United States Patent Application Publication US 2005/0228172 A9 - sequence listing, part 140

SEQ ID NO: 661913 - DNA, 599 bp, Homo sapiens
gacttgaagaccatgtctgtagcccgtgtcatgatctggcgttgggtaggtctagaatttgaaccctgaaccgttgacatcttttgtcaagttccttaaacccacatccagcattttcacctagcatgttatttgcaagtgacttgacacaaggccatctgtaggggtttgaatgacagggtctttattaggatgaaggaatatcttatttgtgagttaggtggctattggtgtagcctgacactgagcttttgcagcaacagtgtggccaggttttacctgctttgctgctccttgatcgtggctggactctctgcttgcagtctcagaagccatctcttttctcagaaatcaaaatcaaagcaaaacacaaacaataaactttcatctctcacttgaccatcttttctccctgctgtcctacctacatagatcaagctgcctctttgccaggtactgagaagaaaggattctatttcgttggcctacattgtacctacwtagctgaaatgttcccaaacatttcagagcagtctcaatcaaatagactttcacagtttttgcaaacatcccagactggtgagtgcaaacgcatatag

SEQ ID NO: 661914 - DNA, 588 bp, Homo sapiens
ggaccacacagtacaaaataacagatctaggagtggagttcacgtgtttcataggcaagatgccctcaattataccgttagaaaatgtattggtaattaaaaattaagccctacctgggaaactccagtacaataaatagaaaggccaggaggagagactgggagcacaggcaaataggagacatcttctctcatgggaagacagtgcttctacggcctcccaagtaatttcacgtcatccacagaaggactcyccaccacagagaatattcccctcaatctacaggtgataaaactggggctagtagaggctaaatgtcttggccaaggtctcaaggaacattaaaatccagatcaactgatatggagtcgcaaagtcttcacaggacattctgcttctatcaaataatcaacgggcactttgagcatgcacttaatgctttgctttccagatcaactgaacacacctgttctctcttttttttttttttaatggagaggctaatcccaaccacagggcattaaagatgccatgtgtaaaaagcactaagctgggccctgccgggcacgcggagctggggtcgttcc

SEQ ID NO: 661915 - DNA, 590 bp, Homo sapiens
acctgcctcagccttccaaaatgctgagatcacaggcatgagccactgcacccggcctaataaaggggctctaagaggtgattgggtcatgagggctcctgcactcctgaataggattaaggcccttatcaaaaagrctctgatatggtctggctgtgtctccatccaaatctcaccttgaattgtagcttccataattcccacatgtcatgggggggattggtggggtgggagataattgattcatgggatggtttcccccatactgttctcatggtagtgaataagtctcatgattgctaggcttcctcagccgcgtggaactgtgagtccattaaaactctttttctttagaaattacccagtctctggcatgtctttatcagcagcatgagaacagactaatacaggctccaagcagcattcacccttctaacttctgccgtgtgagcacacagtgtttgttccctcagaaagactcagcattcaaggcaccatcttgaaagcagagacggagaccaggccctcaccagacagtgaacctgccagcaccttgatcttagactttccagcctccagaacagtggtaa

SEQ ID NO: 661916 - DNA, 562 bp, Homo sapiens
tgaggataagtccccatctgcttctccccatctcccccatgcagcctggcaactgcgtctggcawatccttgttgaatatgtgaatgaatgaatgaataaataaataaatgaaaaaaatgaactcacccaatggaaggaaacacccatggaaatcagaagcaacttactgaaaatacaaacagataccaaaaacatctttataataccagaggactccagtttgcacaccatggaatagaggaagccacaggtaaaaaggtatcaccgggcaaaatcaattaagtttctctcttccccctgcacccctctccctgcacctgtgacttgactgtttcctaggtttcatccatgggttcccactttccccattgctgggcatcaaacttactcaagacacttggggtctcccaggaacttaaaggttacaaccctgatcactcacacactcctgcctcttcagatcttggattaaatcggaggcatcagaacccagtattgactctgaaatcaggcccccattctatcctccgagagcttgtggtcctgtggtcatttcactcc

SEQ ID NO: 661917 - DNA, 562 bp, Homo sapiens
tgaggataagtccccatctgcttctccccatctcccccatgcagcctggcaactgcgtctggcatatccttgttgaatatgtgaatgaatgaatgaatamataaataaatgaaaaaaatgaactcacccaatggaaggaaacacccatggaaatcagaagcaacttactgaaaatacaaacagataccaaaaacatctttataataccagaggactccagtttgcacaccatggaatagaggaagccacaggtaaaaaggtatcaccgggcaaaatcaattaagtttctctcttccccctgcacccctctccctgcacctgtgacttgactgtttcctaggtttcatccatgggttcccactttccccattgctgggcatcaaacttactcaagacacttggggtctcccaggaacttaaaggttacaaccctgatcactcacacactcctgcctcttcagatcttggattaaatcggaggcatcagaacccagtattgactctgaaatcaggcccccattctatcctccgagagcttgtggtcctgtggtcatttcactcc

SEQ ID NO: 661918 - DNA, 628 bp, Homo sapiens
tgtcatttttatattccagtgctttttgggagtgttttccatcctagaaatcagccttccctccagaatagaaccaagtatttgcctttgtacagagtttttgcgctttcctcttgagctcaagtagacactcaatgaacttcggttgaatcactcacattcgtgataatagagagaaatcattggcagggaattgctggcttcccttgaactaaagaactcctgaggacaagaataatagactttasgcagcgtgagggatggggagtgaatcacagaaaaaaatgcattgccgagagaggggcgggtgtggctgtgtctggcacactgactagtgtgttgtctcactgtctccagaagacagacatgggggatctttctacttcatttttcctcctgatacgttgcttatttaaagtgacacaaattccactcactgtctttgaggatgattgtctaagaaaaaaacaaaacagcttgttttactttttgtactttaaatcctcctaatccactctctctgcttggcgtgccttctggaacagagaaggtgccaggcgccggctcctgcctgtctctgccaaacccaagtccctggtttgctcctggggagaagggacccacacac

SEQ ID NO: 661919 - DNA, 527 bp, Homo sapiens
aggaaactggtctgcaatgtgggactaacatttggcaaaacctcttatgtaaagctcagtttcatctacgaagtgatggtctagtgcccactgaagctgaatgaccctggacaagttccttaaagccctaaaactcagtttccacatcgacaaaattaggagagtggaarcagcagtgtctccctcatgcataacataatgaacacaaagccagcacggggcctggcattgagtaatgagtcaacttatttaaatgtttaaactggtttgactctttcataacaataacagtaattctaacatcagtacaggccaagcattgagcaggttctttacttattttataatacatttctgcaacagcactatatggcaattaccattattcccactttacagaagagaaaaccaaggtgccaagggttcagaaattcgccaagggttcagaaattcaccaagtttacacaacatgtagtggctggcccgtaaattaaacccagatgaagccactgctctgtgaccacata

SEQ ID NO: 661920 - DNA, 532 bp, Homo sapiens
gtagtattaaacattcacaagctaagaatatgtgtgtatgcatatataaattgttaataccttttgtatttatgatgaaaataaaggcagagcctctctgagggactctcctcttcctaggccatgcaatgttctcaaataatcccactaaagaagagttcacgatctaaaactataaaataaaaaagtaacaattcactgtgagttaagaaatacaaaaatggctagatttaataacctaaaggtttataaaatagaaaatctagattatagmaattataaaataaatgcattatatattctaattgattaaagacattaaaaacaaactaaaactacaggaaaataataagatgctctattagtcacctcatgttgccctaacaaaatagaagactaagtagcttaaatactgacatgtatcttctcatagtcctggaggccagaattccaatattaaggtgccagcatgttgtgtctgatgagggctctgtttctgccttcttgctatgttcctacatggacaggagag

SEQ ID NO: 661921 - DNA, 587 bp, Homo sapiens
cgctaccaaaataatttaaaaatgaaatttaaaatgtattaccattacaatatcatcaaaatatcaaacaaggaatatatgtaacaaaagatgtggaagatttctatgcttgaaaaagaaggtttgagcagagggaaattaaagaagacctaattaatggggatatagaccatatttatgaattagaagattcagtgctgttaagatgacaatttttcctaaattgtttatagactttttgtaatcccaatcagaaccccagcagccttttattttttatttttattctttttttgaaattgacaggttgatataaacatttataggtaaatgcaaataatctagaatagccaaaattatcttgaaaaagaaaaaaattacctggtttccaaactgcaagtaattaacaaattgtgtatgggggaaaataccttagtaattattactatgtagatcatagrtttgaactcaaagcataaaactttcagaaggaaatcaaagaatatctttgtgactttgagttaggccaacatttcttagaaaagacaccagaaatactaaccacaagagaaaaaaataataattac

SEQ ID NO: 661922 - DNA, 587 bp, Homo sapiens
cgctaccaaaataatttaaaaatgaaatttaaaatgtattaccattacaatatcatcaaaatatcaaacaaggaatatatgtaacaaaagatgtggaagatttctatgcttgaaaaagaaggtttgagcagagggaaattaaagaagacctaattaatggggatatagaccatatttatgaattagaagattcagtgctgttaagatgacaatttttcctaaattgtttatagactttttgtaatcccaatcagaaccccagcagccttttattttttatttttattctttttttgaaattgacaggttgatataaacatttataggtaaatgcaaataatctagaatagccaaaattatcttgaaaaagaaaaaaattacctggtttccaaactgcaagtaattaacaaattgtgtatgggggaaaataccttagtaattattactatgtagatcataggtttgaactcaaagcataaaactttcagaaggaartcaaagaatatctttgtgactttgagttaggccaacatttcttagaaaagacaccagaaatactaaccacaagagaaaaaaataataattac

SEQ ID NO: 661923 - DNA, 432 bp, Homo sapiens
acatttgggttgcaatccattgcctccatttggctrggacttgctgttttccagaggcacagagctgcctggctcagccctcaggcaggacacaccctccagctagcttggtgctgctgaccaagatctcataaaagcctcctccccaaggaaaatgaataattgatacaaggagtaaatcacctcctgaaatggggaaggccagagagacaaatgactccctgttttgacccataattggggctgtcactcactggaaggagagggcagggtggtgggacatcggtgttctgggaaagccactccctgcaaggagagaggccaaaggctcaagtgactcagcttagatgttcctgattatgatcagaagtggggacaggtggggccatcccaattcagatcccagaagcttgaattgcccagacacgtctc

SEQ ID NO: 661924 - DNA, 514 bp, Homo sapiens
tgtgtgtctttatttaagttcagagaagaaaaggctacatcggctaaagatgttttccygcctagaatgacagtggtggtgaaggctttttcataaatttgaaaaataaaagtgttttcattttcttgttgctataataaccttgcaagagatagaaatgagagtctattttctaactgaaattgttttcctcaagcgtaggctcactcttcacactgttggctattattgtggggttgctaatgaatgttgacctactagcacttgcaataatgcattcttttaaatacgacagtgatgtcttaaattacagggaggtttcaaataagaggataatgtctgttttacttgggtggcaccattcattagaattgttttttaccaatatagttaatagaataatccttattcaagtttagtattttatcactgcaagatgccagaatatcatcactcactctaatattggctccttgctccatctaaattggtctcttcacgctgaagtgtcact

SEQ ID NO: 661925 - DNA, 514 bp, Homo sapiens
tgtgtgtctttatttaagttcagagaagaaaaggctacatcggctaaagatgttttcctgcctagaatgacagtggtggtgaaggctttttcataaatttgaaaaataaaagtgttttcattttcttgttgctataataaccttgcaagagatagaaatgagagtctattttctaactgaaattgttttcctcaagcgyaggctcactcttcacactgttggctattattgtggggttgctaatgaatgttgacctactagcacttgcaataatgcattcttttaaatacgacagtgatgtcttaaattacagggaggtttcaaataagaggataatgtctgttttacttgggtggcaccattcattagaattgttttttaccaatatagttaatagaataatccttattcaagtttagtattttatcactgcaagatgccagaatatcatcactcactctaatattggctccttgctccatctaaattggtctcttcacgctgaagtgtcact

SEQ ID NO: 661926 - DNA, 476 bp, Homo sapiens
ctgaaggtttattacaaactgtgcttcctttattttatttatttatttattttctacaaggctccctttcattagcctgggagactcatggaaattgtgaatatgtcttctttatattaaatcctgagagcctagctcaatattagaaatgtagtaggagcactatgttgttttaaataagtgactgtattactttaaatgaatggcctataatcattagagaatagttctagactctaagaatttaataagctaccrgataggattctagacttctggaaatttgctgtccacttggggagatgaggaacactcatactgaataactggaactctttccaaggttgtatgaaaagaatggcatgtacagtattgaattccaggcactgtgctaggcatttggcacatgagatatgtgcaaaaatcagttggttctttgaccaaagttgtcgacagatgaataattacagtattac

SEQ ID NO: 661927 - DNA, 439 bp, Homo sapiens
gatagtaacaattttttgctgtaatccagggtctgtcccttgctagcagaagtggcagctggtgggccaggtaccacctgcttctcactgaggaaacatgactgtatcacctctccaagcacaacctagccattattagaattctgtggaattagaatgggactcacttcaacaaattactgctgcattctagttaggacctctgaaccccatcaagggaygaaggacacacaaaggaaataaatccaacctctggcctcaggaagctctcaggctagtttatccaccgactgcaggtacatttattcctcaatgcttttaattctcccatttttaaaaagatcaatagcgtctcctagcaagacccacagactaaaagagcagggattacttcataaacagccatcatttgttcatgcctacaataccctgtctattt

SEQ ID NO: 661928 - DNA, 615 bp, Homo sapiens
caaggaaaatctaaacaatcaatcataaagcaaacaataattaaattctggtagaatgaatgataattattgaaactatgctaccacatggaaaactcttatgctattaatgtgaaatgagcaaaacagaatgcctcaacatgtgtccaccatctttgaaagtatatgaaaagtggtatgcatagagaaaaaaggtttaaagaacaccccttcacgcatacatgctcactccaaggctggtggcagccttgctcttcattttttctgctctatgttttaaatgttctggctgagctagatggcacaaacattggcagcacagagcagattttcaatgagcacttttaaatgaatgaatgaatgaatgaatgaatgagttgytttctttttttttcttttaagttattatgtttttgctacactgcttgctaaacctggaactcagtagctttccaatctccctataaacattttctgagcctcctggttcagtgagtacttgctttgccttccaagactgtggcatgtcttctccagatggaaaacaggtctttttcaaggaaatcattctaccaacttaaagatcttcatccaaatcttgtacagaaaattaca

SEQ ID NO: 661929 - DNA, 581 bp, Homo sapiens
tttctctgaccctgtcttgaaactgccacacccacaccttcctaagagtccttaggaaacaaaaggcttgccagtcttcatgatctacctactttagaagacatcaggttattaataaaaattctatgtatataaaagaaccacaatttgagagatttagtatttggagcaaagtcatcaatttctaagmgttatctcaatctaaatgggtttctacccctcaggtaaatcattcggcccttgctttggaaatcagaaatgaaggatctatttgttgtgtctagttcaatactatagagttgggttggtcagatgctgagtggatctcctcccagagagggttttggtgtcctgagtccaatcactttcactgctgtcaacttttaattattgctaatttttttacttcactggcagatttctttttttgaaaatcaatcaatcaaaaagaacatgtctcttaataagaatacttaaagcattttaaatgcacaccttcaggttctgaaagcccacagtgtacatttttagctccatgtattccagcttagatggtttgaattttctccccaaaaaagttt

SEQ ID NO: 661930 - DNA, 614 bp, Homo sapiens
ggttttggtgtcctgagtccaatcactttcactgctgtcaacttttaattattgctaatttttttacttcactggcagatttctttttttgaaaatcaatcaatcaaaaagaacatgtctcttaataagaatacttaaarcattttaaatgcacaccttcaggttctgaaagcccacagtgtacatttttagctccatgtattccagcttagatggtttgaattttctccccaaaaaagttttcccacgtgggaaaacttcatcaatttcatcattttaattctctgagaacgtgaacaatttgattgaaatagctggaaccatgtactgaaatggaaggatgtaggtatttatgtctttattttaattaaatttgtaaatactgggatatattaggtagagagaaaccaaaattaaatcactgaaaatgcttatgtacaggttattgatgtgttaaaactcaaagttgcattgaaaatttcccagcagtctgaatattatggaaggaactctcaaaagataaaattcaagagctccaaatttccatctcaccttacttgttgatactcataactgtttagtttaattctttaggtagttcataaattgaactt

SEQ ID NO: 661931 - DNA, 571 bp, Homo sapiens
atctcatacacgcccatgtgtgtctgtgtctgcacatgtgtgtaacaagatccccattatacacacacaggcacacagatatatgtatggttcaaattggagctgaggccacactgtcttctgattaatttggtctccatagcaatgttaatcttttatttcaatttatgtcttaactctcttctaaatgctataggcttgaaatcagctagacttgcagcctcctggctgtgtggtcatgagggtagatygcattgtctttgtgcaattttctcatcaacaagatgagtgtggtgatgctggtaccacatctgactgaaacagctcaggaccaagtgaaatcgtgcctgtggaagagctttgtgcaccacagtgcattgtgagagcaccagttactacaaaaatataaacaggtgccattgacgtagcccgagggagcaccgtgttaagcacgtcacatagattatcagatttaacttccatagtagccctgtgatgtaggtaacaagatccccattttatagatgagaaaacctagaccttaatggctgaaaataacttgcttaatggt

SEQ ID NO: 661932 - DNA, 424 bp, Homo sapiens
atatacacactcacacatacatatatgtatttatatacaccttatatctaaaactgcagtgtccaatatgttaacctctagccacagacacccagggagctttgaaatatagtgaacccaaacagagatgcgtggtaagtgtaaaaatcacacccaatttttaagacttattaggaaaaaatgatatgaaacatctccttaatatctttcatattgatwatgtgttagaatgataacacattgtgtggaatgaatacattattaaaattaattgaagctgggtttttttttttacctgttttaaagtgctactaaacaacttaaaattgtgtgcatttcaaattatatttcaactgggcagcattgttcaattgaggataggtcacgtctcaataatttgaaataacttgctcctgtatttcca

SEQ ID NO: 661933 - DNA, 582 bp, Homo sapiens
acaatgtcttgaagatacaaagtctgctctactaaggcacaggtctgatgtccactttctgaagttccattcaggcagtgggttcagcacacattaaaatttgcttctttggagtccaaactctcaagacgtggtttctgttggtttcttgttccttctacaaacaacccacaatgcatgacttaaggtattgagataaaccccaaaatctcattgccttaacacaacaaaattatcattattattattttggctaatatcaaatccactgmcaatgttatattcctagaagcctacccttcccaaatggtcactccacctgcagtgccaagttctctccatttctctagaaaaggagttggtaaacatttactacgaagggtcagctagtgaatatttttgtctttggggccatacgttctcttggaaactacccaactctaccactgaagcgtgaatgcagccataggcaatacatgaatgaatgagcatggctatgtgtggataaaactttattcatggacattaaaatctgaattttacataattttcacatgtcaccaaatattctattttaaatct

SEQ ID NO: 661934 - DNA, 582 bp, Homo sapiens
acaatgtcttgaagatacaaagtctgctctactaaggcacaggtctgatgtccactttctgaagttccattcaggcagtgggttcagcacacattaaaatttgcttctttggagtccaaactctcaagacgtggtttctgttggtttcttgttccttctacaaacaacccacaatgcatgacttaaggtattgagataaaccccaaaatctcattgccttaacacaacaaaattatcattattattattttggctaatatcaaatccactgacaatgttatattcctagaagcctacccttcccaaatggtcactccacctgcagtgccaagttctctccatttctctagaaaaggagttggtaaacatttactacgaagggtcagctagtgaatatttttgtctttggggccatacgttctcttggaaactacccaactctaccactgaagcgtgaatgcagccataggcaatacatgaatgaatgagcatggctatgtgtggataaaactttattcatggacattaaaatctgaattttayataattttcacatgtcaccaaatattctattttaaatct

SEQ ID NO: 661935 - DNA, 587 bp, Homo sapiens
ttgctccagcctgctgcaactctgactgtggagtattacttttgtttcaataaatctatgcttttgttgattcattcttttgttgctttcgtggtgcattttgtccaattctttgtttaaaatgccaagaacctggacaaccactggtaagacattcacactttatttcctgaagatgaagcttaaataagggcaattccttcatttgaytttcccaggtgctactagttagaatgaatctctctctctctctggttttctcactgtacattttgtcttggcattactctcacttctccttttagagtgtgccccactgcagggcagttgtatgactttattcatcctaatatccttcagtaaggtctccacccagcaaattacacaaagtaagtctcaaaataagattgctttataggccaggagctgtggctcatacctgtaatcccaacactttgggaggccaaggcgggcggatcacctaaggtcagaagttcgaggccagcctagccaacatggtgaaaccctgtctctactaaaaatacaaaattagccaggtgtgctggcacacacctgtaatgccagcc

SEQ ID NO: 661936 - DNA, 587 bp, Homo sapiens
ttgctccagcctgctgcaactctgactgtggagtattacttttgtttcaataaatctatgcttttgttgattcattcttttgttgctttcgtggtgcattttgtccaattctttgtttaaaatgccaagaacctggacaaccactggtaagacattcacactttatttcctgaagatgaagcttaaataagggcaattccttcatttgactttcccaggtgctactagttagaatgaatctctctctctctctggttttctcactgtacattttgtcttggcattactctcacttctccttttagagtgtgccccactgcagggcagttgtatgactttattcatcctaatatccttcagtaaggtctccacccagcraattacacaaagtaagtctcaaaataagattgctttataggccaggagctgtggctcatacctgtaatcccaacactttgggaggccaaggcgggcggatcacctaaggtcagaagttcgaggccagcctagccaacatggtgaaaccctgtctctactaaaaatacaaaattagccaggtgtgctggcacacacctgtaatgccagcc

SEQ ID NO: 661937 - DNA, 598 bp, Homo sapiens
gtgtttgctatctcaggtttttgtgttggaaggataaatattatgatcatcctagtttacatgtgatattgttagtgtggcttactccttcagcctcttccttgctctgtgccttgtagacacaatggtcttctgcaagttctttgaaaggtatatgctccctcctgacacaggtgttgcttcgctgtctgtagtgctctgcgcctccccatcctccccsctccagatgctctcctgactcccagcagcctccaggatgacacttcctcaaccccctgaccaggatatgttctcctattacatcatcaactcattgtcttaagtcttaggacttactacacttgaatagctgtgctaatttttaatataagtacgcagcatctattatccttttttactggagtgcaaggtcagggaatgcataaatggagaaaacccacagggctggcacatagatgctcaaaaatatttgtcaaatggatgaatgaatgaatcaatgagtaaatgcagaaatgaatgaatagatggttattataggaagtgaaaaaatatagctataacatctacaaatgggtataatttcatgaggacacaactt

SEQ ID NO: 661938 - DNA, 604 bp, Homo sapiens
ggaagctgactcacaggtgagaaaataaatktaagagatatcagaggcagctatgggcaccagagagtgagagatgcacatactgaatctccccagctcccacagtgtccccaaaccagcaccgtccaaaaccagtcagtcattttaactcaaatgcaacttagaaagatagtttgtaaaccaacagaaaagcttcctctgtcatgctgagcaaactgaaacttaacctgtacatgctgatgatcactctgaactctatttggaaggttcctatagtttggaaagaggatttaggacagcacaatccaataaacctttctggaatgagaaatattctgtatttcattgtccaatatggtaaccactagccatgtgtggccatcaaacccttgaaatggggctggtgcaattaaggaatggagtattaaggaatagtactacggaatagtactgcattctacataattttaattaatttaaatagtggcaaccctattggacagaacaggttagaaggtaataaaccaggcaagccttgaaaagaactggaattaacagaattctgattgagtgggtcatcagaattataaggttgatttgaatg

SEQ ID NO: 661939 - DNA, 604 bp, Homo sapiens
ggaagctgactcacaggtgagaaaataaatttaagagatatcagaggcagctatgggcaccagagagtgagagatgcacatactgaatctccccagctcccacagtgtccccaaaccagcaccgtccaaaaccagtcagtcattttaactcaaatgcaacttagaaagatagtttgtaaaccaacagaaaagcttccwctgtcatgctgagcaaactgaaacttaacctgtacatgctgatgatcactctgaactctatttggaaggttcctatagtttggaaagaggatttaggacagcacaatccaataaacctttctggaatgagaaatattctgtatttcattgtccaatatggtaaccactagccatgtgtggccatcaaacccttgaaatggggctggtgcaattaaggaatggagtattaaggaatagtactacggaatagtactgcattctacataattttaattaatttaaatagtggcaaccctattggacagaacaggttagaaggtaataaaccaggcaagccttgaaaagaactggaattaacagaattctgattgagtgggtcatcagaattataaggttgatttgaatg

SEQ ID NO: 661940 - DNA, 604 bp, Homo sapiens
ggaagctgactcacaggtgagaaaataaatttaagagatatcagaggcagctatgggcaccagagagtgagagatgcacatactgaatctccccagctcccacagtgtccccaaaccagcaccgtccaaaaccagtcagtcattttaactcaaatgcaacttagaaagatagtttgtaaaccaacagaaaagcttcctctgtcatgctgagcaaactgaaacttaacctgtacatgctgatgatcactctgaactctatttggaaggttcctatagtttggaaagaggatttaggacagcacaatccaataaamctttctggaatgagaaatattctgtatttcattgtccaatatggtaaccactagccatgtgtggccatcaaacccttgaaatggggctggtgcaattaaggaatggagtattaaggaatagtactacggaatagtactgcattctacataattttaattaatttaaatagtggcaaccctattggacagaacaggttagaaggtaataaaccaggcaagccttgaaaagaactggaattaacagaattctgattgagtgggtcatcagaattataaggttgatttgaatg

SEQ ID NO: 661941 - DNA, 481 bp, Homo sapiens
aaacaacaacaggaaaagtctccttttgagaaggttattggtataccttctattcaaagcatcaacaatttccaacattcatcaaactggccaactaaagaatgcatctcatgttaatgatggctactcatcaactccatgytgttgagaatatggagccaaaatgttaccagatctagcagtttttcaacaaaactgagagatccaaatttttacatgatgtctcctcatttttacatgttggcaactaattcattttttgttttgttttaatttaaatgctgtgcaagccaacactccagggccaaacaaaattaatttcaccctcaggtttcaagtttcaatctctaggaaaggtgctggaagctgaggagagagagaagaaagaaaagtaaaataggcagagaccagaccagaaaaatctttacatgataagctaaggaatttggatttttagcatatattacagtagcatttttca

SEQ ID NO: 661942 - DNA, 586 bp, Homo sapiens
ttttttttttttttgacccttttttagatcaatgtttcaaaataccagtgatgtgcagaaaacctatttatacttatgtatagataaactttctaaaaatattttctctgtggctatatccacattatttgcatttgaactaagcagatctctaaagagtctatgaagaatagtaaatgaaatgtagaggtaggcatcaagaaacctggattctaattagccttgagatttaggaaatatcagttcacctctctgggccctgtattttttctgcgaaatgggtatgttagatatyattataaaagaaaaaaatggtttaataaaattcatttacccctacagagttaagttcaaatcaattacagaggggaagcacatggtgacctgctaagagctgcaaatggaagataaaataattgggatggggtcaacaacctgtgacccaccaggattatttagaggtgtacagctaggtgaggcaggtctggttctgtacttgtccacctccttcatctgtatccactttgccccctaagggatgtgtcatttcctcaggcattggcctacctcctcaagtgccttaagt

SEQ ID NO: 661943 - DNA, 586 bp, Homo sapiens
ttttttttttttttgacccttttttagatcaatgtttcaaaataccagtgatgtgcagaaaacctatttatacttatgtatagataaactttctaaaaatattttctctgtggctatatccacattatttgcatttgaactaagcagatctctaaagagtctatgaagaatagtaaatgaaatgtagaggtaggcatcaagaaacctggattctaattagccttgagatttaggaaatatcagttcacctctctgggccctgtattttttctgcgaaatgggtatgttagatattattataaaagaaaaaaatggtttaataaaattcatttacccctrcagagttaagttcaaatcaattacagaggggaagcacatggtgacctgctaagagctgcaaatggaagataaaataattgggatggggtcaacaacctgtgacccaccaggattatttagaggtgtacagctaggtgaggcaggtctggttctgtacttgtccacctccttcatctgtatccactttgccccctaagggatgtgtcatttcctcaggcattggcctacctcctcaagtgccttaagt

SEQ ID NO: 661944 - DNA, 603 bp, Homo sapiens
atttgtgaattttcccaactattgacactaaatatttcagtgttttcatttaaatatccatagaacaattgaattgttacctagaaatataggaatatataagaaagagttactaggcatttggggcttgtaatattgtgatttatgataagaaatacaaatggttttcatcccatttcctggtactcatctcctaaaacgtttgtagtctccaaaatggtgtctttttgtatgctaataagatggctgggtggtcctggatagcctcagaacaggggcttattgcaaagggaaccaactttgtaattagtgtgttgggaactttcagttccaccaacctctggraagaggtgaggggcaggaggttgagttaatcaccagtggccagtcatttatcaatcttggctataggaaagaagcccccataaaaacccaaaaggacaggattcatggagcctccaggttgctgaacacatggaggtgctaggatggtagcccaccccgagagggcatggaagatgcacgtcccttcccacataccttgccctatgcatcttttccatctagctgtccatctgtattctttgtaatattctttataat

SEQ ID NO: 661945 - DNA, 575 bp, Homo sapiens
tcatgtctcagcctcccaagtagctggaattacaggcatgcgccgcaagcccagctaatttttgtatttttagtagaaacgggggtttcaccatgttggccgggctggtctcgaactcctgacctcaggtgatccacccgcctcagcctcccaaagtgctgggattacaagcatgagcaaccgcgcctggcctatattccaaactctggtcacaaccttctgaactgggagctctcagtccctcattatacacactgcccctttgatctcatccagatctccaatcctttatatttcctttttctcctaattacagcttactcctacttacacttccttttataatcaggccagactccaaagacctaccatttcagctactaccatttgytaatttatttatttgcctatttatttacgtatacacattccttgccttgttccagaagagatttcactgaatcttgaaaattacattcttcacttgggcatcaaaatccagaatgtgagaattatcttagaccgcttcttcttaccctcacagccacagaatcaccaaatcctctcaatttacc

SEQ ID NO: 661946 - DNA, 575 bp, Homo sapiens
tcatgtctcagcctcccaagtagctggaattacaggcatgcgccgcaagcccagctaatttttgtatttttagtagaaacgggggtttcaccatgttggccgggctggtctcgaactcctgacctcaggtgatccacccgcctcagcctcccaaagtgctgggattacaagcatgagcaaccgcgcctggcctatattccaaactctggtcacaaccttctgaactgggagctctcagtccctcattatacacactgcccctttgatctcatccagatctccaatcctttatatttcctttttctcctaattacagcttactcctacttacacttccttttataatcaggccagactccaaagacctaccatttcagctactaccatttgctaatttatttatttgcctatttatttacgtatacacattccttgccttgttccagaagagatttcactgaatcttgaaaattacattcttcacytgggcatcaaaatccagaatgtgagaattatcttagaccgcttcttcttaccctcacagccacagaatcaccaaatcctctcaatttacc

SEQ ID NO: 661947 - DNA, 563 bp, Homo sapiens
ctatgggtgaaggattaaacaaactgtggtacatccatacagtaaaatattactcagcaacaaagaacaacaagctgtttatatgtttatatgtaacaatttggatgaatctctaggaaattatgatgagcaaaaaaaaaaaatccaatccccaaaaattacatggtctatgattccatttatataacatttttgaaattcaaaattatggaaataaagaacagattaatagttactagggatcatgaaaatgtgggatgaggatgactataaaagtttcatytttgtggtgatgaaactgtttattatcttgactgtatagtactatatccatgtcaatatcatagttgtaatgtacaaaagttttgccctatattaccattggggaaaactaggcaaagaatgcgtggactctattgtttcttaacaactgcatgtgaatctacagttatctcaaaatacaaaaattaattttagaaatttatatgcctgccgttccactaatcccaggcctaagaatttctcccatagaaataaagccattagaggccaggcgcagtgga

SEQ ID NO: 661948 - DNA, 611 bp, Homo sapiens
ccctttctttctcttgtctgattgctctagctggaacttccagtactatattgaataacagtggtgacagtgggcatccttgtgatgttccagatcttagaggaaaggctttcagtttttctccattcagtatgatactagctgtgggtctgtagctttcttttgtgtacaatttttatcaaatgttggtatcagagttattaaaatgatctgaaattctctcatatatttttgtttctcagcacagcacattttttctatacttctcataatttaaaaagcatataaattatttcttgagaatttgatgtgacaatcattaaaatatctaaggcctggtacattccatagaggcaatttttaataaacttttcaatttgttacacggttgttctcttcttgagtcaattttttataatgtacattttcccagaaaagcattccttctatcaaaatagctctatcagatcttctcagtttcaagagaagccagaaattttcattacagtagtactgcttttattaaaaataattttagacttatattaatgttaacrtcttatgtaaccacagcacaattaccaaagccaaaaattaacattaagagatta

SEQ ID NO: 661949 - DNA, 547 bp, Homo sapiens
gtgctaattagaaaaacttagatggtattgaaattacagttgacaacttatatttttatgagatggagaaaaaagattaagttgatataacaacaaagtggactttttttcttccttatcctgcacgaaatattgcccttgtttcctctactttcctcttggtgttttctctttttttcaaacagaaacaggccaattccattttcttgagcaagaaagcttagtgtgttacttcatcaaggccagctaatactgtgttaaaccgggctgaaaatgagaaaacttgggagatggaggaatggggaaatggcagtgggataggtagggaaggattactcttaattgttttaaaagccataggaaagtcttccttgtacgtggctgtaaatttataagaactattgtgtcacataaaccaacaagaatsaacctttgctgcttcagataatttgatttttccagcaaggaaattaataagttactgattcttcagcatagaaacaactgagaagaattaatgcaatgtttcttcactagaaaacccaac

SEQ ID NO: 661950 - DNA, 295 bp, Homo sapiens
acttccatactgttttccggaatgactgtactaatttacattcccaccaacagtgtataagagttaacttttctccacaacctcactgtaattttctgtctttttagtaatagccattctaactggagwaagatgatacgtcattgtggttttgatttgcatttccctgatgataatttatgttgaacatttttttcatgtatctgttggccttttgtatgtcttcttctgagaaatggaaatagacatttgtgtgtgtccttagctcaccttttaatgggatttttttcctgta

SEQ ID NO: 661951 - DNA, 503 bp, Homo sapiens
tatggagaccaaaattttatcatgcagataaagactccagatagcaggcttcagagaatagattgtaaatgtttcttatcagacttaaagagcctgttctaccagtaattccaaaagggaggagagtataatgagtcatgtctggctctcccttcccatcatggcctaaattagtttttcaggttaattttggaaagtccttgatgataggaaggatccattcagatgggtggggggctttgaattttacttttggtttacagaaggaattttactgtatacaattttttttaaaccaagcagtaattcagataaacccaagatggaatgtagatggccacaaatgaatccatgttayaaatgaatgacacaatcaaatgtaagggggtatagaagataggagctaacttaagtaactttggaaaatattgctgtaactggataaagaaaacacacaaacactataccttatgtaatagactggaaatggccccccagaagat

SEQ ID NO: 661952 - DNA, 510 bp, Homo sapiens
gttaacattttcttatataatttaatgcatctgtaacttctattgacgtacagtgtaagatgaatgcgtaatttactcctattaatttgtagtctatcattatcacattataaaatctttggtttcaagaytttctagcccataccattgatcaatcagtccttaaaaccgttatcatgccctttattactctaaccttataggatgtttgaatatttagaaagtaagtttccctcaccaatctgtttcataatatttaggatttataattacatcctctctttcattcctaatataaggattttgtcaattttgtcaattattttcaaataatcaactttgactttgttaatttcctctattgtttgtttttccatttcactgatttctcttattttgtttcttcattttacttcaggtttgcttagttcttctttctctagattctcaaaatgaaatcttaggtcactgattttaggcctttcttctttttattatgtaattattagc

SEQ ID NO: 661953 - DNA, 510 bp, Homo sapiens
gttaacattttcttatataatttaatgcatctgtaacttctattgacgtacagtgtaagatgaatgcgtaatttactcctattaatttgtagtctatcattatcacattataaaatctttggtttcaagattttctagcccataccattgatcaatcagtccttaaaaccgttatcatgccctttattactctarccttataggatgtttgaatatttagaaagtaagtttccctcaccaatctgtttcataatatttaggatttataattacatcctctctttcattcctaatataaggattttgtcaattttgtcaattattttcaaataatcaactttgactttgttaatttcctctattgtttgtttttccatttcactgatttctcttattttgtttcttcattttacttcaggtttgcttagttcttctttctctagattctcaaaatgaaatcttaggtcactgattttaggcctttcttctttttattatgtaattattagc

SEQ ID NO: 661954 - DNA, 524 bp, Homo sapiens
catctaggcagttattaactacacatcctttagggattagctttggtgtcatctcctccagaaagttttacctgcaagcttaataacccttcccctacattctgggccatatatcatgctaagtgttcccttaggaccctgtgccaaactctatcccagtaccctttatatgtgctayaactgtatgataatcctctgttctcttgaaggccagggctgtatattttttttatctctggatctccaacttctagaacagtgtctggcacatatgggtgtcctgtgaatatttgttgaatgcatgtttcagtgagagtatgttgttaatatgtgggaaaccatttattttttgtgaaaatcattttgtattataaaatccttgaagtgtagaaactcacacatatagtaatgcttactaatctatttaaaaatattttaagtattatttaaaaattaataaatccaatgatctggttttaaaacaagtgtgaccatgttggatgcttcttaacaaagacgccagc

SEQ ID NO: 661955 - DNA, 609 bp, Homo sapiens
aaaaaaaaaaaggagggactttgcagaattcattctagcagcagcatccggaattcagcttggctgatgtcagcggttcaaatgtggtgctggacccagagggagaactaaggtggctttaaaggaccaggtctgtggcatgattttcaacactgctcctgcctagatggctccackgctggctcgctgaccttcctagacattctatgtgctcagacataatctaagaactaagaaatgtaggtcaataggccttggcctccatttctgtattcatacaggcagtctggtgtaaagatgtgacctggagacaggctgactgcctgagttcaaatcccaggtgtactacttacatgttgtttgacctgaggtaacttattaaacctctctatgcctcagttaccttgactctaaaatagtactaataatagtggctgtctcattagggttttatgtctcataggattaaatgagttaacatatgcaaagcaattagtgcttatcagctattattattatattgacaatataatggaacagtcatctgattcatttttttccatgtcttaagacaaaactgcatgttcacggtgaataaaaataatacct

SEQ ID NO: 661956 - DNA, 500 bp, Homo sapiens
aggcacaatgggccaaaggaatacactgaaagccattctgacatcattctggggttccttagatagacactgaagcaactgcaagccacctaaacataccctgttaaactcaaaatgtgccctcaactcaccagtccctcatttggatctcaaaagtgccattggccattcgaatatcatctcacacaactggctttaactgattacagttaaaatatcttattcttgcaaattttacaaaagcataactcagtgaatacatcagaagagagtcaaagaacacttcagtagttttactgtcaatctgcctctgagtgaaagccattattactgactaggttgatcccraaaaatgccacaaaacaggtaaaatttggaaactgccttgaagaacagttttcatcactgcatttaagccccttaaaaaattgtgactttaatataagcaagccaattaatctttttcaaaaagctaaagaagagtttggagaaatatttct

SEQ ID NO: 661957 - DNA, 590 bp, Homo sapiens
gtaattaagtttgaaatttatgacaaaaagataaattttaaaccacatacattacaatttttaagcatacttttaaataataaatagattaaaatgatattataatagaacacttaaaaatacttaatactgaacaataactatgccacaaaatttatggaataacagtatactgtaagagaaatttgtaatcttattagatagaagaatggcttatatttaaaaagctaagcatctaacttgagaaattagaaaaaaggtaaataaccccaaagaaaatagaatgaaagaaataaaaaatgttaagactagaaattaataaaataaaaaagaagaatgaaatagagacaatcaacaaaaccaaaagttgtttcttagaaaagactactcaaatagacaactgctgaagagattgtataaggaaaaaaggcacaaatatatactagtaagaatttaaaaaggaaccagggaccacagctatatgaacagcagatattaagatgaaaatacaataaatctatcaataattttacattaataartttgaaataacaataaaataatacactgaaaacagacaaaataacaaa

SEQ ID NO: 661958 - DNA, 553 bp, Homo sapiens
ttctgtcatgctccagcttctcaccctccatttccagttaattttcttcataccacttgttactttctgacacmtatttttggctgactttctcttacccactgatataagctccctaaggcatgggcactctctgctgtcttatctatcatatcccatgcctggaacaactcaaaatttattgagacttcaggcacaaaagaagtctcaataaattttttgttgacatgataaaatgtattaaacccctttcttatgtcaataccaaatgagtaaaatataagtatcatgtacctctcttaatggtaatagacaattatttatttgttgattttgtctagagggggtacttatttttgtcaccagtcaaaagtcaggtaacaaatatatactgaaagcttactgcaagccagtgactattctggtaatcacacttaagaaagaatcatgtgtctgggcacagcggctcacgcctctaatcctagcaatttgagagcccgaggtgggtggaccaccttaggtcaggagtccgagaccagcctgaccaacatgg

SEQ ID NO: 661959 - DNA, 553 bp, Homo sapiens
ttctgtcatgctccagcttctcaccctccatttccagttaattttcttcataccacttgttactttctgacaccyatttttggctgactttctcttacccactgatataagctccctaaggcatgggcactctctgctgtcttatctatcatatcccatgcctggaacaactcaaaatttattgagacttcaggcacaaaagaagtctcaataaattttttgttgacatgataaaatgtattaaacccctttcttatgtcaataccaaatgagtaaaatataagtatcatgtacctctcttaatggtaatagacaattatttatttgttgattttgtctagagggggtacttatttttgtcaccagtcaaaagtcaggtaacaaatatatactgaaagcttactgcaagccagtgactattctggtaatcacacttaagaaagaatcatgtgtctgggcacagcggctcacgcctctaatcctagcaatttgagagcccgaggtgggtggaccaccttaggtcaggagtccgagaccagcctgaccaacatgg

SEQ ID NO: 661960 - DNA, 538 bp, Homo sapiens
taaaaggctaaaattaccctaataccaaaatcaaaatgacagacaatattaaaaaaagtaaaaccaaaacmaaaaaaaccccatgtaactacagaccaacatctctaacaaactcagacataaaaattctcaacaaaatattggcaagttgaatccatccatgtataaaaagactatgtaccatgaccagggggtgttgcaagatggccgaataggaacagctcaggtctgcagctcccagcgtgattgatgtagaagacaggtgatttctgcatttccaactgaggtacctggttcatctcatggggactggttggacaactggtgcagcccacagagggtgagctgaagcagggtgggaagtcacctcagctgggaagtgcaagagaccacgtgatttccctttcccagccaagggaagctgtgacagactacctggaaaaacaggacattcccacccaaacactgtgcttttcccaaggtcttaacaaccagaagacaaggtgatcctctcccgtgcctggctcagtgggtccca

SEQ ID NO: 661961 - DNA, 538 bp, Homo sapiens
taaaaggctaaaattaccctaataccaaaatcaaaatgacagacaatattaaaaaaagtaaaaccaaaacaaaaaaaaccccatgtaactacagaccaacatctctaacaaactcagacataaaaattctcaacaaaatattggcaagttgaatccatccatgtataaaaagactatgtaccatgaccagggggtgttgcaagatggccgaataggaacagctcaggtctgcagctcccagcgtgattgatgtagaagacaggtgatttctgcatttccaactgaggtacctggttcatctcatggggactggttggacaaytggtgcagcccacagagggtgagctgaagcagggtgggaagtcacctcagctgggaagtgcaagagaccacgtgatttccctttcccagccaagggaagctgtgacagactacctggaaaaacaggacattcccacccaaacactgtgcttttcccaaggtcttaacaaccagaagacaaggtgatcctctcccgtgcctggctcagtgggtccca

SEQ ID NO: 661962 - DNA, 538 bp, Homo sapiens
taaaaggctaaaattaccctaataccaaaatcaaaatgacagacaatattaaaaaaagtaaaaccaaaacaaaaaaaaccccatgtaactacagaccaacatctctaacaaactcagacataaaaattctcaacaaaatattggcaagttgaatccatccatgtataaaaagactatgtaccatgaccagggggtgttgcaagatggccgaataggaacagctcaggtctgcagctcccagcgtgattgatgtagaagacaggtgatttctgcatttccaactgaggtacctggttcatctcatggggactggttggacaactggtgcagcccacrgagggtgagctgaagcagggtgggaagtcacctcagctgggaagtgcaagagaccacgtgatttccctttcccagccaagggaagctgtgacagactacctggaaaaacaggacattcccacccaaacactgtgcttttcccaaggtcttaacaaccagaagacaaggtgatcctctcccgtgcctggctcagtgggtccca

SEQ ID NO: 661963 - DNA, 538 bp, Homo sapiens
taaaaggctaaaattaccctaataccaaaatcaaaatgacagacaatattaaaaaaagtaaaaccaaaacaaaaaaaaccccatgtaactacagaccaacatctctaacaaactcagacataaaaattctcaacaaaatattggcaagttgaatccatccatgtataaaaagactatgtaccatgaccagggggtgttgcaagatggccgaataggaacagctcaggtctgcagctcccagcgtgattgatgtagaagacaggtgatttctgcatttccaactgaggtacctggttcatctcatggggactggttggacaactggtgcagcccacagagggtgagctgaagcagggtgggaagtcacctcagcygggaagtgcaagagaccacgtgatttccctttcccagccaagggaagctgtgacagactacctggaaaaacaggacattcccacccaaacactgtgcttttcccaaggtcttaacaaccagaagacaaggtgatcctctcccgtgcctggctcagtgggtccca

SEQ ID NO: 661964 - DNA, 445 bp, Homo sapiens
tttatagatggcctggagggaggagagaatatcccatggttgtaatcccatcctccccaggtcatgctggccctgtgctttcctcaccctgggcaccacacagtacctgctggtactgagagtatttgatggggtccttttcaaacacttcatatgtctgagattccagattgtccatcagtggctgatgaatgaggaaaaggacaaagttagccagtttctggcaaaggacaatgcactaaaatatcaaaaactttccactgctttctgagytttagtaagatttggaggcatatattctcaagaaacattttccatcccaccttcctcctctaagtgcactccagacccacctgaagcggggactgcagatagtcttcatagcccttggcaaagagttcataggcattaggtggaggacggttctggcttaagtattccaggt

SEQ ID NO: 661965 - DNA, 445 bp, Homo sapiens
tttatagatggcctggagggaggagagaatatcccatggttgtaatcccatcctccccaggtcatgctggccctgtgctttcctcaccctgggcaccacacagtacctgctggtactgagagtatttgatggggtccttttcaaacacttcatatgtctgagattccagattgtccatcagtggctgatgaatgaggaaaaggacaaagttagccagtttctggcaaaggacaatgcactaaaatatcaaaaactttccactgctttctgagttttagtaagatttggaggcatatattctcaagaaacattttccatcccaccttcctcctctmagtgcactccagacccacctgaagcggggactgcagatagtcttcatagcccttggcaaagagttcataggcattaggtggaggacggttctggcttaagtattccaggt

SEQ ID NO: 661966 - DNA, 495 bp, Homo sapiens
accaattgtatttattgctagaaactttaaactttttaaaaaagtttttgaatggtagataacatagaaaaagacatccataaaggtaggaagcaatctcatcatttacaaagtgctgcaaatttgataaatttatgttgctgataatarctcagaagtactcttggatgaatagatataaatccttgaaatatccaaagcatgacaaaaaagaataggacacctaaatggatataaacacaccaaaataggaattgagcttttggcaaattagtcattaagtcattaactttaagcaaacaagttttcagtaaattggttttaagagatctagctttaggtgaactagtttcaagcaaactgactagtatcaaatcagtgttttgctccctccagttccccccaactctagttttgggattgtgatggatgcaatccgggacccctctgagaggtggcaagtgagcttctactaggaaaccaagtgtacaagtg

SEQ ID NO: 661967 - DNA, 609 bp, Homo sapiens
aatcataccatatggggtcttttgtgcctggcttctttcacttagggcgatgtttttgagatccacttttttgtagcattatcagtatctctttcctttttattgctgaataatattccattgatggctgtaacacattttctttctctattaatccatggatgggcatttgggttgtttctactttgaagctatgatgaataatactgctgtgaacattcacatacaagtctttgtgcagaagtgtttttatttctcctgaatagatatctagaagtggaattgctgctgtgtaaatttatgtttaacttttttaaaaaactgccacagtgttttccaaaatggctgcagtatttcatggttccaccagaaacggatgagggttccagttgccccacaccctcaccaacacttgctattgtgtatcttttcactattgccaagtgatttgttgttatcaattaacttagagaatcctggcagaaaccatagagatacaagctgttcttattcccacttgacagctgggaagacygaagtgcaagaatgatgaagccccttgcccaaggtcacaagccggtaaggagcagagtcagggctggacccagg

SEQ ID NO: 661968 - DNA, 570 bp, Homo sapiens
cattatcctgcactcagttgacagtagctgtgccctgctgtgggctgcatcctaggccacatggagaagcacacatgtgtccaggacgtggagcagacatagaagagggaagagggggactgatgggttccaggaaggcttcacagaggaggtgtcgcctgcactgggtcctgatggcctacactctgaggagttatggagccaacaagacagaagtttgtccccacagccccctgctgagtggtttcctctcctgatgctccagtccttgttggyggcaccagccttctcgcctctccgactcagaagctcaatgccagcatggcctcctctccctgctatgcctcactgacccattaggcatcgtgtcctgttgcatctcactctataaagtctgccagctgggctcctgctcttctccccactcagtcacagccattcacagccagacctacaggggccctgcccagccactgtcacagcccgcaatctggcctccctgcttcccatgcctccctatcacacccatcctccaggacacactgcacctgcctgaataatctcccaagc

SEQ ID NO: 661969 - DNA, 570 bp, Homo sapiens
cattatcctgcactcagttgacagtagctgtgccctgctgtgggctgcatcctaggccacatggagaagcacacatgtgtccaggacgtggagcagacatagaagagggaagagggggactgatgggttccaggaaggcttcacagaggaggtgtcgcctgcactgggtcctgatggcctacactctgaggagttatggagccaacaagacagaagtttgtccccacagccccctgctgagtggtttcctctcctgatgctccagtccttgttggcggcaccagccttctcgcctcyccgactcagaagctcaatgccagcatggcctcctctccctgctatgcctcactgacccattaggcatcgtgtcctgttgcatctcactctataaagtctgccagctgggctcctgctcttctccccactcagtcacagccattcacagccagacctacaggggccctgcccagccactgtcacagcccgcaatctggcctccctgcttcccatgcctccctatcacacccatcctccaggacacactgcacctgcctgaataatctcccaagc

SEQ ID NO: 661970 - DNA, 591 bp, Homo sapiens
cacacacacacacacacacacacacacacacacggaatatagcccgagtgcaaagcagaaatgtccttagaatgtcagttgggggcccacaacacagcgcccctccctctctggcctccccctgaactgctcccacacactccccagctcttaccatcccctccttccctgcctcccgtaggctgcagtctcaggctaaagctgctgctggacaccctccacaaatacatccctcctcaaccacagccccagcttcatccacattggccaatccccatatcgattatatctcttcaaaatcagaaccctggaaaaaatcaaatcaagctttgtctgctcaggtgttaggatttctctcctaataataacaacaaattcartgaaaatcatagacacgtcttctagaaacagcttctcttatattttcatggacccaaaccatgtctgagagatgggacggggcacagatgccagtagaaaggggacatcatctggggacaccacccctggccccaactccacttctggctgatgctggcctggtgatggtcctagtccatttcagggctatgcccaacatcagattctctg

SEQ ID NO: 661971 - DNA, 500 bp, Homo sapiens
gcctttgccctactgccccctcggcctcagtgccttacctgcattctcaaaactgcctgactcctcactccccctagaccccgctgagtgtctgctccttggggaggccttccttgtctaccttctataaaagaaattggagttgtgacagctttattatgcctgcagcacttgaaacacactttcctgtggcttagttatttgtgtgtatgtgtctgtttgtgtctctgtcttccccactagaccagaagytgcttgagggcaggaacaagatctgctttaacacctcaggcatggcttagaatggtcagagtaacagaatcgttgaaatgggccagaactcactgggtccagtgccccaggaaatactggaatcccctttgaagctccttagaggcaactgtttctcaactgcccggctgcctcccatggcaggaaacccatgttctcccaaggacgctgatcctatccttaaatgactttgatgactgagtaggtct

SEQ ID NO: 661972 - DNA, 566 bp, Homo sapiens
aataaataaaacatgaaaacaacccagtgcccatcaactgataaatagacaaataaaatgtggtatattcacaaaatggaacgctattttgcaataaaaagcaatgaagttctgatacatgttacaacatggatgaacctcgaaaacattacactaagtgaaagaagccagtcacaaaagaccacatattacatgatttaatttatttgaaatggccagcacaaaaaaatgcatagagacagaaatagaacagtagttccctacagtggggaaaatggagaaggatgttactggatacagggtttctttttggagtgtagaaaatgttctaaaatcagattgcagcaatrcttgggtaactcagtgaatttaccaaaaaccaatgaagtgtgtactttaaataagtgaactgtatgtatgcaaattatgtttcaacaaagctattctttttaaatggaagagatacatttaagcattcattcattcgtgattcaacattcattgaattattctattctagattatggactactgtaatgaatctaccctacataaataccctactt

SEQ ID NO: 661973 - DNA, 617 bp, Homo sapiens
cgaataaaagagggtaagaggacagtgagtgacatgagctgctgtttcaggcagatgagtcagaaggcctttctgagcagtgatactggagtggagtccctaatgagaatgggactggggtgagtcatgtgaccacctagatgaaaagtggtccaggaagagagaacagacggcacaattatattagtctattttcacgctgttgatagagacatacccaagactgggcaatttaccaaaaaaagaggtttaaagaactcacagttccacatggctgaggaggcctcgcaatcatggcagaaggcaaagaggagcaagtgacgtcctacatggatggcagaaggtaaagagagagctcattcagggaaactccccattataaaaccatcagatctcatgagacttatcacaacaacagtgcaggaaagacacgcyccatgattcaattacctcccaccagatccctcccataacatgtgggaattccagatgagatttgggtgggtcacagccaagccatatcaatgatgggagccactgaggcaagactgtgtcccaggagccaaaggagctacaggagtcacaggaaggaatatcagtaccaagagggccacacc

SEQ ID NO: 661974 - DNA, 536 bp, Homo sapiens
atagatgatagatactcagtatgtcccaaatattgcctgaaaaatactcaccctatcattgagaattatcgccttaaaggaaaaacgattttaaaaatgagactacaagaaggacttttgctcatgaaaagacacctttaagtgagcgaaaaaggcaaaccrtagaatgggagaagatccttgcaacacatatatcaacaaagggctcacatgcagaacttacaagttgtgcctatcaatcaataagaaaaaacatcagacaactcaatgaaacacagataagagacttgaacagaaagttaacaaaagtaagataaccaactgaactataaatatatgaagggtactaacctcatcagtaaaaaattagaaattaaaaccatgagcaatagcagcatgcactcattagaatagctaaagttagaaagattgataatatcaatattgacaaggagagcaactggaactctcctacactattagaggaagtgccgttaacagctccgtcacttttcactttctcagtatcagctgag

SEQ ID NO: 661975 - DNA, 536 bp, Homo sapiens
atagatgatagatactcagtatgtcccaaatattgcctgaaaaatactcaccctatcattgagaattatcgccttaaaggaaaaacgattttaaaaatgagactacaagaaggacttttgctcatgaaaagacacctttaagtgagcgaaaaaggcaaaccgtagaatgggagaagatccttgcaacacatatatcaacaaagggctcacatgcagaacttacaagttgtgcctatcaatcaataagaaaaaacatcagacaactcaatgaaacacagataagagacttgaacagaaagttaacaaaagtaagataaccaactgaactataaatatatgaarggtactaacctcatcagtaaaaaattagaaattaaaaccatgagcaatagcagcatgcactcattagaatagctaaagttagaaagattgataatatcaatattgacaaggagagcaactggaactctcctacactattagaggaagtgccgttaacagctccgtcacttttcactttctcagtatcagctgag

SEQ ID NO: 661976 - DNA, 536 bp, Homo sapiens
atagatgatagatactcagtatgtcccaaatattgcctgaaaaatactcaccctatcattgagaattatcgccttaaaggaaaaacgattttaaaaatgagactacaagaaggacttttgctcatgaaaagacacctttaagtgagcgaaaaaggcaaaccgtagaatgggagaagatccttgcaacacatatatcaacaaagggctcacatgcagaacttacaagttgtgcctatcaatcaataagaaaaaacatcagacaactcaatgaaacacagataagagacttgaacagaaagttaacaaaagtaagataaccaactgaactataaatatatgaagggtactaacctcatyagtaaaaaattagaaattaaaaccatgagcaatagcagcatgcactcattagaatagctaaagttagaaagattgataatatcaatattgacaaggagagcaactggaactctcctacactattagaggaagtgccgttaacagctccgtcacttttcactttctcagtatcagctgag

SEQ ID NO: 661977 - DNA, 538 bp, Homo sapiens
cagctctggtgatcactgcctcaatcccccagggccacagacaacagactttatcctgtgtcytcatgacacacacacgcatccacatgcacatgtgcctgaggatttccaagctgcctgatctccacatttactaccatgagtgcctgatttaataggtcctagtgacaacaactttattatatcagagtgcagggagaaaatcaggcccagccctcatcatctctgctgtgcggaggggtgtgagaagtagcattctgccagcacagagctatccagcacctgggaggccctgtaattgagtgtctaccatgagaaaggagctggagaaagctgaccttccctgcaagcacctgctcatatctccctgggtcccttccccagagcccagcctcccactacccccaactcatgtggggctgagtagactgtagggaaagggccacagccacagtggagatggagaaatacattctccatagattaatttcagaagggcctgtgctggggccaggggaaaacagacccaggagaagcc

SEQ ID NO: 661978 - DNA, 538 bp, Homo sapiens
cagctctggtgatcactgcctcaatcccccagggccacagacaacagactttatcctgtgtcttcatgacacacacacgcatccacatgcacatgtgcctgaggatttccaagctgcctgatctccacatttactaccatgagtgyctgatttaataggtcctagtgacaacaactttattatatcagagtgcagggagaaaatcaggcccagccctcatcatctctgctgtgcggaggggtgtgagaagtagcattctgccagcacagagctatccagcacctgggaggccctgtaattgagtgtctaccatgagaaaggagctggagaaagctgaccttccctgcaagcacctgctcatatctccctgggtcccttccccagagcccagcctcccactacccccaactcatgtggggctgagtagactgtagggaaagggccacagccacagtggagatggagaaatacattctccatagattaatttcagaagggcctgtgctggggccaggggaaaacagacccaggagaagcc

SEQ ID NO: 661979 - DNA, 538 bp, Homo sapiens
cagctctggtgatcactgcctcaatcccccagggccacagacaacagactttatcctgtgtcttcatgacacacacacgcatccacatgcacatgtgcctgaggatttccaagctgcctgatctccacatttactaccatgagtgcctgatttaataggtcctagtgacaacaactttattatatcagagtgcagggagaaaatcaggcccagccctcatcatctctgctgtgcrgaggggtgtgagaagtagcattctgccagcacagagctatccagcacctgggaggccctgtaattgagtgtctaccatgagaaaggagctggagaaagctgaccttccctgcaagcacctgctcatatctccctgggtcccttccccagagcccagcctcccactacccccaactcatgtggggctgagtagactgtagggaaagggccacagccacagtggagatggagaaatacattctccatagattaatttcagaagggcctgtgctggggccaggggaaaacagacccaggagaagcc

SEQ ID NO: 661980 - DNA, 538 bp, Homo sapiens
cagctctggtgatcactgcctcaatcccccagggccacagacaacagactttatcctgtgtcttcatgacacacacacgcatccacatgcacatgtgcctgaggatttccaagctgcctgatctccacatttactaccatgagtgcctgatttaataggtcctagtgacaacaactttattatatcagagtgcagggagaaaatcaggcccagccctcatcatctctgctgtgcggaggggtgtgagaagtagcattctgccagcacagagctatccagcacctgggaggccctgtaattgagtgtctrccatgagaaaggagctggagaaagctgaccttccctgcaagcacctgctcatatctccctgggtcccttccccagagcccagcctcccactacccccaactcatgtggggctgagtagactgtagggaaagggccacagccacagtggagatggagaaatacattctccatagattaatttcagaagggcctgtgctggggccaggggaaaacagacccaggagaagcc

SEQ ID NO: 661981 - DNA, 588 bp, Homo sapiens
ggaggtaaggagagatgcttgaaaacctggagaggtaaaagaggcatctaaaaataacaaggattgtaccacaattcccaggcacaactgagagagtctacaagcatctcagagaagccctaaatgcagcacagagcttgtgttggttttaaaatgtgccaacaaattatttgactctattccctttaaaagttttacagccaaatttctcaccccttcaactcagtgactcacatctaacaaatagattgtgataaaagtaactgtatgttacactgagattagattagtcattagaggtattgaagctttctcctcattctcactctcttgaatcactcactccagggaagccagctgccatgtcataaggatactcaagcagccatgtggagaggtccacatggtgagaaacaatcagcaaggaatgaagcctcctgcaacagcatgtgagcaagkctttttgaaagaggatcctccagccccagtcaagtatccagatgattgcagccctagctgatatcttgagtataacctcatgagagactgtgagccacacctcacaaccaccgagctaaactgctacca

SEQ ID NO: 661982 - DNA, 588 bp, Homo sapiens
ggaggtaaggagagatgcttgaaaacctggagaggtaaaagaggcatctaaaaataacaaggattgtaccacaattcccaggcacaactgagagagtctacaagcatctcagagaagccctaaatgcagcacagagcttgtgttggttttaaaatgtgccaacaaattatttgactctattccctttaaaagttttacagccaaatttctcaccccttcaactcagtgactcacatctaacaaatagattgtgataaaagtaactgtatgttacactgagattagattagtcattagaggtattgaagctttctcctcattctcactctcttgaatcactcactccagggaagccagctgccatgtcataaggatactcaagcagccatgtggagaggtccacatggtgagaaacaatcagcaaggaatgaagcctcctgcaacagcatgtgagcaaggctttttgaaagaggatcctccagccccagtcaagtatccagatgattgcagccctagctgatatcttgagtataayctcatgagagactgtgagccacacctcacaaccaccgagctaaactgctacca

SEQ ID NO: 661983 - DNA, 588 bp, Homo sapiens
ggaggtaaggagagatgcttgaaaacctggagaggtaaaagaggcatctaaaaataacaaggattgtaccacaattcccaggcacaactgagagagtctacaagcatctcagagaagccctaaatgcagcacagagcttgtgttggttttaaaatgtgccaacaaattatttgactctattccctttaaaagttttacagccaaatttctcaccccttcaactcagtgactcacatctaacaaatagattgtgataaaagtaactgtatgttacactgagattagattagtcattagaggtattgaagctttctcctcattctcactctcttgaatcactcactccagggaagccagctgccatgtcataaggatactcaagcagccatgtggagaggtccacatggtgagaaacaatcagcaaggaatgaagcctcctgcaacagcatgtgagcaaggctttttgaaagaggatcctccagccccagtcaagtatccagatgattgcagccctagctgatatcttgagtataacctcatgagagactgtgagccacaccycacaaccaccgagctaaactgctacca

SEQ ID NO: 661984 - DNA, 551 bp, Homo sapiens
gacaccctcagagtgctttgtttccttgtgtgttttgtaattttgtattgtatgtttatgcttggcaggattttatctattgaaatcctgtgaaaccaaaccaagggaagatttatgtcttctatctggaacacttaatttaaattcttgggttagagctttctaggccaagtaggtaacaattaattcaaaccacaaatatgcaggcggacaggacaatagatacaacttctcaaagaacggtaatttttttgacaaycaatcctagacaagagcaaagcctagagaaacaagtttccaggccatgttctttgataccaggtggacttttaaagtttactttttatctgagaacacagcccaagggctttatccaggggtctcagtcccaaatttgcttcgatctcaggcatggtctcctgtcacccaagcctctgggttactgaaactaaaagtcacaaaatacctgttaaagaaaattattcagtgacacttgatagagtaaggtaaggaagactttccatcacaataggtacaggtaccactacaat

SEQ ID NO: 661985 - DNA, 494 bp, Homo sapiens
aactaaaagtcacaaaatacctgttaaagaaaattattcagtgacacttgatagagtaaggtaaggaagactttccatcacaataggtacaggtaccactacaatgtggtcttgcagygggagagattggggtcaagtatgaaacaacatgggcaagtgggaatttatagccaacgaatacggtgggggtcagtggatgaaaaattagtaagagaaaaatatcaagggtaagagggattctggctaacccaaactaacgggattcatgtgaagataggccaaggtgatcagacatcacctaggggatgaaggatgaggggcctgatcagagattgagagtgatcagatatcaagggttgagggggttcttgctaaactgacttagcaaggctctttgcgaaaactggattttacaaagaggtgtacaaatgagcctagaaggttcagaagcctgactaaagtttggccaagcaaataatctttgtcataacctc

SEQ ID NO: 661986 - DNA, 494 bp, Homo sapiens
aactaaaagtcacaaaatacctgttaaagaaaattattcagtgacacttgatagagtaaggtaaggaagactttccatcacaataggtacaggtaccactacaatgtggtcttgcagtrggagagattggggtcaagtatgaaacaacatgggcaagtgggaatttatagccaacgaatacggtgggggtcagtggatgaaaaattagtaagagaaaaatatcaagggtaagagggattctggctaacccaaactaacgggattcatgtgaagataggccaaggtgatcagacatcacctaggggatgaaggatgaggggcctgatcagagattgagagtgatcagatatcaagggttgagggggttcttgctaaactgacttagcaaggctctttgcgaaaactggattttacaaagaggtgtacaaatgagcctagaaggttcagaagcctgactaaagtttggccaagcaaataatctttgtcataacctc

SEQ ID NO: 661987 - DNA, 494 bp, Homo sapiens
aactaaaagtcacaaaatacctgttaaagaaaattattcagtgacacttgatagagtaaggtaaggaagactttccatcacaataggtacaggtaccactacaatgtggtcttgcagtgggagagattggggtcaartatgaaacaacatgggcaagtgggaatttatagccaacgaatacggtgggggtcagtggatgaaaaattagtaagagaaaaatatcaagggtaagagggattctggctaacccaaactaacgggattcatgtgaagataggccaaggtgatcagacatcacctaggggatgaaggatgaggggcctgatcagagattgagagtgatcagatatcaagggttgagggggttcttgctaaactgacttagcaaggctctttgcgaaaactggattttacaaagaggtgtacaaatgagcctagaaggttcagaagcctgactaaagtttggccaagcaaataatctttgtcataacctc

SEQ ID NO: 661988 - DNA, 494 bp, Homo sapiens
aactaaaagtcacaaaatacctgttaaagaaaattattcagtgacacttgatagagtaaggtaaggaagactttccatcacaataggtacaggtaccactacaatgtggtcttgcagtgggagagattggggtcaagtmtgaaacaacatgggcaagtgggaatttatagccaacgaatacggtgggggtcagtggatgaaaaattagtaagagaaaaatatcaagggtaagagggattctggctaacccaaactaacgggattcatgtgaagataggccaaggtgatcagacatcacctaggggatgaaggatgaggggcctgatcagagattgagagtgatcagatatcaagggttgagggggttcttgctaaactgacttagcaaggctctttgcgaaaactggattttacaaagaggtgtacaaatgagcctagaaggttcagaagcctgactaaagtttggccaagcaaataatctttgtcataacctc

SEQ ID NO: 661989 - DNA, 277 bp, Homo sapiens
gtgtcacctctgcatcgcgaggagggggataagtggggagaagyctggtgtcagatgggatggcgccggaagagggtgccacagcggggacggaaggcgcccccaccccaactccacgggaatataaacaatttgtattttccgatcaggtggcgggacaggcttcattgggacagccctaacccagctgctgaatgccagaggccacgaaggtacgttggtctcccgaaagcccgggcccggccggatcacgtgggttagtccatcctctggaagc

SEQ ID NO: 661990 - DNA, 549 bp, Homo sapiens
taggaccctttttacctacctaaagctgtgacatctgccataacttgaccagacacagttcccccagccaccagttcaggccatactaaccaatctcttctcagggaccrctgggttatctcttaatcattgtcacctctttgaccagcctgtctccaacacacctgcccccagcctgggtcagtatggtacagtggtgtaaatcaccaaaaaggaaggggtgaggacacaaggaccctccccatcatcattacactcgccatgcagtattcaactccctgtgccactcagagggaggcagaagtcagggcctggaaaagatcttgtctagagactccccacaggcccacacagaacagaacccaggggcacctgtcctacttctttatctggtcttggattccaggaagttgactggctctgtattgttcctggaggtatgaccagcctcaaaggtggatgtaacagaaaagcatactttaggctgcactaaagtaaggagtactgattaataccgtctacacagggaatgtgctaccctggagatag

SEQ ID NO: 661991 - DNA, 574 bp, Homo sapiens
ggaaaagtaaactaactggcccagatcacccctcctggctccttgctcgctcctgagctccaggatgtctggagtatccacatgatgttattcccattttagagataaggaaactgagactcccatcacaaagctggtacatgattgagccatcctggaaccccagcctaatcccaaaggaagcaatgtggcccagcctcccaccccacagtgcattccttggtggggccaacttgttcagccagatatctctattctcccaaagagcacagaatgatttttgccagcctgggccatcacagaagaaattaagctgaaactgaaaacaaatatagagttggaaagtccctcaaaactcaggggcactgaggttgccagtgagacaaccaagaagtggagatcctccccaggcccctcctcttccctgctctcctcsgccctgctctcctccgccctgggggaaagcgtccttggtgcctggagggatgggggagagaaggcgttcaccttggctctgctggcgttttccttggggccctccagctgcagccagatgtgggggttgtccggacag

SEQ ID NO: 661992 - DNA, 540 bp, Homo sapiens
tccaagctctgcctattacccagttccgaaggtaattccacattttcaagtaacattatagccttgttaccaattttctatgttagtaaggtttttgactctagtccctwactcatggactacacctctggatccactcagggctgggaaaaccttgctaccctgaagggaagcacataggcctggcttgctttgccactggctggttgtagagtctaaggaccttgatcaaacataggcagtagccaaggagtggttacagcaggccttgggtgagatccagtgccgcgctggcttcagatttgaccctgtgtagtcatagaggtgatgcccacaggggtgcttgtgtcacaccacctccaggtgtaggaggctcagaatagagagactgtgtttgtttgggagaaagtaagggaagagaacaagagtctctgcctgggaaattcagaaaatgctcccagacttgtccaagaccatcaaggcagtaactctacaagtctgcaagaaccccagtgttacagggcttaggatgccccctaa

SEQ ID NO: 661993 - DNA, 585 bp, Homo sapiens
aacattatagccttgttaccaattttctatgttagtaaggtttttgactctagtccctaactcatggactacacctctggatccactcarggctgggaaaaccttgctaccctgaagggaagcacataggcctggcttgctttgccactggctggttgtagagtctaaggaccttgatcaaacataggcagtagccaaggagtggttacagcaggccttgggtgagatccagtgccgcgctggcttcagatttgaccctgtgtagtcatagaggtgatgcccacaggggtgcttgtgtcacaccacctccaggtgtaggaggctcagaatagagagactgtgtttgtttgggagaaagtaagggaagagaacaagagtctctgcctgggaaattcagaaaatgctcccagacttgtccaagaccatcaaggcagtaactctacaagtctgcaagaaccccagtgttacagggcttaggatgccccctaaagcagatacagtttatatcacaacacgcaagtcctttcaagtatctggaaagacttcccaagaaggactgctaaaaatgagcccagacagtaaaga

SEQ ID NO: 661994 - DNA, 567 bp, Homo sapiens
agtgtggatccctgggggtttctcttacactgtttcctcacattcagaagcctttcctggctctcagccagtccccaaccagataagccactacagacttcttttgattagagtgtgcatgagatattttctcattytttgaatatgaacctatttgtgtctttgtagttaaagtgtgttacttaaagacagcatataattggtccttgccccttgattagagtgcttattccgtttatatttaatccaattattatgattaaacttaaatctgctattttgcgattagttttctatttatctcatagactttgcttctctcttgccagcttcttgctttcttttttgtcaaataggtttcccactttttttttttttttttttgagacaggtctggctctgtcacacaggctgaagtgcagtggcacagtcttggctcactgcaacctctaccccctggctcagcctcccaagtagctgagactacaggtgtgcaccaccacacctggctactatttgtattttttgtagagatggggtttcaccatgtttcccaggctagtctca

SEQ ID NO: 661995 - DNA, 439 bp, Homo sapiens
ggttttgtgaaccaggcccagagtccccatgctgtgtgcagcctaaggacttggtgccctccatcccagctgctccagccatggctgagagaggtcaacacagagcttgtgctgtggcttcagagggtgcaagcctcaagcyttggcagattccatgtggttttgggcctgcaagtgcacagaaatcaagaattgaggtttgggaacctccagctaagtttcagaagatgtatggaaacacctggatgtccaggcagaagtttgttgcagggcagggcgctcattgagaacctctgctaaggcagtggagaagggaaatgtggggtcagagcccccacacagagtccctactggggcaccacctagtggagctgtgagaagagggccactgtcctccagactccagaatggtagatcaactgacagcttgcactgtgtg

SEQ ID NO: 661996 - DNA, 439 bp, Homo sapiens
ggttttgtgaaccaggcccagagtccccatgctgtgtgcagcctaaggacttggtgccctccatcccagctgctccagccatggctgagagaggtcaacacagagcttgtgctgtggcttcagagggtgcaagcctcaagccttggcagattccatgtggttttgggcctgcaagtgcacagaaatcaagaattgaggtttggraacctccagctaagtttcagaagatgtatggaaacacctggatgtccaggcagaagtttgttgcagggcagggcgctcattgagaacctctgctaaggcagtggagaagggaaatgtggggtcagagcccccacacagagtccctactggggcaccacctagtggagctgtgagaagagggccactgtcctccagactccagaatggtagatcaactgacagcttgcactgtgtg

SEQ ID NO: 661997 - DNA, 531 bp, Homo sapiens
gtatgtctttattagcaatgtgaagatggactaatacaaatattgatataaaaaattctcaacaaaatataataaatcaaactcaaaaatatattagaaagatcattcatcatgactaagtgggatttatccccaggatgcaaggatagttaatatacacaaatcaatcaatatgacatcacatcaaagaatgaaggacaaaaaacatatgatcttttcaattgatgctttaaaaaaaagcatttgataaaatttaatgtctcttcatgataaaaaaaacacccaagaaaatgggatagaaggaacatacctcaacataataaaagccatatatgacaaacccacagttagtatcatacggcatgaggaaaaactgaaagccttctaagatctggaacacaacaaagatgcttatttccaccattgttattcaacwtagtactggaagtcctagctagagcaattagacaagacaaagataaaaggcatacaaatcagaaaggaaaaagtcaaattatccttgtttgcaga

SEQ ID NO: 661998 - DNA, 567 bp, Homo sapiens
agtgtggatccctgggggtttctcttacactgtttcctcacattcagaagcctttcctggctctcagccagtccccaaccagataagccactacagacttcttttgattagagtgtgcatgagatattttctcattttttgaatatgaacctatttgtgtctttgtagttaaagtgtgttacttaaagacagcatataattggtccttgccccttgattagagtgcttattccgtttatatttaatccaattattatgattaaacttaaatctgctattttgcgattagttttctatttatctcatagactttgcttctctcttgccagcttcttgctttcttttttgtcaaataggtttcccrctttttttttttttttttttgagacaggtctggctctgtcacacaggctgaagtgcagtggcacagtcttggctcactgcaacctctaccccctggctcagcctcccaagtagctgagactacaggtgtgcaccaccacacctggctactatttgtattttttgtagagatggggtttcaccatgtttcccaggctagtctca

SEQ ID NO: 661999 - DNA, 533 bp, Homo sapiens
atattttaaagcatttacatttagtaagaaacattaaaaaatatctattactatttctactatttgatattgtatggatgtcctaagtaatgcaacaacaaaaataaggatttggaaattgaaaaggaagacataagttgctgtttcaagttgaaacaactgctgtctttagatagcaatccacatattagacagctcagtaaaattgatggataaaaggtcaamatataaaaattaatacgtcttataaacccataaaaacaaattattttagtagattaaattatctttcaaaatatgtgctgctcctctccatagtatgcctccttaggagaagattgtatgtccccaccccagtgatgccaagctagggcatgtgactcattttgaccattgccatgtgagcatagtggcttattccacttctgcaaagaagctctgtcagccaccacatgacttgcctgtttgtttttcactctgccacaagaccaaaatatttcatacagaagcaacaaaagagcaatggacacata

SEQ ID NO: 662000 - DNA, 533 bp, Homo sapiens
atattttaaagcatttacatttagtaagaaacattaaaaaatatctattactatttctactatttgatattgtatggatgtcctaagtaatgcaacaacaaaaataaggatttggaaattgaaaaggaagacataagttgctgtttcaagttgaaacaactgctgtctttagatagcaatccacatattagacagctcagtaaaattgatggataaaaggtcaacatataaaaattaatacgtcttataaacccataaaaacaaattattttagtagattaaattatctttcaaaatatgtgctgctcctctccayagtatgcctccttaggagaagattgtatgtccccaccccagtgatgccaagctagggcatgtgactcattttgaccattgccatgtgagcatagtggcttattccacttctgcaaagaagctctgtcagccaccacatgacttgcctgtttgtttttcactctgccacaagaccaaaatatttcatacagaagcaacaaaagagcaatggacacata

SEQ ID NO: 662001 - DNA, 533 bp, Homo sapiens
atattttaaagcatttacatttagtaagaaacattaaaaaatatctattactatttctactatttgatattgtatggatgtcctaagtaatgcaacaacaaaaataaggatttggaaattgaaaaggaagacataagttgctgtttcaagttgaaacaactgctgtctttagatagcaatccacatattagacagctcagtaaaattgatggataaaaggtcaacatataaaaattaatacgtcttataaacccataaaaacaaattattttagtagattaaattatctttcaaaatatgtgctgctcctctccatagtatgcctccttaggagaagattgtatgtccccaccccagtgatgccaagctagggcatgtgactcattttgaccattgccatgtgagcatagtggcttatwccacttctgcaaagaagctctgtcagccaccacatgacttgcctgtttgtttttcactctgccacaagaccaaaatatttcatacagaagcaacaaaagagcaatggacacata

SEQ ID NO: 662002 - DNA, 598 bp, Homo sapiens
gagggctccccatgtataaagtactctgctaggttctagagattcaaagataaacaggataaatttagtccttgattgagacacccaaattatcatagaagcagtgggtacacagagggttatctatgacaatacagtaaaaggtacaatagatgtaggtgtaaattgctgttagaacataaataagaaatttactctgtcttagtgaagggagaatgcagatgaatgtcagaggaaagttatagttgagctgagttgtgcagaatgatgaagagctttccaaaaagctcaagaggggagggccatttcagacagaagaaggagtatgagccttggtccaaaaatgacagaagagcatgatgtgggagagaaagaggaaaggtactgaaggacctaaaggaaagasactgaagaagagattggagaagggggctggatttcttttctgaagccctttacagggcagggtaagacatctgaacctgatcctatagaacagtacattgggaagcccttccctgggtgaagatacagaagctaatggatttatccttgtaacatctgcccagtgggatttcatcattgttatgcaccgctg

SEQ ID NO: 662003 - DNA, 525 bp, Homo sapiens
gtaaactgtaagtcctttctgtataggtgatatatttcacaatttaaaaacaaaaaataagccaggcatagtgatgaacacctgtagttctagctactcaggaggctgagggaggaggattgcttgaccccaggagttcaaggttgcagtgagctgtgatgtgccactacactccagcctgagtgacagagtaagaccctgtcccaaaaaaaaaaaaaaagagggaggagcaatctaaatgaccatggatgagggaataaagcaaatgtggtatatacatattatgaaatattattcagccttaaaaaatgaggaaatcctgtcatatgctaaaacatggatgaaacttgaggacattgtgttaggtgatgtaagccaatcacacataagcaaaaaaaattttaaacttcatagttccacttacatcaggtatttcaattaggcaacactcaaagaataacagaaagcagaatggtggctggggaaggggraaatggggaattattcaatgggtatagagtttca

SEQ ID NO: 662004 - DNA, 564 bp, Homo sapiens
atgtggcatttcacattgagcatcatatttaattctgaaaaaaatccttgtactgtatcattcttcatattttatggatgcagtaactaaggctgagaactttaaaatttttcytaagttcagacacatagctaagtggcagaaccaagattcaaactcaccccatctaactgcagagcaaactgcatgccttaaatgtcaaagtgaatactagcacagttaatacaatgtttggaaactcagagaaggaatgatccctctgcattatagttactaaggaatcattgccattatttaaatgccagtgcttctacatcaggcccaaattttctgtcctactaactgtgaatcaagacttgattcaacctctacttgagtatctgccgcaatgagaaatcacttacctccactaaccacacatttattttataacaacagattgttagtaagtcctttcttatacatactcaacagctgcttcccaagatgctgtaggattatgtctagagtcaaactagccagaagcaatgtccaaaatacaccataacactgtgcagcaaaggt

SEQ ID NO: 662005 - DNA, 534 bp, Homo sapiens
acattgagcatcatatttaattctgaaaaaaatccttgtactgtatcattcttcatattttatggatgcagtaactaaggctgagaactttaaaatttttcctaagttcagacacatagctaagtggcagaaccaagattcaaactcaccccatctaactgcagagcaaactgcatgccttaaatgtcaaagtgaatactagcacagttaatacaatgttyggaaactcagagaaggaatgatccctctgcattatagttactaaggaatcattgccattatttaaatgccagtgcttctacatcaggcccaaattttctgtcctactaactgtgaatcaagacttgattcaacctctacttgagtatctgccgcaatgagaaatcacttacctccactaaccacacatttattttataacaacagattgttagtaagtcctttcttatacatactcaacagctgcttcccaagatgctgtaggattatgtctagagtcaaactagccagaagcaatgtccaaaatacaccata

SEQ ID NO: 662006 - DNA, 534 bp, Homo sapiens
acattgagcatcatatttaattctgaaaaaaatccttgtactgtatcattcttcatattttatggatgcagtaactaaggctgagaactttaaaatttttcctaagttcagacacatagctaagtggcagaaccaagattcaaactcaccccatctaactgcagagcaaactgcatgccttaaatgtcaaagtgaatactagcacagttaatacaatgtttggaaactcagagaaggaatgatccctctgcattatagttactaaggaatcattgccattatttaaatgccagtgcttctacatcaggcccaaattttctgtcctactaactgtgaatcaagacttgattcaacctctacttgagtatctgccgcaatgagaaatcacttacctccactaaycacacatttattttataacaacagattgttagtaagtcctttcttatacatactcaacagctgcttcccaagatgctgtaggattatgtctagagtcaaactagccagaagcaatgtccaaaatacaccata

SEQ ID NO: 662007 - DNA, 534 bp, Homo sapiens
acattgagcatcatatttaattctgaaaaaaatccttgtactgtatcattcttcatattttatggatgcagtaactaaggctgagaactttaaaatttttcctaagttcagacacatagctaagtggcagaaccaagattcaaactcaccccatctaactgcagagcaaactgcatgccttaaatgtcaaagtgaatactagcacagttaatacaatgtttggaaactcagagaaggaatgatccctctgcattatagttactaaggaatcattgccattatttaaatgccagtgcttctacatcaggcccaaattttctgtcctactaactgtgaatcaagacttgattcaacctctacttgagtatctgccgcaatgagaaatcacttacctccactaaccacacatttattttatarcaacagattgttagtaagtcctttcttatacatactcaacagctgcttcccaagatgctgtaggattatgtctagagtcaaactagccagaagcaatgtccaaaatacaccata

SEQ ID NO: 662008 - DNA, 582 bp, Homo sapiens
acttggttgccccacatcaacattcattcttttgccacacttaaagtttccaagaacaaaaattatcccactgaacataatctttaccatcttttatataaaggaaaattagacttgactcagcagaactgaaataacccagtctcaacagttactgcttttaacttcaagtactgtgtctctaggtgatacctgctccaacaatagtttggtcacattttcaatttgatattctctagtctcccaacttgataactgtaccctaaaccataaagttcactaccaacatgctatatataaaataaccaaagggggaagaagaaagagaaaaaggaaatctcttaaaatacacaggtatacatatgacaaagcaaagaaggaaatgygagcagatagcgcagtcctcgtttctgaaattggtcccctgactggggctatacctattccatttcctcaccctcagccaggcaggtggagcaaaacttaagtcttggtggatctgaatcttgatgctgtggagctgtcttactagccccagactacctgcctctcaatttctaattatatcagtgaaagcaaaca

SEQ ID NO: 662009 - DNA, 582 bp, Homo sapiens
acttggttgccccacatcaacattcattcttttgccacacttaaagtttccaagaacaaaaattatcccactgaacataatctttaccatcttttatataaaggaaaattagacttgactcagcagaactgaaataacccagtctcaacagttactgcttttaacttcaagtactgtgtctctaggtgatacctgctccaacaatagtttggtcacattttcaatttgatattctctagtctcccaacttgataactgtaccctaaaccataaagttcactaccaacatgctatatataaaataaccaaagggggaagaagaaagagaaaaaggaaatctcttaaaatacacaggtatacatatgacaaagcaaagaaggaaatgtgagcagatagygcagtcctcgtttctgaaattggtcccctgactggggctatacctattccatttcctcaccctcagccaggcaggtggagcaaaacttaagtcttggtggatctgaatcttgatgctgtggagctgtcttactagccccagactacctgcctctcaatttctaattatatcagtgaaagcaaaca

SEQ ID NO: 662010 - DNA, 582 bp, Homo sapiens
aataatatatctaagagttgtgacaatatatgatacrcctagactctcagaaaatgctaattccaatcccaattgctctttgcataaagttctgtcctagggtctgttcttttcccacatctaccctccttggatctctcttctgtcaaaaacatgtggttcagaggaggagagagatccaggtcaatgtttttcaaattacaaggaattatcatttaaatggggttgttgctcaagttttgacgtgtagtggaatggagtggagtggagtggaatggaaactaacagaaaacactgcacatggttaagataaagattgtttcctgaaacctttaatttgtgcttacatactcacacatacatatgtgcatgcactgggactctgcaatatgcatttctgactatggaacatagccataaaagtctttgcactgaacgttcagtgggcctttcacaagctgccctaattgggaaagaaaaacatggtccctccatttcctgcccccaactccagaaaagtcaccatagttgagggtacatctgagaagccagcacttgggagttcagggctcaagttccttt

SEQ ID NO: 662011 - DNA, 582 bp, Homo sapiens
aataatatatctaagagttgtgacaatatatgatacacctagactctcagaaaatgctaattccaatcccaattgctctttgcataaagttctgtcctagggtctgttcttttcccacatctaccctccttggatctctcttctgtcaaaaacatgtggttcagaggaggagagagatccaggtcaatgtttttcaaattacaaggaattatcatttaaatggggttgttgctcaagttttgaygtgtagtggaatggagtggagtggagtggaatggaaactaacagaaaacactgcacatggttaagataaagattgtttcctgaaacctttaatttgtgcttacatactcacacatacatatgtgcatgcactgggactctgcaatatgcatttctgactatggaacatagccataaaagtctttgcactgaacgttcagtgggcctttcacaagctgccctaattgggaaagaaaaacatggtccctccatttcctgcccccaactccagaaaagtcaccatagttgagggtacatctgagaagccagcacttgggagttcagggctcaagttccttt

SEQ ID NO: 662012 - DNA, 470 bp, Homo sapiens
catgcataaaaattttaatctcagcatttttatttatgcttttactttttataatttattcctatatatttcatcttccaaataatttctgctttgcatttaatatatcaaaggtattaaaaaagtgatttattatacacacacacatatatacatatgaaatttctatcatagtcttagatatcagaaaaattttttaatgcactgtatgacttgattttttttttcagaaacatgaaaccataccaaagtgagaayttttgacttcatttcagctctggtttctagtttcaagtcttctaccagctatatgacttaaagatactacttgatatgttcagttacttcatctgaaaaattgacatgcattttaacctgaaatacaggagctcaatatttttctacaaaaaggacaattgctgtctataaattcaacattcttttcttggttatcttttttttttatcata

SEQ ID NO: 662013 - DNA, 606 bp, Homo sapiens
ttacttcctggaaacttagacctctaaactggcagaatttaagtttgcaggaayagtaagatacaaattccacaagtaagtccctgggagtgataactgaagggatcaattctacttctatcccttggttcctggactcatatattctagttatgtggggacactgaaccatagattggtattgattcagcatatgtatcacatcctggaaagcagtgctccaacttccaaccctacagggtgtcatctctgagctggcaccttagctgagctttcaacaggccagctcatcattccactaggttgactgcttctgggtggcatggtatataataagaccaatgagcccatcattttacattctttgccataaaatgagtcctttactctgagctaatgtgtgtgagaagcaggttgatggattgggaaatctgtaagccctcatatggtggtagtggcagaggaatttcaggcagagaaggaaaactcatgtctagagcaagtatcaatggtgataaggatgaatgtccatcccctccaaagcagaggggtcaacctctcactggatggctgcctgatctctccaagagcagtgccatctcaaag

SEQ ID NO: 662014 - DNA, 606 bp, Homo sapiens
ttacttcctggaaacttagacctctaaactggcagaatttaagtttgcaggaacagtaagatacaaattccacaagtaagtccctgggagtgataactraagggatcaattctacttctatcccttggttcctggactcatatattctagttatgtggggacactgaaccatagattggtattgattcagcatatgtatcacatcctggaaagcagtgctccaacttccaaccctacagggtgtcatctctgagctggcaccttagctgagctttcaacaggccagctcatcattccactaggttgactgcttctgggtggcatggtatataataagaccaatgagcccatcattttacattctttgccataaaatgagtcctttactctgagctaatgtgtgtgagaagcaggttgatggattgggaaatctgtaagccctcatatggtggtagtggcagaggaatttcaggcagagaaggaaaactcatgtctagagcaagtatcaatggtgataaggatgaatgtccatcccctccaaagcagaggggtcaacctctcactggatggctgcctgatctctccaagagcagtgccatctcaaag

SEQ ID NO: 662015 - DNA, 400 bp, Homo sapiens
caggttgatggattgggaaatctgtaagccctcatatggtggtagtggcagaggaatttcaggcagagaaggaaaactcatgtctagagcaagtatcaatggtgataaggatgaatgtccatcccctccaaagcagaggggtcaacctctcactggatggctgcctgatctctccaagagcagtgccatctcaaagactcagcgrtagtctctgctgttggcaagttaggtgattaacagtggcaagacccgaattgattttggtgaaagagagtgtccatgttcttggacccattcatggcatctattcaacctccatgaccactctactctgaccatggcccattgttccagcagcgaggtgatcaagaagagaatatggttgacatccacaagccat

SEQ ID NO: 662016 - DNA, 627 bp, Homo sapiens
gtgcactggtccttacccagagatgtagttgggactctccataaacaagctcacctttgttctgctgataattagatcattctgagcaaaggtatattgtcaacagtggacctaattatgtatgtaaatgtcatctattagagtgagtaaaggagggggttgaggaggtaacaccaatgtggatgagaaaataaaaactacccacctgaaggccagaaacaagtgaatctgaacagtgcaaggaatggattttagtagacattgttgatgcccttcccaggacctcttaagcaggtgatgyacccattccccagctgttgtgagtgatagccactaaccaatatccatggccatgagctaacatgtatcctttccctgcgccacttctctccacacaaaatagatgtccaaattgatttttgacaaggctgccaaggacacacaatagggcaaggacagtctattcaatagatggtgttgggaaaactggatgttcacatgcaaaagaatgaaattagacccttgtctcacaccatatacaaaaatcaactcaaaatggactaaagacttaaatataaaacctgaaattctaaaactactagaagaaaacataggtgaaaactccat

SEQ ID NO: 662017 - DNA, 627 bp, Homo sapiens
gtgcactggtccttacccagagatgtagttgggactctccataaacaagctcacctttgttctgctgataattagatcattctgagcaaaggtatattgtcaacagtggacctaattatgtatgtaaatgtcatctattagagtgagtaaaggagggggttgaggaggtaacaccaatgtggatgagaaaataaaaactacccacctgaaggccagaaacaagtgaatctgaacagtgcaaggaatggattttagtagacattgttgatgcccttcccaggacctcttaagcaggtgatgtacccattccccagctgttgtgagtgatagccactaaccaatatccatggccatgagctaacatgtatcctttccctgcgccacttctctccacacaaaatagatgyccaaattgatttttgacaaggctgccaaggacacacaatagggcaaggacagtctattcaatagatggtgttgggaaaactggatgttcacatgcaaaagaatgaaattagacccttgtctcacaccatatacaaaaatcaactcaaaatggactaaagacttaaatataaaacctgaaattctaaaactactagaagaaaacataggtgaaaactccat

SEQ ID NO: 662018 - DNA, 627 bp, Homo sapiens
gtgcactggtccttacccagagatgtagttgggactctccataaacaagctcacctttgttctgctgataattagatcattctgagcaaaggtatattgtcaacagtggacctaattatgtatgtaaatgtcatctattagagtgagtaaaggagggggttgaggaggtaacaccaatgtggatgagaaaataaaaactacccacctgaaggccagaaacaagtgaatctgaacagtgcaaggaatggattttagtagacattgttgatgcccttcccaggacctcttaagcaggtgatgtacccattccccagctgttgtgagtgatagccactaaccaatatccatggccatgagctaacatgtatcctttccctgcgccacttctctccacacaaaatagatgtccaaattgatttttgacaaggctgccaaggacacacaatagggcaaggacagtctattcaatagatgrtgttgggaaaactggatgttcacatgcaaaagaatgaaattagacccttgtctcacaccatatacaaaaatcaactcaaaatggactaaagacttaaatataaaacctgaaattctaaaactactagaagaaaacataggtgaaaactccat

SEQ ID NO: 662019 - DNA, 584 bp, Homo sapiens
gagagtgacactgaccctgttaatggaggctaggttctgataaggggaagaaaaatgttccagcatctgcagatttagcccagatatgaggggttttttctccatgccatgggaagggacctgcccaacacaaacactggataattatagtccaaaacagcccagtttccctgggttctgcagaaaaggcagagacagaagtaaggaggccaaacagggacacccctgactcccggccctgaccctgacccaaagctgagccttcacctaagatactgaaagctgttcccctccctccattccaattcccttaactactttgtacactcacaatcctacttgatatagagcaaggggtaatagagaaacagatttcccttatatgtgtcaaattattctaaagtgrttatatggtaaatgataaccaaaaagaaattgaaaagagaaacaaagaagccttatcctactgtcagaacttgtatagagtacagctccagaatgttcaggaacatctgatgcttgtaaatattgtgctctgacagcttcatagcactcctctctccacacactgcccaacaaacttg

SEQ ID NO: 662020 - DNA, 584 bp, Homo sapiens
gagagtgacactgaccctgttaatggaggctaggttctgataaggggaagaaaaatgttccagcatctgcagatttagcccagatatgaggggttttttctccatgccatgggaagggacctgcccaacacaaacactggataattatagtccaaaacagcccagtttccctgggttctgcagaaaaggcagagacagaagtaaggaggccaaacagggacacccctgactcccggccctgaccctgacccaaagctgagccttcacctaagatactgaaagctgttcccctccctccattccaattcccttaactactttgtacactcacaatcctacttgatatagagcaaggggtaatagagaaacagatttcccttatatgtgtcaaattattctaaagtgattatatggtaaatgataaccaaaaagaaattgaaaagagaaacaaagaagccttatcctactgtcagaacttgtatagagtacagctccagaatgttcaggaacatctgatgcttgtaaatattgtgctctgacagctycatagcactcctctctccacacactgcccaacaaacttg

SEQ ID NO: 662021 - DNA, 614 bp, Homo sapiens
atttcttccctgagaatagtccacacacacttagaacccctggaggctgtcctgatgtcccaagcrtgcaagactctcactatgcaaaacaggcttcccctgatctttacatatttctctagctgtgccgcctgtctgaaaagggagaaggactggagaaaagccatcctttctttgctctgagtcctaccaagtgaggagaggaagaggagccagcatttgccttcctaagctgctaaagcagcagtccacccaaaggctctaaggctcacccagcctaggagccggagcatgcaaggcgacctccagcctgcagtgtgggtagaggggttcttcagaccagccaagaaaaaggtgctgcagctcaaaggcggaaagaaacaatggcagggcctctgccacctctagcagatgcggtgtccctgaagataagaggtctcctccaagatcagtgccatgggcagatttttactgccccaggagataaagtgactctggggagctctagaattagacttttcccacaagtgccaagaatgagaaatttcgagatgacagctgggaagtcctctattggggcattgagtagtagagatggtcccctccaagctaaa

SEQ ID NO: 662022 - DNA, 636 bp, Homo sapiens
acaccaccgcattccagcccagcgaaagagcgagactccatctcaaaaaagaagaaaaaaaaatcctagatgggtatgctcctagaattctgaggacactgctccactgtcacctagattctagtgtcatacagattctcagtccactgctgtaacttgacttgyttccactggaggattttgagatcttctctattctcagtgttctgaaatctcagtgtgatgtaccaatctattttttcttttattccctgcgctgggcactcagtgggtctgctcaatgtggagatttgtgattttcacttctgaacatttttaatgtgttgatttaatattgtttcctctcaattatcttttctctctctagaacatctaacagtgcagatgttggagctcctgaaccaatccattaactctaaagtattcccttctgttttgtttttgtattcatcatcaattactaatattatatcataattgctttagttgtctctcttgtacataaccgctctcccttctccctccctctcccactgtgtgtgagcgcacgtgtgtgcacacaaccatctgaaaaatgcaaatatcatgacagttcctttagtatgcatcttctaagcctaagggcattctcctcta

SEQ ID NO: 662023 - DNA, 636 bp, Homo sapiens
acaccaccgcattccagcccagcgaaagagcgagactccatctcaaaaaagaagaaaaaaaaatcctagatgggtatgctcctagaattctgaggacactgctccactgtcacctagattctagtgtcatacagattctcagtccactgctgtaacttgacttgcttccactggaggattttgagatcttctctattctcagtgttctgaaatctcagtgtgatgtaccaatctattttttcttttattccctgcgctgggcactcagtgggtctgctcaatgtggagatttgtgattttcasttctgaacatttttaatgtgttgatttaatattgtttcctctcaattatcttttctctctctagaacatctaacagtgcagatgttggagctcctgaaccaatccattaactctaaagtattcccttctgttttgtttttgtattcatcatcaattactaatattatatcataattgctttagttgtctctcttgtacataaccgctctcccttctccctccctctcccactgtgtgtgagcgcacgtgtgtgcacacaaccatctgaaaaatgcaaatatcatgacagttcctttagtatgcatcttctaagcctaagggcattctcctcta

SEQ ID NO: 662024 - DNA, 573 bp, Homo sapiens
aagtccaaaaggtctgtgggctggagggcgtgtgtggtgtgtgtatgcctgtgtgcagcaaggtgactttattgggggctgtgtgtccacgttaggagttaggagcaagaaactgcaacctggggcccacattcgctcattaaatgaatgtatctgtggtgcttgcaacagccttcgaggtcttgtgtgggtcatcttggcgcccagtgaggaagcaggggctgcccctgttctccaggtctcagagtctggtaggggtttaggataagggccattggttcccttttggcttaatccatctccwccaccaccaccaccaccaccaccaccaccaccaccaccaccaccaccaccgccaccaccatcaccaggaaactcatgtttttggtgggggggaaagaaagtctactgaacacaataaaatgtaaggagaatatttgatttgctgtctgggatttttaagcaaagatacatataattagtgggtgctgctgtagatgatgtggccaggccgatgaaagttggaagcatgtatttgcaaggctggaacatggttgaaatggaatccattca

SEQ ID NO: 662025 - DNA, 573 bp, Homo sapiens
aagtccaaaaggtctgtgggctggagggcgtgtgtggtgtgtgtatgcctgtgtgcagcaaggtgactttattgggggctgtgtgtccacgttaggagttaggagcaagaaactgcaacctggggcccacattcgctcattaaatgaatgtatctgtggtgcttgcaacagccttcgaggtcttgtgtgggtcatcttggcgcccagtgaggaagcaggggctgcccctgttctccaggtctcagagtctggtaggggtttaggataagggccattggttcccttttggcttaatccatctccaccaccaccaccaccaccaccaccaccaccaccaccaccaccaccaccaccgccaccaccatcaccaggaaactcatgtttttggtrggggggaaagaaagtctactgaacacaataaaatgtaaggagaatatttgatttgctgtctgggatttttaagcaaagatacatataattagtgggtgctgctgtagatgatgtggccaggccgatgaaagttggaagcatgtatttgcaaggctggaacatggttgaaatggaatccattca

SEQ ID NO: 662026 - DNA, 573 bp, Homo sapiens
aagtccaaaaggtctgtgggctggagggcgtgtgtggtgtgtgtatgcctgtgtgcagcaaggtgactttattgggggctgtgtgtccacgttaggagttaggagcaagaaactgcaacctggggcccacattcgctcattaaatgaatgtatctgtggtgcttgcaacagccttcgaggtcttgtgtgggtcatcttggcgcccagtgaggaagcaggggctgcccctgttctccaggtctcagagtctggtaggggtttaggataagggccattggttcccttttggcttaatccatctccaccaccaccaccaccaccaccaccaccaccaccaccaccaccaccaccaccgccaccaccatcaccaggaaactcatgtttttggtgggggggaaagaaagtctactgaacacaataaaatktaaggagaatatttgatttgctgtctgggatttttaagcaaagatacatataattagtgggtgctgctgtagatgatgtggccaggccgatgaaagttggaagcatgtatttgcaaggctggaacatggttgaaatggaatccattca

SEQ ID NO: 662027 - DNA, 504 bp, Homo sapiens
aggaggtaaaatgagataaagtgaaataaaataaatttgaggggagcacaagtttttactttgtcattctctgaaatacctatagttactacggaactatgaattcttggagacccctaaggcattttaaagtgtgttcactaaattcatttgaagcataaaaggtagaaatttcatcaaccttcctcagttttctgctctacaaccaacactcaagacttctacatttcctcgttactggttaccatactcatcstaagtgtgcccatgccactagtgcttaagtgtgtccctcttcaaagcatgaacaaggtattccttgtttcccgagaactgtgtgtgtttatgggggagaggcagcagtatttaaaggacatgaggggacatttctcattcatccaggaactactgtgtctgggaggggggtgaagggtgccgcaacaactttaaggttagttctaagcttcacagaagcatccctggtgccatcagtgacgcagggag

SEQ ID NO: 662028 - DNA, 504 bp, Homo sapiens
aggaggtaaaatgagataaagtgaaataaaataaatttgaggggagcacaagtttttactttgtcattctctgaaatacctatagttactacggaactatgaattcttggagacccctaaggcattttaaagtgtgttcactaaattcatttgaagcataaaaggtagaaatttcatcaaccttcctcagttttctgctctacaaccaacactcaagacttctacatttcctcgttactggttaccatactcatcgtaagtgtgcccatgccactagtgcttaagtgtgtccctcttcaaagcatgaacaaggtattccttgtttcccgagaactgtgtgtgtttatgggggagaggcagcagtatttaaaggacatgaggggacatttctcattcatccaggractactgtgtctgggaggggggtgaagggtgccgcaacaactttaaggttagttctaagcttcacagaagcatccctggtgccatcagtgacgcagggag

SEQ ID NO: 662029 - DNA, 575 bp, Homo sapiens
ctgaggccacctttataaggttactaattccaatcatgagggcactgcctttgtgaactaatcaccttccaaaagccccatctcctaataccatcaccttgggggttagcctatcaacatatgaattttggagaaacatattcagaccatagcagtcatcttaatgataagtctttcaatccatgaacttcgaaagttctttccatttatttaggtcttctctaatttctttcagcaatattttgcagtttttaatatacaaattgctgacctcttttgttaattttatacctatgtgtttattcttgtaggtgatattgtaaattaaattgcttcctttatttcatttttggattgttcattgctagtgtatagcagtgcaattgagtattgaacttgtaacctgcaattttgttgaacttatatattagtytcaataattttgatttttgtgtgaattccttagaagtttttatattatgagaccatgtcatctattagtagtgatggtttcactcctttcttttcaatataaatacctctaaatatgtaatattacttgtctatttaaattt

SEQ ID NO: 662030 - DNA, 575 bp, Homo sapiens
ctgaggccacctttataaggttactaattccaatcatgagggcactgcctttgtgaactaatcaccttccaaaagccccatctcctaataccatcaccttgggggttagcctatcaacatatgaattttggagaaacatattcagaccatagcagtcatcttaatgataagtctttcaatccatgaacttcgaaagttctttccatttatttaggtcttctctaatttctttcagcaatattttgcagtttttaatatacaaattgctgacctcttttgttaattttatacctatgtgtttattcttgtaggtgatattgtaaattaaattgcttcctttatttcatttttggattgttcattgctagtgtatagcagtgcaattgagtattgaacttgtaacctgcaattttgttgaacttatatattagtttcaataattttgatttttgtgtgaattccttagaaktttttatattatgagaccatgtcatctattagtagtgatggtttcactcctttcttttcaatataaatacctctaaatatgtaatattacttgtctatttaaattt

SEQ ID NO: 662031 - DNA, 502 bp, Homo sapiens
ttctggaatatgtttatagattatgcttttagtgatggaggatgacaatgcaaaagagaagtccaggagaggtgatcaaataaagattttcagcaatgaaaatctctgaacctataatgttcaaatcctgtctcctataggaaaataaaatttgtttatatctgattttagaagcaattgtgttctgtgaataaggatatttatttgttttttatttactgccctctagtggaaacacattagaaatttaatttacttaagattttcaagatagrgtacggccgactccagtagggatgtctctaagacacagagttctgggaagttaaatgagtttctcattaaaaagatattttgagaccaggtcaattgcttttctcagacaaacattaagcagaatctatcatttagtttacattttttacaccatttatatgatcataggtcacaaaaaagcttgaccatagaaagattggacattgaaatgtgctttttagaaaca

SEQ ID NO: 662032 - DNA, 488 bp, Homo sapiens
ggccttcactcctcatattttaagtcttaggcaaaaggaggcttggatatgcaatggtaacaagaaattccaaaatctcagagacttgaaagaaccaagtttatttcttgctcacactgccggttggttcattatgggtygacagggtatctgcccattgtaatgagcattgcaggctgacagaagctccatctcaacccatgcttccataataatgacagggaaaagaaaatatacagtgcgttctgtgttcttttatgtgatggttagtcaggtgggaccatgaaagaagatgccggataggctgaggagaacaaagtttattatactcacaggtcctagcaacaagaggcatggcataccacctagggccacatgtgaaaatacctgggtcagtctggaggcagaagggatacgcatgaggggaaggaatcggacacagtctttattgtagttttagagggaacagcaaggcaggacaggataaa

SEQ ID NO: 662033 - DNA, 467 bp, Homo sapiens
ttacaatacatcctgaaattaagttaattatttcagtagtatttactctttcgtcctcaaaactaatttttaaaagaagtatgtggccttcactcctcatattttaagtcttaggcaaaaggaggcttggatatgcaatggtaacaagaaattccaaaatctcagagacttgaaagaaccaagtttatttcttgctcacactgccggttggttcattatgggttgacagggtatctgyccattgtaatgagcattgcaggctgacagaagctccatctcaacccatgcttccataataatgacagggaaaagaaaatatacagtgcgttctgtgttcttttatgtgatggttagtcaggtgggaccatgaaagaagatgccggataggctgaggagaacaaagtttattatactcacaggtcctagcaacaagaggcatggcataccacctagggccacatgtgaaa

SEQ ID NO: 662034 - DNA, 467 bp, Homo sapiens
ttacaatacatcctgaaattaagttaattatttcagtagtatttactctttcgtcctcaaaactaatttttaaaagaagtatgtggccttcactcctcatattttaagtcttaggcaaaaggaggcttggatatgcaatggtaacaagaaattccaaaatctcagagacttgaaagaaccaagtttatttcttgctcacactgccggttggttcattatgggttgacagggtatctgcccattgtaatgagcattgcaggctgacagaagctccatctcaacccatgcttccataataatgacagggaaaagaaaatatacagtgcgttctgtgttcttttatgtgatggttagtcaggtgggaccatgaragaagatgccggataggctgaggagaacaaagtttattatactcacaggtcctagcaacaagaggcatggcataccacctagggccacatgtgaaa

SEQ ID NO: 662035 - DNA, 575 bp, Homo sapiens
ctataaacaagaataatttgacttctactttccaatttggatgcctttttttttctcttgtctgattgctctagctagaaattccagtcctatgttgaataactgtggtgaaagtgtgcattctttctttgtccccaatcttagaggaaaggcttttattttttcatcattcaatatgatactagctgtgcttctgtcatatatggcttttattatgttgaggtatgttccttctatacccatttttcagggtttttataatgaagggattttcaattttrtcagatgttttttcagcatcaattaaaatgatcatatggtttttatccttcattctgttgttataatgtatgacacaaattgatttacatatgttgagccatccttgcatcacccacttggtcatgatgaatgtttttaatgtgtttttaaacttggtttgctagcattttgttgagaatttgtgcatcaatatttatcagagatattggcctattgtttaatttttatatgtatttttgtctggtttaactatcagggtaaagctggccttgtataatgagtttgaaattatt

SEQ ID NO: 662036 - DNA, 575 bp, Homo sapiens
ctataaacaagaataatttgacttctactttccaatttggatgcctttttttttctcttgtctgattgctctagctagaaattccagtcctatgttgaataactgtggtgaaagtgtgcattctttctttgtccccaatcttagaggaaaggcttttattttttcatcattcaatatgatactagctgtgcttctgtcatatatggcttttattatgttgaggtatgttccttctatacccatttttcagggtttttataatgaagggattttcaattttatcagatgttttttsagcatcaattaaaatgatcatatggtttttatccttcattctgttgttataatgtatgacacaaattgatttacatatgttgagccatccttgcatcacccacttggtcatgatgaatgtttttaatgtgtttttaaacttggtttgctagcattttgttgagaatttgtgcatcaatatttatcagagatattggcctattgtttaatttttatatgtatttttgtctggtttaactatcagggtaaagctggccttgtataatgagtttgaaattatt

SEQ ID NO: 662037 - DNA, 575 bp, Homo sapiens
ctataaacaagaataatttgacttctactttccaatttggatgcctttttttttctcttgtctgattgctctagctagaaattccagtcctatgttgaataactgtggtgaaagtgtgcattctttctttgtccccaatcttagaggaaaggcttttattttttcatcattcaatatgatactagctgtgcttctgtcatatatggcttttattatgttgaggtatgttccttctatacccatttttcagggtttttataatgaagggattttcaattttatcagatgttttttcagcatcaattaaaatgatcatatggtttttatccttcattctgttgttataatgtatgacayaaattgatttacatatgttgagccatccttgcatcacccacttggtcatgatgaatgtttttaatgtgtttttaaacttggtttgctagcattttgttgagaatttgtgcatcaatatttatcagagatattggcctattgtttaatttttatatgtatttttgtctggtttaactatcagggtaaagctggccttgtataatgagtttgaaattatt

SEQ ID NO: 662038 - DNA, 589 bp, Homo sapiens
tcatatgttgtttcttttctcttgatgcttttagaatcctttctttatccttgatccttaggaatttgattattaaatgccyggagctagtcatctttgggttaaatctgcttgatgttctataaccttcttgtacttaaatattgatctctttttctaggtttgggatgttttctgatattatctctttgaataaactttccatccctatcttcttctctacttcctttataaggcctatgagtcttagatttgctcttctgaggttattttctagatcctgaaggcatgcttcggtttatttttatttttttcttctcctactgtatattttcaaatagcctgccttcaagctcaccatttttttctgcttgattaattctgccattaaaagactgatgcattctttcttatgccagttatatttttcaactccagaatttctgctttattattttaaattatttcaatttctttgttaaatttatatgatagaattctgaattccttctctgtgttatcttgaatttctttgagtttcctcaaaagagctatttttaattatttctctgaaaggtcacatacctgt

SEQ ID NO: 662039 - DNA, 589 bp, Homo sapiens
tcatatgttgtttcttttctcttgatgcttttagaatcctttctttatccttgatccttaggaatttgattattaaatgcctggagctagtcatctttgggttaaatctgcttgatgttctataaccttcttgtacttaaatattgatctctttttctaggtttgggaygttttctgatattatctctttgaataaactttccatccctatcttcttctctacttcctttataaggcctatgagtcttagatttgctcttctgaggttattttctagatcctgaaggcatgcttcggtttatttttatttttttcttctcctactgtatattttcaaatagcctgccttcaagctcaccatttttttctgcttgattaattctgccattaaaagactgatgcattctttcttatgccagttatatttttcaactccagaatttctgctttattattttaaattatttcaatttctttgttaaatttatatgatagaattctgaattccttctctgtgttatcttgaatttctttgagtttcctcaaaagagctatttttaattatttctctgaaaggtcacatacctgt

SEQ ID NO: 662040 - DNA, 589 bp, Homo sapiens
tcatatgttgtttcttttctcttgatgcttttagaatcctttctttatccttgatccttaggaatttgattattaaatgcctggagctagtcatctttgggttaaatctgcttgatgttctataaccttcttgtacttaaatattgatctctttttctaggtttgggatgttttctgatattatctctttgaataaactttccatccctatcttcttctctacttcctttataaggcctatgagtcttagatttgctcttctgaggttattttctagatcctgaaggcatgcttcrgtttatttttatttttttcttctcctactgtatattttcaaatagcctgccttcaagctcaccatttttttctgcttgattaattctgccattaaaagactgatgcattctttcttatgccagttatatttttcaactccagaatttctgctttattattttaaattatttcaatttctttgttaaatttatatgatagaattctgaattccttctctgtgttatcttgaatttctttgagtttcctcaaaagagctatttttaattatttctctgaaaggtcacatacctgt

SEQ ID NO: 662041 - DNA, 638 bp, Homo sapiens
tctgtatcctatgaaaatatccttcaaaaggaaaggcataacactttctcatacaaacaaaaattgaagaaattggttgcgagtagatcttccttgcaaaacatgttttttaaaaaaaggtcttcgtagagaaggaaaatgatacaagtcagaaacttgggtctacataaaggaaagatgagtatcacagaaggaaataagtgaaaaatgagtctcagccacatgggaccaaagaatctaactcgtgttttggaattcttcctcctccacttcttagatgacttggaactgcagcctttcctcttcaggctgtccctgaaccatgcacctagtcacagtgcttgcgaacttgctcacatccttctgactgtcagctttgccctcacctccacaaccccatgacttcaacctgtccttagctgacattggtttcacccctgccacaatttcaaagataactgtagacctccaaactcacagcagaatcattttatacatgagctgcctgaaatagatgtcttttaaaattatttttggatgtttgcacaatctactcatractgtgatggcctatgacccatttgtggcgacctgtcatctcttgtactacacagtgatcaggaatccccacctctgtg

SEQ ID NO: 662042 - DNA, 514 bp, Homo sapiens
tcctacctacattataatcatgattgaatcctattacagctgtagagccctctttatctctcctttgtgatccagrcatatgggataaatgtacaactctctgttctaagaaataccattttcagagcagttttaggttcacagcaaaactgagaggaagatgtagagatttcccatatactctcacacatgcatagactctcaaattttcaacatcctccaccagagtggtacatttgttacaactgatgaatccacattgacacatcataatcacctaaaatctggagttagctgaagggttcattgttggtattgtacattctatgggtttgcacaattgtacaatgatgtgtatccatcattctagtacatacagtattttcactactctaaaaatcctctatgccctgcctgtccattcctccccttttccccaccccaactccttgtaaccactgatcttttacatctccaaagccatgtagttgtaatcatacagtatataatacat

SEQ ID NO: 662043 - DNA, 487 bp, Homo sapiens
actatttggtactaggcttagtatctgggtgacagaataatctgtacaacaaactcctgtgagtttacctacataacaaacctgcacatgtattcctgaacctaaaataaaattttttttaatgaagtgagaaagctcaggaccttccaattatgagactggtggatttgttaataaacttgacttagtcacttacaatgtatacatgtattaaaacatcatgttaagaccatagatatatccatattttgtcaattaaaaataaataattttaaaaagacatgtatgtaaaaagtgagaatgcaaagatgttacttatgaatcttatctaaagaaaaagataagaatttatagcrcatattcaaattatgttcaatcttttctaagtaagaaatcctgattcagtcccatagaagctgtaataaaagctcagttttattatactctattatgttaataataccctcttgtattatttatggtctca

SEQ ID NO: 662044 - DNA, 581 bp, Homo sapiens
gagcaaacctaaagagaaagcactgtaggaaatatagccaagacatcagtccacaggggcttygctaatttcataaggggcctgggcccttgataagcatgaagggtgaacagttaagagtcttaaactggctcagacagcagtcaaatgtgtaggaaatgtgtataaatggcatttaaaagagaattcttgaatattgtatatgacaatgatttcaatatacagttaagaaaaaaatagaacataaagttgtgtatgcaacatgatccagattttacacacacacacacacacacacacacacacaaatacaagtagccatagggaaaaaaagctagaaaccatctctaggtagcattatggttattttttatgacttctttggcaggttctgtgtcccaaatattctattacaagcacacattacttttgaaatcaataattaaaaagtgcaagcatggaaactaatggaaaaatggcagataggagacaggactaacacacagctcccactagatggacagaacagcatgtggagactcacactgtgaacttttgctccaagaaccagtgcaagaaca

SEQ ID NO: 662045 - DNA, 581 bp, Homo sapiens
gagcaaacctaaagagaaagcactgtaggaaatatagccaagacatcagtccacaggggctttgctaatttcataaggggcctgggcccttgataagcatgaagggtgaacagttaagagtcttaaactggctcagacagcagtcaaatgtgtaggaaatgtgtataaatggcatttaaaagagaattcttgaatattgtatatgacaatgatttcaayatacagttaagaaaaaaatagaacataaagttgtgtatgcaacatgatccagattttacacacacacacacacacacacacacacacaaatacaagtagccatagggaaaaaaagctagaaaccatctctaggtagcattatggttattttttatgacttctttggcaggttctgtgtcccaaatattctattacaagcacacattacttttgaaatcaataattaaaaagtgcaagcatggaaactaatggaaaaatggcagataggagacaggactaacacacagctcccactagatggacagaacagcatgtggagactcacactgtgaacttttgctccaagaaccagtgcaagaaca

SEQ ID NO: 662046 - DNA, 581 bp, Homo sapiens
gagcaaacctaaagagaaagcactgtaggaaatatagccaagacatcagtccacaggggctttgctaatttcataaggggcctgggcccttgataagcatgaagggtgaacagttaagagtcttaaactggctcagacagcagtcaaatgtgtaggaaatgtgtataaatggcatttaaaagagaattcttgaatattgtatatgacaatgatttcaatatacagttaagaaaaaaatagaacataaagttgtgtatgcaacatgatccagattttacacacacacacacacacacacacacacacaaatacaagtagccatagggaaaaaaagctagaaaccatctctaggtagcattatggttattttttatgacttctttggcaggttckgtgtcccaaatattctattacaagcacacattacttttgaaatcaataattaaaaagtgcaagcatggaaactaatggaaaaatggcagataggagacaggactaacacacagctcccactagatggacagaacagcatgtggagactcacactgtgaacttttgctccaagaaccagtgcaagaaca

SEQ ID NO: 662047 - DNA, 501 bp, Homo sapiens
gaaccattatcccatttcaattttattcctacttctcgtcttttgtcctgggaagatattcagggtactgcctaggagaccccacccctgtgagcccttccctctagatgtcctgttttcctgtccctttagcttttccaactgtcctttgcctcattcttggtttcccttcctttcaggttttcggaggcggcggtgattatgggtgtacatatttgtatattttttgtcatcctgagatacttctaatttcattgtatataggtggttttccctggaattcattaattgtttgctttggacatgtggaaagagccttactaataaaattgattttrcttatgaattaaagcccctttttgcacatgtattgtacgactggagtcgttgggtttgggatatttttggtgagtggttggtgaaaagggaaattttttttggaagtgcaaaacatttgtattgttttctttgataatatatttttcccaaaaactaaaaatt

SEQ ID NO: 662048 - DNA, 412 bp, Homo sapiens
atgcaaatgtataacaagcacacaaaatatgctcaacatcatcaatcattatagaaattctaattaaaacctcaatgagatascacttcatacccatgagtgtgactataataaaaaagaaaggcaataataaattgtggctaggatgtggagaaaccaaaactctccaacattgctggtgagaacgtaaaatgcaacagctactttggaaaacagtttgaacttttcttaaaagcttaactgacatacatgtaccaaataactcagccatccacttttgggtatttactcaatagaaaagaaagtatatatccacacaaagacttatataaacaagttcaaacaagcgtttgttcataaacgcttggatattattcataatatccaaaaagtggaaataatcccaatgttt

SEQ ID NO: 662049 - DNA, 412 bp, Homo sapiens
atgcaaatgtataacaagcacacaaaatatgctcaacatcatcaatcattatagaaattctaattaaaacctcaatgagatagcacttcatacccatgagtgtgactataataaaaaagaaaggcaataataaattgtggctaggatgtggagaaaccaaaactctccaacattgctggtgagaacgtaaaatgcaacagctactttggaaaacagtttgaacttttcttaaaagcttaactgacatacatgtaccaaataactcagccatccacttttgggtatttactcaatagaaaagaaagtatatatccacacaaagacttatataaacaagttcaaacaagcgtttrttcataaacgcttggatattattcataatatccaaaaagtggaaataatcccaatgttt

SEQ ID NO: 662050 - DNA, 611 bp, Homo sapiens
gacaaagagaaaatcttaaagaagagaaaaaaattacctatagaggaatggataagaatgaaaatgtaatttcttgtcagaaatctgcatgcaaaaagagagtaaagtgaaatatttaaagtgttgaaaaaaaaatccaccaaactaaaattttgwatacaatgaaattatctctcaaaagtgaagagaaaataaagacttcctcaggggaccctttctattttggagaatggaggctactccagttaaaaaaaaaaaaaaaaagttctcaaacaaacaaaagtgagggaatctgtcaccagcagacctgcctctcaagaaatgctaaaagacgattacataaatcagaaacttgcatctacataaagaaagaagaacatcagagaaggcaaaagatgaagataaaataaatctttttcttaatcctatcagatctaatagataactgtttgttcaaagtaataatagcagccatggattgggtgattagagcacatgaacaagtggttcgatgaattatagcaatgttagtagagaagggagggaggaattaggaatactctgttatattataaggtacctgcattaaccgtgagaaagaatattatttg

SEQ ID NO: 662051 - DNA, 611 bp, Homo sapiens
gacaaagagaaaatcttaaagaagagaaaaaaattacctatagaggaatggataagaatgaaaatgtaatttcttgtcagaaatctgcatgcaaaaagagagtaaagtgaaatatttaaagtgttgaaaaaaaaatccaccaaactaaaattttgaatacaatgaaattatctctcaaaagtgaagagaaaataaagacttcctcaggggaccctttctattttggagaatggaggctactccagttaaaaaaaaaaaaaaaaagttctcaaacaaacaaaagtgagggaatctgtcaccagcagacctgcctctcaagaaatgctaaaagacgattacataaatcagaaacttgmatctacataaagaaagaagaacatcagagaaggcaaaagatgaagataaaataaatctttttcttaatcctatcagatctaatagataactgtttgttcaaagtaataatagcagccatggattgggtgattagagcacatgaacaagtggttcgatgaattatagcaatgttagtagagaagggagggaggaattaggaatactctgttatattataaggtacctgcattaaccgtgagaaagaatattatttg

SEQ ID NO: 662052 - DNA, 520 bp, Homo sapiens
tgtgagtgattataaatgtcaccatggatggcaatagcaatttgcagtagcaaagcaaaatgggggaaaaaaagttgttccttgcgtaaaaaaattttaagataataaaatggacaaaatattaagagaaactttcaataaatacatagtgaacttgatttttaaatttctgttcaataatcaaaatgaattgataaaattagtctcctgaaatcaaaattaaatgtccaaaaattwaaaaaaaattaacagaatctgagcttgtaactttattgagcaataaaatggcttagattcttacacaaaaaagaagaccatttttagatggagatgtaaaagaatctgttgtttcggttatgaaaattttgtcagaaaattatagggaaaagtctagaaaaatttttttaaatgaaggctctccaattggagacaaaacagttgctatagaattcaagacacctctaacaaagtcaaaattcaaatgattcaggccggaagtggtggctcacgcctgtaatcc

SEQ ID NO: 662053 - DNA, 516 bp, Homo sapiens
caggtagttaacaacaatttaagtccttcctagtgtttgctgggataagcgattgaccttcctcaatctaaagcctaaatcatagtcaagtgagcactgcattaatgaatagatgggattatagcatacatgctgtttttttttttttttgtgcaaactatcttttttctttttccttttggcaaacctcctccctccccatctcctttcctgctgctccacccctgccacaacccatgctacaaaactagcatgtatcttcaagtattttatttttttcttcaagtatttcaaaaatgcatgctcatataatcctatctaagcatatatatgtataaaaaaatctatatacattcccacacatagaattttggggccattttttaggaaagcagggttayattatacactcttttcccagatttttcattttcaagaggaaatacagttctacttcatttactgtatggctgtattatgatttactttgtttccggttttctgctacactgaata

SEQ ID NO: 662054 - DNA, 589 bp, Homo sapiens
ctatcacaattttatcaatatcctaaattaatttaacgcattggaaaccgaaggtgagtgtcagatagtgtgccaaggtaacgattgtgtcttctgaattacctggcactgacagtgggtttgagagtggggcatcctaggatcttcaatgagatacgtctttctgtttcatattttaaaggtcgtgaggagttggctgagaaagaaagggacatgaagtatctggttttaaatcatcccaaactcaaatttatctcagcaataaaatwtcacttcagctctgtttctttgttggactggaaagaggcggaaatttaaaaaggcctggagtaaacttatagactgaaaagagaccttctcagatcagaaataatttttccaacgacatttttcaaacatagacgttttttaaaaaatccccttagaaaattgcattatcactggtaaattattaaaataactttttcaaacaaaatacagactgtttttatagatctgtcatataacttcaaatggaataaatagactagataagtgagctttttattttcattctagttatagtggaggcattttttttttattctgg

SEQ ID NO: 662055 - DNA, 589 bp, Homo sapiens
ctatcacaattttatcaatatcctaaattaatttaacgcattggaaaccgaaggtgagtgtcagatagtgtgccaaggtaacgattgtgtcttctgaattacctggcactgacagtgggtttgagagtggggcatcctaggatcttcaatgagatacgtctttctgtttcatattttaaaggtcgtgaggagttggctgagaaagaaagggacatgaagtatctggttttaaatcatcccaaactcaaatttatctcagcaataaaatttcacttcagctctgtttctttgttggactggaaagaggcggaaatttaaaaaggcctggagtaaacttatagactgaaaagagaccttctcagatcagaaataatttttccaacgacatttttcaaacatagaygttttttaaaaaatccccttagaaaattgcattatcactggtaaattattaaaataactttttcaaacaaaatacagactgtttttatagatctgtcatataacttcaaatggaataaatagactagataagtgagctttttattttcattctagttatagtggaggcattttttttttattctgg

SEQ ID NO: 662056 - DNA, 514 bp, Homo sapiens
ccctcaggtcatctcagggaagtycactgtgctttcatcatccagtcatcacacttttgccctggaactttttttagactatacgttttgctagaaaatgttctcctctataagtcaccagactcttttcttcaagtggtttcagtttcagaacttctactttgtccataaagctttccctaatgaattgaaagagaagaattcttgttaggtctatctggtctaaagctgcaactaaattcaaaactctttcactccaaaggcagtgtgatagagtggatagagcatggacttgggcattaatgaagccttgattctgaagtaaaaaatttcatgttggctgtcacactgattgtgtgcaattacttttagtctcagtgtcttcaaacttaatctagagataatgtcatctaccacatatggttaatacccatattaaatgcatgtatacatgtatagtatctgatacttggcactgaacaaatgtagtccctactccattctatagaatgca

SEQ ID NO: 662057 - DNA, 618 bp, Homo sapiens
ccctcaggtcatctcagggaagtccactgtgctttcatcatccagtcatcacacttttgccctggaactttttttagactatacgttttgctagaaaatgttctcctctataagtcaccagactcttttcttcaagtggtttcagtttcagaacttctactttgtccataaagctttccctaatgaattgaaagagaagaattcttgttaggtctatctggtctaaagctgcaactaaattcaaaactctttcactccaaaggcagtgtgatagagtggatagagcatggacttgggcattaatgaagccttgattctgaagtaaaaaatttcatgttggctgtcacactgattgtgtgcaattacttttagtctcagtgtcttcaaacttmatctagagataatgtcatctaccacatatggttaatacccatattaaatgcatgtatacatgtatagtatctgatacttggcactgaacaaatgtagtccctactccattctatagaatgcatatcttttacatatatccaatataatattcaatttgtttacttgattacagagtcagcctggactaggttttgtagaaacatacaaccctaacacaacagtggt

SEQ ID NO: 662058 - DNA, 577 bp, Homo sapiens
agtctttcatcaataagtacgatgttagctgtaagattttttttttttttttttttgaracagggtcttgctctgtcactcaaactgtaatgcagtggcgtgatcactgcggagtgcagcctgaacttcctgggctcaagtgatcctcccacctcagcctcccaagtagctgggatcacaggcacatgccaccatgcctggctaatatttttattttttgtagagatggagtttcactatgttgcccaggctggtcttaaactccttgacccaagcaatcttcccaccttggcctcccaaagtgctgggattacagtcatgagccaccatgcctggccaatattttttttatgccctttataaagttgagaaagttctcctgtattctgtgaaaaaatgttgtgttttcttatatgatttttctgcatctactgattctgcatctactgcatctactgattcaattcttattttagtctattaacatgatggattacatagactttttctgtttttataaaaaaaattgtggtataagaacctaaaattttttgtgatttttgaatgttaaaccaac

SEQ ID NO: 662059 - DNA, 577 bp, Homo sapiens
agtctttcatcaataagtacgatgttagctgtaagattttttttttttttttttttgagacagggtcttgctctgtcactcaaactgtaatgcagtggcgtgatcactgcggagtgcagcctgaacttcctgggctcaagtgatcctcccacctcagcctcccaagtagctgggatcacaggcacatgccaccatgcctggctaatatttttattttttgtagagatggagtttcactatgttgcccaggctggtcttaaactccttgacccaagcaatcttcccaccttggcctcccaaagtkctgggattacagtcatgagccaccatgcctggccaatattttttttatgccctttataaagttgagaaagttctcctgtattctgtgaaaaaatgttgtgttttcttatatgatttttctgcatctactgattctgcatctactgcatctactgattcaattcttattttagtctattaacatgatggattacatagactttttctgtttttataaaaaaaattgtggtataagaacctaaaattttttgtgatttttgaatgttaaaccaac

SEQ ID NO: 662060 - DNA, 591 bp, Homo sapiens
tccttcttcttctattttctgaaaaagttttagtagaattggtactatttcttctctttgtttagttctgttgaccagtaataccacatgagtctggtattttctttgtgggaaggtgctaaactatgaattcaacctctttaatagatatagagctattcaggttatccatatccagtcttgagtaagactggtagtttgtgtgtttaaagcaattttttcattaaaactaagttatcaaatatattggcatacatttttttcataacattcccttattatcattacaatgtcttaggatctgtgtgaaccccccctttttattcctcacattcataatttttgcctgtctctttctctcttgaccaatctggctatacttttatcaawttcagttatctttttaaagaacaaattttttgttttatttatttttgttttttattctacattgatttgcagtcatatcttcatttttcattctttccacttactttgcatttaatttggtctttttccctagttttaggtagaaagttagattattgattttaggcctttcttattttttaacataagcatttattactg

SEQ ID NO: 662061 - DNA, 514 bp, Homo sapiens
gctctagggtgtacagtatacatctttaacttatcacagtctactttcaaaaaatattataccatttcatgtatagtttaagaaccttacaaaggcatccttccaaattccccctcattcctttgtgctattgttctcagatattttgcttctgtgtatgctgtaaaccttataatacagagttgttagttttgcttatagtcgattaccttttaaaaacattttctaaatcagaaaaaacttttatatgtattcacatgtttaccatttctggcacttatttctttgtgtagatccaggaatcctttatttcttgttgtatagggctactggcaattaactttctaagcttttgttatcgttgttcttttttaaaaaattgtggtaagaacacttaacgtaagagctaccctcttaacaaacttttaagtgtacaatacagtatcattaactacagattggacaatagttttatagaacttaacyaacttacagaactgaaattttataattg

SEQ ID NO: 662062 - DNA, 537 bp, Homo sapiens
tagtcccacaactcactaagatcttgtgccatttttttttcagtatcattttctctttgtgcttcatgttggttagtttctatagcagtgtcttcaagttcagttttctttcctggtatggcatgttttacctctagaagttttatttggctctttttaaatcttccatttttctcctcatcaagtttatgtttccctttacatcttgaccatatttataagattgtggtacttgttttaaggttcttgtctatgaattccatgatgtatggcttttctgggtctgtttctgttaattgctttttattctggttatgggtaatatttttctgcatctttwaagacctggtaatttttaattggatacaaaattgtaaattttgctttctttgctactggctttaatgtattcctttaaagattgtagaggttttttgttgttgttgtggttttgtttttcctggcatccagttaaggtacttcagtatcatttaaggttggattttaagttttttttttagaatgggtccagagaaa

SEQ ID NO: 662063 - DNA, 646 bp, Homo sapiens
agacctgatcttgatctctttagctcagcaggcatgtcaggttctttatgttctcctgcctgcgctgtggctaaacactggctctcagtagtaagctaggacatcctaaagtgcatctctttttttcccttctctcagtgatcagtcctatgctgcctattgtcyaacatctgaaaatgattatttcatctattttcatcaagctttcgagttgtttataattgaagagtgattcctattactgctaattctccttggtcaaaggagaagtccctcggttagattttgccccaccattctgctgaaactctttgcatgaaggccaccaatgatctccagattgctaaatctaatattgcctgtatttaagattcacaaaagacagttaactctccttcagaactcataaaactatacagatggcagaagtagaatgacatgtaagagcactgagtaaacctatttagcactttatttttattttattttatttttcattttggacacttcaagaccattgagtactgtttagcactttaaataaaattagtcatgaattcttaaaagtttcatagacagcgtggagcttacctaagtgaaatgcacttgtttggaaatgcacctgggatattgtttttattcaggt

SEQ ID NO: 662064 - DNA, 566 bp, Homo sapiens
gtttgggttctaataagacagagtgaagagattttgtttgcactggtcattcagtagagatcctagaaatgtcacaccttagtagtagagttaagctaactatatggggtaagactamtctagctttgttctaaaagcttaaaagtaagtcctcaaatgaccaagctgatcagcaagaaacttgtctgtctgatcaaacaaaatccaacactcaatgaggaaagtaacaaaatcttaacacacaacagtgtaatattcacaatatctaaaatccaattttaaaatgacggcaagtaaagaagcaggaaaatgttactcagaagaaaaaattggacaatagaaagaaacccagaaataaaggagatgttgggatcagtagaaaggactttaaaatagctattatagggcctggtgctgtggctcatacctataatctcagcactttgagaggccaaggtggaagaatcgcttgaggccaggagttcaagaccagcctgggcaacatagtgaaatcaaaaaattagctggacatagtggcacatgcctatagtcccagctactcagga

SEQ ID NO: 662065 - DNA, 637 bp, Homo sapiens
catgcttaactttgtcttttgagaagtcatcttcctcactacgaacaagaatttaaactcttcaggttcattaatcacactccctgaaatctaaaataaagtcatataaacttggtaaatatactcttacccacagtgttttccttattactacatttttccaaaaggactggaaactatttgttgaaaattagagaagcattgaatatagtggaaataatacagtgtggttccataacaattagttgttacgtttaaaatatgacactccttaaggtaaaatttaataataccaaaagtaccctagaaaactgatgaaatggtaacaaaatttgagattatactttgatagaataatttttgtccacattaaagtttgacatctayggagctagacaagggagtaatacaaagaaactccccaagcagatgagtagatatttgaactatcttgctgtcaaaataactataaaatttcaagatgttgaatgggggataggtagacaattctttaaaggtctgattatttaggcaatgactcctcttgtggtttggaatatgacatgttgacaatcaaaacttagttctactacttactagccatgtgatcttcagcaatttacttaacctttctggg

SEQ ID NO: 662066 - DNA, 558 bp, Homo sapiens
gaagactgttgaggtagaggtgaagccctcccagtgctccacacttttgtgctgtccctggaaacaatttcagccagaaaacactgggacaacatcttcaaagtgctgggggtagaaaacccagaaacattgtgaacctataattctatacctaatgaaaatatctttgcaaaatgaggatgaaataaagacaggcaaagctgaaagaattaatcaacatcacaccagtactataagaaatgttgaaaagaaattctttgtaagaaaataatactagatggaaatatgaacctamacaaaggagtgaagagcaccagaaatagtaactatgtgtgaaatataaaagaattttttttactatttacatctctttaaaagattactgactgtgtaagacaaaaataataaacatttattgtggatatatttagaagtaaaatataagacaatagcacaaaaaccagaagagaaaataataaaagtgtgcagttgtaaggatcttctattatacatgaggtggtatagtataatttgaaagtagactgtgatgctaaatta

SEQ ID NO: 662067 - DNA, 489 bp, Homo sapiens
tggggacaccctccgcccctacagcaccgtcggcttctggaaagccgacagtcctcctttctgggaatctcctgcatcaactcgtgcccaatttctggcctcccctctcggagaaatcagcattctgaggatgcccctggcgctgaggtgcttggaagcttccgaggtttgggagcaagtacggttcaccccgagatcaccgcgaagctttgcctccgccaaagtaccctacccatccctaggccccaacggctgagaggagtgggggagattttgcacactgcaccccccttcctcctctccccacccccacttcgccatgtaaacactaggactttctcgagagccttggagagccgctctagtggcttcgggccctgaaaccccaggctgggcttttttgatgtttagcatcccaaagckgctccccaccctggccccagcctgggaactgggagctgtgggcaggagaggaaggaaagcagctct

SEQ ID NO: 662068 - DNA, 385 bp, Homo sapiens
cgacctgggtgcagtaaactttggaagtgctgcattgtatcatacctacaactcacgcaatagataaaactcagacatctctctacacatctacatagtccattggcttcgtactgaaatcaaacagaaraagtttttggaaatatttaacaaaaagccaacccactcatggccatcatttagcactgggtaggggtaaagagaaagagaaaccctttgaggtatgtggtagcatacaaacatgttcacagtaaccttcctgtattaaccattttctaacaattacaatgccacatcaacacagttagttgttgaaaattctcaacatggctaaatacttagattgcattggtggtgtgcctgtgaaagctatttgggggttgtg

SEQ ID NO: 662069 - DNA, 605 bp, Homo sapiens
aacttttaaataacaggtgctctcgtggtcacttgcctcaaagaagatattttaaaaaaattattgtgtttaattccgtaagaataaagtcagcctacaacctatctctatctgtattcctgactaaaaaaatttgaggaggaaacactttgctgagacttagtattatgtaaatgcagagccatagaaactggtttaagcagggagccctctcttccaatagtttctgaggtgcagtctgcttaaaaacagacccacctctttaggtcattcttatagctagttactcttaactttattaagaatctttaagaattcaagggaataagtgagagagcctctgttttgagattgggtggtggggaggtgggaaaggagttttagagaggaaggggagcaaggccgtggtgtaataatctctttgagatttaccagaagtcttggtctcttgattgaggattcctgcttcaaaccaattctgtgtgtagtttagtgcagtttttcatttgtgaataggaactgtatcaaaaccctagtgtgaccatgacaattgggtaatcacacacaaggcatmtttgctaatggagagattctgtaaatatgtt

SEQ ID NO: 662070 - DNA, 562 bp, Homo sapiens
ctctttgtgggagcacagccttagtcaaattcatcctggtcctaaatggtcagcagaggtctaaccaagaagccacattcagctgcttgccagtggggtggtcagagccccagcaagatgcccactcaggagccagcttgtgtactgggcaagaggagggcagcagtttcctgtgacagaagcactggcagccataaggtataaactgtggcccacttcctttctctccttttcctttaggctgataaggtccttcctttaaagaggaaaaaaccttaggggaaagtttaactagcactctcatcaccaccaatccatttcagagacctaggctgtcagatttttgggggattttttttgttgttcacaagataagctggaaaagataaatgtcaatctcctttgtggtctaaagatgaattcttacaatttctgacaraagctgaacccaaggcctctctaccagccactgtgagaacagttaagatctcccatcctggatgaaagtacttcaaacccatcacccatcaccaacatcacaaggcagattcacactcagcaa

SEQ ID NO: 662071 - DNA, 595 bp, Homo sapiens
tttttgcaatttttcagtctgtaaggaccagagaagaagggtatatacttgtacagtcaccgactgaaatgcagcacccgtggatcccatgttatattataccaaaaaacctatcccagctgcacacaacagacatgaccagggtagattcaaaggaaaagaaacaaggcttgaaactcaacactgcagcacttagcatggtagggcacagaaatctctaacagagggtgcatctgtctataagacatagacccctgcaggatagccagtactgagatcagtttcccaagcaggacttcccctaaaccagaagaaacaatctcaaacacccattatcgtaagtccagcagatactacctctttaataaccatgtttaatgcaaaggactttctacagaatctgagatytggcccatcagatgaagagcagaaactaggctgccaatgaaatgaaaataaaatgaaactataattcagagaagataagcacagatgcagccagagggcactacagttagttgtcaccatttcttacagagtagtagaccagtaccttaagtatataagtgtatgactgaggctgggaagtggtggg

SEQ ID NO: 662072 - DNA, 501 bp, Homo sapiens
taagcttcattatgaagggaatatttttatgtcatgtttaaagatctcctgtaatgaaaatcctatagtgatgtaaaagagatttatgattctcagtagcatctggggtatgcccattaaagagaaaataagcactcacattttgtgctgtagtctcagacctgggtaatcaaagcatttttatctccaaatagtatcttgagtcctgttgaaagtagtagaagttggtggcatcttttggggmaaaaaatgcatatctccctggaaaactccttttatctgggccaaatcaatgcatgtttatgctttatgtatataatgataattcatgttcataatgataactccaggtcactgcatgattcttaaaacacttttagatttagaaaaaaaacctaaacaaagaaaaacacacatttagtataactgaataaataacatttgacctattgttctaaaacttgggcattaatgtttggtaggtatactgatttactagcc

SEQ ID NO: 662073 - DNA, 634 bp, Homo sapiens
ctgcttgcgtgggacctgcttgacagaggaaggagaggcaggcagggagggtgagaagggaacagtggagaagctgctgaatgtaaataatgagaagggctgttacctctttaactcctggccctgtgttattgaaatcarccaagttaaagcctagagatttagaacatagaccccaaaggaggcaaaagaagaaaaaaactcacagcagggttctacaattctaacccccatggttaaggggaaggcaattccattttccttaggctatgtgtctttgggcatattacttaatctccctcattaaatcttggttctcttagctgtaaagtcaattctagtgtttctcaaactgtcttgtgttaaagaaccagattttcaaaaaaatttccagtctgtcatagagtgatacttttataaaacacaataaaaataaattcctagaagtgtttaaatgttttattcttaaatttgacagacataaaattactctctcaaattgcttttgtttctagacatttactctcaattactacagtatttgattgcagaccagtaacagtttgtggattggtaccagtatgtggactagactttgagttgtcattggcacagacactaatggcattcacct

SEQ ID NO: 662074 - DNA, 606 bp, Homo sapiens
gatatcacacctttcagcccttacaaaactaaatgggaattcagaaaacaatatttaaaaaaatataggaaaactcactggggagtttcaacatgccactcttggacagagagaatgacctccatgtttttagagatttgaaaagctagtgtctgggagtttggtgaaaccaggaaggaattgtgattagcagcaagatgaggatcaatgaacaccaagcaagaaaaggagtggtggcttagtaaatggaaacaacactgaggcacaggaagaagagagatgtggatagaaaaatagaaaagggggaaggcaaaagggacaaaaatgtgtccatgagaatgtaaaggagaaacatttctttttttcacgcattgctaggttcataactgagacccttataacaaaagatagattaacgagagaaaagcataacaaatttatttaatataagttataggtgacatggaatctttagaaatggaggcccaaagaaagagagaaaattgtgtatttttatgccaagtttggtaaagaagttgtggggaaatatgattagacmaaagggggtataatccaatggtaataaactggggggaacttagcaag

SEQ ID NO: 662075 - DNA, 463 bp, Homo sapiens
acctgtttctttcttaacaccaaaaattagtggcaatctctctcaycttcaagtgcagtccatagaagtctaaagtgtgcaacaagataattattactgagataatctgtattttccccgtgccacagtatagtaatgtgataggactttacaggtgttcctgaaaggcctgtggggttgggactgatgagaactgagagaaacactcacataacccaatgaaagaggagtccaaatacagttcttatacaatcaaacaatacagaaaagtacttttgtcatcatgtgtaccccatccccctcttttaggtcatttgaaacaatagttagaaacatatgtgattccacaccagaccttctaccttgtgattttagttttttcaggcacagaggagaaatttctttagccgaactgcttgctcagtgtacattaaagaactggtgttcacagtatagctgatag

SEQ ID NO: 662076 - DNA, 463 bp, Homo sapiens
acctgtttctttcttaacaccaaaaattagtggcaatctctctcaccttcaagtgcagtccatagaagtctaaagtgtgcaacaagataattattactgagataatctgtattttccccgtgccacagtatagtaatgtgataggactttacaggtgttcctgaaaggcctgtggggttgggactgatgagaactgagagaaacactcacataacccaatgaaagaggagtccaaatacagttcttatacaatcaaacaatacagaaaagtacttttgtcatcatgtgtaccccatccccctcttttargtcatttgaaacaatagttagaaacatatgtgattccacaccagaccttctaccttgtgattttagttttttcaggcacagaggagaaatttctttagccgaactgcttgctcagtgtacattaaagaactggtgttcacagtatagctgatag

SEQ ID NO: 662077 - DNA, 463 bp, Homo sapiens
acctgtttctttcttaacaccaaaaattagtggcaatctctctcaccttcaagtgcagtccatagaagtctaaagtgtgcaacaagataattattactgagataatctgtattttccccgtgccacagtatagtaatgtgataggactttacaggtgttcctgaaaggcctgtggggttgggactgatgagaactgagagaaacactcacataacccaatgaaagaggagtccaaatacagttcttatacaatcaaacaatacagaaaagtacttttgtcatcatgtgtaccccatccccctcttttaggtcatttgaaacaatagttagaaacatatgtgattccacaccagaccttctaccttgtgattttagttttttcargcacagaggagaaatttctttagccgaactgcttgctcagtgtacattaaagaactggtgttcacagtatagctgatag

SEQ ID NO: 662078 - DNA, 593 bp, Homo sapiens
aactaaaaaaaattgaccattaattgtaaactcgcaagcagatgcaataactaactaaggtcagcccacagaatgtagaccatatagaaaactttcacttaacaatgaggacacattccaagaaatgcatcgttaggcagttttgtcactgtgggaacatcatagcatgcacacacacaaacatagatgataatagcctactacatacctagactatatgggatagcctattgctcctaggcttgcatattactctacttaatactgtaggccattgtaacataatgataaatatttgtctatctaagcatagaaaatgtacagtaaaaatatagcattataatcttatgggaccatcagggtatatgtaatctgtgattggatgaaactttgttatgtggcacacgactatatcaaagaaatagtcttaaaagagtgcctatatttttttctgtcatcccatcacaatgataccaaataattaaarataatgtccactttaaagcaataattctaacaactcagtgaacttcatagtcttgcattctttaatagaaatagagatctcagcatttataattaacaagacttgg

SEQ ID NO: 662079 - DNA, 592 bp, Homo sapiens
ctctgcatgccctgaaacaaaataggagcacgctgcctagtcagttgtggagccacaagtctgaagttgggatggaactctgtatcgatattaagattcagctagtgccatgcatggttctttgtgttcgtggaatagtaaataacagcgcaatgtaagaaaaatgatttttaaaaagaaaacaaaagaacagtgacccaggatagtgtaatggttaaaagtacagctctgagtcagaagaaagcagagtttgaaccctagcttctccgcttactggctgagtgaccctggacaaatggcttaacctccctaagcatcatgaggtcaaactcataggccgttgaaaggattaagctggataatgtttgttaagcacttagcccaaagtgagcactccatcagtggtagccgaaaatgtccrctgcctggcagcaaggtgcactgggcacatggcaagggcacgatacatagttcttgttgacttagtgaattagatcactagtaaccattactcagggaattcaggtctccaggttgcatgctgtacaagctctctctcttcttcactttttatgtatgtaggtgcacagag

SEQ ID NO: 662080 - DNA, 578 bp, Homo sapiens
ctatttttcttaaacttcacacgggacaagccataacacaacagtttgtaaacaaaaatctgactaaattttttagattgtttctttttctaaaatgttttttttcaattgctgccctttcaaaatagcagaggctattaaataattcctgttcacaggatttatgactaaaatgcctaattttaartttcttctgtccttttagatggctgttataacatattctcagtgtaaaaactcaaaaataatagagagcattacagatgacaaccatgggtttacttgtgataaaatagtcactcttcgttcagaaacaatgaagaccaaaccaaatcagcaagctcccatcagcatccacatatcttaggtaatttctgcaacatttttaaacagaggaagataaatgacattgatcatcacatttcaaatgttatcaacccaaaacaaatcaatctgcattgcatcaggtatcttaacttccatgaactagagaatattagggttgccattataaatctcatcttactttgcttggtgaaaaaaccatgaattataagcactatatagataccatggaa

SEQ ID NO: 662081 - DNA, 622 bp, Homo sapiens
acaacagtttgtaaacaaaaatctgactaaattttttagattgtttctttttctaaaatgttttttttcaattgctgccctttcaaaatagcagaggctattaaataattcctgttcacaggatttatgactaaaatgcctaattttaaatttcttctgtccttttagatggctgttataacatattctcrgtgtaaaaactcaaaaataatagagagcattacagatgacaaccatgggtttacttgtgataaaatagtcactcttcgttcagaaacaatgaagaccaaaccaaatcagcaagctcccatcagcatccacatatcttaggtaatttctgcaacatttttaaacagaggaagataaatgacattgatcatcacatttcaaatgttatcaacccaaaacaaatcaatctgcattgcatcaggtatcttaacttccatgaactagagaatattagggttgccattataaatctcatcttactttgcttggtgaaaaaaccatgaattataagcactatatagataccatggaaggcagaatagcttcagtattatgggattctagcttctgcaagtattcatcagttacaacctgaaatttctgtggtttgtgt

SEQ ID NO: 662082 - DNA, 618 bp, Homo sapiens
aacactggaatcccagccaacagtgaactgaaactgacctatactgtcctaatttgttaaaccataattagacctctctagaatattcttttaaaacttagctatggtaggggataaaagtaatatctttttcctcacccaccacaaggcttatggctgagaggcctctataaccaaagatgggttaatgagagaaaagcatacacrtttatttaatataagcttcatgtggtacaagcgccttcagaaacgaagacccaaagaaacaggaaacccggtgcatttttatggatagtcatgcaaaagtgtgattggaggatgaaggataagacctaataataataataatctggggggaattatcaaggcctgttcagattcttttatgtgcctctgtgtcttcaggcatttatttcctcttggtatagggaggacccctttggaatgggggtctcatgacctacttcaggagaagatcagctaggttttatggcttgcactgggggagaagagaggagggggagtccagtttctatgctacatttcaggggagggcggacaggaggtcagagagactgtcctgcttctgctgttttcctaaatgccaaggtgctagat

SEQ ID NO: 662083 - DNA, 618 bp, Homo sapiens
aacactggaatcccagccaacagtgaactgaaactgacctatactgtcctaatttgttaaaccataattagacctctctagaatattcttttaaaacttagctatggtaggggataaaagtaatatctttttcctcacccaccacaaggcttatggctgagaggcctctataaccaaagatgggttaatgagagaaaagcatacacgtttatttaatataagcttcatgtgrtacaagcgccttcagaaacgaagacccaaagaaacaggaaacccggtgcatttttatggatagtcatgcaaaagtgtgattggaggatgaaggataagacctaataataataataatctggggggaattatcaaggcctgttcagattcttttatgtgcctctgtgtcttcaggcatttatttcctcttggtatagggaggacccctttggaatgggggtctcatgacctacttcaggagaagatcagctaggttttatggcttgcactgggggagaagagaggagggggagtccagtttctatgctacatttcaggggagggcggacaggaggtcagagagactgtcctgcttctgctgttttcctaaatgccaaggtgctagat

SEQ ID NO: 662084 - DNA, 604 bp, Homo sapiens
cttatggctgagaggcctctataaccaaagatgggttaatgagagaaaagcatacacgtttatttaatataagcttcatgtggtacaagcgccttcagaaacgaagacccaaagaaacaggaaacccggtgcatttttatggatagtcatgcaaaagtgtgattggaggatgaaggataagacctaataataataataatctggggggaattatcaaggcctgttcagattcttttatgtgcctctgtgtcttcaggcatttatttcctcttggtatagggaggacccctttggaatgggggtctcatgacctacttcaggagaagatcagctaggttttatggcttgcactgggggagaagagaggagggggagtccagtttctatgctacatttcaggggagggcggacaggaggtcagagagactgtcctgcttctgctgttttcctaaatgccaaggtgctagattttggggtaccctatccygaaccctgtcactacacagagaatcaaagtttctcaaagcctgtttgaatgttgtcaagtatatacttacatgtatacatcataatataatatacacacagatatacatacatattt

SEQ ID NO: 662085 - DNA, 611 bp, Homo sapiens
tctattttctgtgaaaatcaagcagatcaactcagttcttatcataccatgagcaagtaccaggatgaaatttggctgtgtgtggacaggtatcaggatgaactcttcatccttattttatctgttttccccccatatcaacagaaagcttatctagtttagcaacaatgcaccttctactaatcggtaaatattatgtataaattacaagcattctgagtttattctgattagtcatgtttttagaaaatgtgttatagattcacagggctggaaagaactcagaattctggtattttgaggcaaagattccagagacagtgcctataaaaattgaatacatacactacctatatcaggagtggtggtggttggaagttaataattaaatrttcagatacttgggaccctattgagaccttctcaatcagaatctctgcaagtagaacatgggaatttgcattttaaaataagcaccttaggtgagaactgctgctattgactatgtcacccacctgattctgtttaccagcagtggcctccagaatgaatgagaagcagggcctttgcccatttctgaaaaggtggtgctgaaaaggcggtgctgtttg

SEQ ID NO: 662086 - DNA, 538 bp, Homo sapiens
gtgtcatcacttaacatactgtatcatttatatatttatcttgcttattatgtcttccctacaagaatgccagctccgtgagggtagagatttttgtcttatcagtgcctagaacagtttggtaaatacttgtcaaatgaatgactgactaactgagatattttattcatgtggattaacctttataaaacaagtaaaatatttaaatggtacaagattacctgctgcatttatattgttcggagascaaggagaacaaataagggacaagtatttttatccttggaaggcagttgttggaatttcttaggaaaaaaatgtcatcttccatgtaccaaatatatgtaggcttctagaaagagacagagtttcagatactgcttcaaacatgggaataatccattataaccatcttctttgagtttgagaacactaattttggcaaaaagtttacaaattagagtagactgacgggacaggcagtatagtgtagtggctaagagagaagctccaaagtgagaaaaccagaatttgtatt

SEQ ID NO: 662087 - DNA, 484 bp, Homo sapiens
ctttcactttatatccaacaaggtatctcccttccactttcagaagttgccttaaaacttgttttttcttttttctagaaagtccattatgattagtggctgtggtcagaagttatccagcctgtgatagattgaatttctcactattcttcactctcctgcagggagattatacatccatacctttgccatggcctcatggtgggtgaagaatactttcctatcctttgactttgggggtttggcatgagacttgctttggccaaygagatgttagcagacataccttagcagaggactgaaatgtgcttaagtagatgggcttgccctgttagacatcaccatgagaagagtttccccaggtacctgctaccctttcagcctggatctcagaatgaacacacatggaacagacctgagcccaatctgcagcagagtcgtgcccagtcagatcctcaatctgaagcaaagttgcctacagagc

SEQ ID NO: 662088 - DNA, 565 bp, Homo sapiens
gattgtcttgcatcttttacacctgcagcaaaattctccaactctaagatcactgttgacagcagaaatggacttctatgtagcactttctgtgttatttcgtttaatcaaatgcaaatgtcaactctgtgaggtaaatattgctagtttcatttaacacaccaggaggtgaatgttcagtaaaggtcacatggtgataaaagcaaaaccaggactgccatactggtcttcygaccacagaaatctttgccctgctctgttctttttttctcataacatggaaaggggagcaagcatttcagaagacccaaactgctggagagagtgaaactatgcatcagggaaaatagcatttttgtttaagaactcaaataatgggaaataaaagcaatacatacttgaatgtgtccatttatgcattcttcttggtctctatacaagaagtgctgtttgagatgaaagttctctgtactcaaatatagagaaccaaaaccagaatgtttcaactctcaatcaagaacttgcagacatgaggcaggagaatcatttgaacccgggaggtgga

SEQ ID NO: 662089 - DNA, 631 bp, Homo sapiens
agcagtcatactgcagtagggccaccccaatgacctcattttaacttaagtacctctttaaataccccatctccaaggaaggtcatattctgagatactagggcttagggcttcaacatatgacttttttgggtgattccagtcaccctataacgatgcattgctaagtgaccgayagtaggacacagagctgtgcagactcttaaagagttggaatgggttcctgacacgtctgatttaactgtcagatagcttgaaaagtaaaagtgagaggcaatgtgggctgtttccactgggacctgatcaaggagggagagcttgggcccagaattgccatcgggctgatcctggggaaaggcaggtacccctgtggtagagacaaactcatcagcttaacttgcgtctatccagatccacttgtggctctctgactttccagtcatgactgggaccaaggtccgtaacgtgtgcaagcctcccctggagaaatgggaagaagaattccctgcgagactgtcctgccagtcctgaagtctgctgcaaggcaagattgtgaggacgctcggtaaattgccaagctctttctgtccccagcaagccgacagagctctgaacatcctcgctcacctgc

SEQ ID NO: 662090 - DNA, 304 bp, Homo sapiens
atgtccccataacaataaattcctgaaaaggctggggtgggaagatcccagatggatgtgacttcctggggctaccacrtctgagcctggtgggatatgagcactgtggacacctctttttatgcagggtctggcctggagtgcagggtctgtgaagcgagaggaccctgccaggacccggcctctgagtggctcagtgggaggaggggcgccctgggtgctgggggtgcctggtgcaggcccccacttggccttctcagtccctctcagagtttgccagaaagtgacaccatagtagactcaa

SEQ ID NO: 662091 - DNA, 462 bp, Homo sapiens
tttctattaaaaaaaaaacaaagagaaagtgtgtgtggtggctcactcctgtactcccagcactttgggatgccaaggcaggcggattacttgaggccagaagttcgagaccagcctggccaacatggtgaaaccttgtctctacaacaaatacaaaaattagccaggcttagtggcatgcacctgtagtccyagctactcaggaggctgaggcaggagattctcttgaacctgggaggtggaggttgcagtgagctgagatctgcattccagccttggttacagagagagactctgtctcaaaaaacaaacaaacaaaaagagaaacatgaatttaaacatcccttatacactagactataacttcacctgactttaacttttaaatgaaaagttattatgtttagtatagtcaattctttgccttgaagattgactggtaaattttttttttacacttac

SEQ ID NO: 662092 - DNA, 550 bp, Homo sapiens
ggtgggtcttgggcagtccagtctgaggctcaaagaggttttgtgcattgttgaaaagcaggaaacagggaaaaggaaaacatccttggttctgggtttacaatggacttcctagctgcggtagttggatctcagaagaggaggtagaggtctgaagggagaggctgcttgcacagtcaggcgggagaactcaagcagggtggaatgagatagagaagacagttgaagaagaagaaccagggctcagatttctagacggaggatgttcctgtaatgccccactcaagtgggactttggaatggctggaatggtcatccagcaaataaacgtactgcacattgtttgtgctttaatgtacccacatgcctgccttttgtcaggttcaaaacaccagatccaggagataagtaaagccaagaccagcgctgcccaggatggagacacaggtgcctacwtctccagtggtggctgcggcgaaggcagaagtgagagtgccccctacagaatacatcagggagaggcagcctggggtatcagtatgagcctagg

SEQ ID NO: 662093 - DNA, 554 bp, Homo sapiens
gccaccatgcccagctgtgttttccttcaatatataacacatgtatgtgcttgcttttggccacacttttaaagtaatgctgatagctatgaatcagaaatctgtttccaaaaatttgttgttgctgtcgttttgagatattctggctaaatgtttgatagttgtgtgttttttttttttttttttttttttttttctgtatggaagctatatttacatttcarattaggtgcagtggctcatgcctgcaatctaggcactttgggaggctgagtgagaggactgtttaaggccaggagtttgagaccagcctggtcaacatagtgagaccttgtctctactaaaaataaaaattagctgggtgtggtggcagcacctgcagtcccagctacttgggaggctgaggtgagaggagcccttgaacctaggaggtcaaaacttcagtgagccataactgtgtcactgcactccagcctgagtgacagagtgagaccctgtctctaaaaaataaaaaattgaaaaagttatatttgcatttcaaaacctattgatcc

SEQ ID NO: 662094 - DNA, 554 bp, Homo sapiens
gccaccatgcccagctgtgttttccttcaatatataacacatgtatgtgcttgcttttggccacacttttaaagtaatgctgatagctatgaatcagaaatctgtttccaaaaatttgttgttgctgtcgttttgagatattctggctaaatgtttgatagttgtgtgttttttttttttttttttttttttttttctgtatggaagctatatttacatttcagattaggtgcagtggctcatgcctgcaatctaggcactttgggaggctgagtgaraggactgtttaaggccaggagtttgagaccagcctggtcaacatagtgagaccttgtctctactaaaaataaaaattagctgggtgtggtggcagcacctgcagtcccagctacttgggaggctgaggtgagaggagcccttgaacctaggaggtcaaaacttcagtgagccataactgtgtcactgcactccagcctgagtgacagagtgagaccctgtctctaaaaaataaaaaattgaaaaagttatatttgcatttcaaaacctattgatcc

SEQ ID NO: 662095 - DNA, 554 bp, Homo sapiens
gccaccatgcccagctgtgttttccttcaatatataacacatgtatgtgcttgcttttggccacacttttaaagtaatgctgatagctatgaatcagaaatctgtttccaaaaatttgttgttgctgtcgttttgagatattctggctaaatgtttgatagttgtgtgttttttttttttttttttttttttttttctgtatggaagctatatttacatttcagattaggtgcagtggctcatgcctgcaatctaggcactttgggaggctgagtgagaggactgtttaaggccaggagtttgaraccagcctggtcaacatagtgagaccttgtctctactaaaaataaaaattagctgggtgtggtggcagcacctgcagtcccagctacttgggaggctgaggtgagaggagcccttgaacctaggaggtcaaaacttcagtgagccataactgtgtcactgcactccagcctgagtgacagagtgagaccctgtctctaaaaaataaaaaattgaaaaagttatatttgcatttcaaaacctattgatcc

SEQ ID NO: 662096 - DNA, 538 bp, Homo sapiens
aaggtataaaatccactggtaaaattaaatacatggacaaacccagaatattctaatattgtaaatgtggtgtgcaattcatgcataactctagtatgaaacctaaagagcaaatctatcaaaaacaatatagctacagcagcctactaagagataggcagtataaaaatatgtaaattgagacaataaaaagacaaaatgtgaggaggatggagttcaagtgtagaatttttttcatttttgtttctattattttctttgtgatctagaactttgtgataagttgccacctctgtaaaatgacttgttatatttataagatgttttctgtaagcctcatagtaaccacaatgcaaaaacctataatagagtcactgcaaataaaaagcaatgaattaaaacatactrccagagaaaaccacttaaccacaaaggaagacagtaagaaagagagaaaggaagagaggagttacaaaacaaccaaaaaacaagcaacaaaatggtagtggtaagttcttacttatcaaaataacactga

SEQ ID NO: 662097 - DNA, 439 bp, Homo sapiens
ggggatatcacaatttcttttgttttttaagaggtagaaaagacataactcaattacgtctttattagcagcatgagaacggactaacacaatttctttttagcggtcaataatatttcattgtctggatacaccacagtttgtttatttaaaaatgagaaatttttcatgataaagaattatgttaaattttagaaaatgagaaaatctgagaaagaaggsaaaaaacattcgcactgttgtgcaaccatcaccaggatccatcttgcagactgaactctgtatccattaaacaaaagttcccacaggcttcactctaggtgtacattctgcgggtttggacacatgcataatgacttgtagccaccattacagtatcatacagagtagtttcactgccttaaaaatcctcctattcattcctccttcctcctgccca

SEQ ID NO: 662098 - DNA, 565 bp, Homo sapiens
tgctggtgacagaggcctgtcccctcctattctcccaagagtgagctgccagcctgcctgagtgctctgaaacagaggagctgcaattcaaacttcacccagttctctgtttttttctctcaaaagggttgaaaatatgtgaagtaaccctcagctctgcaaaagatattgtgtttcactatttcctttaactgctctctggatctggaaccccattgtagggagaaagagcagggcatrgggaagaggtgccttgaagctgccacttagagacagctcagattccactggtttaaatcactttccttcagattcctttggaaaagtggattcgtctttcaggctgtcttcctggcagcccccttacttcctttagtggtagaactcctgagctttagccaggcccatggcttcccaattaaaggctacatttcccagcctcacttgaagccaggtacagccatgtgactcagctctggccaataggataatatccatacagtctctatgttgctgcctggaaagtgccatggtgtggagccatcttagaccagatgaagccaac

SEQ ID NO: 662099 - DNA, 565 bp, Homo sapiens
tgctggtgacagaggcctgtcccctcctattctcccaagagtgagctgccagcctgcctgagtgctctgaaacagaggagctgcaattcaaacttcacccagttctctgtttttttctctcaaaagggttgaaaatatgtgaagtaaccctcagctctgcaaaagatattgtgtttcactatttcctttaactgctctctggatctggaaccccattgtagggagaaagagcagggcatggggaagaggtgmcttgaagctgccacttagagacagctcagattccactggtttaaatcactttccttcagattcctttggaaaagtggattcgtctttcaggctgtcttcctggcagcccccttacttcctttagtggtagaactcctgagctttagccaggcccatggcttcccaattaaaggctacatttcccagcctcacttgaagccaggtacagccatgtgactcagctctggccaataggataatatccatacagtctctatgttgctgcctggaaagtgccatggtgtggagccatcttagaccagatgaagccaac

SEQ ID NO: 662100 - DNA, 598 bp, Homo sapiens
tatcaaaccttttattaagtgtagaatactgtgttaagcattgcatgtgyctcacttcattttaatctcacatgcataaggaaggtactattattctctggtaggtggtattgttgttcctaactattaagttgcttttccagttaaggattacacatcatcgcccgttgccatgcgactgcagtgcatcctgtaggaggagcattctttccagcctcactgatgtcaggcttgattgtatgatcttcttttggcagggggtctttctgagcagtagtattaacagttattacgtatttcaaccagagaaatttttcctttcatgagaatagtctgtgtcagatggggctgctctttcagccttggtcctggaagaaaaaggggatgtgaagcagctcacatttgagatgtcacatgagtgacatataaacttttgctgttataagtcactgagatttaggattgttttttacacagccctacctaataaaatcatactactattaatatattaaaccattttacagatgaagacactgagattcagtgaggtttagttacttgcccatggccacatagaagcaaaagtagaacaact

SEQ ID NO: 662101 - DNA, 598 bp, Homo sapiens
tatcaaaccttttattaagtgtagaatactgtgttaagcattgcatgtgcctcacttcattttaatctcacatgcataaggaaggtactattattctctggtaggtggtattgttgttcctaactattaagttgcttttccagttaaggattacacatcatcgccygttgccatgcgactgcagtgcatcctgtaggaggagcattctttccagcctcactgatgtcaggcttgattgtatgatcttcttttggcagggggtctttctgagcagtagtattaacagttattacgtatttcaaccagagaaatttttcctttcatgagaatagtctgtgtcagatggggctgctctttcagccttggtcctggaagaaaaaggggatgtgaagcagctcacatttgagatgtcacatgagtgacatataaacttttgctgttataagtcactgagatttaggattgttttttacacagccctacctaataaaatcatactactattaatatattaaaccattttacagatgaagacactgagattcagtgaggtttagttacttgcccatggccacatagaagcaaaagtagaacaact

SEQ ID NO: 662102 - DNA, 628 bp, Homo sapiens
tactattaatatattaaaccattttacagatgaagacactgagattcagtgaggtttagttacttgcccatggccacatagaagcaaaagtagaacaactgggattcaaacttgggwcagtgtgactctagaaacagtgttttaattgtcgaagggatgagaatgaaataagttgaggaggaaccagtcttccactgtattggacgaaacctgacctgagaggaagaaaagcaggagctgtaattactcccaatatttaatctggagacaaaactttgagtctaagggcacaggcttcggagtaatgtggactccttgttaggactgatgatcttagacaaattacttaacctatttttttgggttttttttgtttgtttgtttggttggttttttgaaatggagtcttgctctgtcgcccatcctagagtgcagtggcgcgatctcggctcactgcaacctctgccttccaggttcaagtgtttctcctgcctcatccccctgagtagctgggactagaggcgtgtgccatgatgcctggctaattttttgtatttttactagagacggggtttcaccatgttggccaggctagtctcaaactcctgacctcaagtaatctgcctga

SEQ ID NO: 662103 - DNA, 628 bp, Homo sapiens
tactattaatatattaaaccattttacagatgaagacactgagattcagtgaggtttagttacttgcccatggccacatagaagcaaaagtagaacaactgggattcaaacttgggacagtgtgactctagaaacagtgttttaattgtcgaagggatgagaatgaaataagttgaggaggaaccagtcttccactgtattggacgaaacctgacctgagaggaagaaaagcaggagctgtaattactcccaatatttaatctggagacaaaactttgagtctaagggyacaggcttcggagtaatgtggactccttgttaggactgatgatcttagacaaattacttaacctatttttttgggttttttttgtttgtttgtttggttggttttttgaaatggagtcttgctctgtcgcccatcctagagtgcagtggcgcgatctcggctcactgcaacctctgccttccaggttcaagtgtttctcctgcctcatccccctgagtagctgggactagaggcgtgtgccatgatgcctggctaattttttgtatttttactagagacggggtttcaccatgttggccaggctagtctcaaactcctgacctcaagtaatctgcctga

SEQ ID NO: 662104 - DNA, 490 bp, Homo sapiens
cgtgtgccatgatgcctggctaattttttgtatttttactagagacggggtttcaccatgttggccaggctagtctcaaactcctgacctcaagtaatctgcctgatcagccacccaaagtgctgaggttacaggcatgagccactgtgcccagcccttaacctgtttgagtcttactttcctcaacttgaagatgaagactaggggccatgttgtaggcttgtcattagggccaaattggcctgatcctgtgcacatartgggtcctgagtatttgaattattgaatgtggattttagacttaattcagatattccaaaaaatggcaatgggcaggccccaaaaaagagtatttcaagaattcccacatataccccctaagaggtcagcatatagatgcctgccatgcatacattattggggccagggtggattagccagagaaacagcacaacagagagaggctacaaccttgcccaatgggtcagaa

SEQ ID NO: 662105 - DNA, 567 bp, Homo sapiens
gtgattctctagtttctagctgtgggaacttgagcaaaccccttctcttcccaggcatcatttattaaatggagatattgaactagaattagggatcacaagtctgcagcctcaattaattgctttcgttttgtttgttttgttttaaattaaattttgttttaatttaaattttaagttaaaacagcacagtgtttaatttcattctgttgctcaggctggagtgcagtrgtgcagtcttggctcactgcagcctcaacctcctgggctcaagtgatcctcccacctcagcctcccaagtagctaggactacaggcacatgctgccatgcctggctaattttaatatttttttgtagagacagggtttcaccatattaaccaggctggtcttgaactactgagctcaagcaatccacccaccttggcctcccaaaatgctgggactacagttgtgtgccacagtgcctggccaaaattaagaatttctgttcataaaaattgaatgaaaggaaagccacagattgggagaaggcatttacaacacatgtatctgacaaaggactca

SEQ ID NO: 662106 - DNA, 620 bp, Homo sapiens
ttggttctaattgtgattctctagtttctagctgtgggaacttgagcaaaccccttctcttcccaggcatcatttattaaatggagatattgaactagaattagggatcacaagtctgcagcctcaattaattgctttcgttttgtttgttttgttttaaattaaattttgttttaatttaaattttaagttaaaacagcacagtgtttaatttcattctgttgctcaggctggagtgcagtagtgcagtcttggctcactgcagcctcaacctcctgggctcaagtgatcctcccacctcagcctcccaagtagctaggactacaggcacatgctgccatgcctggctaattttaatatttttttgtagagacagggtttcaccatattaaccaggctggtcttgaactactgagctcaagcaatccacccaccttggcctcccaaaawgctgggactacagttgtgtgccacagtgcctggccaaaattaagaatttctgttcataaaaattgaatgaaaggaaagccacagattgggagaaggcatttacaacacatgtatctgacaaaggactcatatctagaatataatgcactcttacaaatcaaaattttaaa

SEQ ID NO: 662107 - DNA, 696 bp, Homo sapiens
taagaagttacatgttcattgctttaaaactcttggtacattcttccagtggaatattatgtggctgtttttaaaaagaaaaaggatgtcttatgcaaggatacgaaaaaagctctaagatcttaagaatatatgttaaattagaaaaaaacacaaaaggaaaataatggtgtatatagtgtgattttgtaattgcctgacaggttcttcttgcccactgcacagatttactgagacagcagtattgcagtagagaaagagtttaattaacacaaggctagccaagtggaagatgggagcttattacttgaaatcagtctccctgaaaatttggaggtgagggtttcttaaagatagcttggtggcctggggtctagggaatgaaggatgttgactggttgggttggggatgaaatcatagagggtcaaagctatcttcttgtgctgagtcatttcctggtggatcgcaagaccagatgagccagtttcttggtatgggttacaggtccaggtggcactgagaggagttagccagcttgccttatgtagacagcaagggaagggtccccagagagcccccaacccacaggggatgacctgtctcatccccacataacagaaaaagcagcctgggaaaaaaatcaagctgcaagcaacaacaaggsaactagcacagagggctgtgcctggagacat

SEQ ID NO: 662108 - DNA, 610 bp, Homo sapiens
gaattttaatttttaagcctcccaaagttctgggataataagcatgagctactgtgcccagcctgggctgtcattttttatacaattaggaaagttgttctgctccctccttcagttttggatgatgtttgattttagtcttatgtagacagatctttctgtattataatttacactgtttagaagataaatatggtagataatacaaagcagtgttattgttgctcagaatagaacttggataacatttttgacactgtaataataatattaaatatcactattaatatattacatgatggttgagatatttacataatatttattaatcttatcattggtatgtattataaaactaaaaatgatactgaatattattaatatatattttacatgtttartttttcaatcattaatcacttaaaaagagagcgagattagacacagtattagtttgttacatggtttttaacctaaaactctgacaattttagttgatgaatactcattcataccaaagacctattattaggaatagaacttgttaaatatgtacatatgtacctgattaaaaaaactaaagctttgcagtaagaatttgtatttgtat

SEQ ID NO: 662109 - DNA, 610 bp, Homo sapiens
gaattttaatttttaagcctcccaaagttctgggataataagcatgagctactgtgcccagcctgggctgtcattttttatacaattaggaaagttgttctgctccctccttcagttttggatgatgtttgattttagtcttatgtagacagatctttctgtattataatttacactgtttagaagataaatatggtagataatacaaagcagtgttattgttgctcagaatagaacttggataacatttttgacactgtaataataatattaaatatcactattaatatattacatgatggttgagatatttacataatatttattaatcttatcattggtatgtattataaaactaaaaatgatactgaatattattaatatatattttacatgtttaatttttcaatcattaatcacttaaaaagagagcgagattagacacagtattartttgttacatggtttttaacctaaaactctgacaattttagttgatgaatactcattcataccaaagacctattattaggaatagaacttgttaaatatgtacatatgtacctgattaaaaaaactaaagctttgcagtaagaatttgtatttgtat

SEQ ID NO: 662110 - DNA, 610 bp, Homo sapiens
gaattttaatttttaagcctcccaaagttctgggataataagcatgagctactgtgcccagcctgggctgtcattttttatacaattaggaaagttgttctgctccctccttcagttttggatgatgtttgattttagtcttatgtagacagatctttctgtattataatttacactgtttagaagataaatatggtagataatacaaagcagtgttattgttgctcagaatagaacttggataacatttttgacactgtaataataatattaaatatcactattaatatattacatgatggttgagatatttacataatatttattaatcttatcattggtatgtattataaaactaaaaatgatactgaatattattaatatatattttacatgtttaatttttcaatcattaatcacttaaaaagagagcgagattagacacagtattagtttgttacatggtttttaacytaaaactctgacaattttagttgatgaatactcattcataccaaagacctattattaggaatagaacttgttaaatatgtacatatgtacctgattaaaaaaactaaagctttgcagtaagaatttgtatttgtat

SEQ ID NO: 662111 - DNA, 579 bp, Homo sapiens
gatcttgggtcatggcaacctttgcctcccaggctcaagcaattctcctgccccagcctccaaggtagctggcactacaagtgtgtgccaccacaccaggctaatttttgtatttttagtagagacaggtttcgccatattggccaggctggtctcgaactcctgagctcaagtaatctccccacctcggcctcccagggtgctaggattacaggcatgagccaccatgcctggccatttggagatattaattttttattccattatctgattgaatgtttttgctttttggaatttttagtcaattattgagttttcccaaatatacaatyatatcatctttgaataatggtaggcttacctttttcttcccaatagttactcctctggtcccattacctttcattaagttattttgtcacaataaacaactctcagatcttcatggctgacaacaataagatacagtcgtgctcatgttacatacccattagggtaggcctcagctctgctccatgtctttgtcatctgggactacactaaaggagtggctccatctgggatatactagtcttctga

SEQ ID NO: 662112 - DNA, 588 bp, Homo sapiens
gatcatggctcactgtagccttgacctcctgggctcaagtgatcctccctcctcatcttcccaagtagctgggactacaggtgtatgccaccaggtctggataatttttttatttttatttttttgagacagccttgccctgtcgcccaggttggagtgcagtggcgaaatctcagctcactgcaacctctgcctcccggggtcaagtgatcctcctgcttcagcctccagagtagcttggatgacaggcacctgccaccatgccccactaatttttgtatttttagtagagatgcagtttcaccacattgccccggctggtctcaaactcatgaactcaagtgatccgyccaccttagcccccacaaagtgctggcattacagatgtgagccacagtgcctggcccaggcttgcatactttttgtatcttttgtagagatgggtttttgccacattgcccagggtggtctcaaactcctgggctcaaggggtccttcgaccttggcctcccaaagtgatgggattgcaggtgtgagccaccatgttcagcccattatagttaattcttaatatgacaaaagaagaaa

SEQ ID NO: 662113 - DNA, 568 bp, Homo sapiens
tatataaaattagtgctgatgatcacagtaccgtcatgactttaaagagttgtgctttttgtaattttcaagaatacgaaggcagtatgtgatccaaaatgaattttatgtgtattttactgagactataaactgcttttcctgtaattagtttaaaaattatcatacagcagagttgactttctttttggtgtacagcttaacccatgtgtagatttgcataacacctccacaatctataccaaacagttccatcagtctgcaaaactcccttgtgctatcagtttagaatcatgccctccccatccccagtctctagtagtcactcatctattgtctatcattatagttttgtcttatgagaatattatttatataaatagaattatacagtgtgtaacrttttgagactggcttctttcacttagtgtaatgcctttgagatttatccaaattgttacatgtatagtggttcactttttaaaaaactgctgcatagtgtataggcataccatagttcatttatctgtttacacattgaaggaccacttacccatgatcagtttac

SEQ ID NO: 662114 - DNA, 554 bp, Homo sapiens
acttgtgggagagtgacaattgccccttacatcaaataccccgtagttcattgagaatggctgagagtgcctatgaagcacacattctaggttatctttcttcaaaggtgtctaggtgatgtttctaacctgaaatattgtgtgcccagtgtagcttagtgctagcaaataaaacagccactggttcccttccagaatacccaacaaacaataaaaaagagagcagtgaattggagagatgcacctctcaccttggctgactttcaatttgggcatctgatggaatagtaggatttgtgtggtttagaaaaagattgatttacctaaatgaccgaaggcccagtgcacaggaatatggcctgcaactgggtatctgaactaaaacaaaggccccaggtatccaatgtgctactgttggccctgataattggtgttaggtaagagtgtacttttctactaccctcacctccctccaggataaggcaaagtastcctcacatatgttgcttttctttactgcaggacatttgtgaagatatttctgatcatgttga

SEQ ID NO: 662115 - DNA, 563 bp, Homo sapiens
tcagattagcaataatatttgtacaaaaaggttttcagtgttcagagtaattgacggactggttttgggtgatggttttaattactgggagcttatatataattatacaatttataatatataatatataatttataaaattatataattttcaatgagcaaccactctaaacataaggatgagagctcaggtatcagctgtggagtttttcttaagaatacaagtaaattgagtgtgacctgaccttagtctgttattgtaaccagagttactattctttgctctagtctagaaatatctccaagtaggagatatgtgtagggaaggtagatgatctttgtgccttcactctaatggtcttggagtaggaatgtagatcatggtttgatggagggatattggtgatgggtggggctttcttatccatggcaaggaaaatgctggtgraaggcttcatgtgtggcatgattagttgatataacccaataagattagtttatataggcagggtgtggtggctcacccctatatcgcctgtaatcccagcactttgggaggccga

SEQ ID NO: 662116 - DNA, 579 bp, Homo sapiens
aaattagtttttcttctctaatatgttttccgtaatgatagctgcttcatttacaagctaataccaggaaatggctttaaaaaaaacacattggtaagtagaatggatttgtcaggatcttggtttttgtgaggcagagtccagattgaatgctacctcaaaagttcctttattacataaaacaagcaaacaaaaaaacattttccagtagttactttcagcttttctggattttcttttctctttaactatttcacaccctcttatttagtaggtagcatacaattgtctaccagctgatttatataaagactttattgaatttttatttcttcactaattgaatcattcatgcattcagtgtctcactcactccttgacwcatttacatattcagtacaagcatatcacatgcctgctatgcagaagagtctgagtgagacaccatgtaggatgcaaaattgtgtcacacaatccttgcttttaaggagttataatcttttttgtatcttttggaaataaattacatgacatgtttccatgataattggacatacgtcataattttggtacataata

SEQ ID NO: 662117 - DNA, 579 bp, Homo sapiens
aaattagtttttcttctctaatatgttttccgtaatgatagctgcttcatttacaagctaataccaggaaatggctttaaaaaaaacacattggtaagtagaatggatttgtcaggatcttggtttttgtgaggcagagtccagattgaatgctacctcaaaagttcctttattacataaaacaagcaaacaaaaaaacattttccagtagttactttcagcttttctggattttcttttctctttaactatttcacaccctcttatttagtaggtagcatacaattgtctaccagctgatttatataaagactttattgaatttttatttcttcactaattgaatcattcatgcattcagtgtctcactcactccttgacacatttacatattcagtacaagyatatcacatgcctgctatgcagaagagtctgagtgagacaccatgtaggatgcaaaattgtgtcacacaatccttgcttttaaggagttataatcttttttgtatcttttggaaataaattacatgacatgtttccatgataattggacatacgtcataattttggtacataata

SEQ ID NO: 662118 - DNA, 553 bp, Homo sapiens
atttcattcttcccttagcccctggaaaccacaattttactgtctgtctctatgatttwgactactctaagtacctcatatcagtggaatcatatagtatttatctttttgtgaccatcttatttaatttagcataatgtcctcaaggttcatccatgttatagactatatcagattttccttcctttttaaggctgaataatattctgtcgtatgtatataccagattttgcttatctgttttgccattcatctgttgatggatacttgggttgctttcatttttttagctattgtgaataatgctgcttatgaagatgggggtacaaatatctctttaagaccctgctttcaatcaatttgggcatatacccaaaggggaattgctagcccatatggtaattgtatttttaattgtttgaggaactgccatactgttttctaaagtagctgtaccattttacattcccaccaacaatgcacaaaggttccaatttctccacattcttatcaacactaattattttctgtttgtgtgtttttgatagtaccc

SEQ ID NO: 662119 - DNA, 553 bp, Homo sapiens
atttcattcttcccttagcccctggaaaccacaattttactgtctgtctctatgatttagactactctaagtacctcatatcagtggaatcatatagtatttatctttttgtgaccatcttatttaatttagcataatgtcctcaaggttcatccatgttatagactatatcagattttccttcctttttaaggctgaataatattctgtcgtatgtatataccagattttgcttatctgttttgccattcatctgttgatggatacttgggttgctttcatttttttagctattgtgaataatgctgcttatgaagatgggggtacaaatatctctttaagaccctgctttcaatcaatttgggcatatacccaaaggggaattgctagcccatatggtaattgtatttttaattgtttgaggaactgccatactgttttctamagtagctgtaccattttacattcccaccaacaatgcacaaaggttccaatttctccacattcttatcaacactaattattttctgtttgtgtgtttttgatagtaccc

SEQ ID NO: 662120 - DNA, 553 bp, Homo sapiens
atttcattcttcccttagcccctggaaaccacaattttactgtctgtctctatgatttagactactctaagtacctcatatcagtggaatcatatagtatttatctttttgtgaccatcttatttaatttagcataatgtcctcaaggttcatccatgttatagactatatcagattttccttcctttttaaggctgaataatattctgtcgtatgtatataccagattttgcttatctgttttgccattcatctgttgatggatacttgggttgctttcatttttttagctattgtgaataatgctgcttatgaagatgggggtacaaatatctctttaagaccctgctttcaatcaatttgggcatatacccaaaggggaattgctagcccatatggtaattgtatttttaattgtttgaggaactgccatactgttttctaaagtagctgtaccattttacattcccaccaacaatgcacaaaggttccaatttctycacattcttatcaacactaattattttctgtttgtgtgtttttgatagtaccc

SEQ ID NO: 662121 - DNA, 612 bp, Homo sapiens
agtgtaaaaactgtcaggccgatatactcctctgccttcttataaatctaagtttttctttaaaatttttatgttattttgcacatttgacacagagaaaartcatattcttcaggcttttttttgtattttaaaaaattaaaagaataaataaaactcttaccttatagactccagtttaattgaatgcaatcccaactgctcttatttaaaactggtcagctgaatgttaatgaaatattctagattattcattttcaggcatgtgaagtatcatttcttgtttaggaaactcagtcagaggacctcgagtatccaaatcagtgtctgaatcatacggaactattaacaatgataagattaggccaaagagcacaatgaatagagttatgacaagcagaatttgtctgagattcatttgcgtttggctgcaaatgactaagtaagaccaacagtagcaatgtcatgagatgattgtgaagcattaactggaaaattataaatagatgatttctagaggctattgaaaaggaccagttgtttctgagtgtcatgtcaattatgagaaactattgctaacaaagagaaagaatgaaaaattaaaaagcatag

SEQ ID NO: 662122 - DNA, 612 bp, Homo sapiens
agtgtaaaaactgtcaggccgatatactcctctgccttcttataaatctaagtttttctttaaaatttttatgttattttgcacatttgacacagagaaaagtcatattcttcaggcttttttttgtattttaaaaaattaaawgaataaataaaactcttaccttatagactccagtttaattgaatgcaatcccaactgctcttatttaaaactggtcagctgaatgttaatgaaatattctagattattcattttcaggcatgtgaagtatcatttcttgtttaggaaactcagtcagaggacctcgagtatccaaatcagtgtctgaatcatacggaactattaacaatgataagattaggccaaagagcacaatgaatagagttatgacaagcagaatttgtctgagattcatttgcgtttggctgcaaatgactaagtaagaccaacagtagcaatgtcatgagatgattgtgaagcattaactggaaaattataaatagatgatttctagaggctattgaaaaggaccagttgtttctgagtgtcatgtcaattatgagaaactattgctaacaaagagaaagaatgaaaaattaaaaagcatag

SEQ ID NO: 662123 - DNA, 612 bp, Homo sapiens
agtgtaaaaactgtcaggccgatatactcctctgccttcttataaatctaagtttttctttaaaatttttatgttattttgcacatttgacacagagaaaagtcatattcttcaggcttttttttgtattttaaaaaattaaaagaataaataaaactcttaccttatagactccagtttaattgaatgcartcccaactgctcttatttaaaactggtcagctgaatgttaatgaaatattctagattattcattttcaggcatgtgaagtatcatttcttgtttaggaaactcagtcagaggacctcgagtatccaaatcagtgtctgaatcatacggaactattaacaatgataagattaggccaaagagcacaatgaatagagttatgacaagcagaatttgtctgagattcatttgcgtttggctgcaaatgactaagtaagaccaacagtagcaatgtcatgagatgattgtgaagcattaactggaaaattataaatagatgatttctagaggctattgaaaaggaccagttgtttctgagtgtcatgtcaattatgagaaactattgctaacaaagagaaagaatgaaaaattaaaaagcatag

SEQ ID NO: 662124 - DNA, 612 bp, Homo sapiens
agtgtaaaaactgtcaggccgatatactcctctgccttcttataaatctaagtttttctttaaaatttttatgttattttgcacatttgacacagagaaaagtcatattcttcaggcttttttttgtattttaaaaaattaaaagaataaataaaactcttaccttatagactccagtttaattgaatgcaatcccaactgctcttatttaaaactggtcagctgaatgttaatgaaatattctagattattcattttcaggcatrtgaagtatcatttcttgtttaggaaactcagtcagaggacctcgagtatccaaatcagtgtctgaatcatacggaactattaacaatgataagattaggccaaagagcacaatgaatagagttatgacaagcagaatttgtctgagattcatttgcgtttggctgcaaatgactaagtaagaccaacagtagcaatgtcatgagatgattgtgaagcattaactggaaaattataaatagatgatttctagaggctattgaaaaggaccagttgtttctgagtgtcatgtcaattatgagaaactattgctaacaaagagaaagaatgaaaaattaaaaagcatag

SEQ ID NO: 662125 - DNA, 646 bp, Homo sapiens
cattgattattagtctatattattyttggtatgaaattctaggttagaattatttttctttcttatgtaaaacaaattgtcttctggcttttaatgttgctgttgagaaatccaaatcaatctgatttatcatcctttgtatatgcctctacttccaccccaaagcttacttccctgcatcttctgaggtttcaaataatgtgactttggtgtgtgtctatttttagtgcactaggcaggtcttttaaatttggcaactcatgtccttcattttcttgaaagatttcattgacgattcctcctttctctttcctcttgccttcaggaactcctttcctctagaagttggacctcctgcaatagtcactaattatctctcctaatttatatctatttacctttttactttacattctgtgagatttcctcaactttatttttagctattatattgtgattttcatttttgctattatacatacttttattttcccagagtcctttttttgttccgcaaatatttcttttgaaatatagcatctttttcttattttatggatataatatcttatctctgataatctttcttttttaccgaaatcatattttccatggatggtgtgtttcctccaggttgagatttttg

SEQ ID NO: 662126 - DNA, 630 bp, Homo sapiens
tcctcaactttatttttagctattatattgtgattttcatttttgctattatacatacttttattttcccagagtcctttttttgttccgcaaatatttcttttgaaatatagcatctttttcttattttatggatataatatcttatctctgataatctttcttttttaccgaaatcatattttccatggatggtgtgtttcctccaggttgagatttttgttgcttgctgtgactctgttatacaaattggagctttccctaaatctctgctaatccttgactgcccgctcatatttaggagtaaaagactagaaagctgattggatgctctgaatgtgtaggtgggcctgttgactgaatgtcactgtagggtaatctggatgtgccaatttcagtatcttgtcttcttggactgatcagatctcctagagagggaacctctagtctctcgactggagggttaaggaattgctcccagtgtatgmggagccaaatcagggaagagggctggggatctcaacattcagaatgtctgcattaattgaatcctcctgttttcagaatactcctcaactatgcatggcatctgccagtccagagaccctgtgattcattctttctaggtaa

SEQ ID NO: 662127 - DNA, 593 bp, Homo sapiens
tggccatctttaatcagaaattgcccaggcctctcccaattaattttttgtgtgtttgttttttgagatagggtctcactttgtcacccaggctggaatacagtggtgagatcacagttcactgcagccttgacctcttgggatcagatgatcctcccacctcagcctccctggtatctgggactacgggtacatgccaccacgcctggctaagtttttgtatttttgtgtgtgtgtgtggagatggggttttattatgttttccaggctggtcttgaactcctgggcttaattgatcccccaccttcatctcctgaagtgctgggattacaggcatgagccaccatgcctagccmtaacttatttttattaacaacttttttgtagaatacttattaacacctggtaaatgctaaattagcaaatacttctatattgctgaattgtaatacaggtaactaattcagacttcagaatctttcaagatgacccttctcttagggctgattttcttcctactttacatattgaggtcacaacatataaatagctacttatcgcttgttgactgtggggaatgtggggctaaagag

SEQ ID NO: 662128 - DNA, 542 bp, Homo sapiens
atttagaaataattttagaacaagaaaaaaagtagaaacattgcatgaaatgatccttaaaatttttccacttcaaatctataatgctaagattgtgagtagggttaatggataactaaaaatggagaattctttttatatttaatggagtaggtaggacagagtgcagaactcttttaatcattttgatccaaaagtcaaacttgtattcattctctttctctatcttttctttctgggctaggaagaggtttttaaggttacactttgtgttaataaagtctttgcttggaaaagtggatgttgatcctctcataatgctgatttcttatttcattttcttggtaartaagagtgcatgtattgactttcctgtaccattctaggatacaactgtaattgaattattcttttttgacaatctttttagaattcttgctccctgaaagatttattccaaactccataacatggcattctcatccctcttataatatggcagcaacttaccttgtagcttaatctgtttcttggccccatca

SEQ ID NO: 662129 - DNA, 652 bp, Homo sapiens
ctttccacattgagttcaaagtcaaggagctctggttactgcatgtggcctcaaaaaaggtctacacaagtgtttggttatatcgcttaatctacttagttaagtttctcttttattcgtataatatttctttattccaccaaataagcactgtcatgcattttttcaaaaatattttaaataaatatcactttttctgatttccacgttgatcataagaataaacgggaacttgggcacagagttttatatgtggaaacacaacaaaacaaccttgtagaagcagctctcaactgaggcctttggcaaagcagatgggcaggcccagactggggatggccagctgtgatggggcatcttarcttggctcctactaccttgataagttacccaatttattaatttacagtgaaaaataaccatctcaaggctgggaatgcccatggctttgaagatcatctaggcacagataattgcctaatttatatgttcatctcagtgttttcccaggagccccagctgcctaacttaatctccacttgtgtctctagtgggcatctcaagcccatcaaagagctgttaatcctctcccaatcttaccagtttcagtaaacgtcactactctgttaagccaaagcatgactctccactc

SEQ ID NO: 662130 - DNA, 645 bp, Homo sapiens
actgctggttctaagtcttttcatcatgctcttctctaccatcatgtcaatacataactttttaaaaaacgtagttggaaaatgcttttgaaaaatgcttagggtaggctctgtctcagctctttaattaaatgtccttttttcaaataagccattcctgatccctcttcttaaaacccctgccacccagccattatctagtccatcacctagctttattattattattatcattatttgagacagggtctcactccgtcacccagactggagtgcagtggcgcaatctgggctcactgcaacctttgaccctcaggctcaagagatgctcctgcctcagcctcccaagtagctgagactacaagtgcatgccactatgcccagctaatgtttgtattttgtgtagtagagatgggatttcaccatgttgcccaggctggtcttgaactcttgggctcaagcgatcttctagcctctgccttccaaagtgctggcattacaggcrtggcctttattatttttttaatggttcttatcactagctgcagttatttatttatttgcttgtttgtgttttccctaaggacctgagctgtcaagttttctattgtatgtctgttgtctaggacagggccaggcacttag

SEQ ID NO: 662131 - DNA, 506 bp, Homo sapiens
acttgactgtgtgttaaagcccgaagcattcaatttataccatctttgagtggtttccagcacatcttaaatataataagccctggtttaagattgaagacaaaatatctttcttttctgcgaagagtagttattttcattttygccctttagatcactatttttcaacaaatagatcttaacccatttagcaggttgtgaaatcagtttagtgaaataaagagctaaacaatgaattagaaaaggatttcatgaataatgataagtgctatgttgtaaaatttggttttctgtccttgcgatagtttgctcagaatgacggtttccagcttcatccatgtccctacaaaggacatgaattcatccttttttatggctgcatagtattccatggtgtatatgtgccacattttcttaatccagtctattattgatggactcataggtgggaactgaacaatgagaacacttggacacagggtggggaacatcacacactggggcct

SEQ ID NO: 662132 - DNA, 645 bp, Homo sapiens
gctctaccctcatgaatgaaattagtgacctcataaagaaaggttacagggagctacggcagcaacaaggtgccatattggaagcagagagtaagcyctcaccagacacagaatctgctggtgctttgatcctagactttccagcctccaaaccatgagaaataaatttctagtgtttataaattacccagtctaaggtgttttgttatagtagtctgaatgactgactgtacattttccttagggtgtcttcttagggaagttggatactagtggtcaagtgtatagagagtgtggtttcattatggtggttattagtggaaatgctttttctacaattagtgctaagattgtgtaagactatttggtatcatcaactaataaaaatggttgaaataagaaggatgtctgatgtttgaatggctaattttagatatttagaagacccaattatgtgggaaaaagtctatctcaattaattgttgaataattatctctctctctcttccccatccaatgctggaaaacaggctaagtgctaaataaatccttttttgattgttgaatgattgatgtattttcatcatgatttggggagatgatataagcctcagacctagcacctgttttggactacttatgaac

SEQ ID NO: 662133 - DNA, 631 bp, Homo sapiens
gttatagtagtctgaatgactgactgtacattttccttagggtgtcttcttagggaagttggatactagtggtcaagtgtatagagagtgtggtttcattatggtggttattagtggaaatgctttttctacaattagtgctaagattgtgtaagactatttggtatcatcaactaataaaaatggttgaaataagaaggatgtctgatgtttgaatggctaattttagatatttagaagacccaattatgtgggaaaaagtctatctcaattaattgttgaataattatctctctctctcttccccatccaatgctggaaaacaggctaagtgctaaataaatccttttttgattgttgaatgattgatgtattttcatcatgatttggggmgatgatataagcctcagacctagcacctgttttggactacttatgaacactcttgattaagatatagaaaaattaatgttggtggttcctggcacattatcgcagaagatctttggctatacatgaaccttagccacatgcactaatgtatttagagctcagaatgagagcattatttgtcaaggtggctcagtctaacagattgtatagctgtgtaatttttcattagcaaaagtag

SEQ ID NO: 662134 - DNA, 602 bp, Homo sapiens
cagaatgagagcattatttgtcaaggtggctcagtctaacagattgtatagctgtgtaatttttcattagcaaaagtagcatggaaactgaagattaatacagrttttacaatttgaaagaaataatgaaaacagtttagagaaagtaatacatttcataaaaggattttgagaaaaatctaaagaaactggcattactttgattagagaagtgttattggggttttttaaagatgtttgtttaataatgtcaccatgagctctcactgaacaacaatagctatctgtttttgtggtctcacaggattagatatttttaggggcatccaccagaggtaggatatgagttaactctttccttgccttgagagttttcatttcaattgcattcatagagtatctaatatatactaggagtcttacttatagtatcttatttaatcctcacaatcaccctctgttagaaatgaggagactgagtctcaaaaggttaagtgatcaacttgggagtcaaaccatgtattttgagcctcaagtctaatattctttctattttggtgcactggcttcatacccttgtacagatgtgagaaatttgagtg

SEQ ID NO: 662135 - DNA, 337 bp, Homo sapiens
aaataccatatggacttgatgtgctcaattctatataaatgtgttaattctggtagttatcccataatctgttggattatgctcttttataatgagtaacgagctaggtaaataaaaatgaatctaaactttgtatggattaatacagaagatgtcattttgtatatgtaggatacaaggtttccttttcatttttctcctttctgcttcttgtgatctgcatgtatctcttcttagtagttataaacctgagatatctgtatttcaaaaaaaawtttatttttactatcatagattaagttatagacatgtaagaatagattgttagaaaatgata

SEQ ID NO: 662136 - DNA, 532 bp, Homo sapiens
ttagttcaaactgcctcagagatttcagaagcacactgagagcaataaaagcttgatgcctctttagtgtcagccagcttttaatggctggaatgggagttcttcaaattagtgatagtcagttgtcatgcctaccctcgtgcctccttcttgcctgctggctggttccaggagtgaggcagagtggaaagcccccaggatttggagatggcaggcctagttctgctcctgtttctgctacttactagaagttggacaccaggcaatttagtaatttctatgaacctgaatttccttagctgtaaatattcacctctgaagrttgttgtaaaaatcaagatcattctttagaagaattttgaaatttctgatgctacatgaaatgttagtagttctgattatgattctatcccaatccaaatactgcttgctgattttgtgactgtggtagggtgagctgggatgtgtgtgtgtgttagagagagagagagagagggagagggagagggattgatttgtggcaacttatata

SEQ ID NO: 662137 - DNA, 644 bp, Homo sapiens
gggattacaagtgtgagccaccatgcctggccaaaaacttgatttgtatgtgatatgaaaataygcagataatacacatatttaggtctttaaagagttttgctttttaaatttcagatttctcttttgctatatataaataggcatataattttagatttgaaatgagtaagattattttccccaatgtaagtgcttctttatgttaaattgttttctttcttttattcatttaaaaattgggttgtctatttttcttgaacatgcagcaattagatagtgtgatgatttggatgtgagaattatccattggaatactgtctcagtgtatttgccaaattgtcatcaagcataatttactcaaaatcctgagattcttccttgaaaattaatttgaaaataaatttgcttgccctctcctcttttgaagcaaaattggttcactttaaaattttcttttgtgatgttgttgctaggggaacaatatggtaaaccttgtaatctctgtcctctttattttctttagatctactctgatctgtttttatcagttctgtcctattttaaaattatataacacttgtaacctgcccccaacctactttggaagtactgaagtataaatcctaaacaaatgactgaat

SEQ ID NO: 662138 - DNA, 616 bp, Homo sapiens
gctgctggcgctgacatcctgatagagttcaggcgcctggtgaagctacacagacggtgcctggtctccagaccacatgcttttcatctacgtcataaacatgaaatktctgaattgttccattggcattttcatctctgtttagatagagatgttataaactttagttatataattgggacccatatcatgccaaagtaaaaaatttaaacatttccattcacttgcctgagacctccttctcctaattttgcaaagctgacttggtcatttcagtaactcacaattatttactctgacattttgggattacatcagacattctatggtacagttattttccaatgaccaaagtcatatcttattctatctgcctacttgatagcaagttagtgtgagtgaaaagccttggcaaatacatataagtatataaaagaaagttaatttgtttaggatggaaattcttttaccaccctagaactgcattagcatcataattatttcaaatttgctttcatttttaagaagggtgcccaaagtaaagtctacttagaaaaaacaattttttagattaagataatgatcatttttctaattatgtacatctttaatatat

SEQ ID NO: 662139 - DNA, 533 bp, Homo sapiens
aatatccatgtaaggactgctggcagtgattggctgctcaaaaaacataaaaataaagacaaccatacaactcttgacaaaaccatacaacaccatcaataaattagtcttgccaaaaaagaaaggaaaaatacaacttaatataatcaagcctttagatctaactgtcaatttccaggagaattggacagagagagaggggaatgtgaattastgaattagataaataatatcatggggctgcaatcagcaaaccccaggctgtgtgaaactctacaggacaaacaaccctgtttcttcaacaaaatttccaggatagagagggagacagagagagaggaaaggtacagattaaaagagatataagagatatattaactggccaagatggctgaatagcaacagaaagcaggtgatttctccatttccaactgagttacccatttgatctcactggggctggttaggtagtgggtccaacccacagagggtgagcagaagcagggtggggcgttgcttcacccgggaagtgc

SEQ ID NO: 662140 - DNA, 533 bp, Homo sapiens
aatatccatgtaaggactgctggcagtgattggctgctcaaaaaacataaaaataaagacaaccatacaactcttgacaaaaccatacaacaccatcaataaattagtcttgccaaaaaagaaaggaaaaatacaacttaatataatcaagcctttagatctaactgtcaatttccaggagaattggacagagagagaggggaatgtgaattagtgaattagataaataatatcatggggctgcaatcagcaaaccccaggctgtgtgaaactctacaggacaaacaaccctrtttcttcaacaaaatttccaggatagagagggagacagagagagaggaaaggtacagattaaaagagatataagagatatattaactggccaagatggctgaatagcaacagaaagcaggtgatttctccatttccaactgagttacccatttgatctcactggggctggttaggtagtgggtccaacccacagagggtgagcagaagcagggtggggcgttgcttcacccgggaagtgc

SEQ ID NO: 662141 - DNA, 508 bp, Homo sapiens
ggtgatgatttgccccaggacatggaactaaattgtcagaatcaggaatccagtctggatcctcggacactatcttgtctctgcttgtctataaaccatgctgtcttaaaaagcaggatgrttcttttctttggttgtttggataactcttccctgtcctctgatcttcagtgtggaagaggtcagaatcccaagaagttggtctgtaattcctgcaatatcacacattttacttttcaatgagacccccaatatttccctcagcttccattcaggatgcacctctctgtttcttttcttttgccattacatgttaaattttcttggttttatttgcttttagtttctattttcttcttttttcacctttcatccccttcttctatattcccttttctccctagtctttgtcatcaagggacttttcaattgctggttacagcccttctgttcttgtatgtgttatagatattgttgcttctctctcattttcaccctaattgtcatc

SEQ ID NO: 662142 - DNA, 426 bp, Homo sapiens
gacatcctgtaatcacaggatgttgcaggatgttacctttcttgcatagatcaagtgttacaaagagcctggcaatttacacatctgtgctaccatgacttaagacaaaagygcaaatcaggatttttgtttttgttatgttttattgtcctccctcctcccatctttgtccctccattctttctcccaggtactccatatccttatgttgttttcgtctcatcaaagccctgacagaaacacaaccacttccaaagacttgccattcctcaaatgtcctgcgttctaattggacttgcccccctttgctctaacaatcttattccaccttcatcaaaattattatttctaggatactgattttagagcatctgttttaagtgattattaataatatatgaataataggtaggtttagtccaaatt

SEQ ID NO: 662143 - DNA, 603 bp, Homo sapiens
cacttctaagcacactataggcactcagtaatgcagaattaactcactggaaataattcttggttaactcactggaaagaaagcactatttgccacattctgtggctggatattttaaggcaagggtaggtacaatataaggaaggccaaaactagcccaggatgatgagtatgtaaataagagctcacctccttgctaagaagctccagcaacttttcctttggggaaaatgcaacactgaggtctcctctttgaaggctttggcttttgctctgaaaacctgtcatcacctgtctctttttacttttcatactawccacaaaataaatctctgatagtgctgtactagtctggcaatgttgctttttccttcaaatatttactccctctgtggacacatcaactcaaagattacaatcaggggaacctcctgtgtttcagataaataaactatcactctgtaagagaagagaactccctctgccctttatgtagtttgcattcagacaaataactgtttcttaaatgagaaacataattggtattgtgcaagggctgggagtgctcccatgctttcttccaagcagcaaatagtggcccca

SEQ ID NO: 662144 - DNA, 545 bp, Homo sapiens
agtgcctccttatttggaagcccccaaagtcatctcagaccctacttggacataagtaaacagcgaagtaggatctggaagaggtttaagttgaactttccttgtgtgcattatcctcaaagatatattgcaataagatttttgtatagaatgcaagtctcctactggattttagccctgtttcccatcgaattttatctagtcatatttgacttgtgtcagawaaagattaaaaccttcagacaccgggccgcaagttgaagatctttctgaatcacagtgctaaaataatagggagggattttccgtaagtgttaccaaactaaactgggatccccttgcctggtgtagcaaagccaaatactgacatagggattgctgcaagagaaagtgaagcatttatagcaggatgccaagcaaggagaatcagcagctcacacttaagacccagcctccacagtggcttacaagtaaggccttttaaaggtgaggaggcagaggttataggcaaagtcatcaatcaatacacagaggttatacattgg

SEQ ID NO: 662145 - DNA, 545 bp, Homo sapiens
agtgcctccttatttggaagcccccaaagtcatctcagaccctacttggacataagtaaacagcgaagtaggatctggaagaggtttaagttgaactttccttgtgtgcattatcctcaaagatatattgcaataagatttttgtatagaatgcaagtctcctactggattttagccctgtttcccatcgaattttatctagtcatatttgacttgtgtcagataaagattaaaaccttcagacacygggccgcaagttgaagatctttctgaatcacagtgctaaaataatagggagggattttccgtaagtgttaccaaactaaactgggatccccttgcctggtgtagcaaagccaaatactgacatagggattgctgcaagagaaagtgaagcatttatagcaggatgccaagcaaggagaatcagcagctcacacttaagacccagcctccacagtggcttacaagtaaggccttttaaaggtgaggaggcagaggttataggcaaagtcatcaatcaatacacagaggttatacattgg

SEQ ID NO: 662146 - DNA, 545 bp, Homo sapiens
agtgcctccttatttggaagcccccaaagtcatctcagaccctacttggacataagtaaacagcgaagtaggatctggaagaggtttaagttgaactttccttgtgtgcattatcctcaaagatatattgcaataagatttttgtatagaatgcaagtctcctactggattttagccctgtttcccatcgaattttatctagtcatatttgacttgtgtcagataaagattaaaaccttcagacaccgggccgcaagttgaagatctttctgaatcacagtgctaaaataatagggagggattttccgtaagtgttaccaaactaaactgggatccccttgcctggtgtagcaaagccaaayactgacatagggattgctgcaagagaaagtgaagcatttatagcaggatgccaagcaaggagaatcagcagctcacacttaagacccagcctccacagtggcttacaagtaaggccttttaaaggtgaggaggcagaggttataggcaaagtcatcaatcaatacacagaggttatacattgg

SEQ ID NO: 662147 - DNA, 542 bp, Homo sapiens
tgggcctatatatttatttttctcacaacttttatgctcagaaaatctctactaaattaattactaaggggttttgctatggtatgaatgtttgtgtccccctacaaatttatatgttgaaatcctaacctccaaggagatatattagaaggtggggcctttgggaggtagtcacatcatgagggtggagcccttataaggcctgagagagaccccttgcctttctgtcacatgaggacacaagaagacactatctgtgaatcagaaagaggacccttgccacacactgaatctactggcaccttgatctgggacttcccagcctccagaactgtgacaaatacatttgtattgtttataatctacccagtttatggtattttattatagttgtccagatgggctaagrcagattacaaatctttaccttcctcatactggtgtgtgatggtgtaggccctgtggggctgatttaggatttcctgggtgccttgagttgtgagaggagaaaacagtatctctgcaaatgtaagggaattgga

SEQ ID NO: 662148 - DNA, 593 bp, Homo sapiens
tatctgttcagtattgattgatctataacccgtgattagataatccatgcaaagaaataaaattccaagatggtaaacactgaaaggacacttctccctacccctattctcctgcctcacagttcgcagatccaatgatccagaggcaatcattgctatcaatttcatatacatccttccagagcaaatacaaatggcatcattcctgtattcctgtattagtttggtcttatgctgctaataaagacatacccgggactgggtaatttataaagaaaaagaggtttaatggactcacggttctacatggctggggaggcctcacattcatgacagaaggcaaaggagaagcaaaggcacaccttacttggtggcaggcaggaaaacatgtgcaggggaattgcccttttataaaaccgtcagatcttatgagacttattcattatcacgggaacaacaggggaaaaactgccccyatgattcaattacctcccaccgggtccctcccatgacatgtggggattatgggagctacaattcaacatgagatttcggtggggacacagcaaaaccatataaatttccttctgtaa

SEQ ID NO: 662149 - DNA, 603 bp, Homo sapiens
gacattatctggtggtgtcctatctgagaataaaagcctgaagttcttgcaatggctctgtgtgaactgcccctctcttcccactgccaacatttctggctacatctcctatactctcccttttgttcagttttgtttagccattctctaaatataytaagactagtcatacttttgagcttttgcacttgctcttctgacttcctgggatatacttcccccagataccctcctgtctcaaccttcatttcctttaggtctcaattcaaatgtcacttgtcagagattatttcctgaccactctatataaagcagcatcctcactactgttctgcttttcttttcctttagagcaatcaacactgttggatacatactatattttatttacttactgtcttttcctgttttgttctctgctgtattccaagggcctggaaaagtgcttggcacagaaaatatgttcaagtaatatttatgagtgaatgagttatcttgttttttaatggaaatatatcttctacataaatgtattacagacttttaatataacaatacaactcagaaaacgtcccaaataagaatactatgagctgtaaacaa

SEQ ID NO: 662150 - DNA, 547 bp, Homo sapiens
taaacttcctgcacgctaatctccatatttgaatctccttctcaggaagacaacctgtgacattatctggtggtgtcctatctgagaataaaagcctgaagttcttgcaatggctctgtgtgaactgcccctctcttcccactgccaacatttctggctacatctcctatactctcccttttgttcagttttgtttagccattctctaaatatattaagactagtcatacttttgagcttttgcacttgctcttctgacttcctgggatatacttcccccagataccctcctgtctcaaccttcatttcctttaggtctcaattcaaatgtcacttgtcagagattatttcctgaccactctatataaagcagcatcctcactactgttctgcttttcttttcctttagagcaatcaacactgttggayacatactatattttatttacttactgtcttttcctgttttgttctctgctgtattccaagggcctggaaaagtgcttggcacagaaaatatgttcaagtaatatttatgagtgaatga

SEQ ID NO: 662151 - DNA, 577 bp, Homo sapiens
taagaatactatgagctgtaaacaactgcatagttttctaccgtatgtaaaaacacaatttaattagtcctctattaatggaggttttatgttatttccagtaatgtggtgaataactttgtgatttcttctgtaatgtgactatatctgtgagaaattctagaaattgtattttgctgggtcaaagggtgtgtgtgtgtgtctgtgtgtgtgtgtgtgtatatatatatatatatatatatgtatcttgcattggtaattttgttagatataaccaaattgttytctgtaatcttacactaatttacattcttcccagcaagatatcagcatgtgtctttcagcacatcctcaccaatattttaatgttgctaatctgataggtaaaacatggtatttcagtgtgatttaatttttaattctgctattgaaagtgaggttgaaaatattttcatatatttaaaaggcagttgtattctcttttgtataatctttattataatactttttctttatgaaggttttgtgaactttgtccagtctttttgatttgtagaaaatagtgtgcatatttgca

SEQ ID NO: 662152 - DNA, 577 bp, Homo sapiens
taagaatactatgagctgtaaacaactgcatagttttctaccgtatgtaaaaacacaatttaattagtcctctattaatggaggttttatgttatttccagtaatgtggtgaataactttgtgatttcttctgtaatgtgactatatctgtgagaaattctagaaattgtattttgctgggtcaaagggtgtgtgtgtgtgtctgtgtgtgtgtgtgtgtatatatatatatatatatatatgtatcttgcattggtaattttgttagatataaccaaattgttttctgtaatcttacactaatttayattcttcccagcaagatatcagcatgtgtctttcagcacatcctcaccaatattttaatgttgctaatctgataggtaaaacatggtatttcagtgtgatttaatttttaattctgctattgaaagtgaggttgaaaatattttcatatatttaaaaggcagttgtattctcttttgtataatctttattataatactttttctttatgaaggttttgtgaactttgtccagtctttttgatttgtagaaaatagtgtgcatatttgca

SEQ ID NO: 662153 - DNA, 577 bp, Homo sapiens
taagaatactatgagctgtaaacaactgcatagttttctaccgtatgtaaaaacacaatttaattagtcctctattaatggaggttttatgttatttccagtaatgtggtgaataactttgtgatttcttctgtaatgtgactatatctgtgagaaattctagaaattgtattttgctgggtcaaagggtgtgtgtgtgtgtctgtgtgtgtgtgtgtgtatatatatatatatatatatatgtatcttgcattggtaattttgttagatataaccaaattgttttctgtaatcttacactaatttacattcttcccagcaagatatcagcatgtgtctttcarcacatcctcaccaatattttaatgttgctaatctgataggtaaaacatggtatttcagtgtgatttaatttttaattctgctattgaaagtgaggttgaaaatattttcatatatttaaaaggcagttgtattctcttttgtataatctttattataatactttttctttatgaaggttttgtgaactttgtccagtctttttgatttgtagaaaatagtgtgcatatttgca

SEQ ID NO: 662154 - DNA, 519 bp, Homo sapiens
ttaagtctctatgagcagatgaatgtataargaaaatgtgatatatatacataatggaatactattcaacttttaaaaagaaggaaatcctgacatttcttacaacatggttgaatccaggggacattatgccaagtgaaataagccaggcacaggaagacaaataccatatgatctcacttaaaaagtcaaactcttattagagagtagagtgttggttatcaggggtgggggcagcttggttggggtgggcggggggtgagggattaggtaaatgtcggttaaatgatacaaaatttcagttagaaggaataagttcaagagctccattgtacaacatgatggttttagccaataacaatgtattgcatacttgaaaattgctaagagagtagattttgagtgttctcaccacacacaaaaaaataagcctgtgaagtgatccacatgttaattagcttgcttagccattccacaatgtatacatatttcaaaacatgttgtataagataaatacat

SEQ ID NO: 662155 - DNA, 468 bp, Homo sapiens
gagctatctgtcctggagctccgagttgagcattccgggtcaaagtggccagcgaggcgggggcgcggtgggccgctggcgagctccggggcggaacgggctgccctttggcgctcgtggggttctcgctgccccctcagctcctgcgtcctggctgccctcgtaaggggtcttgtcccttggctggtgaggattctgcccctccccgctggcgtttgtttactttctttcccttggtcgctccccgcagttgactgattatgtctgtgcctgtctttccccctccccatagttctagcgactgcgaagatagctcgctgagctggaaccccacagatcaccaacaaaaatgaaggtaagtggagtcaactctgccccgatcctcgcgccctgracactgccaatcctaaggctagtgccgtggaatgtcatttgttttgctactcaaaattgatgttcctactgatc

SEQ ID NO: 662156 - DNA, 634 bp, Homo sapiens
atttgcatcatgaagtttcctggaagcttttttctcccctctaaattattccctgtttcctgtgatctctscaagtctctatctcaggttgcaaagggaagggcctttgggaaaggtcttctttacccagacactcccactccaagccactatggcccacaaggcaagacttagcttagccaaagccactctgtttctgctgcatctctccatcctgagtttctacctccagctgaaacataaatcctccagggaaatattgtttcaggctgcctggtggtagcagagccccagggtctctgagccctgacgtggacatgaccaaacttaggccatgacactctccctcccttcaccttactagaatctctcttttcagaatagtctctgctgccttgaggtgggtcctctcttttccttatgggagctcccctgggaagtatggggactttgtgaaaacttagaaaagaacatcatactgaactgacaaaagctggaagcattccccttgaaaacctgcacaagacaaggatgtcctctttcaccactcctattcaatagagtattggaagtccttgccagagcaatcaggcaagagaaagaaataggaatagacattcaaataggaagacag

SEQ ID NO: 662157 - DNA, 634 bp, Homo sapiens
atttgcatcatgaagtttcctggaagcttttttctcccctctaaattattccctgtttcctgtgatctctccaagtctctatctcaggttgcaaagggaagggcctttgggaaaggtcttctttacccagacactcccactccaagccactatggcccacaaggcaagacttagcttagccaaagccactctgtttctgctgcatctctccatcctgagtttctacctccagctgaaacataaatcctccagggaaatattgtttcargctgcctggtggtagcagagccccagggtctctgagccctgacgtggacatgaccaaacttaggccatgacactctccctcccttcaccttactagaatctctcttttcagaatagtctctgctgccttgaggtgggtcctctcttttccttatgggagctcccctgggaagtatggggactttgtgaaaacttagaaaagaacatcatactgaactgacaaaagctggaagcattccccttgaaaacctgcacaagacaaggatgtcctctttcaccactcctattcaatagagtattggaagtccttgccagagcaatcaggcaagagaaagaaataggaatagacattcaaataggaagacag

SEQ ID NO: 662158 - DNA, 491 bp, Homo sapiens
tggatgccctttatttctttctcttgtctgattactttggctaggacttccaggactatgttgaagaggagtggtaagagtgggcctccttgtcttgttccagttctcagagggaatgctttcaacttttccccattcagtattatgttggctgtgggtttgtcatagatgacttttattacattgaggtatgtcccttgtatgccgattttgctgaragttttaatcataaatagatgctggattttttcgaatgctttttctacagctattgagataatcatgtgatttttgtttttaattctgtttatgtggtgtatcacatttattgacttgtgtatgttaaaccatccctgcatctctggtatgaaacccacttgatcatggtggattatctttttgatatgttgttggatttggttagctagtattttgctaaagattttagagtctatgttcatcagggatattggtctgtagttttctttttt

SEQ ID NO: 662159 - DNA, 563 bp, Homo sapiens
ggcaactcctggccaggcatgttggctcacacctataatctcagcagtttgggaggctgaggtgggakgatcgcttgagcccaggagtttgagaccaggctgggcaacatagggagaccccctctacaaaatgtttttaaaaattagctgggtgtggtggcatgttcctgtagtcgctgaggtgggagaatcgcttgggcctggggggtctaggctgcagtgagctgtgattgtaccactgcactccagcctggatgacagagtgagaacctgttttaaaaacaaccaccaccacaacagcaaaacaacttccatagtctagcctccctccctctttctttctttctattctttctttctttctttctttctttctttctttctttctttctttctttctttctttctttctttctttctttctgtctgtctgtctttctttctctttctttttctttctttctttctttttctttctttctttctctttctctttctttctttctttccttccttccttccttccttccctccttcttccttccttcccttttctttcttct

SEQ ID NO: 662160 - DNA, 316 bp, Homo sapiens
agttctacttttagttctttaaggaatctgcacaccgttttccataggggttgtactagtttacattcccaccagcagtgcagaaatgttcccttttcaccacatccacgccaacgtctattattttttkattatggccattcttgcaggagtaaggtgatatcacactgtggttttgatttgcatttccctgatcattagtaatgttgagcattttttcttatatttgttggccatttgtatgttttcttttgagaactgtctattcatatctttagcccactttttgatgggattgtttgttttttcttgctaa

SEQ ID NO: 662161 - DNA, 556 bp, Homo sapiens
aagtagggctttcacgcctatcrgcctgtggagtctgcacaccagattcaggccctcccttgagttctggccaggagacttcctgttcagttggaattgttacaaggttcagctgggggtttccttctccctgtggtcttttcccagtatttctggcagccctccccaagaacacccatgagacaactctgaaatagctttctgagggtggaaaacccacaggcttttcctgctgcttcctctacccctatattttgcttggctctctaaattgactcagctccagataaggtcagatccttctcccatgatctagaccttcaggtgccccagtgagggtgtgtgttcagtgacagacaatccacctttcccactttcacagcttgggcactcacaatatttggactgtctcttgggttctgcaggagcaacctccttccttcagagggtttgtgggttctctcggctttcctggtttattcctgcattagttctgaagcaaagggtgaagatgcgagtgttgaacctttgaaatttttttcaaaggtccacacag

SEQ ID NO: 662162 - DNA, 627 bp, Homo sapiens
tggacaccaacaacatataaatggtaatatataagtggtcttaaagccaataggccggatgaactcacctacggcaagagtgcagaaagtgaagcagaaggagctctgaagaaacccaacacttacaagttgagtagaggaggaagagccagctaagagaatgagaagaaacagccagaggcaaaaggaaaacctgagcagggtcacagaagccaaagaagagtatgtttctacaaggaaaatgtggacaagtgtccaacgttgctgagagacatgtgacatgcaggtggccctgacaagagtaatttcagtgaagcgatgatcaaggcagatcaacccacacctcaccctccctgccctatcaacatggcttatcacttctttgcttctttttcttgggtctttcagcatctattcctgccttcgtcaactctttatcaaattcaaacttccctagagaaaggttctgctggaacagcatttcactctcttctctgttgggtagaagctctgggccacattatatcttgcctatagatgggatgatcttgggtcacggagtcacccaatccgtcacgtgaaaccagaacacacrtaccacatgacatccattagaagggggtgtct

SEQ ID NO: 662163 - DNA, 674 bp, Homo sapiens
gtgtgtcatcagttcataccttctaccttcttagcatctctcctcttgattctcttctgtcyaccaccatcactactgcttttattcacgccgttctcatatgttctctggattctgggaaaagtctcctaactagctctcttgtttccattctgacatctgttcaataagcctttcacatatttgcaagaacacttaaaaaaagtacaaaatgtattaggctattctgctgtttaacctttcaatggctctccactgccctcaggataaagctgatccatgaaaacatgaatccttgaaaacatgctctattgagtcttccttgcactggtttctgatgaactatccaatgaaccatttactcagtattcttttttttttttttaaatttgagacatattctcgctctgttgcccaagctggagtgtgatctcagctcactacaacctccacttcccgggttcaaacgattctcctgcctcagcctcttgagtagctgggatacaggcgcatgccaccacacctggctaatttttttgtatttctttttagtagagtcgaactcctgacctcaggtgatctgcctgcctcagcctcccaaagtgctggaatttcaggcgtgagccactgtgcctggcctctgtattcctttttacgttagatttaaactgtgg

SEQ ID NO: 662164 - DNA, 576 bp, Homo sapiens
tcccccataacatattagctatgaagaaatgccagtcatctgaacaatatttgaaatttactgtgctctggaaactgtcttaggtcctaggatggagttggggttagaagacaggggaggaaataaaaaaaagaataagatgccctggtccagtagcatttgcagtgatgcgtgggcactctgggatttcatggctcatcatggttctcagggcaaaggtgaaaaaactgagtcaattagaagtttattattttccatgttgtcacattctggccatattcctattgattttgtagtagaccattagagtatgccgagagccrtaccttgccacttattcatataattcatattcattataacatgccagtagtaaagagaagaatcccagtttccactcccctttttgaataaaccttatggaaacaattaatgtcattcatgggatctgggacctggtagatgctgagcatgtttcaccacttagagaagtgtacaggaaacctgaggtcatttcaggatagcatggctagttgggtcagaagggattctagcctgtcccatttctgctgaaag

SEQ ID NO: 662165 - DNA, 612 bp, Homo sapiens
cattccagcctaggcgacagagggagactctcaaaaaaaagaaaaaagactacaacacaactccattacaacagtaatgagagactatcgcggaatgtacacctttattagagtccttatttctcaatattttagtaatctatttacctttttctctatagactctaagtatcatgaggctagagactatgtcctctatctgtgtattcccagtacctggcacagtgcctagcccatgatagttgggctcagtaaatatttggtgagccaatatatgttcgktgaaggagtggatatttaaaaaaattatctagttataatggaatttcactgtataatttttgtttgatgtccaatttcaaagaagtcatttttttgtctgaaagagctgataatgtcattttaaaaatcttttgattaaataaaatgtaccagcattttctttcaaatatatcagcttattattctgtagctcagttatctctctctaggtattgaggagatgtgaactctaagggacaaaagctctacataatttgaaggtattatactcaaggcaaagtttcttttcaggtaaaaattacactgcagtttttcaatcaagtgaaagtt

SEQ ID NO: 662166 - DNA, 612 bp, Homo sapiens
cattccagcctaggcgacagagggagactctcaaaaaaaagaaaaaagactacaacacaactccattacaacagtaatgagagactatcgcggaatgtacacctttattagagtccttatttctcaatattttagtaatctatttacctttttctctatagactctaagtatcatgaggctagagactatgtcctctatctgtgtattcccagtacctggcacagtgcctagcccatgatagttgggctcagtaaatatttggtgagccaatatatgttcggtgaaggagtggatatttaaaaaaattatctagttataatggaatttcactgtataatttttgtttgatgtccaatttcaaagaagtcatttttttstctgaaagagctgataatgtcattttaaaaatcttttgattaaataaaatgtaccagcattttctttcaaatatatcagcttattattctgtagctcagttatctctctctaggtattgaggagatgtgaactctaagggacaaaagctctacataatttgaaggtattatactcaaggcaaagtttcttttcaggtaaaaattacactgcagtttttcaatcaagtgaaagtt

SEQ ID NO: 662167 - DNA, 574 bp, Homo sapiens
aagatggacattagctattgcaaagwtattaacctaccctctctacttgtactgttcaggctgacctaacccccacattcatctgaaatattcaggtaatgaggttagagttgaaaaaacctgaattatgaggacaatgacttagctttgtatttccatatacggaacctatggtttcacaggtgaacaatttacgtgatggattagtgacagcctggacctttgctgaattaccagcctgggagcctctggtttgtaaatggttttatactagcttgtggaatgcattttgtgctactgtggacttgaaagaatgaatatatttttccaacaggcttgctggctaccaggaagtagacgaaattgatcttaaacaacaaagggattaatctaaaaggtcagagatgaatttatgtgtggaatgttcaggaataataacagggaatagtttaggggaaaagcacaattcattattaaggagacattagcttcccaaggaagagaactatgatttaaagtaataaaatactaaattaactaggaatatacaagtttacaatttgtatttttacaa

SEQ ID NO: 662168 - DNA, 645 bp, Homo sapiens
ggaatatacaagtttacaatttgtatttttacaaatttttrcaaaatttataattggtgaatcaaggaatgatatctgagattttcttttctcagccaccaatggcacacacacagtcaaataaagcaatgtgggaaagctcacaccaacatagcaagaaaaaaaaatcacattctttggggtgacaaaatgtgcaacagcttttggctagctgtttcgatttaacagaatttggtgaaaggaagtttgagctgctaggaaaatctacttttcttcttgaaaagctgatttttttttccccatgagaaatctcaaagtgaaaattgctgctttcacactactctctacagaaatattaataaatgccattctgttaggtattaattaaaacagtacttgttcaattctattttatcacatattgtgaagagttgagataaagctctcacgctgtctttttggatctgttaatctttttattgtacatataaaagtatacagacaaattggattctctaggggttgttacattcattcattcactcagtatttatttatcgaacagtaggtactgggaatattattttgtgagacagtctgtttccttgggaactcatagtttaaagaggaaaagcagacatggta

SEQ ID NO: 662169 - DNA, 580 bp, Homo sapiens
aacaagtaggcatataacaaatatttgttgctttgatgttgttgaattttatttgtccaaatagaatgaagaaacacagcrcaggatgatgcccaggaagtaagggccaggcattcgtggagggtttgggcccttaatagtttgtgaaagagattatcaggaccacatctctaaaagagaagcaattcaaacgccaaacatcctagtgtttaccagcaggagatttagtttgtactgcaagggagtgtggacttacccccaaagcaaatacacaattgtgtgtattttactctgctgaatgctcttgaaatcaatttctaacccataaaacagaagtttcccaaaccaaatccactataaaattcatctctgtggagaggccatagctgttacaggagggcaggatggtagatcaggaggcttttctgtttaaatatttaaatagatttctatttgaacagctaaatgaaaccaaactcactctcttatctcaataattaaaaagaaaattgctgagctttctttgccaagtgttcatgccatttcccccctttcttgagctttctcagggtattctaag

SEQ ID NO: 662170 - DNA, 599 bp, Homo sapiens
cccacccatgctaggactaagaagggagcccagaccactgtgcattccatgaaccagcccattgcctgaggcaacagagagcttctgccagtaaacaaggatcaagtatatacccagccatgttttycacagctggctcttacctaaaagcactatcaactggcatataggctgaactgcacagcgcaatataaaacctactgaaagaatgcatagagctatagaagcaaagccaaaagaccctacccagcactctctccagttgcacatgaagcagaggaaaggagaaaggaagagaaaaaaatactatggggaaataaataaaaagaaaaaatcctactcgtatgaaaataattacaaaaattagaagtgccagcatttccagacaagaagaaactagaacaagaattctggcactgtgaaaaatctgaatatagtgacaccaccagagaattgctgtattagtcacagttcactagagggacagaactaataagatatatttatatatataaaggggagtttattaagttttaacgtacacaatcacaagatcccacaataggctgtctgcaagcttgagaagcaagcagagccag

SEQ ID NO: 662171 - DNA, 577 bp, Homo sapiens
catttttccctcagcccacctctcttctgacttaactatctctggtaatgttgcttctcatcttagtcaccaaagtttttatttttcgcttacactttayatccctacatgaaatcaaatccaaggaactatcaattctatctctaccaagtttgtacttctgtctcttttgcttctttcttgttctctctagcctactttatattgcatttagttatttttattgcttggactactacagtaattccctaactggtattcacttttttttctctcctttactcaaaattttctctccttttatcaagtcactctacatatgctgctaaattaatattcttgaactttgctctgatcaaattacatttctgccaaaaaagttcaatagttttttattagttatgggttaaatctgagctccttaggctggctctgcacaacatggtctcatctcactttctagtcttacctccctctgttccatgtacaccttatgacatgctaaaattgaacttcctggagtttctcaaacatgccttgtcttttcccactgctcctctttctttgttcagtattt

SEQ ID NO: 662172 - DNA, 577 bp, Homo sapiens
catttttccctcagcccacctctcttctgacttaactatctctggtaatgttgcttctcatcttagtcaccaaagtttttatttttcgcttacactttatatccctacatgaaatcaaatscaaggaactatcaattctatctctaccaagtttgtacttctgtctcttttgcttctttcttgttctctctagcctactttatattgcatttagttatttttattgcttggactactacagtaattccctaactggtattcacttttttttctctcctttactcaaaattttctctccttttatcaagtcactctacatatgctgctaaattaatattcttgaactttgctctgatcaaattacatttctgccaaaaaagttcaatagttttttattagttatgggttaaatctgagctccttaggctggctctgcacaacatggtctcatctcactttctagtcttacctccctctgttccatgtacaccttatgacatgctaaaattgaacttcctggagtttctcaaacatgccttgtcttttcccactgctcctctttctttgttcagtattt

SEQ ID NO: 662173 - DNA, 628 bp, Homo sapiens
actaaaaatgggctttcacaaatataaacaatgcacaagttctgttaaaatcaatggcttacatttttttcttttcatgttcagtgacagtttaacatcagttgaagctagcttcctgcttatgacaaaaggagaagtcattttatttctaactatgtattttyagtctcctctttttggtatgaatcattaatattaaagttgctgttgacaaaataaaaggcagagctagaaatggaacatattaaagaaaatgctatgttgcacgcatgatgtggaatactcaaatagatgaaataaagctgctcttttgcaaaaagctattcttcatgaagcttagtgccaggaaaagatcaatgtcctctatttttagctctctccattttgttcctataagggacaaagatgctacacaagtcctaatacagtgagagagtaaatccaatgtagtcattttagttttcttttcacctctcccaggcaattatattaaagtgcccaaataaagacgactgactttcatatgtttggaagggtagatgatctttttatgtctgtcagttggctgttctgaataatggagaccccagatgtgccactggccttttcaaagaaggacagaggaaga

SEQ ID NO: 662174 - DNA, 628 bp, Homo sapiens
actaaaaatgggctttcacaaatataaacaatgcacaagttctgttaaaatcaatggcttacatttttttcttttcatgttcagtgacagtttaacatcagttgaagctagcttcctgcttatgacaaaaggagaagtcattttatttctaactatgtatttttagtctcctctttttggtatgaatcattaatattaaagttgctgttgacaaaataaaaggcagagctagaaatggaacatattaaagaaaatgctatgttgcacgcatgatgtggaatactcaaatagatgaaataaagctgctyttttgcaaaaagctattcttcatgaagcttagtgccaggaaaagatcaatgtcctctatttttagctctctccattttgttcctataagggacaaagatgctacacaagtcctaatacagtgagagagtaaatccaatgtagtcattttagttttcttttcacctctcccaggcaattatattaaagtgcccaaataaagacgactgactttcatatgtttggaagggtagatgatctttttatgtctgtcagttggctgttctgaataatggagaccccagatgtgccactggccttttcaaagaaggacagaggaaga

SEQ ID NO: 662175 - DNA, 628 bp, Homo sapiens
actaaaaatgggctttcacaaatataaacaatgcacaagttctgttaaaatcaatggcttacatttttttcttttcatgttcagtgacagtttaacatcagttgaagctagcttcctgcttatgacaaaaggagaagtcattttatttctaactatgtatttttagtctcctctttttggtatgaatcattaatattaaagttgctgttgacaaaataaaaggcagagctagaaatggaacatattaaagaaaatgctatgttgcacgcatgatgtggaatactcaaatagatgaaataaagctgctcttttgcaaaaagctattcttcatgaagcttagtgccaggaaaagatcaatgtcctctatttttagctctctccattttgttcctataagggacaaagatgctacacaagtcctaatacagtgagagagtaaatccaatgtagtcattttagttttcttttcacctctcccaggcaattatattaaagtgcccaaataaagacgactgactttcatatgtttggaagggtagatgatctttttatgtctgtcagttggctgttctgartaatggagaccccagatgtgccactggccttttcaaagaaggacagaggaaga

SEQ ID NO: 662176 - DNA, 542 bp, Homo sapiens
gatatgtattggttcttctggataattagaaaacctgatcacatgaattgggcgaagagmtttcccagacctcatcctcctcttttctagttgccacaaaatattttgaggattctgatattatgttctgtgaggtttcttgagtgttttttatttatttataaatgtcttaaaacttttaagaggtaccataactggaaaactcatctgacattggagagagccccactgtagaaaatacaaggatgctaactgtgttggaaaaggcaaacatgtcagtaaccctggcctgtgctgccaagttgaaaggaagggataagtctgtggtatcactgacatggctagaatttctataatggagaagatggagagtaaaacaggaagtgattatggccagtaccattttcatctttcctggaccttgtcaatagagctttcacctacaaactccacattaaaatttcaaaaagcacatgcctgctttttccaacccattgaaacatatctcttgccttttatttattaatagaaaattgtgactt

SEQ ID NO: 662177 - DNA, 554 bp, Homo sapiens
aacagaatgtgagccataaatcagagtcacatatgtcatttaaaattttccaatggccacattaaagtggtaaaaagaaacaggtgagattaaatctaattacatgttttattgaactcagtacatctaaaatattattttaacatatcagtttaaaaactattgagatatttcacattacttataaaatactaagtgtattagttcattttcatgctgttatgaagaaataccccagactgggtaatttataaagaaaagaggtttaattggctcacagtcccacatggctgggaagtcctccggaaacttacaatcatggtggaaggcatctcttcatagggtggcaggagagagaatgagtgycagcaggggaaataccagatgcttatacaactattagatctcatgagaactcactcgctatcatgagaacagcatgggggaaaccgaccccatgattcaattacctcccactgggtccctcccacaacacgtggggattatggggattatacttcaagatgagatttgggtgcaaacacagctaaacc

SEQ ID NO: 662178 - DNA, 517 bp, Homo sapiens
tatcatctgacatgatagagtgccttctacacttaattgtctgtgtggttgtgtagatctacaagcacagagctgaacaggatcccaaagtagctaggttggtatttttttctttgtaaagaagcttgcatactagtactacaaaaaatgaaaaattaaaaaaaaaggatctgaaatttgaactgttttatgctgctagatagatgtggtgattgctgaaaacatcaatttttaaaaacattaatatggtatcatttgtagagttaacaaagaataaaatacaaggttgctttatggacttgaatggacatttctccaaagaagatatatgagtggccaatgggcacatgaaaagatacttaacatcactaggaaatcattagggcaatatgaatcaaagccataatgcaatatcacttcacacccattaggatagctattatgaaagaaaaagaaacagaaaacaggtatyggtgagggtatagagaaattgcaacccttgtgcactgctggtggg

SEQ ID NO: 662179 - DNA, 579 bp, Homo sapiens
tctatagatattcgattaactgaaagtatcccttatgggaaacaaagggatgggccgaattaaaggagtaggtggggctagcagcagcgtgcagcaggagcatgtccttaaggcacagatcgctcatgctattgtttgtggcttaagaatgcctttaagcggttttccgccctgggtgggccaggtgttacttgccctcattcccgtaaactcacaaccttccagcttgggcgttagggccattatgaacatgttacagtgctgcagagattttgtttatggccggttttggggccagtttatggccagattttggggggcttgatcccaacaacaaggagaactgacatggccatgaaccatgtgttatatrtaattcattgtaattaactcaataaaaatgtgaaaataactttaagatttttttataataagattttaccttaattataaagatctaggacttattctttgcttggcatggtttgctgcattacagaactatagaacagatgatctctgcaaaactgaccatgttaagatagtaccccactttggttttaggtgtgcctaaatgtc

SEQ ID NO: 662180 - DNA, 370 bp, Homo sapiens
gacagatgtttaattggttgctttcttgtcccttcttaatgtgtgagatgccctcatgagagaggttagagcagacagattaagtggagaaagccacttaactatcctctgccctcatgaccaagagagtattcattcctcattttctttttgatatattcctgtttgttayaattttttagtatctgattgtggaaaaggaattactacccccatatatttgtcagtggttggaaagacagtgttgagtgagcctgatactcattcaccacacacgaagcttggctcagtcctcagaagttcaaagaacttgtctgttcttctgaatacctcagaccaagggctatcatgaacatgtaagtgttcaggc

SEQ ID NO: 662181 - DNA, 558 bp, Homo sapiens
attgcaaattgtgctgctataaacatgcatgtgaaagtatctttttctattagtgacttcttttcctctgggtagatacccagtagtgggattgctggatcaaatggtagttctacttttagttctttaaggaatctccacactgttttccatagtggttgtactggtttactttcccaccagcagtgtagaagtgttccctaatcactacatccatgccagcagctagtgtttttttattttttgattatggccattcttgcaggagtcaggtggtatcacattgtggttttgatttgcatttctctgatcatgatcattaatgatgttgagcattttttcatatgttttttggccatttgtatatcttcttttgagaattgtttattcatgtcctcagaccactttttgatgtgatttttttttcttactgatttgtttgaggtcattgtagattctggttattagtccttcrtcagatatacagattgtgaagattttcccccactctgttggttgtttgtttactctgctgactgttccttttgccatgcaaaa

SEQ ID NO: 662182 - DNA, 558 bp, Homo sapiens
attgcaaattgtgctgctataaacatgcatgtgaaagtatctttttctattagtgacttcttttcctctgggtagatacccagtagtgggattgctggatcaaatggtagttctacttttagttctttaaggaatctccacactgttttccatagtggttgtactggtttactttcccaccagcagtgtagaagtgttccctaatcactacatccatgccagcagctagtgtttttttattttttgattatggccattcttgcaggagtcaggtggtatcacattgtggttttgatttgcatttctctgatcatgatcattaatgatgttgagcattttttcatatgttttttggccatttgtatatcttcttttgagaattgtttattcatgtcctcagaccactttttgatgtgatttttttttcttactgatttgtttgaggtcattgtagattctggttattagtccttcatcagatatayagattgtgaagattttcccccactctgttggttgtttgtttactctgctgactgttccttttgccatgcaaaa

SEQ ID NO: 662183 - DNA, 529 bp, Homo sapiens
cctctttaaattgggtattaatggcatgctctttaaatgtcctgagtttaaccaatagtccattttgggtgtaaattaagcagcaaatggctaaaaaaagtactgtataactgttttgtgaccacatgccctctggcagctagtgtgcccagccatgtggcaccctgggttatgggtatgctctttggatctgcactactagtagttaaaattactctgttcataactgagggctttcaaaatgttattttaaaggggaaaatgttggttatttatggactttttcccccaaaaaaccttgccattgttgcttttaatgacagaaacccygtggaacacctgtataggcctctgaatcccttttggaatctgagaaaagcatatttatgcacaaatgcagagttttgtctacaacttaaggaagtttgcatatctcaggtcaagagtcccgttcttaaatggtctatttttgtggtttgtagccaaggttagaaagtgacacaaagtgatttattccaaatcagtaaga

SEQ ID NO: 662184 - DNA, 646 bp, Homo sapiens
tgagataaaaaatagctaattataaaagtgagccgtatggacttaattatgaacaataaaatgaactctcattaaaaaggcataaattcatcactttgcagctcaataaacataaaaatgggaaaatagcctattctttttaatgataaaaatcagtaatagtattagtatattatgcatttatatgctaaatattctaggtttcttttgcatttgttatttattttttaaagatatcttttcaagaaascattgacttcattattttatgggtaaagaaatcaaagctagagaaattagagccacaaaactaggaggtgatacagcagaaattggaacccaggacatgctggcatgactccacatttaaacgatttatactctccatgctgcttccctttaagacttgaatgataaactcttggcacttttattaatattgtcacactagtattgtttgtattatattaatcagcacacacgcctaagaggcttaccacagtacaactttatttctccctaatgtaaagctcaaaggcggggtacccttggctgcagtcatcagatctgtgctgatggtcgctctactgccttcagcatgtggctgctgccagtgtaactagaggtgttgctatttgggcggcca

SEQ ID NO: 662185 - DNA, 617 bp, Homo sapiens
cacacaatggctttgcttcagttgactactttgcaaaaaacagttaaatttgttttattcttaaaatttgtggtatagttatgcctgaattcaccccgcatattatatgtatactatataccaggcattttgttaaatgctctgagtccaaaagtatgttttaatataaagtatcgtcctttctctcaaagagtttgtggtctagtagtgaaattgaggtgtgtaaaaatgcagcaatacctggcagactrttataaatgtatatataataaaattaagtttagctatgtgagtttatagttttatataataaagcttctccaaaaccatttttctttgtgctttcctataatttttctttatttaaaaaatcatttcaacttttattttagattcaggggtacatgtgtaggtttgttgcatggatacattgcattatgctgaggtttggggcacaaataatcccatcacccaggtactgagcatagtacccaatagtttttcaactcttgcccttttcctgtactccggcctctagtagtccccagtttctattgttgccgtctttatgtccatgtgtatccaatgcttagctcccacttataggtgagaacatg

SEQ ID NO: 662186 - DNA, 583 bp, Homo sapiens
tgatctgcccccttggcctcccaaagtgctgggattacaggtgtaagcctgattgcagcttctagtagttcaaaacttccttatggtcataaacaaggcagaggctgagtaactatttttcctaccatagaatgtcatgtaaccattaaaaagaatgggggaagactgcatcaaagtagcataaaaggatgctgaacccatatttttatttatttatttatttatttatttatttattttgagatggggtttcactcttgttgcccaggctggagtgcaatggcccggttgaacccatattttgaaagacaaaagtaagttgtataatratctatataaagggatcccatttatataaaaaagaccttcatatacctctgtgaatagtatacatgtatctttacatattaaacatgtttctctctgtatatgcataaatatgtgcatataaatctacatagaatagaaaactaatcccaaattgtcaccaatggttaccactgaagagcagtaatatggagtaatgataaggaacttgaatgttttatttcaaatatatctgtagtgtatgaattgtttacaa

SEQ ID NO: 662187 - DNA, 583 bp, Homo sapiens
tgatctgcccccttggcctcccaaagtgctgggattacaggtgtaagcctgattgcagcttctagtagttcaaaacttccttatggtcataaacaaggcagaggctgagtaactatttttcctaccatagaatgtcatgtaaccattaaaaagaatgggggaagactgcatcaaagtagcataaaaggatgctgaacccatatttttatttatttatttatttatttatttatttattttgagatggggtttcactcttgttgcccaggctggagtgcaatggcccggttgaacccatattttgaaagacaaaagtaagttgtataataatctatataaagggatsccatttatataaaaaagaccttcatatacctctgtgaatagtatacatgtatctttacatattaaacatgtttctctctgtatatgcataaatatgtgcatataaatctacatagaatagaaaactaatcccaaattgtcaccaatggttaccactgaagagcagtaatatggagtaatgataaggaacttgaatgttttatttcaaatatatctgtagtgtatgaattgtttacaa

SEQ ID NO: 662188 - DNA, 573 bp, Homo sapiens
gaaactttaagaactaaaatgttctaaatatcccttggacattttatgtctttcttgtaaggcatactgccttgtttaatggtagttttacagtgtttctggcttagaacaaaggggyttaattattgatgttttcatagagaatataaaaataaagcacttatagaaaaaactcgtttgatttttggggggaaacaagggctacctttactggaaaatctggtgatttatatcaatatttctcaattttttaattgtgtttatttttctgggtgttcaatttgctatacagataaatcaaactatgagttatgcttcatttcatgcggtgattgctgccaatacccttggctctcacctagtgaagaatgcgctttactaaactatgggctggcccctaatgggagagtcactgatataaattgccctttttataagaagtttctttctgtcttgctactcaaatttacctccttaaaaatatttatattatcttaacaagggctctcatttcattgcttttgttgaacaatatttctcataattgttgacaatttaatgaagctggcagtg

SEQ ID NO: 662189 - DNA, 569 bp, Homo sapiens
cctcaactcagtaagactaccatggtctactttggatctctccccttgcacggtggtccagagttgctccagaaaaaaaccaagatcaccatacacctcaccttgtttatttccttttctgaggaattctagccytttgctgcttgttgtccaatgtctgataacaattgcttcatatattgtgttgcattttctagttgcttaagacaggaagttatgacttctgttttacttcaacgtgactggaaattgaagtcttattgggacaattctgaggaacattttacaaggtttccttgagactccatggcaagatgaagccctggttgcacaaatgatagctcattcattacatacactttattagattttctctcttccctatcccacattcccccactccttcacttgttctttccatgatcacctgtaagataaactactgcgcataagtcttttatcagactctgttttgggggagcccaaacttagacagttgggccccccagaaattagacctcatagcagaggcttatgactactattttattgaggagtataatgccaga

SEQ ID NO: 662190 - DNA, 504 bp, Homo sapiens
gcactgatctctgcaatctcttcagggatgcaatattgttttgacttactatttttttaggtagaggcagctctaatggcttccatttgagctgcctttcattttccaccataataaccctcaccctaccagtcagggagccaatgtggggattctaccagctgctaagtatgtctatgcgaattatggattctggcactggggaaataaccacaggatgagtctgggtacccattggactgactggaagtgggacattagctaaaactccatacattacctgacctacataagcccctacttyaactggaggaccacagtggcattttgggttccctggaatgaatgtcagctaagagccagtgaccagtattccccaaataatctgatcattttcctttctgcaatgcacagaaaggctacaagaggtgaaccccagaggcccctctagcaatggagccagctccctcttgcctgctcctcttggtccaccccatcctccct

SEQ ID NO: 662191 - DNA, 506 bp, Homo sapiens
ttgggttccctggaatgaatgtcagctaagagccagtgaccagtattccccaaataatctgatcattttcctttctgcaatgcacagaaaggctacaagaggtgaaccccagaggcccctctagcaatggagccagctccctcttgcctgctcctcttggtccaccccatcctccctatccagtttatctctcctgtttgctccctcctagaaatcctcaccctagataagccccagtcccactcttgcccctccaacagatgcctggtgaatttggtccctggtaagatccaggtcccyttccctctaaaggacttaaggccaattaagggggatcttggcaagttttcacatgatgctgacagatgtatagaggctttccagaacttaactcaagtatttgaactctcctgggaagatgttatgctacttttgaatcaaagcctgactaacactgagaagcaggctactctgcaagtggcagagagatttggggaatgagcttt

SEQ ID NO: 662192 - DNA, 585 bp, Homo sapiens
aaaaattattagcagagaaggaataataaaaatccaaacagaaataaataaaattgaaactaaaataatagaaaaggtcaacataataaaaagttcattttttaaaaagaaaaatcaacaaatctttagctagactacaaaagacaaaagaagatacaaataaataaaatcagagatgatatgactgaaatacagaggatccttagtgacaattgtgaacaactatatgccaacaaattgaaagagctaaataaaatggatacattcctgggcacataaaacctacaaagactgaataatgaagaaataaaaaatctgaaaacactaayaatcagaaacaagattgaatcggtactaaaaataatttccaaccaagaaaagtccaggactgaaagacttcactgctaaactttattaaacttttaaagaagaattaatactaattcttctcaaactcttctaaaaaactgaagggaagagaattcttccacacttattagatgaaaccagcattattctgttacaaacactaggcaagaaggcaacacaaaataaaattatatgcctatattttttatgaacaca

SEQ ID NO: 662193 - DNA, 577 bp, Homo sapiens
aaaactttcccccatttttcaattgatttgccttctaatttattgagctatatgaattatcaaatatattcattatgaattttctcagagaaatgtattgcacatattttctcccagtctgtggcttggtttttcattttcttaacagtattgtttgaaaagtagcagatttcaattttgatgaaatacaaattwtcaattttttaatttatagttggtgcttctactatcttatctaaatataacctttacctatccaagtcacaacaatttttcttctctattttcttttagaattttgagaattttaatttttatatttaggtgtatgatgcattttaagttaattttgtggttggtatgaagcaaagatcaaggttcactttattccatgtggatatttggtggcttcagcaccatctatggaaaggctgtctttttcacatagaactatttttgcaccttcgtaaaaagatcaattggctatttatgtctgtactaaaggttactggttaagaactcagccactggaatttgattatctgagtttaaatcctgtttcaaccatttataggat

SEQ ID NO: 662194 - DNA, 550 bp, Homo sapiens
gttgtgttccataactggcttctcaatgccrtcatgtttactgatgacctttgctggcctgcactgaggacaaagttcttcagaaccagccagaagaggatctagttagacttctgtgaaagaaagtctatgtgccattccagtgccgtactcatgcctgccatggagcaagacggtggaagacacttaaaccttcagtgctttaactcctccacggataacaaagaaggagagagggagaagctggaagctacttcacccttcaatttcaggaggcagtgcagggctcactggggactagaacaggtctgcagaaacagccttggtcaccagtaatcatgaaattagatggttccagaagcctatggggagaattcctccccccatgaggttgtttgggggaaaacagactgggtgctattatgctgcccaattgatgcaaatctctagaagaagctttcacatgagcccctcaaattcatcaacctcctacagcatctccaaatggtgtcaaaaacacacctgggggtgggaccagagctggggcagg

SEQ ID NO: 662195 - DNA, 550 bp, Homo sapiens
gttgtgttccataactggcttctcaatgccgtcatgtttactgatgacctttgctggcctgcactgaggacaaagttcttcagaaccagccagaagaggatctagttagacttctgtgaaagaaagtstatgtgccattccagtgccgtactcatgcctgccatggagcaagacggtggaagacacttaaaccttcagtgctttaactcctccacggataacaaagaaggagagagggagaagctggaagctacttcacccttcaatttcaggaggcagtgcagggctcactggggactagaacaggtctgcagaaacagccttggtcaccagtaatcatgaaattagatggttccagaagcctatggggagaattcctccccccatgaggttgtttgggggaaaacagactgggtgctattatgctgcccaattgatgcaaatctctagaagaagctttcacatgagcccctcaaattcatcaacctcctacagcatctccaaatggtgtcaaaaacacacctgggggtgggaccagagctggggcagg

SEQ ID NO: 662196 - DNA, 550 bp, Homo sapiens
gttgtgttccataactggcttctcaatgccgtcatgtttactgatgacctttgctggcctgcactgaggacaaagttcttcagaaccagccagaagaggatctagttagacttctgtgaaagaaagtctatgtgccattccagtgccgtactcatgcctgccatggagcaagacggtggaagacacttaaaccttcagtgctttaactcctccacggataacaaagaaggagagagggagaagctggaagctacttcacccttcaatttcaggaggcagtgcagggctcactggggactagaacaggtctgcagaaacagccttggtcaccagtaatcatgaaattagatggttccagaagcctatggggagaattcctccccccatgaggttgtttgggggaaaacagactgggtgctattatgctgcccaattgatgcaaatctctagaagaagctttcacatgagcccctcaaaytcatcaacctcctacagcatctccaaatggtgtcaaaaacacacctgggggtgggaccagagctggggcagg

SEQ ID NO: 662197 - DNA, 566 bp, Homo sapiens
tattctcttggttttttaaataaaagcaaaattaacaatgatctgtgctctgaaagttttgaaaatatatttgaacaatttgaatataaattcatcatttagtcctcaaaatatatayagcattgctaagattttcagatatctattgtggatcttttaaaggttttgaccattttgttatgaggaattatacatgtatcacattcactatattaaaattgcacttttattttttcctgtgtgtcatgttggtttttggtacttgtattgtcatttggagaaacaataaaagatttctaaaccactgatgttgtttctccttcttatacagttactatttatctttaattctacattattcaaaatattacctctgctcttctctggctggcagagagggccctcattccccaataccattgcattggttcaacttttctccatgttcagcccccttccagttactccttcacagcaccaatagcctctggggtctttagaaaacacaaataggataagattttcctatctaaattcttaaatggctccctgtttcctagacatga

SEQ ID NO: 662198 - DNA, 539 bp, Homo sapiens
attgtcatttggagaaacaataaaagatttctaaaccactgatgttgtttctccttcttatacagttactatttatctttaattctacattattcaaaatattacctctgctcttctctggctggcagagagggccctcattmcccaataccattgcattggttcaacttttctccatgttcagcccccttccagttactccttcacagcaccaatagcctctggggtctttagaaaacacaaataggataagattttcctatctaaattcttaaatggctccctgtttcctagacatgaaataaaagttgctaaacatgatgaatgaggttctgtctcatctcactcctgatcatcagtacttcaacttcccttgtgcctcacattcactatagtcaggcgttcagttccctaactaggcatgttctttccccaggctcatgactttgtatttgctagggtctctacctggaaagcatttacgttttcctgcgtataagaggaggcttattcatccttcagaactcagttcaagcaat

SEQ ID NO: 662199 - DNA, 539 bp, Homo sapiens
attgtcatttggagaaacaataaaagatttctaaaccactgatgttgtttctccttcttatacagttactatttatctttaattctacattattcaaaatattacctctgctcttctctggctggcagagagggccctcattccccaataccattgcattggttcaacttttctccatgttcagcccccttccagttactccttcacagcaccaatagcctctggggtctttagaaaacacaaataggataagattttcctatctaaattcttaaatggctccctgtttcctagacatgaaataaaagttgctaaacatgatgaatgaggttctgtctcatctcactcctgatcatcrgtacttcaacttcccttgtgcctcacattcactatagtcaggcgttcagttccctaactaggcatgttctttccccaggctcatgactttgtatttgctagggtctctacctggaaagcatttacgttttcctgcgtataagaggaggcttattcatccttcagaactcagttcaagcaat

SEQ ID NO: 662200 - DNA, 572 bp, Homo sapiens
gacaaagcatttttgggacctgatgcagcctttgaacgggggtcctaactctggggttctgaaaacacctttttatgattaaatgttaagaccaggccaggcgcagtggctcacacctgtaatcccagcactttgggaggccaaggcaggtggatgacttgaggtcaggagttcgagaccagcctgaccaatatagtgaatacctgtctctactaaaaatacaaaaatgagccaggcatggtggcgcacacctgtaattccagctactcaggaggctgaggcaggagaatcacttgaacccaggaggtggagtttgcagtgagccaagatcgcgccactgcactgcagcctgggcaacagagtgacactctgtctcaaaaaataaaagacytaagtgaaccaccaacaatatgtgaaagtgcttgtttctctaccccaccactgtaccaccagaggggactgttaaacttttgaatctttgcaatgtgatcaattagaaatggagtctcattgtagttttaatttgccttttctcttattgcaagtgaacttgaacatcatgtttctagtac

SEQ ID NO: 662201 - DNA, 525 bp, Homo sapiens
cctgataggaagtttaatgaattttaaaagaaagcaatgttgcttttataaaatataaaatttattatttttcttgggtggggagacagtgtctctctgttgcccagactggagtgcaatggtgcaatttcagctcaccgcgatatctgcctcccaggttcaagcgatccttctgcctcagcctcccgagtagytgggactataggcgtgcaccaccacacccagctttctatttttagtagagacggggtttcaccatgttacccaggctggcctagaactcctgacctcaggtgatctgccagcctcatcctcccaaagtgctgggattatagacatgagccactgcacctggccatttatttatttataaatttaaaataaaattttaatttataattattttaataatatgtaattacatgatttaaggatttttaaaaaatcaattaagcaaaacaattagaaatgaagtaaagaagattagcaaaaatggatatatattcaggcctctaattagtgcat

SEQ ID NO: 662202 - DNA, 633 bp, Homo sapiens
caatacattgttgttagctatagtcaccctactgtgctacagaacattgtaacttattccttctgaaacgacctttgcaaaattatgacagtaaaagaaatctgacatagtggactccatcttgtgtctgacccccaagctgtcctttgtcattcctgggcataggccaagctagctttgggaggaattcagtttatagtttaacttgaaaacaaggacaataacaattcctccctaaaactaaccccttccttgctcagggacagaaaactgcatttttaagactaatgaaaggccacaagaatagcattatgggaggagcatgaactctgctaaaacgtaggcataatttctataacccattackgcgcaggagtcctgtggccggaggtcacaagacttgtgaccttcccaattgctcctatagataacaacaatattgttgaacctaagattgttttttctgagatgtttttcagactgaccccacccagactcatgactcaactggtcctgtgaccccacccagaggcggactcagcacacacctttatgatttcatcttcaagcagtcagcagtacccattccctagtctcctgcccaccaaattgtccataaaaaccctagcctct

SEQ ID NO: 662203 - DNA, 586 bp, Homo sapiens
agatgatttgttttatgagatatattaaaatgaatatactaccaattwtatgacactttccccacaactgtttggaaatattaataatagatctaatggctatttgaaattccttcagaacaatctaaattttttgaaagtattctcattaaattcattatatttcattgtgaccaagagggatttattctagatatgtaaggctggttcaacatcggaaaaaaaaaatcaaaataagtcaccatatctccaagctaaaatgtaaaaatatgcccataaaatttactcagagaaagcatttgatgaaatatgacacccatttttcagcaagtggggaatagaaaggaattatctcaatttcatggagtgtctacataagcctgtatctaacatcatactaatgataaaagactgaatactttccctttcaaacaaggaataagtcaagaatgtctgttttttctattgaacagacattcagacagaatttccagtgagttcaataaggcaagaaaagcaaacaaacaaaaagagatatcgtttataaaggaagaaataaatctgcactacttgaagatggcgtgat

SEQ ID NO: 662204 - DNA, 582 bp, Homo sapiens
tctgtagtataactgaagtaagccagctttttatttaattataacatgattaatatctaaataaagtgcttcaggtcacactagttgacacaggagctgagtattttcacctaagactaatcacaaatgagaattttcggtactgctctcttcaggcactgtgggcacaaattaagcaaacttttgcacwgttaatctgcagttgccaattcacttgatgacattttggctaaagaaattgcccattaagtcacacatgtgacctaagtaacatcctcctctcaaatattaagttactatgggccaaataaaatgtatttaattacatgtgttcaacctattctttttatcctctactgccgactaataaaaatcattctggcttttgtctctgcacttcactccatgcctccatcatttaggaaaagttctgggccaaccagtctagttaaggagtttgtgtgatctagaatcaatagaatggagaaagatagatatcaatagatagagatacacaatggatatctctctatcaatagatagagatacacaatcatctaaactgggatatagaatattttt

SEQ ID NO: 662205 - DNA, 548 bp, Homo sapiens
ggctttgtttatgctgtgagggtgaaactgcctacacaagcctcagcaatggtggatgcccctccctgcaccaagctcaggcatcccaggttgacctcagactgctgtgctagcagctagaatctcatgccagtggatcttagcttgctgggctccgtgggggtgggacccactgagccagaccacttggctccctggcttcagccccctttccaggggagtgaatggttctgtcttgctggcataccaggtatgaaaaaaagaaaaaaaaatcctgcagctagctcratgactgccaaaacggccatgcagttttgtgtttgaaacccagggccctggtggcataggcactggagggaatctcctgttctgccagttgcaaagactgtgtggaaagctcagtatctgggctggagtgcactgttcctcctagtacaatctctcacggcttcccttggctgggggagggagatccactgaccccttatgtttctcgagtgagtccatgccccaccctgctttggctttcactccatgggctgcaccca

SEQ ID NO: 662206 - DNA, 566 bp, Homo sapiens
ggctattgttcctttctttgtgtccatgtgtattcagtgtttagctcccactcataagtgagaacatacagatttggttttctgtttctgtgttagttcgcttaggccaatggcctccagctccatccttgttgctgcaaaggatttgaccttgttcttttttatgactaygtagtattttgtggtggatatgtacagtagtttctttatcttgtctatcattgatgggcatttagactgactctatgtctttctacagtgaatagtactgtgataagtgtatgtatacattgtctttatggtagaatgatttatattcctttgcgtatatacctaacactgaaagcagtggaggaagaacctctatccagtaaatggtactggaataactggctagcctaatgcaaaagattgaaactggaccgcctcacttatatcatatttaaaaattacctcaagatggattaaagacttgaatataaaacctaaaactataaaaactgtggaagataatctaggaaataccatgctagacataggccctggcaaacattgcatgatgaaga

SEQ ID NO: 662207 - DNA, 626 bp, Homo sapiens
ttttactgatttcttacaaaatatacagtaatttgtgttgcactggaatatttcaacagtctttgcaaacttttttcaccaaagatgaggtttttttgcagtcattttgtcctacctgttttgttctaactattgcatcagaacagtagatatgaagtacatttctgtctttcccataattagagactactattctaaacaacaaagtgggatctatctcttgtagatattttaattcatatgctatctttatcccctttcttaatatacagatttttatatgggtcaatcaaatgaattcttcatgtactccttytcgtttcaggaattatctgctatatcattcagtaccatgtacatgaaataatagatgtaataataatagattctataaataaagttcattagctatttttatcagtttttagatttttagatttatcagtttttagtttttagattttttagatttgtcagtctgcaaacaaaagcatatgtgcatgttcattttggaattgccaaaattctttaaccaaaggagttatgatacaaattagatgcattgatcacgtagctactgtagacaaacgtagacgtaagatacaacaattgagaagataacaaac

SEQ ID NO: 662208 - DNA, 626 bp, Homo sapiens
ttttactgatttcttacaaaatatacagtaatttgtgttgcactggaatatttcaacagtctttgcaaacttttttcaccaaagatgaggtttttttgcagtcattttgtcctacctgttttgttctaactattgcatcagaacagtagatatgaagtacatttctgtctttcccataattagagactactattctaaacaacaaagtgggatctatctcttgtagatattttaattcatatgctatctttatcccctttcttaatatacagatttttatatgggtcaatcaaatgaattcttcatgtactccttttcgtttcaggaattatctgctatatcattcagtaccatgtacatgaaataatagatgtaataataatagattctataaataaagttcattagctatttttatcagtttttagatttttagatttatcagtttktagtttttagattttttagatttgtcagtctgcaaacaaaagcatatgtgcatgttcattttggaattgccaaaattctttaaccaaaggagttatgatacaaattagatgcattgatcacgtagctactgtagacaaacgtagacgtaagatacaacaattgagaagataacaaac

SEQ ID NO: 662209 - DNA, 581 bp, Homo sapiens
gaaacactatggctaatttgctgcaatgaagtagcaaaaataaaacacaaatttcmaaaaaaatgctcaaaggctattgaagcagctcatgcaaaaaaaaaggggcggggaagttttagataaataattttttctgctaattataaattacaaattttataattagtcattatgttagttctcaagaggatttttaaatatcacaaagaaaatataacaggctcttgaattatgttcgaagcaattagaatgagtactaaaaaagcctgttaacaggacctattaacatattggttggaaacaatgattgaggaataaaaattatagttttcattcctaggtggctgatgaatcagttacttttcaaaggtcgaaagtacaggagcaaagtatgtttttcagggacaataatgaaaaattaaggatttgtggagtatgatgtgttagaagcactgggcaaaattgtccttagacaacgaaatatctggttcctagagctcaaaaaaattatttagagtaattagaaaaaggagaatggaattaaccagtatttattaaacatctacaatgtatcagatgct

SEQ ID NO: 662210 - DNA, 581 bp, Homo sapiens
gaaacactatggctaatttgctgcaatgaagtagcaaaaataaaacacaaatttcaaaaaaaatgctcaaaggctattgaagcagctcatgcaaaaaaaaaggggcggggaagttttagataaataattttttctgctaattataaattamaaattttataattagtcattatgttagttctcaagaggatttttaaatatcacaaagaaaatataacaggctcttgaattatgttcgaagcaattagaatgagtactaaaaaagcctgttaacaggacctattaacatattggttggaaacaatgattgaggaataaaaattatagttttcattcctaggtggctgatgaatcagttacttttcaaaggtcgaaagtacaggagcaaagtatgtttttcagggacaataatgaaaaattaaggatttgtggagtatgatgtgttagaagcactgggcaaaattgtccttagacaacgaaatatctggttcctagagctcaaaaaaattatttagagtaattagaaaaaggagaatggaattaaccagtatttattaaacatctacaatgtatcagatgct

SEQ ID NO: 662211 - DNA, 581 bp, Homo sapiens
gaaacactatggctaatttgctgcaatgaagtagcaaaaataaaacacaaatttcaaaaaaaatgctcaaaggctattgaagcagctcatgcaaaaaaaaaggggcggggaagttttagataaataattttttctgctaattataaattacaaattttataattagtcattatgttagttctcaagaggatttttaaatatcacaaagaaaatataacaggctcttgaattatgttcgaagcaattagaatgagtactaaaaaagcctgttaacaggacctattaacatattggttggaaacartgattgaggaataaaaattatagttttcattcctaggtggctgatgaatcagttacttttcaaaggtcgaaagtacaggagcaaagtatgtttttcagggacaataatgaaaaattaaggatttgtggagtatgatgtgttagaagcactgggcaaaattgtccttagacaacgaaatatctggttcctagagctcaaaaaaattatttagagtaattagaaaaaggagaatggaattaaccagtatttattaaacatctacaatgtatcagatgct

SEQ ID NO: 662212 - DNA, 581 bp, Homo sapiens
gaaacactatggctaatttgctgcaatgaagtagcaaaaataaaacacaaatttcaaaaaaaatgctcaaaggctattgaagcagctcatgcaaaaaaaaaggggcggggaagttttagataaataattttttctgctaattataaattacaaattttataattagtcattatgttagttctcaagaggatttttaaatatcacaaagaaaatataacaggctcttgaattatgttcgaagcaattagaatgagtactaaaaaagcctgttaacaggacctattaacatattggttggaaacaatgattgaggaataaaaattatagttttcattcctaggtggctgatgaatcagttacttttcaaaggtcgaaagtacaggagcaaagtatgtttttcagggacaataatgaaaaattaaggatttgtggagtatgatgtgttagaagcactgggcaaaatkgtccttagacaacgaaatatctggttcctagagctcaaaaaaattatttagagtaattagaaaaaggagaatggaattaaccagtatttattaaacatctacaatgtatcagatgct

SEQ ID NO: 662213 - DNA, 555 bp, Homo sapiens
tgcttgtctatatgacttcctctagacatttatgtatgctatatcccatcagaaacttcaagaaccatcacatggatatgacattgtccttttcatttttccaggaaacaaggtttgctccttcagcctggatctaaaataaagacatgtaaaacaaagcggaccacacttgacatgaaaaaatatatatgagcaaggaagtaaaactttagtgttgcaactctctaagacttggaagttgtttcttatgcagcataatttaatgacagtcaactaatgcagtgtaaaccatggagcttagactcaaagtaagttccatctggctttaaagttcatgcacagtatactacatcactctctttctcacacatcatgtgatatataaagccatgggttgattatgtaattcagaattgagtgtaaayggccatgaaaatgccttgagaaatctccatttggggactatacagagtatgaggaaatagaaaggagaactaagaaaaaaaatcaaaattttaatggtggtacagtcaatgcagaaaggaatttcaatac

SEQ ID NO: 662214 - DNA, 584 bp, Homo sapiens
cagtattccaaggcaggatggggacaactgaagtggcaaattatttgcagtaactagataaataggatggttgggaattttaatcttgtaacaaaagtatattgttctgttaaaggaaagaaaaagaagaagggataagtaaaggtgaagagaaactaagatggaatggcttccttttccccagttaagtaggagttatatcccttactcttttaagaattagatggcttgagcactgtggaatgaatctacggaaaaaacaaagagatagaaaaaaaggtwgatattagcaaaaaataaaaataaaataactggatcctcaatgctgcccactaagaatatattttaaggatttgaacaaaaattatgataaaaatatttttagtaattgcatcaagttttctttttatttcaccattattcttctgtggtcacatagttcaaatgagtagagcatttaaaaatccagtatatgtatgccattcccgaattggcattttagataatattaataggatacacactttgctgagatgcaggaggactgtatttaaatcccaaatttatttttaggtttgttaagg

SEQ ID NO: 662215 - DNA, 219 bp, Homo sapiens
ctttgttaatcaaaaaagtataaatgaaaaatatattattcaaaaatgtaataaatgaatatatgcatatgataaaatattgttgatatttatttaaagctttattcatcttacagagtgaagtgcctgatyctaagatatggtggtcaaagaggatatctttaaatatctgccctttctcttttgaagatacacctaggcaatgtctgcctatgagct

SEQ ID NO: 662216 - DNA, 534 bp, Homo sapiens
ttgcagcagctcctcccatcacaggctggggggccacctaggagtgaaaaatggtttcctgggctgrgtccagggaccccctgctgtgtgcagccttggaacttggtgccctgcatcccagccactacagccatggctaaaaggggccgagctatacctcagactgtggcttcagagggtgcaagccccaagccttgacagcttccgtgtggtgttgagcctgcaggtgcacagaagtcaaaaaatgaggtttgggaacttctgcctagttttcagatgatgtataaaaatgcctggatgtccaggcagaggtgtgctgcaggggtggggccctcatgaagaacttctgctagggcagtgaggaaggggaatgtgggcttgaagcccccaaacagagtccccactggagcactgcctagtggagctgtgagaagagggctgcagtcctccagatcccagaacagtggatccactgaccacttgcaccatgagcctgaaaaagccatgtacactcaatgccagcccatgaaagca

SEQ ID NO: 662217 - DNA, 568 bp, Homo sapiens
aatgatcacaggttggaagaatagtttgctgtagaattctgtggaatactgagggctcttgggctcaaagaactataatttggcattgtcagagaatgagrgtttcctgatagttgcataattattgtaatgtatcacctatacatgaattattcattttttatcaaagtctctatatttaattaaaaattcaatgaattttaaaataccaatgattagcataactgccacctttaagtatagtttctgttactcacagctggactccacacatgcaaagtactggacccttcctttgaatccaccactgttacccctggaagttggatgtttctgctggcattcttcccatcatggactctgtgcagaagttgcctcctatggtttgaatgtgttccccatagttcatgtgttgggaacttaatgactaatgcaacagtggtgagaggtaggtcctccctttaagaggtgatgcggtaatgagggctctgcccccatgaatcgattaatgttgttatcatggacatgggtacattatctcaagagtggatttgttataaaagtgaga

SEQ ID NO: 662218 - DNA, 568 bp, Homo sapiens
aatgatcacaggttggaagaatagtttgctgtagaattctgtggaatactgagggctcttgggctcaaagaactataatttggcattgtcagagaatgagggtttcctgatagttgcataattattgtaatgtatcacctatacatgaattattcattttttatcaaagtctctatatttaattaaaaattcaatgaattttaaaataccaatgattagcataactgccacctttaagtatagtttctgttactcacagctggactccacacatrcaaagtactggacccttcctttgaatccaccactgttacccctggaagttggatgtttctgctggcattcttcccatcatggactctgtgcagaagttgcctcctatggtttgaatgtgttccccatagttcatgtgttgggaacttaatgactaatgcaacagtggtgagaggtaggtcctccctttaagaggtgatgcggtaatgagggctctgcccccatgaatcgattaatgttgttatcatggacatgggtacattatctcaagagtggatttgttataaaagtgaga

SEQ ID NO: 662219 - DNA, 495 bp, Homo sapiens
aataagtccatctcatctcttctttaggacttcgatattagaacatctcaaggttgttttcttattagcaaaattaaaacataatcttactctcatagggtaaccatgcaaattaaataaaataatgcctctaaagggcatggtcaagaatttggtacttyacatcctgctcctttcacctggaacctgattcatgctgctggaatcattagtttagttgtttcgaatactgttttcaattttgttcttgtcgttcctttgtttccaacttgcttccctccttccttgaacatccctttccttcatcaaaatgacatttctgtttctgtttaagtttctgtttctttatgcttaatcagtgagtaattttctattgaagactcaattttttgggtgttttgggatgatttttaaatgccatgaagagctaaaatcatttttactatgatccttttcactttagtatgtctattatctcacaaactatgcttaaaa

SEQ ID NO: 662220 - DNA, 495 bp, Homo sapiens
aataagtccatctcatctcttctttaggacttcgatattagaacatctcaaggttgttttcttattagcaaaattaaaacataatcttactctcatagggtaaccatgcaaattaaataaaataatgcctctaaagggcatggtcaagaatttggtacttcacatcctgctcctttcacctggaacctgattcaygctgctggaatcattagtttagttgtttcgaatactgttttcaattttgttcttgtcgttcctttgtttccaacttgcttccctccttccttgaacatccctttccttcatcaaaatgacatttctgtttctgtttaagtttctgtttctttatgcttaatcagtgagtaattttctattgaagactcaattttttgggtgttttgggatgatttttaaatgccatgaagagctaaaatcatttttactatgatccttttcactttagtatgtctattatctcacaaactatgcttaaaa

SEQ ID NO: 662221 - DNA, 626 bp, Homo sapiens
taatatgagtttatttctggactctcttttgaaatttttatttctttattgatattgtctatttgataagattatttttatggcttcatttagttgttcaaatatggtttcctttagctttttaaaacatatttaatatacttgatttaaaatctttgcctaaaaagtccaatacttgggcttcctaacagaaaggttctattaattgcttttcttccttgtgtactgcccataatttcttcttcctttgcatgttttctttgttgttgttgtttttgttgttgaaaactgaacatttgggatataataatgtggacactcccaaattaagattcccttctgtcccaaggtttcttccaacaattgttttattttttgctacttgtttattcagagacatttcatgaacaaatgttatgaaggctgtattctttattttatgtattcactgaactatctgttattttaacttaatgatcagcttgttattggacagaaattttcctgaatgcctgaartcaaaacaaacaaaaaaccaaattcacactctctgtaaactacttctctgtatgtattgggacacacaatgaacacttagccaggtagttcacaactctgttttagcc

SEQ ID NO: 662222 - DNA, 626 bp, Homo sapiens
taatatgagtttatttctggactctcttttgaaatttttatttctttattgatattgtctatttgataagattatttttatggcttcatttagttgttcaaatatggtttcctttagctttttaaaacatatttaatatacttgatttaaaatctttgcctaaaaagtccaatacttgggcttcctaacagaaaggttctattaattgcttttcttccttgtgtactgcccataatttcttcttcctttgcatgttttctttgttgttgttgtttttgttgttgaaaactgaacatttgggatataataatgtggacactcccaaattaagattcccttctgtcccaaggtttcttccaacaattgttttattttttgctacttgtttattcagagacatttcatgaacaaatgttatgaaggctgtattctttattttatgtattcactgaactatctgttattttaacttaatgatcagcttgttattggacagaaattttcctgaatgcctgaagtcaaaacaaacaaaaaaccaaattcacmctctctgtaaactacttctctgtatgtattgggacacacaatgaacacttagccaggtagttcacaactctgttttagcc

SEQ ID NO: 662223 - DNA, 626 bp, Homo sapiens
taatatgagtttatttctggactctcttttgaaatttttatttctttattgatattgtctatttgataagattatttttatggcttcatttagttgttcaaatatggtttcctttagctttttaaaacatatttaatatacttgatttaaaatctttgcctaaaaagtccaatacttgggcttcctaacagaaaggttctattaattgcttttcttccttgtgtactgcccataatttcttcttcctttgcatgttttctttgttgttgttgtttttgttgttgaaaactgaacatttgggatataataatgtggacactcccaaattaagattcccttctgtcccaaggtttcttccaacaattgttttattttttgctacttgtttattcagagacatttcatgaacaaatgttatgaaggctgtattctttattttatgtattcactgaactatctgttattttaacttaatgatcagcttgttattggacagaaattttcctgaatgcctgaagtcaaaacaaacaaaaaaccaaattcacactctctgtaaactactwctctgtatgtattgggacacacaatgaacacttagccaggtagttcacaactctgttttagcc

SEQ ID NO: 662224 - DNA, 602 bp, Homo sapiens
ccaatattctctgaccttgactcatttaattataggttattggaatacaaagttgacagaattatttgctgtaaattaaatgtagagagattatatgtagaaaaatagaattaaaaagacaattggcaaatttctatatgatttctataaaatcaacttaaagwaatgtttgctccaattaagtccacaaactctgttatctcttttcatgtctctatttacccctccttagttaaataaaatgaagtacctattagaacaatgtgtgtagggttcgcgatattatcagtgataaacagtttatggtaaaaacaatgtgcaactttgatctactaatacaagtcattcatttattcattcattcattcaatatgtttttaggctctgatatgtacaagatcctgtgcttgacattagatatatatcatgctgaacaaattatatacaaactctgccctcaaagtggctctaatccagtgaaaaaacacaattgcatgttttcaaattgtttatttagttatccataaagatatttctattgtcttttaggaggctttctgccatagtctcattgacggaaccatctgcactcacttgttcgg

SEQ ID NO: 662225 - DNA, 602 bp, Homo sapiens
ccaatattctctgaccttgactcatttaattataggttattggaatacaaagttgacagaattatttgctgtaaattaaatgtagagagattatatgtagaaaaatagaattaaaaagacaattggcaaatttctatatgatttctataaaatcaacttaaagtaatgtttgctccaattaagtccacaaactctgttatctcttttcatgtctctatttacccctccttagttaaataaaatgaagtacctattagaacaatgtgtgtagggttcgcgrtattatcagtgataaacagtttatggtaaaaacaatgtgcaactttgatctactaatacaagtcattcatttattcattcattcattcaatatgtttttaggctctgatatgtacaagatcctgtgcttgacattagatatatatcatgctgaacaaattatatacaaactctgccctcaaagtggctctaatccagtgaaaaaacacaattgcatgttttcaaattgtttatttagttatccataaagatatttctattgtcttttaggaggctttctgccatagtctcattgacggaaccatctgcactcacttgttcgg

SEQ ID NO: 662226 - DNA, 570 bp, Homo sapiens
accattgtcttttgggtcccattgtttcagctgcaagattaactatttcattaatatttactcccttgaaaataatttgtcctatttttctctggctgatttaagtattttgcctgggtgtgcttttctcttaaaatatcctacttaaggttattagagccctttgaatctatgacttgctgttcactggttttgaaaaaattttagccattatcttgcttctcctttattttctttccttttcttctgggaaaccaattatacgtatgttagatattttcattccttgtatcttttaatattcttccatatttattttctatcatttattgcctccatgttttattctgaaaattgtattctaacctrcattcaagtttattaatgtttcctttagctatgcctaatttaacaaatccatgtactgagttctctatttcaataataatatctttcacttttaatattttcatttgttattttttaatagtttctagttctctgattatattgtcaaacttcatcttttattaaaaatattaagcagagttattttaaaatctttttcta

SEQ ID NO: 662227 - DNA, 633 bp, Homo sapiens
tgctggtttcataacaaacctaatayaaggtttccagaaaaataatagttatatatgtctaaatcactggttaaactcaaagtttttctttatacaattatgtacaacttcagagtttttaatatactcctgcagttttaaaactgaaaatttactagaaaagtttgataatttggggagcagagataaggagaaagttatgtaacaataaatactttaataataaatgcaaatcacaactctggtcaatattttactagaacagtcacttccaaaaaatatgtttagataaaacacttaaaaagaaaacagtgttagtagaaaatagtcagctttcaattaagctggcaattatattttagagtgattggagattcaggaaatcatattaaataagatagtgaggacgaataagttggaaactcgttatgctgttaatcttaaagagaggtgacactttgacctaattttggtttcatctgcatggctgtaacatagcgaagcctgaaggaacattcctattcctgatctactctagctaatcctcttatgctaccctttgggcactgaataaattacagctaatctacaaacaacaggaggatctatgcaatttcagctttcaggagcaaa

SEQ ID NO: 662228 - DNA, 550 bp, Homo sapiens
gttctagaactagatagtaattattatttgaacaatgtggtgaatattcttaataacactaaattatacacttttaaatggttacaatggtctattttatgaaatgtgcattttaccatgataaaaaatagcttgatatcctgattatagtctcattataattttcccctttttttcaagaatattatggaatataawtttaagaaactatgctatagcaattttctccatccatccatgtaccacttaatttcagagaatttattggtatacatacaaacttggaagtcctttgtctggctggttaattttataaatgaagaaaatgctctgaagacactagaaaatatagatggtagaataaggacaagaattcaggactcctgaccccaagattgttgttgtcagtactataaaatcctgcttcacattagcaaaaacaatttgcatatagagacttttacattatgggaaaatcttattgattgattccccattttatctgatgcatttataaattgtatttgttacaactaagttaataaatgag

SEQ ID NO: 662229 - DNA, 507 bp, Homo sapiens
atggggtatgacctcttcctatttatggccataaacaatgagctcagatgggrcacaaatagaggccctatatggcacaatgtctatccattgctcccaaattaggtctatagagatattcttttcctgttccaatgaaggggccaaacaatcgattttttcagaagggagcagtactttcaccttttgagactaggctgttgttctaatgcagaagaaggcaccatatatggtctcctcacttgcacgtggaatcccatttgccttgctgcagccttaggaagtaggcaactcgacttggataagagcatttcagagaaatttctgcttttgtgtcattaacacagcagtaggtgcaaaagatagaatcattagtgcagtggagatttagatacccaacttcctaggtcctggtaatactggtagggggtggagtgtggttatgtaaaatccgttaagtggtgaaaagttcttcctaacaaacaggggtttgttggactagcatca

SEQ ID NO: 662230 - DNA, 455 bp, Homo sapiens
gtcagtgaataaccagaagctaggaagaggcaagaaagaattcccctacgggctagaagtgaaaacgggtgtggrttctgcccacaccttaattttagacttcaaacctccaggactgtgagacaataaatttttgttgtttaagccacctaatttgtggtacagtcctgcatcacttaatgatggggatacattctgagaaatgcactgttagacagttttgtcattgtgtgagcaccacagagtgtacagcacttacacaaaccaaaacagtatagactactacacacctaggttgtacagtagaacctactgcccctaggatacaaacctgtgcagcatgttcttgcactgaatattaaaagcaactaacacaagtcatcaggtaatagaaattttttagctccattttaatctaggggatcactgtcatatatgtggtccattattgactg

SEQ ID NO: 662231 - DNA, 581 bp, Homo sapiens
gtgagctgctgcttccagggctccgagccgcgcggcacctcctgcggctcgaggcggatctcctgcagctccttgaccatctgctcgtactcctcgtctttcatggagtccaggccgctgtcgtggcggtcrtccagtagccgctccttcttcagcccgtcgcgggggccctccatggcccactcctgggggcgctcggccgcctggaacatggcgcggacgagctgcgggcgctgctgcgggtgcgctgggccgcgggctgcgcgctgcttcctcgctggggcgctggcgggcgggacggcggcacggactgctgtgggctctgcagcgccgccgcggcgccctataaacgctggctggggatttctctggggcggggtcaggctcggggaatttccaagccagtcagaccagaaaaagagaactggcttcgtcctctgctagggggaaaaagaagcctaaaccctgagctggggttcatcggagaaactccctgcgatgagccactagggtcacggacagggaactttttgatgagcgccgagtggctggaaagtccttccgaccaggccccctccccc

SEQ ID NO: 662232 - DNA, 599 bp, Homo sapiens
aacgtactcatttgacaggtcatttgccctcacagtctgtattttttcaggtcaaatgcaggtgccacactgacttatggccttgacttccgtagactcattccactcaggatgaaacgtgattggttcctgaggtgaccctgcctcagtgatagaagtgagtcctcaggcagggaagggtgtggaggcaaacagcctggggagggaaggacgcctgggttttcccagccagtggctcagggcaccctgcagacctgccagtcccctctgggatgagccttcatccctgtgaccccttctctgagaaagggcaccccaggcccaaagcctccccagtgcacagggctggtttctgatgagctgccccctgaggctggcctggcaaaaccaggtactgacctgcacagggccttggcatgatttggaaaaaggcaactcattgtccagatggacacagcccgacccccaygcctcagcccacacctgcatgctgtacacagcagccctgaccccaggaaagtccctaagatttgtaggaaaaaggaaagacacacagtacatgctccaccaggctccttctccagggcctccccagcgca

SEQ ID NO: 662233 - DNA, 606 bp, Homo sapiens
gtttctcatgatcctgtgcgttggcagggaggttctttggcttcacgagtattgctcatgtgcctgcactgagctgggagctctgtccttcttcctgtgctggctagccaggacttccttactgcatggcaaccaggcttggagggagtgatctgagagaacagacataaggtgcaagcgcttatcaaggctcatcttgtgtcatgcctccgaagagtcccattggccaaagccagtcacatggccaaggccagcctgaccaacctggtgaaaccatgtctctactaaaaatacaaaaaaattagccaggcttggtggttcatgcctgtaatcccagctacttgggaggctgaggcaggagaatctctggaacccaggaggcggaagttgcagtgagccgagatcgtgccactgcactccaaccggggtgacagagtgagactctgtctcaaaaacaaaacaaaacaaagcaaaactagtgatggctgaaaagawgcaagaataaggacaagatacagaggggctctctatgaagatatgatgatttagggagtgaggagctgcaggaacatttccttatgtgcaaatttggaaagtagcaaaggt

SEQ ID NO: 662234 - DNA, 601 bp, Homo sapiens
agctcctctataagaggaggactttattcaaggtctcagtaccaatccatggtgactccaagagctaaatactcaaattaaaaaaaaaatgttatcccattacacaactctcttaatgggtatgatggacaaaacactagacagttttcaatcacccctcctgttgtccaggaatggcatacactgccattcttgagtatccctaggcactggtaatggatggcgactacctctggcagagaatggctaactgctcttggatttgctggagagcagttgcgtttcttttattccaatgggaaagttgcgaaagtcaagaagaaatggattaaaataaaaatggccactgtttcagctttatataacctgatttcttagccaaaaaccacaaggtgacagtcccttggtaaattttcaacatgratgatccaaaaagatgcagcacagcatttaggcccctctgaatgccatatttgaaatgttgtatttagggagtacagttgtccctcagtatccaccagggattggttccagaacccctgcctttatcaaaatctgtggatgctcaagtttcttatatagagttgcgcagtgtttgcat

SEQ ID NO: 662235 - DNA, 567 bp, Homo sapiens
aacatttttcccatggggataacggttaacaattctgaaaccacaatagatgtatactggaattgaacaattaaataaatgggtggtggaaggtgggagccagatttctcactgttggagtgggaggttatagacaagcaagaggagacatgaataattcatgcagtcatggcttagagttgaagacatcagttcgaacttaatataaattcagatgggagagaaagagagagagagagagagaactatgcaaagatatatgtatatgtacacagtttttttcatttttactttatcagctgaaagggcctaaaaacaatgagtttaactagtagcaagatcttgatttctcccaccattctccaaaaacaagaaccagggttccttggaaaaatgacagatccttggactaggcaggaaatatacataaggctagaatatattgcactgccagcaagtaaagacatrtaaaacaagcaaacaaacaaaccttaatgatgggagtatgtcaaagggatatagggggcacttgaaagatttcccaatggccaaaacttgtacaacttg

SEQ ID NO: 662236 - DNA, 487 bp, Homo sapiens
tttaatcaactcaaagttccacataactggggagacctcaggaaacttacaatcatggcagaaggcagcacttcacagggcggcaggagagagaatgagtgccaagcaaataaagaagccccttataaaaccatyagattttgtgggaactcactcattatcaggagaacagcatgggggaaactgcccccataattcaattatctccacctagtcctgcccttgacatgtggggattattgcaattcaaagtgagatttggatgaggacacagagccaagccaaattacataggtagcatgcattatattttgattggatagggctgcttagacaacgttgaacaagttgttgcatagtaagtttatatccagcttgccgtatatttctgccattaccttgtacattgaaccaggacagagaatcttgtatttaataattattaataaattacataaggaaactgaggatttttatttgcacacag

SEQ ID NO: 662237 - DNA, 441 bp, Homo sapiens
taggaagagaaattgaagatacagcatagattcctaaaagaaaccatttttgagcctttaaaggacgtgatattaaaaatagacaaccgaggtaatttttccaagctagattatgtgacacttacaacataaagtaatggcataggcaaggcaatgcaaataatataatttgacatggatttggagaaataagaccatttttaacttcctattcttttctagaaatcacagaagttttgacttactaagagytcaaataatccatcagaggaaacttccatgcttgaaagaactgcaggaaaaagtacaacacccattaagaggccttctcatggcagtagtgtctgtattgagtcaccactctcgaatggctagtgcagaagaacctgaaaagtcttgatcctaagttcatcactatgcttcttggcatccccaaaataa

SEQ ID NO: 662238 - DNA, 573 bp, Homo sapiens
tttttgtcccccccagacattcatgtgttgatcccctatcccacaatttgagggtatttggaggtrgactctttgggaaataattaggttttgatgacatcagaaggataaagtccctatgattacatcagtgttctcataagaagagaaagagacttaacagcgctctctctcaggtacatgcacagaggaaaggccatgtgagcatccaataagaaaatgaccacctaaaagcaaggaaaatgaccatcactgaaagccaaatatgccagcacctgatcttggacttcccagcctccacaactatggtaaataaatgtctgatgtttaagccatctagtctacagtattttgttatagcagccccaactgatcaagacagacaaggtgggtgtggttactatattagaggtcagtagagccaaagtatcaatcagaatacttactcatgcagacctatggcattggctagttgctcatggtgttcctcgacctgcaatagataagaatcctgctaaacgcttcatttggtctgtaaaagtggaaaagttctaggtcaagtgaacaaaagtc

SEQ ID NO: 662239 - DNA, 573 bp, Homo sapiens
tttttgtcccccccagacattcatgtgttgatcccctatcccacaatttgagggtatttggaggtggactctttgggaaataattaggttttgatgacatcagaaggataaagtccctatgattacatcagtgttctcataagaagagaaagagacttaacagcgctctctctcaggtacatgcacagaggaaaggccatgtgagcatccaataagaaaatgaccacctaaaagcaaggaaaatgaccatcactgaaagccaaatatgccagcacctgatcttggacttcccagcctccacaactatggtaaataaatgtctgatgtttaagccatctagtctacagtattttgttatagcagccccaactgatcaagacagacaaggtgggtgtggttactatattagaggtcagtagagccaaagtatcaatcagaatacttactcatgcagacctatggcattggctagttgctcatggtgttcctcgacctgmaatagataagaatcctgctaaacgcttcatttggtctgtaaaagtggaaaagttctaggtcaagtgaacaaaagtc

SEQ ID NO: 662240 - DNA, 554 bp, Homo sapiens
ttgaacctgctgtataacaggaatatgtaaaccattgcaattgggagcacaaactgtctgaaataagatgtaataattctaaactcttatgaatctactctccaaatggagtcatttaactaaatctacatgtgtcacaggtagactgtacagagttactccattaccttccaggccaaatacaatgttgaataatgcaaatagtaagcacatagtaatttgaaattttctgtgtttttgaaattcaacagtaaccacagcaatcatttagatggtaggacaacaaagcaatttttaatagaggagtattttatcactgattttgtttaggattgccagtccatgatgataataaaaagcacaccaacttttagtcagttttatcgtagtgttttatcctctacacaccatgctttctcttgtatccaggcgagaccactcccacyaccccatttactgtatgctgctgccgtaaataataatactttacgaactagtaaaatggaaaaataaatttcacaaagtgaaggcacaaataaataatattgggaata

SEQ ID NO: 662241 - DNA, 535 bp, Homo sapiens
agaaaaaaaaagaaatcacaaatagaaactgggcttccctttagatgaggtagcaggtcttagctacaagattagaaatgccatggtattacagcctaaaatatcaaagaaagtgttttctctattagacttaattaatagggtattaccatttctcagtattttgtctattcttaataactggcaaaacatccggtctctcactagtacatttgggcaacaaaatgcggccttttatacacattagcmagctacagttatactcagggacctgtaatataaataagatgtatatcttaaagctattcactgcaaggaggatgatagtactaaaatgtgtcaggattcattttacccattggtaaaatgaaaataaaaattgtatttatctaaaagggtaattaagggatcaaattaggtaatagaggtaaaatgtttaatatgccttgtgcaaagcaagatttcaatagattttaattattaatacgtgttatttctctttagctactagtagttgaatgaagaaaattcaact

SEQ ID NO: 662242 - DNA, 506 bp, Homo sapiens
actcattgcaagcaataaatgaaacacatttcatattttattaaaatgttcttaaaataattgaaacccaaagcagagtttatttcaattaacttgtgactcaaaataaatatttaacgtatttagcattctgcaattaagatctataattttagtgatatgcaattagttttttttcttraagctattctccacatagtgtgggtcaaagctttattttactttattcttcaaagggcccatttgtttttgagagattctctttttttctgcatttaatctgctcaaaaaaatgtcaaacttaactgctccaatacctgcacagtcaagactttctactattttataatgtatgcctgcttattaaagtcttcaagacatcctagacttagacaaacagtgtccaaatgtaccatatttagcttctatctcaaaatctcccgagctgtcaatttaggtgttaaagagaccatttgtaaagcttggctgggaattgccattattga

SEQ ID NO: 662243 - DNA, 606 bp, Homo sapiens
aagaaaaaatgacattattggcagatgatgtaactctatatgtataaaactcaaaggcttctacagtaaaccaattaatatttataaataaatttagcaagagaactgaaggaatagtcaatatttacaaatcaattgtacttttaaataccactaacagacaattagaaaatgaaattwtaaaaatatacatacaatttgcaacagcatccaaagaaagcaaataccaaaagaaaaaaatctaataaaatatgcataagatctgcacaggtaaaatcaaaaaaaaattactgagagaaattaaagactataaaaactacaaatgaaaggatttaccatgtttctgaacagaatacaatgctgaaaagatagcatttctttcaaaaatgatatatagattcaatcaaaattctagcagatatttttaaatatggaaatccacaagataattttaaaatccatatggaaatgtaaagggataagaataaccaagatcatcttgaagaagaacaaattcaacagagatataaccctggaaatcaagacttaataaaatatatagtaattaagacagtgtatacacagagaaaggagacagtgtacaca

SEQ ID NO: 662244 - DNA, 618 bp, Homo sapiens
gtggcctccgcctggccctggaggatgggaggccttcgcggggcgggggggacggagggaggcactgagtgcccctgtccccgcagtggggatgcagcagcaggtggcggctatgtggcctgtggaggctyggcacccagaggcgcgcggtgagcccgccccggcgggagcgtggcgaatgtggctttgggcgcgcgggtgtgtgggacacgctcccacccacgtggcgtacatggggacctggggacgcgggtgaaagaggcgcctcctccttcctctggtctctctccctccttcctggacattttgctcctgcgctgtctctttcttcatcatggaagcccaggttgctccgttccccactcccagctccttatatcttccagggaacaggcggatggcctggcagctgaaggtagttaagtcgtggtcaaaccactatacccccaatccctgccgccctttggcgcctccccagcccatccccatgtccagttgcccgccttgtaggccctctaacctgcctcggggcgccttccactttcttggaagacttgggacctctgacacagactggggttcaaatccaggcccctccaattgctttcagtacacagg

SEQ ID NO: 662245 - DNA, 568 bp, Homo sapiens
acttcagtacaagaagctgggagaggactgttataraactcactaagtggggttgggtccatctttgtcagcagattttgaactcctcaaagtctattcatcttttcatctgtcccttccccatgccaaacactagattcacaacaaatgttccttcctttgcaatgaatgcctctcaaagccaagtcactcaaactgagcagttatgcatgttgtggaagggctgagtttaccttctccatcaatcacatcttgtggctctcttttccttcttttttgatttcctttgaaacaccagaagttgtacaacttcaaaatgatgccaattagaaattggtgtaactcatagagaaaactgaaaatctttaaaatggcagcagtgaagatgaaatatgacaaaggaatggacaaaatgggtagctattttattatgctatgtagcatttaattaaaattttaatgtaggaatttcagtgtgggaaatctcttttgaatactttaaacaaagccacatctttcaaaatctgagagccattgttagcttttgtcatggtgactcagtcacatg

SEQ ID NO: 662246 - DNA, 671 bp, Homo sapiens
ggaagtccaaccagtacgtgctcaatgaccatcttttgtgttattccgtaaagccaatcactacaaagttgtgtgatgcattccgtggtcagaatgcgtgactggtcsggtggctggtggtagtaaggggtgaattctacctggaggatcagggcaggctgctccacaaagagggcctttgagcctggcctcggaagaagaaggggagtccaggagggagcattgaccaatggaagacagcaggcccagggttgtctctggaaggtcagcagtcctgcgtggctaggcagagcacaggctcgttggatgagaggacatatttggaggctggggggctgcaaagggtggtcagggggcattgcaaaggccctccctcccctgctaggaagtgaaaccaccttgcaaccttggcacaaagtgtgatctctgctgcattaacctggatgcatccttttcctctcaaacatgacttcctcagaaagaccttttccagactacccagactccagcactcccctgtgatttacactcatgttaccccatgcttgtctttcccagcatttatctcatttgtacacacacaagaggcagttaagcttaatgcataagagcaggacactggatcaagactgccagtgcacacctggccccaccacctaccgggcaggtga

SEQ ID NO: 662247 - DNA, 671 bp, Homo sapiens
ggaagtccaaccagtacgtgctcaatgaccatcttttgtgttattccgtaaagccaatcactacaaagttgtgtgatgcattccgtggtcagaatgcgtgactggtccggtggctggtggtagtaaggggtgaattctacctggaggatcagggcaggctgctccacaaagagggcctttgagcctggcctcggaagaagaaggggagtccrggagggagcattgaccaatggaagacagcaggcccagggttgtctctggaaggtcagcagtcctgcgtggctaggcagagcacaggctcgttggatgagaggacatatttggaggctggggggctgcaaagggtggtcagggggcattgcaaaggccctccctcccctgctaggaagtgaaaccaccttgcaaccttggcacaaagtgtgatctctgctgcattaacctggatgcatccttttcctctcaaacatgacttcctcagaaagaccttttccagactacccagactccagcactcccctgtgatttacactcatgttaccccatgcttgtctttcccagcatttatctcatttgtacacacacaagaggcagttaagcttaatgcataagagcaggacactggatcaagactgccagtgcacacctggccccaccacctaccgggcaggtga

SEQ ID NO: 662248 - DNA, 614 bp, Homo sapiens
caacagattggatgtcacccacccacattctctactcagtccattcattcaaatgctaatctcttctggaaacaccctcacagatgcacccagaaatcatgttttaccagctatctgggcatctcttagctcagtcaagttgacacatggaattaattatcacagaagggaaatgtctacagggccttcctgtgatgagtttggggtactggaggcaccacaggttcaccaaggagggggtggtctagtcagcccaggagcacagagagagcccaatttgagaaaatgaacgggtgagtttggggtatggagaaggtggtggggagagaggatgttccagacagaagaaggagtgcagacaaagcatgaaggaatgaaacaacctagtcccatgggggacctcaaacctgaatataacttaatgtaggattggrgagtatagaggaaagtccagtgagtgtgtcctctagcataatactatttataaatgcagttgtatattatttatatataaatacatagtatttcagtaaattaaagaatataaaataatgtaagttccccccaaacctagcccacacagtttactgaagggctagagtgagaaagaggag

SEQ ID NO: 662249 - DNA, 614 bp, Homo sapiens
caacagattggatgtcacccacccacattctctactcagtccattcattcaaatgctaatctcttctggaaacaccctcacagatgcacccagaaatcatgttttaccagctatctgggcatctcttagctcagtcaagttgacacatggaattaattatcacagaagggaaatgtctacagggccttcctgtgatgagtttggggtactggaggcaccacaggttcaccaaggagggggtggtctagtcagcccaggagcacagagagagcccaatttgagaaaatgaacgggtgagtttggggtatggagaaggtggtggggagagaggatgttccagacagaagaaggagtgcagacaaagcatgaaggaatgaaacaacctagtcccatgggggacctcaaacctgaatataacttaatgtaggattggggagtatagaggaaagtccagtgagtgtgtcctctagcataatactatttataaatgcagttgtatattatttatatataaatacatagtatttcagtaaattaaagaatataaaataatgtaagttycccccaaacctagcccacacagtttactgaagggctagagtgagaaagaggag

SEQ ID NO: 662250 - DNA, 526 bp, Homo sapiens
tgcctgtattgcccctgaccaacagcatctccagggcaccaccacacactgactggcttagccctgggctcaagaccagtcactgcccaaggggatgaggttgccacaatagcttggactaacacgtcccaatccccagactggagtctgtttctcaggtctcattctgctgtatagcgggaggcatggggaatcgcagtgggtatttggcagtcagccagtgtccaccacacagactctgtcctcaaaggtacacagtgtggtggtgggagtaaaaaagtcactgtaatacaggagctgatggagagccacagagggcctgcctctggggcacagaggaatgacagcttgctcagcctggggtcctaaaaatgcctgggagtccccagctaattgcagaactagggaggggagggtagaaaggcattcctaggagggacgagtccccctagagggccaccttgtgtgtgmctagctgagcagtgggtggtgctagagcaaagggcggggtagaagcaaagaccac

SEQ ID NO: 662251 - DNA, 547 bp, Homo sapiens
aaccctgcttccaatatataatgatgaaactgagataatatggcctcaataggcacctcccacttggaaaagggaaggatgggaagtacatagagtcactgtccatagcaattctgaaatcccactgggcagacgtcatgaaagcccatatcctcggcatccatgrttaggctctagttttgctctctgagagatgctgctttgttcacttttctccatgagcctggttctacccatgaggttatttcttattttgtaagcttccttggtagcacatgaatcaggcattgagaaataagccctccttatggacggctgttctaaaagtttggtacaagccttaaggcttgaagactgaaggtcttattcagtctgtctgtatggttctttggtaacatgaccctcaaaaatgtagcacaagtataaacttcattttattgcacttcacttttttgcacttcacagatattccatctattacaaattaaagggttatagcaactctgtgttcagcaagtcttatttttctaacagcatgtgctcactt

SEQ ID NO: 662252 - DNA, 547 bp, Homo sapiens
aaccctgcttccaatatataatgatgaaactgagataatatggcctcaataggcacctcccacttggaaaagggaaggatgggaagtacatagagtcactgtccatagcaattctgaaatcccactgggcagacgtcatgaaagcccatatcctcggcatccatgattaggctctagttttgctctctgagagatgctgctttgttcacttttctccatgagcctggttcyacccatgaggttatttcttattttgtaagcttccttggtagcacatgaatcaggcattgagaaataagccctccttatggacggctgttctaaaagtttggtacaagccttaaggcttgaagactgaaggtcttattcagtctgtctgtatggttctttggtaacatgaccctcaaaaatgtagcacaagtataaacttcattttattgcacttcacttttttgcacttcacagatattccatctattacaaattaaagggttatagcaactctgtgttcagcaagtcttatttttctaacagcatgtgctcactt

SEQ ID NO: 662253 - DNA, 558 bp, Homo sapiens
gtgaactgagtgcagtactttggtttggcaaatgcagattttagttcttacataaaatactttactgaatctgcataatataattaaaatgaaaatttatccatctgttatgttaacagtttgttttaaaactaaagaagaaataaagaagtgattaatgctgattcttacatgattattactgggaataattttttcgtatagaggagggggttgtaaatagggtctgctctggaagagcgctggactctgctaaaagttgaaaatgctgatcatggacaatgaattctgcacagtctattgacatccagaaagagattaggagtcttttgtaggaaatttcactaactmaaaagaaaagtgtcaaagataccaagatctggaattgcctaaggaaatagtcagtcagatcacccaacataactacagataacaagctcccccagccaccttgcccagatagctagttaccttctcaataactagttgtaaatactactgaacagctaagacatgttgggaatgcacttaacacaaaagctatcaaaacaaacaaaa

SEQ ID NO: 662254 - DNA, 586 bp, Homo sapiens
ggttcaagcaatctacccacttcatcctctcaaagtgctgggattacaggcgtaatcccacccttcagtgggaaactactggaggatgtgctacagcaagatgagggtgagtcaaaggagatccaggcatgaaaaacaggaaagagggggtgcaacagaggaagacccccagatgatagtaaggaaaatcccaagaggtcagctgcacagcaggtggagagagcccagcccagattggaaaaggtcagaaggagccaggagaagtttctgtaagatgcagtgcaattgtgagactgcctagtgtgtctgcacacattgggagaagatttacataccaggagagttcagaatagartagtgataagcacataaaaaacgaaacaaacaacctgagagtgggatatgtagatttttatcttgaaccaatttttaaagctttattaaggtataatttacatgttataaactgcacatatttgacatacacaattggacaaattctgacatacagatgaagctgtgaaaccatgtccttttataatccctctcctcatccttcccaggcgtccaggtaaccatttattta

SEQ ID NO: 662255 - DNA, 631 bp, Homo sapiens
aaattcctcttccatttaaaccagatagagtagatcctgttgtctgcaacttaaaatttgaatgggcacaaatatcatcctcattctcatcatcgtcaccatctctatgatttgtatcttagatataaaatggcttgagccaagtgtagtggtttacacctgtaatcccagcacgttgggaggcagaagcaagaggatctcttgagcctaggagttcaagaccagccctgacaacagagtgaggcccccatctctacaaaaaattttaaaaattagctgggtatggtggtgcatgcctgtagtctcagctatctgggaagctgaggtgggaaggatcgcttgagcccaggaggttgaggctgcagtaagccatggttgtgccactgcrctgcagcctgggtgacagagcaagaccctgtctcaaaacaaataaataaataaataaaatggcaggtgggtgttgctgtccctattttcttgaagttcatttttcttttgagaggaaaggtgtcctggtatttttctttatcttactttatattacattgtagacatgcaagctatgcatgtataataggtgttcatggtgttcattaaagatttgctggccactggctagctgggtagagag

SEQ ID NO: 662256 - DNA, 544 bp, Homo sapiens
cactatgtaacttaatcattacaatgacactatgaggcaggaactattttgtctctgcttgtggatgaggaagctcagagaatttgagtaactcattgaaggtctacatagctgggatttggagttaagagtcctgcctttggaaactgcattcttaaccaccatagyattttgcctcttgctgtttaatattactcctactattgtgatgttattcttatttttcttttctattattattctcactgtgatgcttcccatcatagtgatgttttcaagaatagtctttgtataactggtactttcttttggtttacttcttgcaatttgggcatggtacttccatgtgagcagtgagtatgggagaaatccttggtggagtatcttttcgggaacacatatgtgttctatcttgctgtggatgccacttttcttcttgacaaaggtttttcttcttaacacagggcaggctcccagctgctgcaaaatagatcagcaccatggagagctccttccagtcaccaaaatggaataagggtttgtg

SEQ ID NO: 662257 - DNA, 544 bp, Homo sapiens
cactatgtaacttaatcattacaatgacactatgaggcaggaactattttgtctctgcttgtggatgaggaagctcagagaatttgagtaactcattgaaggtctacatagctgggatttggagttaagagtcctgcctttggaaactgcattcttaaccaccatagcattttgcctcttgctgtttaatattactcctactattgtgatgttattcttattwttcttttctattattattctcactgtgatgcttcccatcatagtgatgttttcaagaatagtctttgtataactggtactttcttttggtttacttcttgcaatttgggcatggtacttccatgtgagcagtgagtatgggagaaatccttggtggagtatcttttcgggaacacatatgtgttctatcttgctgtggatgccacttttcttcttgacaaaggtttttcttcttaacacagggcaggctcccagctgctgcaaaatagatcagcaccatggagagctccttccagtcaccaaaatggaataagggtttgtg

SEQ ID NO: 662258 - DNA, 505 bp, Homo sapiens
tgagccagccacactcaacttcttttactcctctatatattccacattctctcatttcttagctttctggaatgctgttccctctcttgggaatactattctatcgtctggaccctgtgcctggataattcctacttctccttcaagtcagagaggaaacatttccttctgtgagaagccatcttgtaactcyccaaatctgtggtcagtgctccctgtgtcatctttgacttttctcatcattgcacttcacaggactctgtaatgtcattttcagcctctttgtctgtgtcttttcaggagatgaggatatgtagatgagggtccctgatgggctctctgttatatttctatagcgaccagcagcaatatagtaggcatctaatagatttttaattaagtggttaaaatagaacataggcataaattttctgagcagtagaataatgtacataaatgtaaattatttatattcttctcctttgggtgttgcagaggatgtcac

SEQ ID NO: 662259 - DNA, 535 bp, Homo sapiens
ctttggaccagacaatgctgattcaagtcccagctctgccattcaccagctgtggaatttggatgacttacactctatttgcctcagtttgcttgtctttaacttgaagctggtcacacctagccctctgggctgctgcaagagacccagaacactatggtgacctcttccagcagctgtgactgattatgtctctgtcttcctctgcaaaagtaagaggcagaggaggagacgtgagcactggcctgggagcacaggaaggatatggttaacttctgaccatgactgatgcatggtgtcctgtcccatccactccacaaagattcttctgaggaccacctggaacaaaggggttaaggtatctgtctacwcagagtgctctgaaattgcaacacacacacctttgccttatgaataaatatatctctgcttgttctctttgtggatagaagatagagtttaaatcacaaatcactgatgaagagatcattgtgctcacatttcagtatgtagctacttccaagttcctaatatt

SEQ ID NO: 662260 - DNA, 474 bp, Homo sapiens
cctataaaccacatggcttcagtcctgtctcaccgcacataaatgagctacatctgtcctttacgagcctgtttgcctgtccacaaaatggcgatgtggagaaggtggctgcatcccttctaagggcatctgcttctccccttttgtcatgaactgtttttaatgcccacagttctttgaaacccggcaccacttgctctccaaactagtatgcgctccaaggctatgtaraactgttggccaccttgtcataagcaatgacagctaacctggattaaggcttactatgcaaccagcatggagcccacctcctgccctggctggctcatttactccccagcacagacctaagaaggaggcactgtgccctcaccagacaagaaacccaaaccttcgcatggccaagtcctttgctaccctggactcccaccaactggggccagcagccctgggatgggcctggcacttgtgagc

SEQ ID NO: 662261 - DNA, 474 bp, Homo sapiens
cctataaaccacatggcttcagtcctgtctcaccgcacataaatgagctacatctgtcctttacgagcctgtttgcctgtccacaaaatggcgatgtggagaaggtggctgcatcccttctaagggcatctgcttctccccttttgtcatgaactgtttttaatgcccacagttctttgaaacccggcaccacttgctctccaaactagtatgcgctccaaggctatgtagaactgttggccaccttgtcataagcaatgacagctaacctggattaaggcttactatgcaaccagcatggagcccacctcctgcccyggctggctcatttactccccagcacagacctaagaaggaggcactgtgccctcaccagacaagaaacccaaaccttcgcatggccaagtcctttgctaccctggactcccaccaactggggccagcagccctgggatgggcctggcacttgtgagc

SEQ ID NO: 662262 - DNA, 505 bp, Homo sapiens
ccgtgttaaatattgactaatacagaagagaaaagagataccaataaatgcgatctatcatcaattataagatgcatgcttttcctacttgaatacctctgaaatctggatgtatctttcaatcaatgccaattataattggcagtgtttttttctttattaataatacataaaataatggggcatctaacacttgayggagtcttagatttgctgaaattctaggatatctggtgtttgcttcatcagaaagtctctctagatcatttctcctcttcattttacttctcacattgcacactggatccgatgcccccaaacccaagggtgtggacttcctcctttctttcactttacgctctttgaaagtgaagacaaatactgttagagaaagagagaagcaatgtgttaatgcaataggacatgggttttgtgattgagagaggcctgaatctgaaaccttcctctaccacttaattgctgtgtgaccttgtataaattatta

SEQ ID NO: 662263 - DNA, 614 bp, Homo sapiens
tgcttttatttttgcaaccatccaactcttgtygtgttttgatttcagggctgctccaagattctgggacaaaaggcactatatataagcattattatgagactcaaagggggctctgagcaaaacaaaatccttttattacagagaattggaaagacttgttgccaaatatagttactgcacggaaaatgcgtttttccttttttccccacgtcatcaccattgccaccaccgtgctgtagctaaacccacaccctatcaattaatctatctacaaatattttaaataataatgactaacatcttttggcagttacatgtgccaagcatggtcccaagtactttacatcttgtatctcattcggtcttcccagcagctcttcccagaggtaggtatcattattagcacatttgacaggtgaggaaattaagccttggagaacttaggcaacttgcttaaagttgcctaagcaaatagctaaaaagaggcaaagtcaggatttgaatgcagctgtatgatatcaatgattacgtacttcctttatgtcaaagggaatacgggattgcacagcaaagatgggtatatgtccctgatcctcagaaatctgtaatcc

SEQ ID NO: 662264 - DNA, 591 bp, Homo sapiens
ggttctatgcctatacttccatttatttccaaactcagtgggaaagaaagaatgttattcaatcaccagtagttatgacagtggtgagagggaggaaatgaatgagcaaagaggagaaatagccaacctagtgcagggaaggggctggtgggtaaggctggacccttgagtgaggttctcaaaaaggagtagatatgactcaagcaaatagggatgggaagggcattcttggcagggagaagggcatatgcaaaggcatggaagtatgaaagaagctcagtgcatttgagaaattgctaccctcatctcttgactctccagggatggcacctgcttagctccrgcctctctctttggatggatctctgtcttcacttcctcatctccagccatacgttaaccgtctctaacgcagcatctacctccttcacaccaccaaaagcatccttgataaggccacccatgaccacgtggtactaattacaattaccattgttcagtttttatctcaccagggctctttcaacattcaccacaattgaccattctcttcttcttcaagtacttttttctcttggcttctataacact

SEQ ID NO: 662265 - DNA, 591 bp, Homo sapiens
ggttctatgcctatacttccatttatttccaaactcagtgggaaagaaagaatgttattcaatcaccagtagttatgacagtggtgagagggaggaaatgaatgagcaaagaggagaaatagccaacctagtgcagggaaggggctggtgggtaaggctggacccttgagtgaggttctcaaaaaggagtagatatgactcaagcaaatagggatgggaagggcattcttggcagggagaagggcatatgcaaaggcatggaagtatgaaagaagctcagtgcatttgagaaattgctaccctcatctcttgactctccagggatggcacctgcttagctccggcctctctctttggatggatctctgtcttcacttcctcatctccagccatacgttaaccgtctctaacgcagcatctacctccttcacaccaccaaaagcatccttgataaggccacccatgaccacgtggtactaattacaattaccattgttcagtttttatctcaccagggctctttcaacattcascacaattgaccattctcttcttcttcaagtacttttttctcttggcttctataacact

SEQ ID NO: 662266 - DNA, 541 bp, Homo sapiens
ttggagaaaccacccagaacatttgataatggctcataggcaggatgtgcttaaaaggttaaagatggctgcacattccttgtccgtctcctgattgaaagatgacgtttatttcccctcccctttcacctgggctggacttagtggcttgctcggccaatggaatgtgggagaagggacttccaagcctagtcataagaatccttgcagtttctacctaggcttcttggaawactcactctagagcagtagtgtccaaccctttgaatgcgaggacactttgtggtggtgggtatcacaaaaattattcacggacttttttttttttttttttttttttttagctcatcagctatcattagtgttagtgtatttcatgtgtggcccaagacaattcttccagtgtggcccagggaagccaaaagtttggacacccatgccctagagagagtcagctgtccaatccccctaggaaagaccatgctgctctaagggtagcccaagctagccacatggagaggtgcatattcaaagagaccca

SEQ ID NO: 662267 - DNA, 623 bp, Homo sapiens
aatgaaaaacttgtaataattgtttctcttttagcatactttttattaaaagtttaagagggccataaaccttactgtacatgaatagtcttaaaagtacaaagctctccgaaaatctcaaaaatcgtctggatttcctacattctcttgggcctgtcctatttttctagtgaagtgttatttaggagtcagtgcttatattctgtcaccatccattcttcccaaatgttccttcaatttcattttatgtgtttctaccactacaacattttctaacaggtccaatcctgcgttaagtttctaaattctctaacatctctatacataggtaaaattatagacgggcattaggaataaatataaaactttgaatttttttatataactttatcttctgtagtttcaaatttmagcaggttaaaatacaaattttaatccaaagcttctcttggttgcctaaaataagtctgtatcatttagaaaaccatccgacatgccccaaatctcacaggttcacaatgcaacagaatgtcctcatttatattttctaacaattaacaataagttaaacttcatctgagaatgttccttgctgcaggccattttgtgtacagctagaaaag

SEQ ID NO: 662268 - DNA, 595 bp, Homo sapiens
ctgagcacaatcaagtcttctgaggaatgctcaagaattaaaaatgtaagattttgaaaactatttaatataatactataaactaaggaggctaatctttataaatacatcaatgaaaaccaaaacctatatatatactggtggggagttaactaatctcaaggcaacacatgaacaagcgtattacagaacaaattgggctacattagagttactattaaaaacatactacctgatcttccctcaataaacttatgtccacaaaacacctaattcctaaacacgcaggcagaaaatggcagacacagaattctctggtggtcaggactcctctgctttatgtcaagtactattatcttctcgtatcaattatttagcttaagaraaaaaagggataactacaaactcattaatttgacttatatgttcttaaaaggtatggagctatattttacttatttaaaaaatctgtttatattctgccttaacaagatggagctacattttagtctttatttcatagtaattaacatcttgtctttcactgcaaaaatcaacttttaccaattcataatcgtttactattcaaaacaac

SEQ ID NO: 662269 - DNA, 629 bp, Homo sapiens
gcaatttacgtatttcacatttatcttgtttaaaataattttttggtgtggttttaaaaaccttgcctccttttacccttcagggaatagcgtcccactaaaagagaacactattgtaatgatacttccaggcaagaaacctgtctttatgatgtaaaacagggctaccagatccagataaggtctgccattaggatgcttcagaagtcataacatttcaaagaaaaaaaawtttttaagtaattcctacattaataattgctagttagtgaatttagtttttaagcacatcgtatttttatataaatataaatttttataacttaaaattctaaacttaatttcctgagacaaaattggtcctttcactctgattatcaatgtcaagacagcagcttcttatttgacagtcagtatttaactatattttacatctactgagtgtttcagggccttaaagttcattatgattattatattattaattacaacgtgcactgtaacattccctttttaaagaggtgcaaatagaagttaaataacttatccaaggtcacccaaacaagtcagtgacaaagttgggagtaggagtaaaacttcagcccctagactgaagactacttcgagct

SEQ ID NO: 662270 - DNA, 629 bp, Homo sapiens
gcaatttacgtatttcacatttatcttgtttaaaataattttttggtgtggttttaaaaaccttgcctccttttacccttcagggaatagcgtcccactaaaagagaacactattgtaatgatacttccaggcaagaaacctgtctttatgatgtaaaacagggctaccagatccagataaggtctgccattaggatgcttcagaagtcataacatttcaaagaaaaaaaaatttttaagtaattcctacattaataattgctagttagtgaatttagtttttaagcacatcgtatttttatataaatataaatttttataacttaaaattctaaacttaatttcctgagacaaaattggtcctttcactctgattatcamtgtcaagacagcagcttcttatttgacagtcagtatttaactatattttacatctactgagtgtttcagggccttaaagttcattatgattattatattattaattacaacgtgcactgtaacattccctttttaaagaggtgcaaatagaagttaaataacttatccaaggtcacccaaacaagtcagtgacaaagttgggagtaggagtaaaacttcagcccctagactgaagactacttcgagct

SEQ ID NO: 662271 - DNA, 629 bp, Homo sapiens
gcaatttacgtatttcacatttatcttgtttaaaataattttttggtgtggttttaaaaaccttgcctccttttacccttcagggaatagcgtcccactaaaagagaacactattgtaatgatacttccaggcaagaaacctgtctttatgatgtaaaacagggctaccagatccagataaggtctgccattaggatgcttcagaagtcataacatttcaaagaaaaaaaaatttttaagtaattcctacattaataattgctagttagtgaatttagtttttaagcacatcgtatttttatataaatataaatttttataacttaaaattctaaacttaatttcctgagacaaaattggtcctttcactctgattatcaatgtcaagacrgcagcttcttatttgacagtcagtatttaactatattttacatctactgagtgtttcagggccttaaagttcattatgattattatattattaattacaacgtgcactgtaacattccctttttaaagaggtgcaaatagaagttaaataacttatccaaggtcacccaaacaagtcagtgacaaagttgggagtaggagtaaaacttcagcccctagactgaagactacttcgagct

SEQ ID NO: 662272 - DNA, 630 bp, Homo sapiens
attagttttagactcagccacagcttttgggtttcatacacagaaagtgtagragggacaagaaagcatttttcagtaaagcaaagaagatgcagggaagcccagaagagattagtgtggtgtcctaggtataatttgcatccaatttgtaagcagtggaaacccaagggccacatttcattcacactacttaacatattagttttccctgaaaagagtctacaaagcacacatacaaaaagccttcttttaacttcctttactggatattgcttaacaaatcctttattcagaaaaataaaaattatttttttcattttgaattaattatgtcttctgatgcttatctaatctaaagccaaagtatgtgataattaacaagaaaacacggagggcagaaagatattgttaagtatgccagtatgactataatataaaaattttagccacattatcttgaattatcataaaatattctaacactttttagaaaagtaaataaaaactaacaaaataaaatttttgttggcaattgtctcccttctttattaagcatacaaaatatgttttctaaactgccatgtacaatgtattaaatctggggtctgaatatctttaaatctttaatta

SEQ ID NO: 662273 - DNA, 630 bp, Homo sapiens
attagttttagactcagccacagcttttgggtttcatacacagaaagtgtagaagggacaagaaagcatttttcagtaaagcaaagaagatgcagggaagcccagaagagattagtgtggtgtcctaggtataatttgcatccaatttgtaagcagtggaaacccaagggccacatttcrttcacactacttaacatattagttttccctgaaaagagtctacaaagcacacatacaaaaagccttcttttaacttcctttactggatattgcttaacaaatcctttattcagaaaaataaaaattatttttttcattttgaattaattatgtcttctgatgcttatctaatctaaagccaaagtatgtgataattaacaagaaaacacggagggcagaaagatattgttaagtatgccagtatgactataatataaaaattttagccacattatcttgaattatcataaaatattctaacactttttagaaaagtaaataaaaactaacaaaataaaatttttgttggcaattgtctcccttctttattaagcatacaaaatatgttttctaaactgccatgtacaatgtattaaatctggggtctgaatatctttaaatctttaatta

SEQ ID NO: 662274 - DNA, 630 bp, Homo sapiens
attagttttagactcagccacagcttttgggtttcatacacagaaagtgtagaagggacaagaaagcatttttcagtaaagcaaagaagatgcagggaagcccagaagagattagtgtggtgtcctaggtataatttgcatccaatttgtaagcagtggaaacccaagggccacatttcattcacactacttaacatattagttttccctgaaaagagtctacaaagcacacatacaaaaagccttcttttaacttcctttactggatattgcttaacaaatcctttattcagaaaaataaaaattatttttttcattttgaattaattatgtcttctgatgcttatctaatctaaagccaaagtatgtgataattaacaagaaaacacggagggcagaaagmtattgttaagtatgccagtatgactataatataaaaattttagccacattatcttgaattatcataaaatattctaacactttttagaaaagtaaataaaaactaacaaaataaaatttttgttggcaattgtctcccttctttattaagcatacaaaatatgttttctaaactgccatgtacaatgtattaaatctggggtctgaatatctttaaatctttaatta

SEQ ID NO: 662275 - DNA, 533 bp, Homo sapiens
gttttctaaactgccatgtacaatgtattaaatctggggtctgaatatctttaaatctttaattagatcccaaaattatatcatggaatggattcaggtttaactgaagaacaataatgcaatgagacaaaaatttaacatatttacaatttacaattttaaagatgaaatatttaattactaagaaaartcatttacttattaaatgattgagaataaaatttttcagtgttttatctaaaatagatgagaatatagtaacagacatatacaaattctggtccctagagctgagttttagagagccttcaccaggcttttcttttctaagatacatattttaggcacatctgttcatttctatcagttgcagtcttctctgatggaccaaaacagatctaatagagcagtaggaagtttttgaacaggttctcagtagctgtggtaaccatgcctccatcaaaagttaggcaacagcctggttcttcagattcctcattttttaaaatcttgtcacaatctttatgctcacc

SEQ ID NO: 662276 - DNA, 533 bp, Homo sapiens
gttttctaaactgccatgtacaatgtattaaatctggggtctgaatatctttaaatctttaattagatcccaaaattatatcatggaatggattcaggtttaactgaagaacaataatgcaatgagacaaaaatttaacatatttacaatttacaattttaaagatgaaatatttaattactaagaaaagtcatttacttattaaatrattgagaataaaatttttcagtgttttatctaaaatagatgagaatatagtaacagacatatacaaattctggtccctagagctgagttttagagagccttcaccaggcttttcttttctaagatacatattttaggcacatctgttcatttctatcagttgcagtcttctctgatggaccaaaacagatctaatagagcagtaggaagtttttgaacaggttctcagtagctgtggtaaccatgcctccatcaaaagttaggcaacagcctggttcttcagattcctcattttttaaaatcttgtcacaatctttatgctcacc

SEQ ID NO: 662277 - DNA, 533 bp, Homo sapiens
gttttctaaactgccatgtacaatgtattaaatctggggtctgaatatctttaaatctttaattagatcccaaaattatatcatggaatggattcaggtttaactgaagaacaataatgcaatgagacaaaaatttaacatatttacaatttacaattttaaagatgaaatatttaattactaagaaaagtcatttacttattaaatgattgagaataaaatttttcagtgttttatctaaaatagatgagaatatagtaacagrcatatacaaattctggtccctagagctgagttttagagagccttcaccaggcttttcttttctaagatacatattttaggcacatctgttcatttctatcagttgcagtcttctctgatggaccaaaacagatctaatagagcagtaggaagtttttgaacaggttctcagtagctgtggtaaccatgcctccatcaaaagttaggcaacagcctggttcttcagattcctcattttttaaaatcttgtcacaatctttatgctcacc

SEQ ID NO: 662278 - DNA, 533 bp, Homo sapiens
gttttctaaactgccatgtacaatgtattaaatctggggtctgaatatctttaaatctttaattagatcccaaaattatatcatggaatggattcaggtttaactgaagaacaataatgcaatgagacaaaaatttaacatatttacaatttacaattttaaagatgaaatatttaattactaagaaaagtcatttacttattaaatgattgagaataaaatttttcagtgttttatctaaaatagatgagaatatagtaacagacatatacaaattctggtccctagagctgagttttagagagccttcaccaggcttttcttttctaagatacatatttyaggcacatctgttcatttctatcagttgcagtcttctctgatggaccaaaacagatctaatagagcagtaggaagtttttgaacaggttctcagtagctgtggtaaccatgcctccatcaaaagttaggcaacagcctggttcttcagattcctcattttttaaaatcttgtcacaatctttatgctcacc

SEQ ID NO: 662279 - DNA, 634 bp, Homo sapiens
catatttacaatttacaattttaaagatgaaatatttaattactaagaaaagtcatttacttattaaatgattgagaataaaatttttcagtgttttatctaaaatagatgagaatatagtaacagacatatacaaattctggtccctagagctgagttttagagagccttcaccaggcttttcttttctaagatacatattttaggcacatctgttcatttctatcagttgcagtcttctctgatggaccaaaacagatctaatagagcagtaggaagtttttgaacaggttctcagtagctgtggtmaccatgcctccatcaaaagttaggcaacagcctggttcttcagattcctcattttttaaaatcttgtcacaatctttatgctcaccattccatctccttccaaagcatgcaaagaagatatgatttggaataaaattaaagaggcaataaatgagacctcataattcatatccatgttttatctcttccttgagtatctatttatataggaattataagaaaggccattaaaaaaggataagggccaaataaataattgataaatcatcaactgataagatttttatggatgcaggaatgcagaaattaatactatatttgcttt

SEQ ID NO: 662280 - DNA, 586 bp, Homo sapiens
gcaggaatgcagaaattaatactatatttgcttttgccataagtaaatgttctattttaaaatcctctatttttttccctttttgtatctttggtcttattcattcttgactccttggactgtttgattggctctgagatcatgaatcaaagaagcctatcccagtgttccttaggtagtactgtggttcatttggagaaaattcagtgcctgataactagatcgaagtaataaacaaataactagttttagagatccttgtcaaaagtgaaactttaagaaactcagttaattcttcttacctagctgtattcttctgcagagaattcatttcttcaacatctatttaaatatctttatcatttctcaccaggaaaatcattccrtaagaattgttcaagcctttctctgagtgtcaaagtagaagtttcataaggctttagtgtgtcacctagcaagatcatcaggcaggcaggaatcaagcatttatgtaaactgaatctttgttctatttaatacaaaatctcagagtttatataacagcttctgagatttaaaaagacaataagcaaaaaggctgaattaa

SEQ ID NO: 662281 - DNA, 521 bp, Homo sapiens
gttcaagcctttctctgagtgtcaaagtagaagtttcataaggctttagtgtgycacctagcaagatcatcaggcaggcaggaatcaagcatttatgtaaactgaatctttgttctatttaatacaaaatctcagagtttatataacagcttctgagatttaaaaagacaataagcaaaaaggctgaattaaatagaacccattgcaaaaaaatggcaccgttggtctgtatcagaaattgcggcaaagcaaattaagcagctcattaaaattatgactagcttaatcatatttgaagaaagatatttctctaaaaattatatctcaatttttaaaatttaaaaatatatctacatttagacaaaaatactgtcatttttattaataaatatgttaaagtgttaaaaatatgttacaataagatatttttaacatatatattgcaagaaaaatgagctaagatgcattttagtttcctaaactgtaagaaataataagtttggcaatatccattagttaag

SEQ ID NO: 662282 - DNA, 538 bp, Homo sapiens
atcaacaaaaattttttagagcagcagtatttataatagtctcaaatgcaaagcaatccacattttcatctatagtaggaaagatatacagcaataagaaagaatgaactagaattagttkcaactacatggataaacctcacaaacacaaccttgagtgaaagacgcccgactaaaagaagagcatacgactctatttatatgaagttcaaagacaggccaaactaatccatagttttagaagccaagataaagtttattctctacttatagacagggggttagtgtgaagactgactgtaaagagagaggagaggtcttcctgttctggtaatattctgtttcttctttatctggttactggttacataggtgaaaatgctttgacatgtacacttatatgtattttggggagtatgtattatatttacataaagtttacattcaaaaaagttcatccacatattcaattatagtccctagagattatagaataagtgtaattttcaaaatgtttggccttatcaaatgaaaaatt

SEQ ID NO: 662283 - DNA, 538 bp, Homo sapiens
atcaacaaaaattttttagagcagcagtatttataatagtctcaaatgcaaagcaatccacattttcatctatagtaggaaagatatacagcaataagaaagaatgaactagaattagttgcaactacatggataaacctcacaaacacaaccttgagtgaaagacgcccgactaaaagaagagcatacgactctatttatatgaagttcaaagacaggccaaactaatccatagttttagaagccaagataaagtttattmtctacttatagacagggggttagtgtgaagactgactgtaaagagagaggagaggtcttcctgttctggtaatattctgtttcttctttatctggttactggttacataggtgaaaatgctttgacatgtacacttatatgtattttggggagtatgtattatatttacataaagtttacattcaaaaaagttcatccacatattcaattatagtccctagagattatagaataagtgtaattttcaaaatgtttggccttatcaaatgaaaaatt

SEQ ID NO: 662284 - DNA, 538 bp, Homo sapiens
atcaacaaaaattttttagagcagcagtatttataatagtctcaaatgcaaagcaatccacattttcatctatagtaggaaagatatacagcaataagaaagaatgaactagaattagttgcaactacatggataaacctcacaaacacaaccttgagtgaaagacgcccgactaaaagaagagcatacgactctatttatatgaagttcaaagacaggccaaactaatccatagttttagaagccaagataaagtttattctctacttatagacagggggttagtgtgaagactgactgtaaagagagaggagaggtcttcctgttctggtaatattctgtttcttctttatctggttactggttacataggtgaaaatgctttgacatgtacacttatatgtattttggggagtatgtattatatttacataaagtttacattcaaaaaarttcatccacatattcaattatagtccctagagattatagaataagtgtaattttcaaaatgtttggccttatcaaatgaaaaatt

SEQ ID NO: 662285 - DNA, 658 bp, Homo sapiens
ttaccatgtggctggcactgaagtagattccagtgatagttaaataagaagtgatttcttctaatgaccactgattctactagagacaagatataagtaaatcaacaactacaatgaagtataatataaaagagatggaagaaatacatgcattttattgcactaatgaaagcacaaaggaaaacaaagaccccatgcttaagaagatcttacctttgggcaaggttttagcaaatatgtatgtgaagagaaggggaagggagagtaaataatcaatgaaaggagaatttcagccactgagaaaggcatatgactaaccacaaatcttagatctttctgatccctcaggtgatgtttaaggatgattcccagcttttatataagcttgactctaaaatagcaagatgtctacaagcaactccttaacaagggagagtgattaggagttgactagaaagagatgacattggactaacaggcaagaaccaaataataaagggtcttgtttaacaaggtaaagaggatctttatcctgacagtaatttgttaaaaatcacatgactgattaaaggaaaatcacgtgactgattaaargtgaactagaatttaaatctcagtctgactctcgaactcatgctcttaactattacactacata

SEQ ID NO: 662286 - DNA, 539 bp, Homo sapiens
aaatcattttagaagtttttttaagtttgttgttgttgttgttttgttttgttttgtttttaaagacagtgtctctcagcaattctatgtctttccctaagagaaattctgaggagtaaagtttcaggctaacttaaaaacagaggaaatacacaagaagattccatattccatttcttttcttccataccttccagccctataaatataataaaattattatcatgaacagtgcttttcctaatgtgaccatctagcctttctcaagtttaaactccctatttaaaagaaccaagcctggttgggcrtggtggctcatgcctgtaatcccagtactttaggaggccaaggcaggttgagtggatcacctgagctcaagagttcgagaccagcctggccaacatggtgaaactctgtctactaaaaatacaaaaattagctgggcgtggtggcgcatacctgtaatcccagctactcaggaggctgaggcaggagaactgcttgaacctgggaggtagaagttgcagtgagcctagatg

SEQ ID NO: 662287 - DNA, 554 bp, Homo sapiens
gaaaataacaaagcagagcatcacactacctgattttaaactattttacaaagctatagtaattaaaccagtgtggtattgccataaaaatagacacgtcagccaatgaaacaaatagagaactcaaaaatgaacccatgactttacaattgattttcaacaaagtttccaaaaatgcgcaattgtggaaggaccgtctctttaataaatgatgttggaaatacttgatacatgcagaasaataaaactggacccttatctcacaccatatacaaaaatccatgcaatatggattacaaacttaaatgtaagacctgaaactgtaaaactactagaaaaaaatataatggaaaagctggataacatttgactaggcaatgattttttaaatggaccccaaaaggtctcccaacaaaagcaaaaatagacaatgggattatatcaaaataaaatacttctacactgaaaaagacacaattaagagttaactgacaacctacatatttgggaaaaatatttgcaaaccatacaactcatatggggttaatatctaa

SEQ ID NO: 662288 - DNA, 512 bp, Homo sapiens
ggatcctgcagcttagaatggggatgtgtgggaggaccctgatgaaactggggacactgagcttgtaaactccgatgagcccttttttgccagaggaaacagcttccccatccctagtggtggcaacatcccctccccaactcacactgccatcagccttttcatctttgtctgaggagattwaccttgcactgcctcaggcaatagtgatggcatccccggaggcagttgccaagaaaaaacaatgttgattctcttcaggacccacccctaacacccctgttttcttctagacctataacttgactgacgtcctggcaggtccctaggggtgaggttcagaggatgtcccacaaggtgtgctatactccaaaagaactgcttgagttttctaatttatataagcagaaatctggagaacaggcataggaatagatattaagggtgtgggataatggtggaaggaacataaggatgggttaggctgaatttattaatatgggctcactaag

SEQ ID NO: 662289 - DNA, 553 bp, Homo sapiens
tgcactgcctcaggcaatagtgatggcatccccggaggcagttgccaagaaaaaacaatgttgattctcttcaggacccacccctaacacccctgttttcttctagacctataacttgactgacgtcctggcaggtccctaggggtgaggttcagaggatgtcccacaaggtgtgctatactccaaaagaactgcttgagttttctaatttatataagcagaaatctggagaacaggcataggaatagatattaagggtgtgggataatggtggaaggaacataaggatgggttaggctgaatttattaatatgggctcactaagcagggattctacatttaatgttgcagctcatggagataaaaaaaggttctaatagtttatttgcttggttagctgaaacatggatcaaaagatggcccactgtgagtgagctggaaatgccartctcccttggtttaatgtagaggaatggatccaaaggcttagggagatggtaatgctagagtggattagtcactttagacctactcatcccaattgggagggccc

SEQ ID NO: 662290 - DNA, 580 bp, Homo sapiens
ttgacattaggctgattgaatctagtaagcaagaagtagtaaacacactggacttattggtgagatatttgaatgtcagaggatgggaaataaatccaactaaaattcagggaactttacctcagtaaaatgtccagtggtgtggggcctgtcaagatattacttccagggtgaaaactaagttgctgcatttgatccctcctacaaccaagaaagggatacaatgcctagtgggctacttggattttggaggcaacacatttctcatttgggtgtgttactctggcccatttatcatgtgacccataaggctgccagttttgagtggggtccagaacaggagaaggctccgcaacaggtccagactgctatgcaagctgctctgccacttgggccatatgacccagcagatccaatggtgtttgaggtgtgagtcrcagatagggatgctgtctggagcctctggcaggcccccataggttaatcacagtaaaggtctccaggatttttgagcaagttcctgccatcttctgcagataactactcttcttttgagaaagagctcttggactgttactag

SEQ ID NO: 662291 - DNA, 578 bp, Homo sapiens
aaggctgacctggctacagacactgctgaatgcccaatttgccagcagcagaaacaaacactgagccttcgatatggcaccattccttggggtgataagccagctacttggtaacaggttgatatattggtcctcttccttcatgaaaagggcagtgatctgtcttcacccraatagatgcttactccggatatgggtttgcctatcctgcagacaatgcttctgccaagactaccatctgtggattcaggaaatgccttatccaacatcatggtatttcacagaacattgcctctgaccaaggcactcactttacagctaagaagtgtggcagtggcctcatgctcatggaattcactggtcttgccatgttccccatcatcctgaagcagctggattgatagtacagtggaattgccttttgaaatcacaattataatgccaactaggtgaccatcctttgaagagccggcacaaagttctccagaaggctgtgtatgctctgaatgtgtccaatatatgctactgtttctcccatagccaggattcgtaagcctaggaatcaaagggtggaaatg

SEQ ID NO: 662292 - DNA, 578 bp, Homo sapiens
aaggctgacctggctacagacactgctgaatgcccaatttgccagcagcagaaacaaacactgagccttcgatatggcaccattccttggggtgataagccagctacttggtaacaggttgatatattggtcctcttccttcatgaaaagggcagtgatctgtcttcacccgaatagatgcttactccggatatgggtttgcctatcctgcagacaatgcttctgccaagactaccatctgtggattcaggaaatgccttatccaacrtcatggtatttcacagaacattgcctctgaccaaggcactcactttacagctaagaagtgtggcagtggcctcatgctcatggaattcactggtcttgccatgttccccatcatcctgaagcagctggattgatagtacagtggaattgccttttgaaatcacaattataatgccaactaggtgaccatcctttgaagagccggcacaaagttctccagaaggctgtgtatgctctgaatgtgtccaatatatgctactgtttctcccatagccaggattcgtaagcctaggaatcaaagggtggaaatg

SEQ ID NO: 662293 - DNA, 588 bp, Homo sapiens
tgggtttgcctatcctgcagacaatgcttctgccaagactaccatctgtggattcaggaaatgccttatccaacatcatggtatttcacagaacattgcctctgaccaaggcactcactttacagctaagaagtgtggcagtggcctcatgctcatggaattcactggtcttgccatgttccccatcatcctgaagcagctggattgatagtacagtggaattgccttttgaaatcacaattataatgccaactaggtgaccatcctttgaagagccggcacaaagttctccagaaggctgtgtatgctctgaatgtgtccaatatatgctactgtttctcccatagccaggattcgtaagcctaggaatcaaagggtggaaatgaaagtggcaccactcaccatcacccctagtaacccactagcaaaatttttgcttcctgttcccacaacattatgytctgctggcctagaagtcttagctccagagggaggaatgctgccaccaggtgacagaacaatgattcagttaaactggaagttaagattggcacttcaccactttgggctcctcctacctctaagtca

SEQ ID NO: 662294 - DNA, 538 bp, Homo sapiens
agactgaactatgccactggctttcctgcatttaccaaacagcagattatgggacttttcagccccacaattgtatgagccaattccttataagataggtgataggtaggtaggtwggtaggtaaacagacagacagacagacaaagacaaagacaaagacagactactggctctgtttctctggagaaccctgactaatatatcaagccattttgacagtctaatataagggaataatgatatccttagaaatttctgtctctagataggatggaccagtttttggcaagctaattcttctgttacagcaaagagaaaaaagccagaaaatttaccaaaattatattttaaagatattgacagttacagaaacaaagactagacatagtaaaacttcataaagggtagagctgtgttctgaagtaagctagtgtttgccagctgtatttttccttgaaagcatttgatatactggactaaggcacatttctcttttctccacctttccttttctattcaggcctttaatggattggc

SEQ ID NO: 662295 - DNA, 574 bp, Homo sapiens
ttcctgcctcactacttgaactggggtatcccatatcattttctcctgctctcagatctggatttacactgctgactcccctggttctcaggccttcagactcagactgaactatgccactggctttcctgcatttaccaaacagcagattatgggacttttcagccccacaattgtatgagccaattccttataagataggtgataggtaggtaggtaggtaggtaaayagacagacagacagacaaagacaaagacaaagacagactactggctctgtttctctggagaaccctgactaatatatcaagccattttgacagtctaatataagggaataatgatatccttagaaatttctgtctctagataggatggaccagtttttggcaagctaattcttctgttacagcaaagagaaaaaagccagaaaatttaccaaaattatattttaaagatattgacagttacagaaacaaagactagacatagtaaaacttcataaagggtagagctgtgttctgaagtaagctagtgtttgccagctgtatttttccttgaaagcatttgatat

SEQ ID NO: 662296 - DNA, 621 bp, Homo sapiens
ttctgtagggtgtttgcagatgagataaacattttaacatgtggattcagtaaaatgctctgcccgttgtgggtaggcctaattatatccattgaaggtctgaacagaacaaaagatggaggaaataattcatcacttcgttcctgcctcactacttgaactggggtatcccatatcattttctcctgctctcagatctggatttacactgctgactcccctggttctcaggccttcagactcagactgaactatgccactggctttcctgcatttaccaaacagcagattatgggacttttcagccccacaattgtatgagccaattccttataagataggtgataggtaggtaggtaggtaggtaaacagacagacagacagacaaagacaaagacaaakacagactactggctctgtttctctggagaaccctgactaatatatcaagccattttgacagtctaatataagggaataatgatatccttagaaatttctgtctctagataggatggaccagtttttggcaagctaattcttctgttacagcaaagagaaaaaagccagaaaatttaccaaaattatattttaaagatattgacagttacagaaacaaag

SEQ ID NO: 662297 - DNA, 538 bp, Homo sapiens
agactgaactatgccactggctttcctgcatttaccaaacagcagattatgggacttttcagccccacaattgtatgagccaattccttataagataggtgataggtaggtaggtaggtaggtaaacagacagacagacagacaaagacaaagacaaagacagactactggctctgtttctctggagaaccctgactaatatatcaagccattttgacagtctaatataagggaataatratatccttagaaatttctgtctctagataggatggaccagtttttggcaagctaattcttctgttacagcaaagagaaaaaagccagaaaatttaccaaaattatattttaaagatattgacagttacagaaacaaagactagacatagtaaaacttcataaagggtagagctgtgttctgaagtaagctagtgtttgccagctgtatttttccttgaaagcatttgatatactggactaaggcacatttctcttttctccacctttccttttctattcaggcctttaatggattggc

SEQ ID NO: 662298 - DNA, 567 bp, Homo sapiens
tccatcaagaggcaaagattgtcagatcagattgatgaaaaagtaagacccaactactacatgctgctgtatcagtcarggttcaactatacgcagtgggaatatgatatattcatatgcacaaaatatacatatattaatacgtatatataattatttaaaccctctctatatatctatgtacacatacaaacccacacatatgcacatacacatatatatctacatacacaaatagcaagagaaaaagagagagagagatctttaataattactttacacagttgtaggggctggctaagcaaatccaaaatctatagggcaggcatttaggaaagcaacagcacaatcaatatgaaactccatgggcaaaaaccaaaactaatgatcacaggcagaatttatttttctaggggaagcctcattactgcttttaaggcctttcaagcctgaatcaagcctactcagataattgagaattaccttccttaaagtaaactgcttaggaactttaattacatttgcaaaatctctccacagcaacactccttagagtttgattgactt

SEQ ID NO: 662299 - DNA, 567 bp, Homo sapiens
tccatcaagaggcaaagattgtcagatcagattgatgaaaaagtaagacccaactactacatgctgctgtatcagtcagggttcaactatacgcagtgggaatatgatatattcatatgcacaaaatatacatatattaatacgtatayataattatttaaaccctctctatatatctatgtacacatacaaacccacacatatgcacatacacatatatatctacatacacaaatagcaagagaaaaagagagagagagatctttaataattactttacacagttgtaggggctggctaagcaaatccaaaatctatagggcaggcatttaggaaagcaacagcacaatcaatatgaaactccatgggcaaaaaccaaaactaatgatcacaggcagaatttatttttctaggggaagcctcattactgcttttaaggcctttcaagcctgaatcaagcctactcagataattgagaattaccttccttaaagtaaactgcttaggaactttaattacatttgcaaaatctctccacagcaacactccttagagtttgattgactt

SEQ ID NO: 662300 - DNA, 620 bp, Homo sapiens
taccttccttaaagtaaactgcttaggaactttaattacatttgcaaaatctctccacagcaacactccttagagtttgattgacttggaactctagtcacgttgacaatttgygggatagagctaaatcattacttatggagaaatttataagaagacctcaagtcaattatctcagtttctagtttaagaaaccagaaaaacaagaacaaattagtaaataaatagaagaaaggaaatgataaagatcagagtagaaatcaatgaatggaagataggaaaacaattgagaaaaatcaatgaaaccaaaggtggatagatttaaaagattagtaagtaataaatcaatccagtaatattgatcaggaaaaagagaagacacaagttaatatcaggaataaatgatgatatcaccacaggttctgtggatgttagaataataataaagaaaaagtatgccaaactatgccaattaatttgacaatttaggcaaaatagatatttattgaaagaagcaaagtagcaaagctaaggcaaaaagagatgactagaatacttatctattaaagaaattaaatttgtagtgtgaggcctctcccaaaagaaaacacaaaaagcag

SEQ ID NO: 662301 - DNA, 620 bp, Homo sapiens
taccttccttaaagtaaactgcttaggaactttaattacatttgcaaaatctctccacagcaacactccttagagtttgattgacttggaactctagtcacgttgacaatttgtgggatagagctaaatcattacttatggagaaatttataagaagacctcaagtcaattatctcagtttctagtttaagaaaccagaaaaacaagaacaaattagtaaataaatagaagaaaggaaatgataaagatcagagtagaaatcaatgaatggaagataggaaaacaattgagaaaaatcaatgaaaccaaaggtggatagatttaaaagattagtaagtaataaatcaatccartaatattgatcaggaaaaagagaagacacaagttaatatcaggaataaatgatgatatcaccacaggttctgtggatgttagaataataataaagaaaaagtatgccaaactatgccaattaatttgacaatttaggcaaaatagatatttattgaaagaagcaaagtagcaaagctaaggcaaaaagagatgactagaatacttatctattaaagaaattaaatttgtagtgtgaggcctctcccaaaagaaaacacaaaaagcag

SEQ ID NO: 662302 - DNA, 620 bp, Homo sapiens
ttcacaacaagtgaagaaaaatgttgaatggagttacactgtgctgtttctaagattcartgcttatctgtgggaggtatatgtgaatgcctatgttttattcaatagtttctcattcaaagactacaagaagtgaacagatatgtagggatagcatttgggggctgtcttagtccgtttactactgctataacagaatacgtaagactgtttaatttataaggaacgaagatttatttcttacagttctggagcctggaaaatccaaggccaaatggctggcatcttgctgacagccttcttgctgtgtcatcccatggtgacagagggcaagacagaaggtggaagacagaagggcaagagagtgtatgagaggtgggtgggggagggagctcatccttttatcaggaacccactctggtgataagaaacccactcttgcaataacatcattaatttgttcatgagggtagagtcctaatgacctgttcacatcttgatggaccaacatctcaacaaaattgtactggggattaagtttctaacacatgaactttgtggtgcattattaaaacaatagcacagaaccaacttgggattagaatgccaaactgtataac

SEQ ID NO: 662303 - DNA, 542 bp, Homo sapiens
cttcaacatttcttcaagaaatgcttctcaaaaaatgctagttttctttagcaacctgttaaatgaatgaggagaaggagaaggaaagtttcatttgaaatggattaattccagctgtatcraaagtagaatcaaatgagaaggtcaaaattataaagtatttagcagataatacaggatagtatctccatgacatcactgtagaatttttagataagatcccaagttatgaaccataaacaaaaagattaataaatttgccaaatgaaaattaagaaccgttcatcaatagaccattaaaacacaggtaacacaatggaagaagacggttgctagactagttctaagacttagtattcagaaaaaaacaaaaatacgtcattagtaaaaccaatccaagcaccccaaaagaaagatgggccaaagacatacacaagaacacttaaaaagtggaattctacatgacttaacacttgaactaggattcaatctcactactaatcagggaaataataattttgtttacaaactggaactctgat

SEQ ID NO: 662304 - DNA, 542 bp, Homo sapiens
cttcaacatttcttcaagaaatgcttctcaaaaaatgctagttttctttagcaacctgttaaatgaatgaggagaaggagaaggaaagtttcatttgaaatggattaattccagctgtatcgaaagtagaatcaaatgagaaggtcaaaattataaagtatttagcagataatacaggatagtatctccatgacatcactgtagaatttttagataagatcccaagttatgaaccataaacaaaaagattaataaatttgccaaatgaaaattaagaaccgttcatcaatagaccattaaaacacaggtaacacaatggaagaagacggttgctagactagttctaagacttagtattcagaaaaaaacaaaaatacgtcattagtaaaamcaatccaagcaccccaaaagaaagatgggccaaagacatacacaagaacacttaaaaagtggaattctacatgacttaacacttgaactaggattcaatctcactactaatcagggaaataataattttgtttacaaactggaactctgat

SEQ ID NO: 662305 - DNA, 542 bp, Homo sapiens
cttcaacatttcttcaagaaatgcttctcaaaaaatgctagttttctttagcaacctgttaaatgaatgaggagaaggagaaggaaagtttcatttgaaatggattaattccagctgtatcgaaagtagaatcaaatgagaaggtcaaaattataaagtatttagcagataatacaggatagtatctccatgacatcactgtagaatttttagataagatcccaagttatgaaccataaacaaaaagattaataaatttgccaaatgaaaattaagaaccgttcatcaatagaccattaaaacacaggtaacacaatggaagaagacggttgctagactagttctaagacttagtattcagaaaaaaacaaaaatacgtcattagtaaaaccaatccaarcaccccaaaagaaagatgggccaaagacatacacaagaacacttaaaaagtggaattctacatgacttaacacttgaactaggattcaatctcactactaatcagggaaataataattttgtttacaaactggaactctgat

SEQ ID NO: 662306 - DNA, 587 bp, Homo sapiens
tcaccatagacatttttaactaatcttagtccaccttcaaataacactgctctgttcgatgtgtattgcaggtaccttacagagtatctcaattcctccctttcatctcttctgatgttgtcgttcatttcacttattcrtatacgataatcacccaatacagtgttactattatcacttttagtaagttgtttttagatcaattaggaataaaattttcatctttctttctttcctgatgccttccttctttatgtagatttgagcttttgatatatcattttccttctccctgatgaacctcttaacatttctcccaatgcagttctgttggagatgaattcatttagtttatgaccctccgaaaggtctttattcctccttccatgctaaaggataatttcagaagacacagtattctaggttggtaatatttttttctttcaacacattaaatattttactccactctgctcttgtttgtgtgatttctgaaaagtagtctaatataattcttattcttttaaaaaaaacttgtattttagaattgggggtatacatgcaggtttgttacaaaggtatattgc

SEQ ID NO: 662307 - DNA, 587 bp, Homo sapiens
tcaccatagacatttttaactaatcttagtccaccttcaaataacactgctctgttcgatgtgtattgcaggtaccttacagagtatctcaattcctccctttcatctcttctgatgttgtcgttcatttcacttattcatatacgataatcacccaatacagtgttactattatcacttttagtaagttgtttttagatcaattaggaataaaattttcatctttctttctttcctgatgccttccttctttatgtagatttgagcttttgatatatcattttccttctccctgatgaacctsttaacatttctcccaatgcagttctgttggagatgaattcatttagtttatgaccctccgaaaggtctttattcctccttccatgctaaaggataatttcagaagacacagtattctaggttggtaatatttttttctttcaacacattaaatattttactccactctgctcttgtttgtgtgatttctgaaaagtagtctaatataattcttattcttttaaaaaaaacttgtattttagaattgggggtatacatgcaggtttgttacaaaggtatattgc

SEQ ID NO: 662308 - DNA, 587 bp, Homo sapiens
tcaccatagacatttttaactaatcttagtccaccttcaaataacactgctctgttcgatgtgtattgcaggtaccttacagagtatctcaattcctccctttcatctcttctgatgttgtcgttcatttcacttattcatatacgataatcacccaatacagtgttactattatcacttttagtaagttgtttttagatcaattaggaataaaattttcatctttctttctttcctgatgccttccttctttatgtagatttgagcttttgatatatcattttccttctccctgatgaacctcttaacatttctcccaatgcagttctrttggagatgaattcatttagtttatgaccctccgaaaggtctttattcctccttccatgctaaaggataatttcagaagacacagtattctaggttggtaatatttttttctttcaacacattaaatattttactccactctgctcttgtttgtgtgatttctgaaaagtagtctaatataattcttattcttttaaaaaaaacttgtattttagaattgggggtatacatgcaggtttgttacaaaggtatattgc

SEQ ID NO: 662309 - DNA, 555 bp, Homo sapiens
caatttgtatttttgttgtaattgtttttgaggacttagccacgaattatttgcaaaggccaatattgagaaaggcatttcctagatgttcttctaggatttttatagtttgaggtcttacatttaagtctttaattaaccctgagttaatttctgtttatggtgatagacagggtaccagtttcactcttctacatatggatagccagttagcccagcatcatgtattgaataggaattcttccctatgtgatcatctcaacagacacagaaaaagctttcaataaaatccaacatcctttcatgttaaaaaccctcaacaaagtaggcatcaaaggaatatacctcaaaatagtaacagtcatctatgacaaacccacagccaacatcacactggccaggcaaargctgaaagcataagcatttcttttgagaactggaaccaaaaaggatgcccactctcaccactcctactcaacatagtactggaagtcctagccagagaaattaggcaagagatagaaataaaaggcataaaaatggagaaagaagtca

SEQ ID NO: 662310 - DNA, 575 bp, Homo sapiens
aattgcattacaatgtctatttgttctttatttttttctaccatttccattatatccattaatatagtaatcatatttcaaamaatattctgtctgttactttcaacatctgtgtcacctgagcctgattctgatacttgcttggtttcttctgacttcgtgttttcttgcctttcagatgtcttgtgattttttgtcaaaagccagacatgttgcattggtaggaagtgaagtgaggatttatgttaatctagctagtagtcaggctttgtttaatgtttgctgtagctatatgtggcagaagttagtgtttttgtttttgtttcccctcttgactttggacttccgtaagtattccttcctcagatacactctttgtctttctcagatctttcaaatataatccacgattatgctggagcccatgtatgtcggtatgatcttggtaaaatgtgaatagaggggcattctataattttccaagtagatctattttggggggcatgtgtccctggccagggacttccacaagcatttcttcttatatagcttcctattccttaaatgagacagga

SEQ ID NO: 662311 - DNA, 594 bp, Homo sapiens
tcatatttcaaaaaatattctgtctgttactttcaacatctgtgtcacctgagcctgattctgatacttgcttggtttcttctgacttcgtgttttcttgcctttcagatgtcttgtgattttttgtcaaaagccagacatgttgcattggtaggaagtgaagtgaggatttatgttaatctagctagtagtcaggctttgtttaatgtttgctgtagctatatgtggcagaagttagtgtttttgtttttgtttcccctcttgactttggacttccgtaagtattccttcctcagatacactctttgtctttctcagatctttcaaatataatccacgattatgctggagcccatgtatgtcggtatgatcttggtaaaatgtgaatagaggggcattctataattttccaagtagatctattttggggggcmtgtgtccctggccagggacttccacaagcatttcttcttatatagcttcctattccttaaatgagacaggaaaggtaaagggggctaacatgagatgaatgtccttcctccacatctctgagatacatctctggtaaagcttttcatgctggagagtagc

SEQ ID NO: 662312 - DNA, 594 bp, Homo sapiens
tcatatttcaaaaaatattctgtctgttactttcaacatctgtgtcacctgagcctgattctgatacttgcttggtttcttctgacttcgtgttttcttgcctttcagatgtcttgtgattttttgtcaaaagccagacatgttgcattggtaggaagtgaagtgaggatttatgttaatctagctagtagtcaggctttgtttaatgtttgctgtagctatatgtggcagaagttagtgtttttgtttttgtttcccctcttgactttggacttccgtaagtattccttcctcagatacactctttgtctttctcagatctttcaaatataatccacgattatgctggagcccatgtatgtcggtatgatcttggtaaaatgtgaatagaggggcattctataattttccaagtagatctattttggggggcatgtgtccctggccagggacttccacaagcatttcttcttatatagcttcctattccttaratgagacaggaaaggtaaagggggctaacatgagatgaatgtccttcctccacatctctgagatacatctctggtaaagcttttcatgctggagagtagc

SEQ ID NO: 662313 - DNA, 435 bp, Homo sapiens
gatttgttacacagcagtacataactaatacaataacacaggattagataactaatacaataacatagcaaaaaataaataagacatcacaaaccatattatttcattcaatcactgtaaaatgctacataagcttttagacataacaaaagatcacatggtgtgactctctgaactgttatgtattttcartgacaagtcagaaatgttatacatattatcttctagtgctagctcttcatctgaaaaatcttcaagtttaaattcaacttgtaaagctgtcattgagacagaatctctcgtatgctggtaatttaaggctagatagagatacagttttatcatacactttctaatccaaaggctctttgatggtttttattccccttttactattagatatgttgctcccttcttgaaatactcagttttctt

SEQ ID NO: 662314 - DNA, 510 bp, Homo sapiens
tatctagggaacatgggaactgccaagatttaataaccaagaaagagactagaagcttcacacagtttggaaaacaaaaggaagcacaatatgttggaagtgaaaagaaacaaatttcaagagataaaagataatcagtgccaagtgctacacagagaacaaggagaactgattattaaactgaatttggcagaatgccaaattaaaagacttgtggaaatatcaatttcacgctatttttccaaatactttgaaaaacagcgaacagatagtgaaagagtaaatcaaactcagatgagtaaggaraaaaatattttttcctaagaaaagttgttcagtttggaggcagaaggaaaatttgtagatacatttattggcactaagactttaaggacttttaagtgtttataattcctggagggttgtataatcattgaactctacaaaactgacccaacatcccaaagtaataagtcttggaaaaaatccagataggaaaaatagcaaacc

SEQ ID NO: 662315 - DNA, 591 bp, Homo sapiens
gaggccaaatttagtctggtgtaactctttttctggataaatttcagagatttagttactctgcctagaaattggtatgtttgaataagagaaattgaactagtctttgatttaaaaaaacattttaatgttctttccgttttcaattttggaactaacagatgttgcaaagagccaaattctgaaaaattaaatttttgtctttaaaataaagtttactatgaaaatttaattcccaaaataaagtctttatgaaattagaagaaacccttggacaaaatgtgattagcctactgaattgacattctactctttggttattttcaaaattccttttccatatgacttcaaaaattgtatttrtggctgtcctaaatccatgattctctgcagcattagcaaagattttctcacgtgttcattccatgccctcttcattactcagcaatacagagtctttactctttctatagcatcacaacaggtcacctttctaaaccgattcctttctaaattctccggagactctcagttttctccagtagctactcttcattatcctctgccctgttttcagtggccactcttccc

SEQ ID NO: 662316 - DNA, 608 bp, Homo sapiens
gcaacatttattagcaggtaaatagaaaaaaattgtggtagaagggagggggaaaaagaaaatagaatagaaccctctagcaatcatctctccagagaaacatcagttttttaacaactatccatgcaagaaaacacctttacaggagaaaacaacagcaacaacaacaacaccaaaaagaaaccagtgatagatcacagtacccggttttagcataataattagaaaagatacatttaagagggtaggaaagacaatctcacrttgcctacaccactgctcccccaaccccaagcagtataatgcagaaaatctgtccacttgagaaagtgagaggaaagtgtacatagatttggaattggaaactagtaccagccttgtcagagtaaaacacaataccagagagaacccagcagctcctgattccaggacaatgcccccagacaaagctcctagacctaccatgggtcagatgggaatctgaggccccagtaagatgaacccaaatccaagcccatttcaccaccaaatgactgaagtgacttggactccaaataaaagtaaatttatttgtaatacatttgtaattaattacttttatttggagt

SEQ ID NO: 662317 - DNA, 608 bp, Homo sapiens
gcaacatttattagcaggtaaatagaaaaaaattgtggtagaagggagggggaaaaagaaaatagaatagaaccctctagcaatcatctctccagagaaacatcagttttttaacaactatccatgcaagaaaacacctttacaggagaaaacaacagcaacaacaacaacaccaaaaagaaaccagtgatagatcacagtacccggttttagcataataattagaaaagatacatttaagagggtaggaaagacaatctcacgttgcctacaccactgctcccccaaccccaagcagtataatgcagaaaatctgtccacttgagaaagtgagaggaaagtgtacatagatttggaattggaaactagtaccagccttgtcagagtaaaacacaataccagagagaacccagcakctcctgattccaggacaatgcccccagacaaagctcctagacctaccatgggtcagatgggaatctgaggccccagtaagatgaacccaaatccaagcccatttcaccaccaaatgactgaagtgacttggactccaaataaaagtaaatttatttgtaatacatttgtaattaattacttttatttggagt

SEQ ID NO: 662318 - DNA, 518 bp, Homo sapiens
tggtatgtaaaccacttatatcttagtatgaaaactagaatgcaaaactattaaattaatcattaaatactattacataaatagtttaattattgataattaatattaagtattaaaaagttaatagtttaatactattaaaaataataatagctactataatttgmtaagagatcatccatataaaaagatataaattaagatatcaaaaagtcaaaactggaggattattaaagtataaaggcttttagtttgaatgtttctctttttttctttttgcaaccaaatttaaagtgtcatcagtttaaaataaattgatataactataagatgttctttgtaagcctcattgtaactacaaaccaaaaacctataatggatacactaaaaataagataaagaatgaaaacatactacaaaagaaaatcacttaacatgaaggaagaagggaagagaggagttatgaaacaaccagaaaacaagcaacaaaatggcatagtaagtccttatatattaat

SEQ ID NO: 662319 - DNA, 601 bp, Homo sapiens
tgaatgtttctctttttttctttttgcaaccaaatttaaagtgtcatcagtttaaaataaattgatataactataagatgttctttgtaagcctcattgtaactacaaaccaaaaacctataatggatacactaaaaataagataaagaatgaaaacatactacaaaagaaaatcacttaacatgaaggaagaagggaagagaggagttatgaaacaaccagaaaacaagcaacaaaatggcrtagtaagtccttatatattaatagtaacaatgaatgtaaatggattcacttctccaattgaaagacatagacgggcttaatggataaacaagagaaaaagaccaaactatatgctgcctctaagaaactcacttcacctataaagacatgcatacactgaaagtgaagggatgaaaaaagatattccatgcaaatggaaatcaaaaggaaacaggaatagctatacttagataaaatagacctttagtcaaaaacactaaaaaacacaaaaaggccattatataataatgtaggtgtcagtacagcaagagaatgtgacaactgtaattatgtatgcacccaacaatgcagcacctaa

SEQ ID NO: 662320 - DNA, 572 bp, Homo sapiens
ataaagaaaacagtaaaagacataaaaggagagatcaactgcaatccaataatagcagaggacttcaatacctcattctcagcaatggacatattattcagatataaaattaacacagaaacatcagagttgaactcccctctagaccaaatggacctaatggacatttacagaaccttctgacgaacaacttcaggatacacrttcttctcaacagtatgtggaacatcatccagaatagactacatgttaggccacaaaacaagtcttaacaaatttttggaaattgaaaatatatcaagtatcttttctgacaataatagaataaaactagaaaccaataacaggaggaactttggaaaatgtacaaatacatagaaattaaacaacatgcttaagaagagccagtgggtcaattaacaagctaaaaagaaaatttaatgattattgagccaaatgaaaattgaaacacaacataccaagactgatggaatatagcaaaagcagctctaagatagaaatttatcacaataaatgcctgcatcaaaaaagtagtagatctcaaatagatg

SEQ ID NO: 662321 - DNA, 521 bp, Homo sapiens
agatggaaatatgtatatctttattgtyatgtttacatgggtgtgttcatttctctaaactcatcaaaccatatatttcagttgtgttcactttaatttaggtaaaatatgccacaatatatttaattttaaagtgtaattaacattaccaaggtgaagaaaaatcatatggtaaatagatatagaaaaatattaaatattattcagcattgatttgtgaaagaaataacaatgatctctatgttcatctacatagaaaaatacattgtggtatacaaaacagaagagtaaaacagcaacaacagtacagctataagcaaatacatggatgtttctcacataataatgatgtgataaagaagcaagacagggaagattaaatacaatatgatttaatttctgtgaagtttaaaacaggaaaaactaaattagcttagaaatttgcacaacttttcattataatgaccatttaagaatggccaaaagaaattttaaggtactagaagacactttgtcctcct

SEQ ID NO: 662322 - DNA, 590 bp, Homo sapiens
tgaaagggaaagaagctgggaaccctgaatggggttgctgagtgcsaggactcattcctaaccctcaatgtctcctaaagaaggagtaagtgaaatatatggagagtagcccactctcactatatacctccgagatcctagctgcaggcagccccatgactcccatggacacttgagttggcagggggagctaaaaagataggaggccaagacagaaactgaattgacatggagcccaggtgctttagcagaggggacagctgcaaggaaacatggccttaggcaccaatcccacaatgtttccaatatttctttaggtggctttggctttgttatctgctagacctggagagagcaggtctgtctttcccatgcatggaggcaactctgatctgtgtgcccctctatccaatggccccaccaagagtctctgcttggctatatcagctcataacacagccttagctgccccactggagcacttttgctagcagacactgccatagcacttttgcaggcaggccctgccaccccaccagagcacttttgctggtggtcccccaacagagcatgtttaacactggtacatc

SEQ ID NO: 662323 - DNA, 590 bp, Homo sapiens
tgaaagggaaagaagctgggaaccctgaatggggttgctgagtgcgaggactcattcctaaccctcaatgtctcctaaagaaggagtaagtgaaatatatggagagtagcccactctcactatatacctccgagatcctagctgcaggcagccccatgactcccatggacacttgagttggcagggggagctaamaagataggaggccaagacagaaactgaattgacatggagcccaggtgctttagcagaggggacagctgcaaggaaacatggccttaggcaccaatcccacaatgtttccaatatttctttaggtggctttggctttgttatctgctagacctggagagagcaggtctgtctttcccatgcatggaggcaactctgatctgtgtgcccctctatccaatggccccaccaagagtctctgcttggctatatcagctcataacacagccttagctgccccactggagcacttttgctagcagacactgccatagcacttttgcaggcaggccctgccaccccaccagagcacttttgctggtggtcccccaacagagcatgtttaacactggtacatc

SEQ ID NO: 662324 - DNA, 567 bp, Homo sapiens
aaaaggcagtgtggcaagttggataaaaaagcaaggcccaactccctgctgtctttaagagacacatgcaataagtaatgacacccacaggctcaaagtaaagggacagagaaagatctaccaagcaaatggaaaacaaaataacaatggttgctattctttcatgagataaaaaagactttagcatggaatactgcacagccatacaaagaaatgaaaccatgtcctttgaagcaacatggatgcatctagagtccattatcctaagcaaacaaacataagaacagaaaaccagataccacatattctcacttataagcrggagccaaacactgaatacacatgaacacaaagatgggaacaatagactctgggaactacttgacagggaagagtgggaggggggcatgggttgaaagactacatatagggcactgtgctcactacctgagtgatgggatcatttgtacaccaaacctcagcaacacacaatttacccatgtaacaaaccttcacatttacccatcgaacctaaaataaaagtcaagagtaaaagaagaaaaagga

SEQ ID NO: 662325 - DNA, 619 bp, Homo sapiens
tttacccatgtaacaaaccttcacatttacccatcgaacctaaaataaaagtcaagagtaaaagaagaaaaaggagcatgatggttcctagaagaaaacatagataaatttcttctaacttaggtcgggcaaaaatttttcagaaaagtcacaaaaagaacaaaccataaggaaaaaataataaattaaatctcatcaaaataaaaacttacacttatcaaaataaccgttaaaaaacaatctggcaagccacagagtgggaagaaatagaaacaacagataatttgacaaaggactttgatccagaacaaatggcaactcaatgaaaaaatggtaaagattttaagctggccttccacatacctgttggcatttgttaaaactaattcaacccttaaaatctgaacatattattgtatataaacataacctcagtagaagtggagaaggataaatttgttggaacacagcagcacattttgtgaattgctttagtaattattaaagggaccactactaaaacagactgcaggtatggtcaggrttttcactttctctgtcttggagtctctaaatgaaaaatatgcctatttttttagatgaaaaataaatttgtaaa

SEQ ID NO: 662326 - DNA, 590 bp, Homo sapiens
cacttgttcacttactcttataactacattctttatgctatgcaatgtgttagcccttatcattactctgtaaaggacattttctatyatcatgcaaaccaatgcactaaaacggtttacctacctttaagccaggcatgaccagaaggggaaagaaatcactcctagagactaacgcgggagcagaggttgtaaacattgcctttgcatttctcatttttatatctatcatttaaagaatgctatatttgcagtagatgaccatgtttcacttttggaataaatacttttgcttaatttaatgttccagtctatatagcatatttataaccttcttattcgttaatatactcaagaaaatgttctcattttcagccaaaattttttatctattctatgaactcaacaaatatctgagaatatatcaagattctacaacatctagtatataaaatgtataaagaacaactactgaaactactgaacccaaattggaatttaataaatatcattgttaccacatatcattaattattatattcaggataagaaaatgtttatataaggaagtgatgtacgaaacatgtcaa

SEQ ID NO: 662327 - DNA, 590 bp, Homo sapiens
cacttgttcacttactcttataactacattctttatgctatgcaatgtgttagcccttatcattactctgtaaaggacattttctattatcatgcaaaccaatgcactaaaacrgtttacctacctttaagccaggcatgaccagaaggggaaagaaatcactcctagagactaacgcgggagcagaggttgtaaacattgcctttgcatttctcatttttatatctatcatttaaagaatgctatatttgcagtagatgaccatgtttcacttttggaataaatacttttgcttaatttaatgttccagtctatatagcatatttataaccttcttattcgttaatatactcaagaaaatgttctcattttcagccaaaattttttatctattctatgaactcaacaaatatctgagaatatatcaagattctacaacatctagtatataaaatgtataaagaacaactactgaaactactgaacccaaattggaatttaataaatatcattgttaccacatatcattaattattatattcaggataagaaaatgtttatataaggaagtgatgtacgaaacatgtcaa

SEQ ID NO: 662328 - DNA, 553 bp, Homo sapiens
ttacaataatccactgtcattctccaagatccatctgtcttctacacaggcaaaatgggagactkgaatgggggtgtggtgggaatcaccacccctgcgtctttcaagtccttgatggtggcactaattgctgcaatccctccagggatgcaacatcattttttatttacatttttctaggtagaggcagctctaatggtttccattttgcctttcccaccataatatccttcacccaaccagtcagggagccaatgtaggggtgctgccagctgctaagtatatctatgccagttatgtattctaacactgaggaaatgaccacaggatgagtccaaggacacactggacccactgtaagtcagacctgaactaaaactccatcaattacctgacctccataagcccctactttaactagaggaccataatgacattgtgggtcccctggaatcaacgtcacctcagagccagtatccagtagtctctgagaggtctgatcatttccctttctccaatgcacagttactctggccggtctccttggggaagg

SEQ ID NO: 662329 - DNA, 606 bp, Homo sapiens
gttgctttgtctctgctgtccattatggtggctatgcccaccttgcctttgacagttgagtgcctccacttggcccctgccacctcgagatccaattattcccactgtatttaaattttgtagttgagtgactgcagttcccaccttagatccaacatacagagaagagcaattacagggctcttcaaagatgcaggtgctgccctcagaaatctattttgcaaggcatcagtcaagggtatatcttctggaccctcccagctggaataagtgggtctaaagtgactaatgcactccactattctaatctccctaagcctttggatcacttcctctatattaaaccaagggagatcaggcatttccagctcactcayggtgggccatcttttaatccaaatttcagctaaacaagcaaataaactattagagccttttttttaactccctgagctgcaacattaaatgcagagtccctacttagttggcccagatcaataaattcagcttgatccaactctatgttcttccaccattgtcccatatccttaatatccattcccatgcctgttctccagacttctgtttatataaattagagaactc

SEQ ID NO: 662330 - DNA, 548 bp, Homo sapiens
agcatcacacgttctcacttattttgggacatgaaaataaaaacaattgaaatggagacagacagtagaaggatggttaccagagggtgagaagagtagtgaggggatgatggggaagtagggacgattaatgggtaccaaaaaaattgttagaaataagacatagtatttgatagcataacagagtgacaatartcaataatttaattgtacatttaccaataaataagagtataattagattgttaataacacaaaggataaatgcctgagggaatggataccccattttacatgaggtggttactatgcactgtatgcctgcatgaaaatatctcatgtactccataaatatatatacctactctgcacccacaaaaattaaaaattaaaaataacatattcatatcctcagggaaactgaggaaaaccttataacacagttatttactatacctcaatagagaattttatctcctcagttctattattggttattgtaataaattaactcctcagttctattattcgttattgtaataaattaa

SEQ ID NO: 662331 - DNA, 491 bp, Homo sapiens
ttcgtaacttttctttattactttgaatttttaaaatttgtttttgttggtttagggttcaaaatatttaaataataaaaagaaatcgatactcttggtggacaaatgaaggctaccaatctaaacaagtggcttcttcatacatcagtcctctccaggataagagaatcacttcatgcaatttcagatttgaatcactctatatgtattttagggctcttgatagtatmcccagtttccagttctttgtcttaaaaattctggttgaatgatttcttgggaaaagagagttctattttgtttctcccattagcttaattggttccaagaaaaatactgaatatgtaatagggttggaattagctggaatgtgtgagttggcatcaaggacatcactcaacaatggggtccccaggtgggaacatcattagcaagcagcatgacttccctatgacataagttgactgaagatggcacagaaagggttcaga

SEQ ID NO: 662332 - DNA, 491 bp, Homo sapiens
ttcgtaacttttctttattactttgaatttttaaaatttgtttttgttggtttagggttcaaaatatttaaataataaaaagaaatcgatactcttggtggacaaatgaaggctaccaatctaaacaagtggcttcttcatacatcagtcctctccaggataagagaatcacttcatgcaatttcagatttgaatcactctatatgtattttagggctcttgatagtatacccagtttccagttctttgtcttaaaaattctggttgaatgatttcttgggaaaagagagttctattttgtttctcccattagcttaattggttccaagaaaaatactgaatatgtaatagggttggaattagctggaatgtgtgagttggcatcaaggacatcactcracaatggggtccccaggtgggaacatcattagcaagcagcatgacttccctatgacataagttgactgaagatggcacagaaagggttcaga

SEQ ID NO: 662333 - DNA, 491 bp, Homo sapiens
ttcgtaacttttctttattactttgaatttttaaaatttgtttttgttggtttagggttcaaaatatttaaataataaaaagaaatcgatactcttggtggacaaatgaaggctaccaatctaaacaagtggcttcttcatacatcagtcctctccaggataagagaatcacttcatgcaatttcagatttgaatcactctatatgtattttagggctcttgatagtatacccagtttccagttctttgtcttaaaaattctggttgaatgatttcttgggaaaagagagttctattttgtttctcccattagcttaattggttccaagaaaaatactgaatatgtaatagggttggaattagctggaatgtgtgagttggcatcaaggacatcactcaacaatggggtccccaggtgggaayatcattagcaagcagcatgacttccctatgacataagttgactgaagatggcacagaaagggttcaga

SEQ ID NO: 662334 - DNA, 579 bp, Homo sapiens
aaacaactcaggtcaaatatctctgaaactcccattcttaagatataatagaggcactttttctagtttccctttgtcatcagcccactacaatataatgccatatttaataaatagatctctcactctgctctaaggaactgccccactgggaacactattccatcttacttaaaatgctacagtcattcctctttgttgattcttaaccagggatatattgagaatctcttgaggaagtttttaaaatatgaatgactaggcactgcgtctaaatattttgtttcagtaggactgggatgaagtctgagttatatgtattctacaaggtttcccaagggattctgctagaaatattgcaagtttttatttgagtgcttcaactgtgccaggtgcagtgtgaaaagcttttcacacattttctttttttcacagaaattttatttgtggccrgcactgttgattcattaaacaatatactttctcacccttctttttaagcaaagctctgactttattcaggtattcatcctctaccataaagccatgtaataaggttcttaatgatctaacataaaa

SEQ ID NO: 662335 - DNA, 560 bp, Homo sapiens
tggcaatgtctaggtcttcagtctgtagcccagcagcaaggaatgttttgaaggcaagttactaagaatttcagccttcagctttgctactggtctctaccccaaccaagaactcatcagatgctaaattcctcaaaacatagccaggggtttcagatgctgagaagtcagaaataatgatgaatacccactacaagtgagaagaagctgagtcttaggagatgtttttaaatcaacagaagaaaattcattatactctactatttttatatatgatcaaaatgttatttaatgtaagtgaataaattcattcaaaattgaaaactaaccaattgttaatcccattctcaggtgtgtttgttttctattgytgctgtaacaaattacctgaaagtagtggttttaaacaacacagatttattatctacagttctggaggtcagttctaaaactaagttactggcattcctcctgcaggctctaagggacatttcattgccttgcctcttccagcttctagaggcttgcctgcacgacttggctcatggccccttccagca

SEQ ID NO: 662336 - DNA, 600 bp, Homo sapiens
cctctctactattttctaattacaccatattccaggccatttcctcatcatccttttgatcttttcctggaagttagcctttcccactataataggacaaataaatttagatacttactggttaaaaagcatgtgctatagtcatattatttagagagacagtttgctgacaatagaagcaattttgaagacatctaaattcagtggttctcaacccaatcagactaaatacttatttttatatcaaatatttagaaattacccctttattatcccaaaatttaaattcaaagataatataaccaacctgcacacaatatcawataggtatgtataattccataatgtaatgaaaaggagaatgacaaatcaactttaagtaaaataatatgtatccaaaagtgtagatgcttgtgtacaactatactgggaaatataacaaagtagtcagacttaagctctgcataaattaccataactgccactgctacaaatgcagactgcacaagagtattagctattcgaattccatgaggagtacactgttggaacatcatttcctggatggtgaacaactctttgagagtcccaaagaaaaca

SEQ ID NO: 662337 - DNA, 600 bp, Homo sapiens
cctctctactattttctaattacaccatattccaggccatttcctcatcatccttttgatcttttcctggaagttagcctttcccactataataggacaaataaatttagatacttactggttaaaaagcatgtgctatagtcatattatttagagagacagtttgctgacaatagaagcaattttgaagacatctaaattcagtggttctcaacccaatcagactaaatacttatttttatatcaaatatttagaaattacccctttattatcccaaaatttaaattcaaagataatataaccaacctgcacacaatatcaaataggtatgtataattccataatgtaatgaaaaggagaatgacaaatcaactttaagtaaaataatatgtatccaaaagkgtagatgcttgtgtacaactatactgggaaatataacaaagtagtcagacttaagctctgcataaattaccataactgccactgctacaaatgcagactgcacaagagtattagctattcgaattccatgaggagtacactgttggaacatcatttcctggatggtgaacaactctttgagagtcccaaagaaaaca

SEQ ID NO: 662338 - DNA, 600 bp, Homo sapiens
cctctctactattttctaattacaccatattccaggccatttcctcatcatccttttgatcttttcctggaagttagcctttcccactataataggacaaataaatttagatacttactggttaaaaagcatgtgctatagtcatattatttagagagacagtttgctgacaatagaagcaattttgaagacatctaaattcagtggttctcaacccaatcagactaaatacttatttttatatcaaatatttagaaattacccctttattatcccaaaatttaaattcaaagataatataaccaacctgcacacaatatcaaataggtatgtataattccataatgtaatgaaaaggagaatgacaaatcaactttaagtaaaataatatgtatccaaaagtgtagatgcttgtgtacaactatactgggaaatataacaaagtagtcagacttaagctctgcataaattaccataactgccactgctacaaatgcagactgcacragagtattagctattcgaattccatgaggagtacactgttggaacatcatttcctggatggtgaacaactctttgagagtcccaaagaaaaca

SEQ ID NO: 662339 - DNA, 555 bp, Homo sapiens
gttttccatggtttactgtgaacacatacagtaccatccatggtactcttcttttttttgagacggagtcttgctctgtcgcccaggctggagtgcagtggcgggatctcggctcactgcaaccaccgcctcccgggttcacgccattctcctgcctcagcctcccaagtagctgggactacaggtgcccgccaccacgcccggctaattttttgtatttttattagagatggggtttcaccgtgttagccaggatggtctcgatctcctgacctcrtgatccgcccgcctcggcctcccaaagtgctgggattacaggagtgagccaccgcgcccggcccccatggtactctttaaccaacaacactattggttaaaagtcccgggaacagctctcctcctaacttctggcttgtctgcagtgctcaagataacaaatgtcttacctttctctactgaaaaaaatctcactgtcccaatgtccttctccagagtgtctttccacctttcatgaagtccagggggcaccataatatgatgctcttgtccaaaggt

SEQ ID NO: 662340 - DNA, 555 bp, Homo sapiens
gttttccatggtttactgtgaacacatacagtaccatccatggtactcttcttttttttgagacggagtcttgctctgtcgcccaggctggagtgcagtggcgggatctcggctcactgcaaccaccgcctcccgggttcacgccattctcctgcctcagcctcccaagtagctgggactacaggtgcccgccaccacgcccggctaattttttgtatttttattagagatggggtttcaccgtgttagccaggatggtctcgatctcctgacctcgtgatccgcccgcctcggcctcccaaagtgctgggattacaggagtgagccaccgcgcccggcccccatggtactctttaaccaacaacactattggttaaaagtccygggaacagctctcctcctaacttctggcttgtctgcagtgctcaagataacaaatgtcttacctttctctactgaaaaaaatctcactgtcccaatgtccttctccagagtgtctttccacctttcatgaagtccagggggcaccataatatgatgctcttgtccaaaggt

SEQ ID NO: 662341 - DNA, 516 bp, Homo sapiens
cctctgtttcctcatctgcaagctggagataagtaaaaatatcagttaaattggttaactrtgaagattaaatgagataacaatcataaaacacttagggcagtggctggcacatagtacatactcagtcaatcttagctattattgttatcatctcaggtatcactattatttgcaaaagaaaaagagaacttttgcatgaaaataaaatcactcagctagatagaaggctcttaaagagatgagatttatgccaaagattcttttttattattattattatactttaagttttagggtacttgaggtcatttcttgtccttcaaaacagaacagaaacctaaaaagtgtatcctcctgtgaacccaaaagtatctgagacaggtctcaattaatttagaaagttcattttgcaaaagttaaggacacacctgggacacagcctcagaagttcctgacaacatgtttccaaggtggttgaggtatagcttgcttttatacattttagggagacat

SEQ ID NO: 662342 - DNA, 633 bp, Homo sapiens
taagtatgcatttatttaaacagtaagagtattttagaaaataacacatatttagtaaagatttcactggaacataaacccactggcttatattgtttatcatatttattacaaaactctatcgttttcccacttaagactcttagcttttcccagtgcctcaggagatggcttttctgcatttttttcttagcttctatatttcctagttaatatactttgagtttaaaaccctagatcacacagtctcatcagaacaaagaggtttcattaaacagaggtggaaaaatgactcactcttccatgttcctaataataytgaacatagtcatgggcttttactgtgtttggggcacaggcatttaagagctcaacaaagtagaatgaatcattttataaacacataggaagttcttcaaaggtttcagtgcataatcaggagtcactccagattggaactcttaagaaaaaaaatatcttgagtaaatcttgaagaatcttcaaaaaatactgttattcaagcttgctatttttctctttccaatgctcatgaagattattgcccttcaatatgtcattgtaacaagacttccctttaaggaaggaaactttgggagtgctagagaacacaga

SEQ ID NO: 662343 - DNA, 562 bp, Homo sapiens
atcttccaaccaacagtattgattattgatctctctcatttctgccaccaaaaaatatataacatgtccaagtatgggaaaagtgaagactacatatcctaagacagaggaatgcacaactttctcttttggtagccctatttaataggtaggaaaacaaagatgagaaagaatgatgatagtataatctataaaaccaaaaaaaaattctactccaggcatatttgtcttcagcattcctaacatttaagaaatgaatgctgattaaaacctactctacatgattgcccagttgtttgttagacactctccctttttcttagatgctgtcaatttcccttacatygaaatccacaaaactcctccaaaaaggcatagtctgttttgttttgtgttttgttcagggattaaacaaattacaagtgcttaaaacattgccttggttctatagacatgcaaccaaggtgaaataaatgaataaatcctatttcttcggtgtttggggaaaaattgatgtgatatgcattcaagagtttggagagaaagtacgtggcacattatg

SEQ ID NO: 662344 - DNA, 522 bp, Homo sapiens
agaaaagattctactgcacacatatttttaaatgactaaataagtccacatatctgcgaaagacatttctaatttctttatcatagataaakaaatttctaatttctaatatcatagattctctcaggttgcaagggagatacctacacaccttaggtaatattctttgcgtgtgtgtgtgtgtgaggaaatagatacttaaaactgtaagcccaaagtcacagctagatttcacagaacttaaatgtcatcccactttccatactctctcagtggtttcacacagcttcaacagtttcttataccaaagttactgttacaactacagaaaatgctttaaaagaacaggaggaacagatgtgtgtttaatccttttatttctcatgcctaaactcacattcttttcaattctctaggttattttccattagtttaacttaccgaaaagtgatttgggatgaagagacaattaaactaatccaagttgaaagaaggtgatctaattatgaaccatggagcctc

SEQ ID NO: 662345 - DNA, 522 bp, Homo sapiens
agaaaagattctactgcacacatatttttaaatgactaaataagtccacatatctgcgaaagacatttctaatttctttatcatagataaagaaatttctaatttctaatatcatagattctctcaggttgcaagggagatacctacacaccttaggtaatattctttgcgtgtgtgtgtgtgtgaggaaatagatacttaaaactgyaagcccaaagtcacagctagatttcacagaacttaaatgtcatcccactttccatactctctcagtggtttcacacagcttcaacagtttcttataccaaagttactgttacaactacagaaaatgctttaaaagaacaggaggaacagatgtgtgtttaatccttttatttctcatgcctaaactcacattcttttcaattctctaggttattttccattagtttaacttaccgaaaagtgatttgggatgaagagacaattaaactaatccaagttgaaagaaggtgatctaattatgaaccatggagcctc

SEQ ID NO: 662346 - DNA, 570 bp, Homo sapiens
ttaaaactgtaagcccaaagtcacagctagatttcacagaacttaaatgtcatcccactttccatactctctcrgtggtttcacacagcttcaacagtttcttataccaaagttactgttacaactacagaaaatgctttaaaagaacaggaggaacagatgtgtgtttaatccttttatttctcatgcctaaactcacattcttttcaattctctaggttattttccattagtttaacttaccgaaaagtgatttgggatgaagagacaattaaactaatccaagttgaaagaaggtgatctaattatgaaccatggagcctcattctcataaagaagattctaaaaatgggtgaatatttagataattttaaaataattatatacttagagtatataatggaaggttgattatctaatgaccatcaatagtgagcaaattattagattatacatatgctaacatttcttttcttaaactgaagttctgtttatttccattgattaatattattccatcagtgcagtatttaagaacctaacaattaagagaaagcaggaaaggggaga

SEQ ID NO: 662347 - DNA, 607 bp, Homo sapiens
cctggtatagatatctcagattatactcaacaacacaacaggccatactgagaaaagtagggactttagagttagtcagacccagttttccacctaccagctgtaggtattggacaaattatataaactttctgaagttcagttgtttttctgtttgaaaaaagaaaaggtgtatcaatacctactatgcagagatctttgtaaggattagaacagatatmtatgacctagcatgatgcctggtgaagattaagcatttaatagttagcagtggtagaatgaattatttcatccagacacagccaagatactcacaattagagaaatgacccatcatatgatagtcctgccctgtcccctcctcagagagttgtggtaagaaaggactacaaacagtaagtcaacagagggaagggaatgtttaaaaagaaagacttttataaccattaatgggctgtcctagcctgcttgggctgctgtaacaaaatatcatagactaggtgccttaaacaacagaaatatattttctcacagttgtagagactgggaactccaagattagggtggcagcattgtcggtttctatcaagggccctctacctagctt

SEQ ID NO: 662348 - DNA, 612 bp, Homo sapiens
tgcaggtgaaagtaagcaaagctgagagcaggtgttgctaagaggtatgagattctcttcaatgaagaggaagttgtatggatrcccaacagttcatgaaaactccaatagcaaaaggtttcacctttgtgggaagaaaacttaccacagaactgtgcacagcaaagctgagcagagccctcaaaagattaataattatactgcagctaacagtcagaacacaaaccccagtcactcagggaaccaatgaccagtttcacatcaagttcataagtaaccaacaggcagtgaatagcacctctcacccactggccacacatacgtaaatatctccaggaacccactccagcacacacacaccatgctgcatcatcaggctagggcaggtttgggaaagcaaatccaggaggaacaggaagtctgaatcttgcagatctccaccaccaagaagccccatcttacatcctcctagactattctgaagttgagactgataaattgggaagtggttatgatttggctactcacaggattgggctgatatttgaactggaatgaaacaaaacataagctgtcttcttaaggaagctgaggtcattcaaggccaagaat

SEQ ID NO: 662349 - DNA, 613 bp, Homo sapiens
tgtacatatgtttttgagagccagaattcaaaccactatagtccaccctattgccctcaaatatttatatttttccaatgtgcaaaacacattcaggccatcccaacatcctctgaaatatcagcctatcacagccgtcaactgtaagtataaaatcctatctgaatgtcatgagctcaaaagtcccaaatctcttcatytaaatcaggtatgggtaaaactgttagcagcagtgaatccatatgggtctgcagcaacctcaatccttgcctcctcagaagaaacaatttgaccaaggggcataaggcagagtgaaagaccaaggcagagtgaaagaccgaggcatattttagagcaggagtgaaagtttattaaaaagctttagagcaggaatgacaaaaaataaatagtatgcttggaagatggccaagcaggcaacttgagagattaagtgcacagtttgatctttgagttggagtttatatgccagcatgcttcccgggggttgtgtcccttctctactgactctttccttggggtgggctgtccacatttgcagtgtcctgccagcacttgggaggggtcatatgtacagtgtgtttactggagttgt

SEQ ID NO: 662350 - DNA, 613 bp, Homo sapiens
tgtacatatgtttttgagagccagaattcaaaccactatagtccaccctattgccctcaaatatttatatttttccaatgtgcaaaacacattcaggccatcccaacatcctctgaaatatcagcctatcacagccgtcaactgtaagtataaaatcctatctgaatgtcatgagctcaaaagtcccaaatctcttcatctaaatcaggtatgggtaaaactgttagcagcagtgaatccatatgggtctgcagcaacctcaatcyttgcctcctcagaagaaacaatttgaccaaggggcataaggcagagtgaaagaccaaggcagagtgaaagaccgaggcatattttagagcaggagtgaaagtttattaaaaagctttagagcaggaatgacaaaaaataaatagtatgcttggaagatggccaagcaggcaacttgagagattaagtgcacagtttgatctttgagttggagtttatatgccagcatgcttcccgggggttgtgtcccttctctactgactctttccttggggtgggctgtccacatttgcagtgtcctgccagcacttgggaggggtcatatgtacagtgtgtttactggagttgt

SEQ ID NO: 662351 - DNA, 613 bp, Homo sapiens
tgtacatatgtttttgagagccagaattcaaaccactatagtccaccctattgccctcaaatatttatatttttccaatgtgcaaaacacattcaggccatcccaacatcctctgaaatatcagcctatcacagccgtcaactgtaagtataaaatcctatctgaatgtcatgagctcaaaagtcccaaatctcttcatctaaatcaggtatgggtaaaactgttagcagcagtgaatccatatgggtctgcagcaacctcaatccttgcctcctcagaagaaacaatttgaccaaggggcataaggcagagtgaaagaccaaggcagagtgaaagaccgaggcawattttagagcaggagtgaaagtttattaaaaagctttagagcaggaatgacaaaaaataaatagtatgcttggaagatggccaagcaggcaacttgagagattaagtgcacagtttgatctttgagttggagtttatatgccagcatgcttcccgggggttgtgtcccttctctactgactctttccttggggtgggctgtccacatttgcagtgtcctgccagcacttgggaggggtcatatgtacagtgtgtttactggagttgt

SEQ ID NO: 662352 - DNA, 613 bp, Homo sapiens
tgtacatatgtttttgagagccagaattcaaaccactatagtccaccctattgccctcaaatatttatatttttccaatgtgcaaaacacattcaggccatcccaacatcctctgaaatatcagcctatcacagccgtcaactgtaagtataaaatcctatctgaatgtcatgagctcaaaagtcccaaatctcttcatctaaatcaggtatgggtaaaactgttagcagcagtgaatccatatgggtctgcagcaacctcaatccttgcctcctcagaagaaacaatttgaccaaggggcataaggcagagtgaaagaccaaggcagagtgaaagaccgaggcatattttagagcaggagtgaaagtttattaaaaagctttagagcaggaatgacaaaaaataaatagtatgcttggaagwtggccaagcaggcaacttgagagattaagtgcacagtttgatctttgagttggagtttatatgccagcatgcttcccgggggttgtgtcccttctctactgactctttccttggggtgggctgtccacatttgcagtgtcctgccagcacttgggaggggtcatatgtacagtgtgtttactggagttgt

SEQ ID NO: 662353 - DNA, 596 bp, Homo sapiens
tactggagttgtacacatgctcatttgtggtgttcttccctcaccaaatgttcctagaaggtcatctaccacttaaactccactgttttgccatttagtgcacatgtttgagcccaggcccaactcctgagaccttattgggaagctgctaatcaccagtttcaggtgtttctatttattggaagacttcctttcccttgtactggctatgaccaattattattttagagagacagttaacaaccatctgaccatcacctgatggttgcctaacattcctgggttggtaaaggaagcctcccctgacctgctaatgtctgactagctacctactgtaacaaaactaggtatgaataatcctggagccaaattcctctccacctgtggagctgtgaaactataaaacaagttwtctgcttttaagataaaatggtgagaatggaatagggtaacagttatagatattcccatttcaaagaggagaaattggaataaagaagtcacccatccctagaaagtctaacgtgcagcaaaagaaatattaggtttcaaggcccaagaataatcctctgtgactctaggctccactcattggg

SEQ ID NO: 662354 - DNA, 463 bp, Homo sapiens
agctttatcccagaaatgtgggacttgtagagcaatagcaccactcttggtaaaactaactgaaatacctgagtcccagaggttgagcctgggtcttctattcttactgattcctagaacatttctagatatagcagtcctttaaagaagaaggttatagatattagtgttgtttgtcaaatatttctggttctgtgccactggcgacatgataggactgtattttctgcctcttttgtggtgtggaggcaccacatgactarttttggtcaatgagatggaatgagaatgatgtgtatcagtgctaggaaaaagcattcatttggcagtgcagtgcccttagagttctttctcttcctgcgaagatgaccaggaacatcagggaatggatagacatgtaggaaaaacaagggagaaaaattgtgttatcactgtaaggcatgggggctctttgttactgctg

SEQ ID NO: 662355 - DNA, 592 bp, Homo sapiens
accccttttcatcagtgttattcaacatagtactagaacttccagctggaataatcagacacgagaaagaaacaaagggcatccaaattagaaaggaaaaagtcaaattatccttgtttacatatgatatgatcttatatttagaaaaacccaaagtctccaccagaaaaaactattagaactgataaacgaatttagtaaagttgcagggtatgaaatcaacacagaaaaattagtagtatttccatatgccaacaacaaacaatctgaaaaataaagaaagaaattccccttagacctaagaatgaaattaaatatgtaggaattattatgctaagaaatgaaagatctctacmaaaaaaaaaactataaaacattgatgcaagaaatcaaagaagacacacacaaaagggaaaaatatttcattttcatggattagaagaacgaatattgttaaaatatccatactacccaaagaaatctataaatttgatgagatcctatcaaaataccgatggcattcttcacgaaaatagaaaaaaaaatcctaaaatttatactaaatcacaaaagacccagaatagccaacgct

SEQ ID NO: 662356 - DNA, 591 bp, Homo sapiens
caggtcttatcttaaagggtactgtgagaagtaattgagttaatacacataaaactcttagaaggattcatagtagactcttggcaaatgttttattacttgttattatcattattatttttatggaatatttcatgttttgtcttaatgattaaattatattttcttagtagtgaaaagagaccaggttgattacaaaaattagttaaaatgtatgtttttctttagaaaagtactacaaacttcagttacactttgattaaggattaaatamaattatgtatttaatgcaccttagtcatggtagacactgggaatcagaaaaagatcactgtattaatattccaaaactagtacagttaactatcttaaagttaagattttaaaattccagtgtgagtagataatttacaggaatcaaaagtccaagtcaatttaaaattcaccttcacacagaaattattcatattttacaaattttccagttcagaatcaattctgctaaaacaagcaaacaaaaacacatctacacataaaacactgtttttaaattcagatatgtaccagaagtcaacagattagaaggatttt

SEQ ID NO: 662357 - DNA, 591 bp, Homo sapiens
caggtcttatcttaaagggtactgtgagaagtaattgagttaatacacataaaactcttagaaggattcatagtagactcttggcaaatgttttattacttgttattatcattattatttttatggaatatttcatgttttgtcttaatgattaaattatattttcttagtagtgaaaagagaccaggttgattacaaaaattagttaaaatgtatgtttttctttagaaaagtactacaaacttcagttacactttgattaaggattaaataaaattatgtatttaatgcaccttagtcatggtagacactgggaatcagaaaaagatcactgtattaatattccaaaactagtacagttaactatcttaaagttaagattttaaaattccagtgtgagtagataatttacaggaatcaaawgtccaagtcaatttaaaattcaccttcacacagaaattattcatattttacaaattttccagttcagaatcaattctgctaaaacaagcaaacaaaaacacatctacacataaaacactgtttttaaattcagatatgtaccagaagtcaacagattagaaggatttt

SEQ ID NO: 662358 - DNA, 612 bp, Homo sapiens
tcaatctcgactcactgaaacctctgcctcccagcttcaagcaattttcccacttcagtctcccgagtagctaagactataggtgtgcaccaccatgcctggctaattttttgtattttcagtagagatggggtttcaccacgttggccaggctggtctcaaacttctgacctcaagtgatctgcccacctcagactcccaaagtgttgggattacaggcgtgagccatcrcacctgctactaataagaattaataatactcagggataaagttaaaggttgagaggaaattacatacacacacactttggtaattatatcagtcacctattgcaacagtacactccttaaaaaggccatccaaaactcaatggcttaaaaccacaggtatgtattcccacactcatgtgtctgaggatcaatagtgattccaatgaaaagggctgggctcagccaactggagagctgttcttcaggtcagttagcctttgccctaggctatgggctggactcagatctacattacatacatgatctacctgagggtcttataagggtctgtagagcacaaaatagggtgaaacttctaaagcccctgcttgtgtcatatct

SEQ ID NO: 662359 - DNA, 555 bp, Homo sapiens
atcaatggggcaggtcaacatactcaatccatatagttccctgacctcctacctgggttttgccagcctcccttactctaggggctggtccatgatttccatatctttgacaaatggctagaattctctggaatcatggtattgacaacaaacttgtttaaagccaagtctcattttcaaatcaccaaacttaacctcatgattccaattgatggcaactcctgggataccaaagctgggttaggataaacctcttcacctctgtgcttsttgtctgctctcaataggtctgttgctgagttgccagagtacatggtggctgaggacttgtgggatagaagattataatttggtctccaaatttgggatgaggtacacctggaaatgtgctaccttcttaggcactttcttaaccaactttgaatttcatttcctttacatgtacctaattatggtaaagttaatatgtaaaattacatatttgtctttgtactgttcggattaaggtgagtgagtaggcagctgtgagactttaggctttaagttactggctca

SEQ ID NO: 662360 - DNA, 555 bp, Homo sapiens
atcaatggggcaggtcaacatactcaatccatatagttccctgacctcctacctgggttttgccagcctcccttactctaggggctggtccatgatttccatatctttgacaaatggctagaattctctggaatcatggtattgacaacaaacttgtttaaagccaagtctcattttcaaatcaccaaacttaacctcatgattccaattgatggcaactcctgggataccaaagctgggttaggataaacctcttcacctctgtgcttcttgtctgctctcaataggtctgttgctgagttgccagagtacatggtggctgaggacttgtgggatagaagattataatttggtctccaaatttgggatgaggtacacctggaaatgtgctaccttcytaggcactttcttaaccaactttgaatttcatttcctttacatgtacctaattatggtaaagttaatatgtaaaattacatatttgtctttgtactgttcggattaaggtgagtgagtaggcagctgtgagactttaggctttaagttactggctca

SEQ ID NO: 662361 - DNA, 581 bp, Homo sapiens
caacattttattctgaatgcttaacctattttttcatccatggaagatcagaaggtcttatgactattactcctcttaaattaaaaaaaatatgttaaaaatagtctttgaaaatgtctgttcttagctaggtgtggtggagggcccggataatcacagctactcaggaggctgaggcaggagaataacttgaactgggaaacagaggttgcagtgagccaagatcrtgccactgcactccagcctgggtgacacagcgagactacatctcggaaaaaaaaaaaaaaaaggaaaatgtctgttcctctggagagtcactaaaattcatatgtaccctattaggaacaaatgtgaaaaacaaataaaaatttcaatctgtatattttttataatagaaacacttaacgtagatcaaccttcttttattttctaccttcatgtaatctaaccactgtgattttagagcttgatatttttcccttacaacaaatatttctcataatactgaataaataattgctgggtctaaatttttatacacttgtaaaataaacaattgcattatgaactatagaagtatt

SEQ ID NO: 662362 - DNA, 581 bp, Homo sapiens
caacattttattctgaatgcttaacctattttttcatccatggaagatcagaaggtcttatgactattactcctcttaaattaaaaaaaatatgttaaaaatagtctttgaaaatgtctgttcttagctaggtgtggtggagggcccggataatcacagctactcaggaggctgaggcaggagaataacttgaactgggaaacagaggttgcagtgagccaagatcgtgccactgcactccagcctgggtgacacagcgagactacatctcggaaaaaaaaaaaaaaaaggaaaatgtctgttcctctggagagtcactaaaattcatatgtaccctattaggaacaaatgtgaaaaacaaataaaaatttcaatctgtatattttttataatagaaacacttaacgtagatcaaccttcttttattttctaccttcatgtaatctaaccactgtgattttagagcttgatatttttcccttamaacaaatatttctcataatactgaataaataattgctgggtctaaatttttatacacttgtaaaataaacaattgcattatgaactatagaagtatt

SEQ ID NO: 662363 - DNA, 529 bp, Homo sapiens
ctatgtgccaggactatgctaagtacagtgggtgtaggagtttgataagactatgtataaaaagtactatgtgccagggctgtactgtgctaagtaaatattcttctaaatagtcttgtactgtgctaagtacagtcttggcacatagtaatttttgtatactttgtgggctatcattatccccattttacagatgcagaaaccgaaggctatcccratttaagtaatatgcccaatgtcctactgtgagtaaataaaagaactagacttaatcctaggtttgtctggcttttggttctgggattgagaaactgatactagtgagcagctgggagctctgctaccaacctgcacatttaccacagctgaaatttagcttaggctaaaggtgttcaccaaggaatagctatgtaagcattcaaaattcccccattcttcattctacatgaacaataaaaacatgttaattttatttgtacatttgtcatcttgaaatgtgccataagtgaaaagagatatgatactgggt

SEQ ID NO: 662364 - DNA, 630 bp, Homo sapiens
gacttgtctgaaagatttcccttaagtggttatattgttacctttttttctatttctctatttatataatagtttaataacagaggtaggagagaaaaggaatgaagtgaggaaatgtttctactatcaaagtgtttcttcaattaccaactttcctcttcacaactacataaataaggacattttaataccctaattaatatccatttttaactctatgccatgtttttattgccatcctctcattaaaaatctaatgagcattagcattctgacaatgataataaatgccaacaatccatattcagttattaaagctaatggttctcccattggaatgtaatatatgcttcaagcttttttgccaaaagctcaatgatacttttatctccagtcgaccaattgcacatttaatttaatacctattaaatgcaaacagcaatccagaaattacattagagttgttacctgagccatccagagccagcamctagaaagtgaaaattaggtaaaggactaatgttagtcacagaatagaaatgataagcaaactcctgcctcagcaaagtggcttatttgaaaagaagaaataagtcatacgacaggctctaagtacaacagcaggacaga

SEQ ID NO: 662365 - DNA, 563 bp, Homo sapiens
aactaatttaatttttaaagtaactytctgctatagaaatgactataccagtgttatagataaataaaatgaggcttagagaagctatataagtagcatcagcttacccaagtgtttctgacacctaagtccatgtaaggtagttatccctgctattagggaatgcatgactgataagaggaactaatgagattatctgaaggttaggcctaaatacttctataaaacattccagaaagagaaaagaacatatatttttaggaagtcttttggggacattcttgactgattagttcaatttatcattctttgctaagacctgaattcttgctcaatccaatcatcttcacagttcacagattctaaccctggtcagttgtcttatacttatatactcatatacataagagaagctgggtgaaagagtgaatgccaatgaatgaatgctaagcagcaatttctccatttcagttcacagccctggagggagatcaaaagcctcagtgtatagagataactgcagcaatcatgatcaccagttcactttagatgtacattaaggt

SEQ ID NO: 662366 - DNA, 562 bp, Homo sapiens
ttcagaaagtcataaataagagcaaaatatccttctatccttaggtattaattttccacatcaatcatctttgttctgttagaaagctagcattgctctataatattttccaatttcccagaaaagttggtttgcataatatgacttcagaaacaactgtcaaaaagaaaactgatttgattatactctggatttctaagactgactaaacaagcactttatagaaatagctcaatttataaagctctgatgttttccactttttttcttagtcaatagaaaaaatattgaccatgggaaagaaataatagaccrtatttggtttttagatgcaggtactctttgatatgcaattttagatcctcatatgggaatcaaaaatcctcttctgtcagctcataaaaagatgtcatcagacacttgagcaggatatatgttttaacagtaagtaatatcccaaatatcttgctcaatttcaaagttctacatgattctaaaaaatcacgagtatgcatctgtttgattattctaatcttgaaaaatactctaataagaataaact

SEQ ID NO: 662367 - DNA, 497 bp, Homo sapiens
tatttaattaagttaataagtaacacttggatatctagataatttctacataagatagaatactaaaacactaagttcatataattttacttatattctgtagagtggatatatgtttgtatcttattaatggacacatatcttttttaccactgtaagatgtgaaagggatgtgcgcagctgtagaaagttatgctatgtatatttataaactttgctggtttgctagaatgcttgtatatcagagtttcaactaggcatcgccccctgccaccaacacagctttttctttgaaataaaatgttagatacattggtgaaaagttatcatcaatataggttgttgagacaataatagagktcaatactgacatagaaatgaacctgtgtatgtgattttgtttttccaagagactacattcttcctagcacatcatctcagtttgttccagaatatgaaagatcatagtgaaaggcaaaacttgagggagtgtaaaa

SEQ ID NO: 662368 - DNA, 548 bp, Homo sapiens
ttataacagctactatggaaatatcaaaccagaacagatgctcagcattcaatgggttaaatttatataggcagatgttattagcataaatatttcagaaagtatatattttatgggtagaagcttgatattcatcaatgtccccactgttaatcaggttttagatttcttcaaatctaattgaacagagtaataagtaatgggatcgaagtcataataaagtctccctgtaaagaaaagcccaggactcaatggcttcacggctgaattctaccaaacatttaaagaactaataccaatcttacttaaactatttcaaataatagagaaggaaatacttccataatcattctatgaggccagtattaccctaataccaaaaccatacagaaaaaaaaaaaaaccctacaggccagtacatctgatgaatattgatttttwaaaaatcctcatcaaaatgccagcaaacttaattcaacaacacaggccagtattaacctaataccaaaaccagacaataatacagaaaaaaaaaaaaaaccctacag

SEQ ID NO: 662369 - DNA, 623 bp, Homo sapiens
tggcttacaagaccctaatgatctgtcaatacccacccccacccatacacacactctcacacacccacacacacactctcacacactcatgcacacactatcaaacacctccccccacacacatctctgacatcatcttgtaccactctccccttcactcaactccagccattctggtctgcttgctactcctagaagaatcccaagctccaaaacatgctcctgtcttagggcatttgcttcagctgttcccactgcctggaactgtcttgcccaagatacccacttagctcactccctccaccttctgtaagtctgtgctagaatgtctcctcatgagacctgccttagactctctatttaaaattgcaactcacagctccctctgcatgctcctgagctgtttttccctatcgtgtaccctagcatgtatcttagcacgtascctgcatgccttctctgctagtgcactctctgctttacttattatcacatttatggatggttatatgtctccctcctagaatataagccctataatcacaaggatttttgtgtattttgtccactgttgtatctccctaacctataagagtatttagcatttagtagatgctcaataa

SEQ ID NO: 662370 - DNA, 572 bp, Homo sapiens
ttgaataaataggatctaaaacattatggctttctgctacgataacgtcaccaaatgctccactgactttggaacttgcaagagcagtgtccctgccgaggcagttggtgtcatggggtgagttgagggatgctgcaaggtttgtcttgcctcaaaatatctcacatataattctgccacattgcctgaagccccatgtgaaaatacaagtcttttacttaggagggagaattagatggtgatttggcataatcatgaggagagacagaattgacacatgtcggtgagaggagacgaggctctggaacaggagatgctgctcacagggtgggggagcaccctgagcccagtgmaggggaaaggaggctggagaagtcacgggggcaggtaaggagatgaaggcgcaaaacaaagcaagcttcacccacttaattcttccacctagagctgagaagagactaagtgtggggactattggagaaactaccagctaaaatacacacctttgttctggaacagctgctttatgcgaagataccatgaccacattatttttacattaaaataaattc

SEQ ID NO: 662371 - DNA, 497 bp, Homo sapiens
gtgacagttgcaaggtgctggagtccataaaaacttgagtttcaaatattggaagagggtctctctttctgatttaaaaagaaaacaaaattcttcytaaaatctgtttaggtctagcctcttctccaagataacacggttgctttcaccaagagttcccgttgttttcacttaacaatccactttcccttattagtcagaattagattcaggtaaagaaaaggatcacattgcaagaaacatagttcccaaggattataacaacatgtctattctttcatttcaaggactggctttgacatcaaagaagtgaaataatagtctctctcaaaaatgttgtttttatttagctaaaaataggacgaatgccatctatatggatagatatgaaagtgcagttattttcaaattgctaaataaatgtttccccctcaaatctgagcctagatgaccattttggaactctgcaaggaacataaacatggaacattccaatt

SEQ ID NO: 662372 - DNA, 571 bp, Homo sapiens
ggatctaatggaggtaaaaggtaaaattatggttaccagaggctaggaagggtgtggggagactggaggatgaagagaagttggttaaggggtacaaaaatatttagacataaagaataagttctatttgatagtacagtagggaaattatggttaacaataatttattgtatatttcaaaatagctaggaaagaattgtaatgttcccaaaacaaagaaaagataaatgttygaggtgatagataactcaattaccctgatttgatcattacacattgtatacaggaattaaaatatcacatgtaccacaaaaatatgtaaaactattgtgtatcaataaataataataataataacatgaattacctcatagattcttgcaattccacagagcagggttacttctcctggaaacttatctaagccttgtttgaaaagatttaaagcagtcacaggttgatccaatgagacataaacctaaaaacaagatacatttcaataaaagtataggttcttaaaattaatatttgttatgacatttataattattgattagtaacaaattatctc

SEQ ID NO: 662373 - DNA, 508 bp, Homo sapiens
tacaattagcattattttcagatatactagaaaaayatattttcagccagcttaattcaggcatacatggtaaatatctaaacattttaagttgatctttataaagacctttttccagcaaatagaccatagtccttctcatgctttgtataaacagaccttctattttttagaaaaagatgtcatgcaaaaattttttatgtcttctaacttcccaaggttagatttagtgcttcttacaggttgctggttttgcttgcatagttggtcctaaaacaactcatcctatggagaacccatatctttgtgctaatccaattaaggatattaatataaattattgatacagaataaaaatggcaaaaagaaattataatgatgaagactcaggctgctaaggactgaactctgacctttttttctcttgccccaaatcctttctaagcagaccccacaaaccataaaatctcattaaacagtttttttaaactaagctggtataatgcag

SEQ ID NO: 662374 - DNA, 621 bp, Homo sapiens
tcctggtccatctgttctgctcactcagcaaatgaggaccttgtgtcttccttacttattaagcaaataccacctggtgactgtgcactgttctgacctggctattctagaaggtctatgaagatgagaaaggaagggracttgccctcgtgggcctcagcattcaggcatctcctccaaggtgctccaagaaaccaagggacactggtcagtgggccccagagcgcctgagccttcttcatcctcttctgctaatggtgccaccatgcacctgttgctcagttagaaacctcatttaaaatcagtcactgagtggtactgattgtacatgtttttgtttgtttgtttgtttgtttttgagactgagtcttgctctgtcacccaggctggagtgcagtggcatgatctctgctcactgcaacttctgcctcctgggtttgattctcctgcctcagcctcccaagtagcttggattacaggtgcacaccaccaggcccaactaatttttgtattttcagtagagatggggtttcaccatgttggccaggctggtcttgaactcctgacctcaagtgatctgcccgcttcagcctcccaaagtacagggattacagacatgag

SEQ ID NO: 662375 - DNA, 621 bp, Homo sapiens
tcctggtccatctgttctgctcactcagcaaatgaggaccttgtgtcttccttacttattaagcaaataccacctggtgactgtgcactgttctgacctggctattctagaaggtctatgaagatgagaaaggaaggggacttgccctcgtgggcctcagcattcaggcatctcctccaaggtgctccaagaaaccaagggacactggtcagtgggccccagagcgcctgagccttcttcatcctcttctgctaatggtgccaccatgcacctgttgctcagttagaaacctcatttaaratcagtcactgagtggtactgattgtacatgtttttgtttgtttgtttgtttgtttttgagactgagtcttgctctgtcacccaggctggagtgcagtggcatgatctctgctcactgcaacttctgcctcctgggtttgattctcctgcctcagcctcccaagtagcttggattacaggtgcacaccaccaggcccaactaatttttgtattttcagtagagatggggtttcaccatgttggccaggctggtcttgaactcctgacctcaagtgatctgcccgcttcagcctcccaaagtacagggattacagacatgag

SEQ ID NO: 662376 - DNA, 614 bp, Homo sapiens
tattttaaaaaattaggtatccatttacatgtagaaagtgttttgaaagggcagatgggaacctgttgacagtatcatctctaggaagtgaggtttagggattaagaagggagggaaagagaattttcactttttctcttctatcatcctatactgtttgattctttaaaaagtcagtacattcaatacttttaaataattaattttaaaagtaattaaatacatggtagcctttaaaaaaaaaaacaaasactagcaaccctatgctaaaaatatagaaaatagtgatcccatgtatctatgtggaaggtggaagctctgtcctgcttttactatcacaggacccttttggaaaactcgaccttccccagccttcatgggagaaagacctcccaggtgaagaggcctccaaagagggctatcttggcccatttctcaaacaaagagctctgagttgatgtggtgcaaggccacagagaaaactacttgtgggattgaggtttggggtcagaggagcatctgtgaagctggtaaggaacagtttccattcaaagagacaacaaatatgtgtcaggtactgtgctggatgctggctaagcagagcctggctgtcc

SEQ ID NO: 662377 - DNA, 614 bp, Homo sapiens
tattttaaaaaattaggtatccatttacatgtagaaagtgttttgaaagggcagatgggaacctgttgacagtatcatctctaggaagtgaggtttagggattaagaagggagggaaagagaattttcactttttctcttctatcatcctatactgtttgattctttaaaaagtcagtacattcaatacttttaaataattaattttaaaagtaattaaatacatggtagcctttaaaaaaaaaaacaaacactagcaaccctatgctaaaaatatagaaaatagtgatcccatgtatctatgtggaaggtggaagctctgtcctgcttttactatcacaggacccttttggaaaactcgaccttccccagccttcatgggagaaagacctcccaggtgaagaggcctccaaagagggctatcttggcccatttctcaaacaaagagctctgagttgatgtggtgcaaggccacagagaaaactacttgtgggattgaggtttggggtcagaggagcatctgtgaagctggtaaggaacagtttccattcamagagacaacaaatatgtgtcaggtactgtgctggatgctggctaagcagagcctggctgtcc

SEQ ID NO: 662378 - DNA, 572 bp, Homo sapiens
ggatctctgggtgcaagaaatagggccctatatgccaatggggctccttcaaatcatatatcatgacatcttcctacccccaactgccccagcctggactgcagaatacgcttctggtcactcctctctttaatccaccctctaggattctgtctgcattctttttctacacttaggtgtcatcacttcattcctgtgcttaaaaaccacagtgaaygccacgctgtcttcagaaataaatgcaaacactaaggcaatgatacatgaggccttccagcctgtctcctggctccagcctctttttccaagtcatctctgttcttagcagccagcagccaacagccattgcctggcacagcacctgctacacattcggttatatttgtcctgcaaatgtttaactagctgtacccgtcataatctcctgtacatgacatgcacttacacttctccagagtttgtacattcaagtcattccctttgccaggagcagtctttcccattccatttgcttggggaataggtccttattcctaattcttctatttaaatgtcacctcttttccgtagcc

SEQ ID NO: 662379 - DNA, 616 bp, Homo sapiens
caggggaatcacttgaacccaggaggcagaggttccagtgagccaagatagtgacattgcgctccagcctgagcaacaagagcaaaactctgtctcaaaaaaaaagtcttatttgtagaaataatagttatgacattatgcatctagtcttttggattgcagataaagtatctcaaatccgttttgtaatgaggcattttatatatacaactaattaatcagggcgatttcaggcaagccattttacctcttttcaccttagtttccacactggtaccatgaagtaattggtctgggtgacctcaaagtgttttccaatattaacatttcacgaagaattctcaactctaaccatatgtgtgctaacaagaaacggtcacatcacaaatcacaaaaagcagggggaaatctaagtgataattccatttggtctaggaatgcattagagtctgtgacttccttgggtcagtgatgaatstatgatgaaccatttcccagtttccaagatcttcttccctgtctcacttgaagattcaagtagatccaaggaagctcactccacctctgatgagttgagggacttgtgccatggttcacttgaaagatgatcatggct

SEQ ID NO: 662380 - DNA, 616 bp, Homo sapiens
caggggaatcacttgaacccaggaggcagaggttccagtgagccaagatagtgacattgcgctccagcctgagcaacaagagcaaaactctgtctcaaaaaaaaagtcttatttgtagaaataatagttatgacattatgcatctagtcttttggattgcagataaagtatctcaaatccgttttgtaatgaggcattttatatatacaactaattaatcagggcgatttcaggcaagccattttacctcttttcaccttagtttccacactggtaccatgaagtaattggtctgggtgacctcaaagtgttttccaatattaacatttcacgaagaattctcaactctaaccatatgtgtgctaacaagaaacggtcacatcacaaatcacaaaaagcagggggaaatctaagtgataattccatttggtctaggaatgcattagagtctgtgacttccttgggtcagtgatgaatgtatgatgaaccatttcccagtttccaagatcttcttccctgtctcacttgaagattcaagtrgatccaaggaagctcactccacctctgatgagttgagggacttgtgccatggttcacttgaaagatgatcatggct

SEQ ID NO: 662381 - DNA, 523 bp, Homo sapiens
ggagttgcatctgtcttgttcattgctacttccccagatagaaaagtacctatatataggtggagaccttgtaaatattttaagaatgaatgaatgaatggcttcttcatgcaataggcaaaggctccatcccaatttgatcatctctaagtccagtcactgtgtccaggggtttgaggtactctgatgggctcatcttgagtcacgcacacacctgtgtctggtggtcgggaggaggcacagcaccagaagtagaacagaggtgaagaggagagagcaacaagtagcgtaacaagtagtgtcttaggccctgctgagwgtaaggcactcttgtttctgagctctttttggaaatatgtgggcattatgccttccagactcctcactgctgaattataattacttagacatactttgaagacacattctctgagaaatatagttcaaccttcagtatataacactgttcttcaaaccagaattcaaaatgcataatctgataaatacagggacaacaagatgc

SEQ ID NO: 662382 - DNA, 575 bp, Homo sapiens
aggtctcgatccagaacacttaaagagtaatttttggctacacagaatggatgtggatgggaatatgaaaggccacccctattttttaaagaataagcctagagcctatgaaccttaaaaacaggacatactcagccttatacaaacccaactgccaaggttctctgcctatacacttttagcattctcccactgacaagatatagaagaggacaaaaaaagtgaggtgcttgttaaccgcaaccctctggtgcccaggtagactctctaccagggacgcttcctctttggagggactgggcaggaccaacattgagaatcacattactggtgagttaaagaaagataatggggttgaggatagaatctggttccgtttcactggctccccattagtctgagctctttaataatagatggtactatgagaggtcatgccacagttgggtaggtcgctggcagttttgcccaacacttgtggcagcttctgcagagcatyggctctatgtgtgcctcctaacacatccaccacatgccaggctctgtgctatgtcctggggataaagtaccattca

SEQ ID NO: 662383 - DNA, 586 bp, Homo sapiens
gtctttccaacaaggttggagcagcagtcgaagtcaatacttcaactgcttgtactataaatgtttgtgcttttttgtctttttgtggaggagttgctgaacacatagagttgaatttcctgaagttatgtatgatgcaactcttcctttctatccagagttgagaaggggatgggaaaacactcatgcctagtgctgataggtgctgtgtgcaggaccatttgacaaatcttatcacaacctttaaaagcatgcagaccactggtctctgtatctcgaccgctacacatttattcattccaagaaatactcaattttgttccaaatattacaacatcaagaagttagtaacaagaacattcggcggagcattgttcacaacagaaaaatataataggaaactaccaaactctccatcacagggctgaatgaatcctgggaaggtgaaagctctctcaacctacctaactgaaccagactcctcttcctctgtaaaacctggtgactgaggccatggccctgccggtgtgcctgtgcatataagggtactcaatactccagctccygactgctgaggtgtgagttt

SEQ ID NO: 662384 - DNA, 642 bp, Homo sapiens
ctacaatagcagaactgagtagatgcaacagaggccatctgtctcctaaaacagaaaatatttataatctgtttccttacagaaaaagcatgtgccaacccctctactagacactggggagatggatgttgactgatgatgaaacaattggataaatggtccccagatcccaggcagctcaagctgccttttgctattagttatttttatatgtgagatcctgaaggcagggattgagtcttcttttccttttttggctccaccaaagggtcagaaggtcttggaaaatgttgatgctgatttgctgccttggacaccaggaagcggtggtgcacggaagggcttgaagacgcgggtgctccttcatcgctggtcggtagagtccttcacccttggtctggaggtcaggctgtggttgctgcggtgcattctctcagctgggagaccatccctgcatgcgctgtgagaggagacatgaggcctgcagacctgctagaagctggggggaacaccgccrggtccactgtcggacaaagtatttgactttcaagtgaaaaccaaacctagggcacaaaggagaaagtatagatgtcaggtactgacagggctgtatttaaacctcatctttggttctttctaatt

SEQ ID NO: 662385 - DNA, 610 bp, Homo sapiens
tttctcttacttcttttgtttgtaatctaataaattcctgttcaagtttagatgaaatagttagaatgcacaaatgaaacctgcaccctgattttttaaaaaacaagaacattatgagtgccctagaaaccctatagccatgatgctttctagtcactactctcccacctccaagcatacataaccttacttttaagggcattgaatagtcttgactgtttctgtacttcacgtgaatggaattttacagaacctatggttttgcrtctgttttcacccaacatcatatttatgagattcatccattttatcacatatagttgtagtttgttcactctcattgctgtgccgtatgcctgcattagtctgttctcatgtttctaataaagacatgcccaagactgagtaatttataaaagaaagaggtttaatggactcacagttccacatggctggggaggcctcacggtcatggcagaaggtgaatgaggagcaaaatcacatcttacatggtggcaggcaagaggcctcgtgcaggagaactcccatttataaaatcatcagatctcgtgagacttactgaatctcaagagaacagtatgggggaaac

SEQ ID NO: 662386 - DNA, 487 bp, Homo sapiens
tcaaaaaactaaaaatagagctgccatatgatccatcaatctcaytgttgggtatatacccaaaagaaaggacataagtatattgaagagatatttgtattcccatgtttattgcagcattgtcacagtagccaagatttggaagcaacctaagtgtccatcaacacatgaattgataaagaaaatgttgtacatatacacaatgaagtactattcagtcacaaaaaagaatgagatccagtcatttgaaagaacatgggtggaagtggaggtcattatgttaagtgaaataagccaggcacagaaagataaacattgtatattctcatttatttgtggaatctacaaatcaaaacaattgaattcatggagatagtagaggatggttaccagaggctggggaggttagtaggggagtagggggaggtgggaatggttaatgggtacaaaaaaatagaaataatgaataagacctactatttgatag

SEQ ID NO: 662387 - DNA, 487 bp, Homo sapiens
tcaaaaaactaaaaatagagctgccatatgatccatcaatctcattgttgggtatatacccaaaagaaaggacataagtatattgaagagatatttgtattcccatgtttattgcagcattgtcacagtagccaagatttggaagcaacytaagtgtccatcaacacatgaattgataaagaaaatgttgtacatatacacaatgaagtactattcagtcacaaaaaagaatgagatccagtcatttgaaagaacatgggtggaagtggaggtcattatgttaagtgaaataagccaggcacagaaagataaacattgtatattctcatttatttgtggaatctacaaatcaaaacaattgaattcatggagatagtagaggatggttaccagaggctggggaggttagtaggggagtagggggaggtgggaatggttaatgggtacaaaaaaatagaaataatgaataagacctactatttgatag

SEQ ID NO: 662388 - DNA, 642 bp, Homo sapiens
cattttaaaacagtcctggaataaatggtgctgaaattgctcagatctagcctgctatcttctaccccagcatacagagagagaacagaacagatgaaatgctgggcttgccgaccccgtctctcctttccactttgtggtcttaagaaaatcacataatcagaagttcaattaccttatctataaaataggaagaaaaggccgggtgcagtggctcacgcctgtaatctcagcattttgggaggccaaggcgggtggatcacttgaggtcaggagtacgagatcagcctggccaaaatggcgaaaccccatctctactaaaaatmcaaaaaaaaaaaaaaaaaaaattagctgggcgtggtggcaagtgcctgtaatcccagctaatcagaaggctgaggcaggagaacctcttgaacccaggaggtggaggttgcagcgagccgagatcacaccattgcactccagcctgggcaacaagagcaaaactctgtttcaaaataaataaataaaaataaaataaataaaacgggaagaatgatatcctcaatgtagattttttaatgaggatcacacaaaataaagtaggtgaaagtgccgacgtttgttagagcagagcatttcagactttgacgtgtgtat

SEQ ID NO: 662389 - DNA, 617 bp, Homo sapiens
gggctccagaaatgaagaccccaacagctgacacatggaacccaagagtggtgttcttaccggcactcgaggacagtctagaggacccatagaaatcataggatgctatcttagagagaacggaagcccccataactgtggaaggggaaagtggctggaaaaatattgtttgtttttgttaataggactctagtgtggacagagaaaacttggattaaacactgtgctgggcatcatctgtggtccttaaccacggtcccaccttggcatgctctctccagcaaagcargggaggaagcctgaagaccccattagtttctgtcacaagaagcactcactatggtttctgggaagcactcactcagaaggtgggaagaaagtggaagctagttttcttccacctccgccagtagaatgcagggacctggacccctgcagggatgttagcagctttctgcattttctgggctctggataacatcatccctccctgctttttgttctcaacagcccttccaataatcttgtggcctaattcctatattaaattcgcctctgcctaaatacctacagcaatttgtgtcttccaactgataaccctaactaatgcaaatagg

SEQ ID NO: 662390 - DNA, 617 bp, Homo sapiens
gggctccagaaatgaagaccccaacagctgacacatggaacccaagagtggtgttcttaccggcactcgaggacagtctagaggacccatagaaatcataggatgctatcttagagagaacggaagcccccataactgtggaaggggaaagtggctggaaaaatattgtttgtttttgttaataggactctagtgtggacagagaaaacttggattaaacactgtgctgggcatcatctgtggtccttaaccacggtcccaccttggcatgctctctccagcaaagcaagggaggaagcctgaagaccccattagtttctgtcacaagaagcactcactatggtttctgggaagcactcactcagaaggtgggaagaaagtggaagctagttttcttccacctccgccagtagaatgcagggacctggacccctgcagggatgttagcagctttctgcattttctgggctctggrtaacatcatccctccctgctttttgttctcaacagcccttccaataatcttgtggcctaattcctatattaaattcgcctctgcctaaatacctacagcaatttgtgtcttccaactgataaccctaactaatgcaaatagg

SEQ ID NO: 662391 - DNA, 563 bp, Homo sapiens
actataataaattattcactgaagactggaatttgacatatttatctgctaaatctgtgttaacgataagacagaaaaagaaacagatatgcaaaatgaattctgtatccaaatgaatgtaatgcaaagacacagttttaaatcagattagaaactataatattttaacagttacctcagttattatgcaatcataaaactgtaaagacatataggtctatttcagcatgattcattatttgaatgactacttacttaaaaagaaaaaactttctgttgaagttattaatcataatttccacacaaatcactgaagctctsctttaaaatttgaaaagagcatagagaacaaaataggaggagtgatctaatgaaaataataatgacatttagttttcagtttatctgtaagatgataattgattttttgtgcttactcatttaaaataataattgcttatttcctgataatcatctgagcagactatgctccttctgaatccctcaatgtaaaaacatttttctctcaatatgtttttatgaaaaacaacattagaacatta

SEQ ID NO: 662392 - DNA, 563 bp, Homo sapiens
actataataaattattcactgaagactggaatttgacatatttatctgctaaatctgtgttaacgataagacagaaaaagaaacagatatgcaaaatgaattctgtatccaaatgaatgtaatgcaaagacacagttttaaatcagattagaaactataatattttaacagttacctcagttattatgcaatcataaaactgtaaagacatataggtctatttcagcatgattcattatttgaatgactacttacttaaaaagaaaaaactttctgttgaagttattaatcataatttccacacaaatcactgaagctctcctttaaaatttgaaaagagcatagagaacaaaataggaggagtgatctaatgaaaataataatgacatttagttttcagtttatctstaagatgataattgattttttgtgcttactcatttaaaataataattgcttatttcctgataatcatctgagcagactatgctccttctgaatccctcaatgtaaaaacatttttctctcaatatgtttttatgaaaaacaacattagaacatta

SEQ ID NO: 662393 - DNA, 564 bp, Homo sapiens
atatgttagatatttgtataatatttttaaaactgtcagaaaattccataataaactctttttctcactctgtcccatgtatttgcatgtttaagtttcttatagatgctgggtattagaactctgktgaatgcatagtttgcaaaaattttctcccattctatacattatctatttactctgttgacagtttcttttgctgtgcagaactctttagtttaattaaatctcatttgtccatttttgcttttgttgcaattgcttttacaattttcatcatgaaatttttgtctatgtctatgtcccgaatgatattaatgtaggtttccttcaaggggttttatagttttgggatttatatttaagtttttaatttatcttgagttgatttctgtatatggtgtaaggtaggggcccacttttaatcttctgcatatggctagccagttatcccagcactacagagcttgaagactgtctttctgaaataagtggcagacaagaatacagaaaaatgaataaaaaggaattaacaaaacctctgagaaacatgggattgggtaa

SEQ ID NO: 662394 - DNA, 600 bp, Homo sapiens
ttgatttctgtatatggtgtaaggtaggggcccacttttaatcttctgcatatggctagccagttatcccagcactacagagcttgaagactgtctttctgaaataagtggcagacaagaatacagaaaaatgaataaaaaggaattaacaaaacctctgagaaacatgggattgggtaaaggacaaaatttacaactggtccatgtacctgaaagagatggggagaagggaatcaacttggaaaacatatttcagaatatgatttatgagaacttacccaacctagctagagaggccaacattcaaattcagaaaatgcagagaaccctagtaagattctccatgagatcatccccaagacacatcatcatgagattctccaaggtcaaamcaaaaaaaaaaaaaaagaaaatagtacaagcagctggagatataggccaggtcaactacaaaaggaagcccatcagactaacagtggatctctcagctgaaactctacaagccagaagagattgggggccaacattcaacatctttaaagaaatgaaattccaacctataatttcatatctggccaaactaagctttataagtgaagg

SEQ ID NO: 662395 - DNA, 617 bp, Homo sapiens
tcctcttaattattcttttaagaggtaatttaattttagataaattctcttaaaaaatgtaaacaggaaaaattgtttttcgtaaataaaatagccacagtattttcaaacctatttttatttatctgtagcctcagagccagcagaataaggttttttgatactctaaaacagagggaaaataagttaaaggaaaatattatgcyatatgttggcaagttttacctgctttcatgaaataaattgaacataccattacatcatagtcaagttattacatacttttgtttatctattactgtattacaaaagggaaaagtactacattcactgtatgttaacaatgataatacagaaggcgtaatatgagagaacagttccaacacatttggaagtggagtgcactgccaagaatgtttagcttttactgacttgtaagactggttaattttactgaaagttactctctaaaacatttccagcttgactgaaaatgaatcaatatttactgatgaaagattacacaactttgaaagaggcagacaaactctaaaattggtcttttactacctgaaagaaactcccatcagtgaatagtctgtggaataaagaacaaa

SEQ ID NO: 662396 - DNA, 617 bp, Homo sapiens
tcctcttaattattcttttaagaggtaatttaattttagataaattctcttaaaaaatgtaaacaggaaaaattgtttttcgtaaataaaatagccacagtattttcaaacctatttttatttatctgtagcctcagagccagcagaataaggttttttgatactctaaaacagagggaaaataagttaaaggaaaatattatgctatatgttggcaagttttacctgctttcatgaaataaattgaacataccattacatcatagtcaagttattrcatacttttgtttatctattactgtattacaaaagggaaaagtactacattcactgtatgttaacaatgataatacagaaggcgtaatatgagagaacagttccaacacatttggaagtggagtgcactgccaagaatgtttagcttttactgacttgtaagactggttaattttactgaaagttactctctaaaacatttccagcttgactgaaaatgaatcaatatttactgatgaaagattacacaactttgaaagaggcagacaaactctaaaattggtcttttactacctgaaagaaactcccatcagtgaatagtctgtggaataaagaacaaa

SEQ ID NO: 662397 - DNA, 615 bp, Homo sapiens
tgcaggatttagcaggctcatccttggacctgtgggtgaagtaagatttattttttctatgaaggaaatatgtcaaccgaaaaataaattagtgtactcccaaaagtagaagtgaaaagaaagtttcatatgatgagaaagaaaattattacaaaaccctatttttcagctctctttactgatataataaaaaatatactcaaaaatgtagatataagctttatctataaagaggaactgttaaaaaaaaagtccagtattsagctaaaatctattcaacacatcctattcacacattcaatttctaatgaggttcttgtcactgagattatatttcatttagaaagacaatcaattcaataattaagtgaatatgataaccacataatgttaaagatctgtgtaagaaataaatagagaaatatgataggaaataaaaggtagaaagccagactactttttatagaatgaccaagaaaacattccctgggaagatgacatttaagcttaaacattaaacatgaaagttgaaaaagagacgtaaaacagtgagtagagaaagttgtttcagaaagagaatacagaaagggcaaagggcctgaggtgcctgtgcgt

SEQ ID NO: 662398 - DNA, 615 bp, Homo sapiens
tgcaggatttagcaggctcatccttggacctgtgggtgaagtaagatttattttttctatgaaggaaatatgtcaaccgaaaaataaattagtgtactcccaaaagtagaagtgaaaagaaagtttcatatgatgagaaagaaaattattacaaaaccctatttttcagctctctttactgatataataaaaaatatactcaaaaatgtagatataagctttatctataaagaggaactgttaaaaaaaaagtccagtattcagctaaaatctattcaacacatcctattcacacattcaatttctaatgaggttcttgtcacygagattatatttcatttagaaagacaatcaattcaataattaagtgaatatgataaccacataatgttaaagatctgtgtaagaaataaatagagaaatatgataggaaataaaaggtagaaagccagactactttttatagaatgaccaagaaaacattccctgggaagatgacatttaagcttaaacattaaacatgaaagttgaaaaagagacgtaaaacagtgagtagagaaagttgtttcagaaagagaatacagaaagggcaaagggcctgaggtgcctgtgcgt

SEQ ID NO: 662399 - DNA, 615 bp, Homo sapiens
tgcaggatttagcaggctcatccttggacctgtgggtgaagtaagatttattttttctatgaaggaaatatgtcaaccgaaaaataaattagtgtactcccaaaagtagaagtgaaaagaaagtttcatatgatgagaaagaaaattattacaaaaccctatttttcagctctctttactgatataataaaaaatatactcaaaaatgtagatataagctttatctataaagaggaactgttaaaaaaaaagtccagtattcagctaaaatctattcaacacatcctattcacacattcaatttctaatgaggttcttgtcactgagattatatttcatttagaaagacaatcaattcaataattaagtgaatatgayaaccacataatgttaaagatctgtgtaagaaataaatagagaaatatgataggaaataaaaggtagaaagccagactactttttatagaatgaccaagaaaacattccctgggaagatgacatttaagcttaaacattaaacatgaaagttgaaaaagagacgtaaaacagtgagtagagaaagttgtttcagaaagagaatacagaaagggcaaagggcctgaggtgcctgtgcgt

SEQ ID NO: 662400 - DNA, 594 bp, Homo sapiens
aattttcacatgctaaacattccttgtcactagcactcataaaagaaaaataacaaatacctcagaaataattttgttgttctctttcaattactattccaatagttaatcaccatactgatacataaaaaataaatgtgttgcgttttcatattttgtgtataaattaattcattcaacatacacacttttgtgtctagtttcattaattcaacagaatgtttgagagattcatctatattgatatagttgtcaatcttatcactgtactctgtggcagattttgttttcaaagatgrccacacagtgtctcccaacccacatgatcttcaaattgagcttgctgcttcctagagatggaatccaattcctatccacttggattatcctgacattaatgactttcttgtaatcagtgcaatgtggcttaatgaatagggtgtgacttatgacttctaatgctagatcagaagaagcactgcagcttagttcttattttttgaaacaccagctcctcatatactccttcttgggatcctcccttcttagaatgcagctgaaattctcagagaagcccaagtcacatgcaaatgt

SEQ ID NO: 662401 - DNA, 594 bp, Homo sapiens
aaggaagtaaatccatgtgcagaaaagagggtatctaaaaaaggatgactaagattgataaactacaagtaaaactyatggttgagaataaagaagtcatcagtagtttttcttgaggcaattagtgacctctcctaaacacttataatccttaaacatttatctccagatcagatatttgtcttggattctagactaatttatcctgtaatataacatacatctctactggagtggttatttcacagcaaagctttaaaaaacatgtctaattttcacacccctccaaacttgagctttgcctccttattctttgcctctgaaaaccactccccatgaatccaggtgaaaaccaaaagccatcttaaattcctcctgtcctcgtgtattgcaaattcaaacactcatcaaatgctattattcgacctttaaataattttccagatcatcatcattgagctgatctcaggttcttatttaatctcagtaagtgaaatgtagaaaaccttttatcggtaccctgtctttgacttttactctcttaagtcattttgccacactgctatcagtattatcctttcgaaaaatatgaat

SEQ ID NO: 662402 - DNA, 594 bp, Homo sapiens
aaggaagtaaatccatgtgcagaaaagagggtatctaaaaaaggatgactaagattgataaactacaagtaaaactcatggttgagaataaagaagtcatcagtagtttttcttgaggcaattagtgacctctcctaaacacttataatccttaaacatttatctccagatcagatatttgtcttggattctagactaatttatcctgtaatataacatacatctctactggagtggttattycacagcaaagctttaaaaaacatgtctaattttcacacccctccaaacttgagctttgcctccttattctttgcctctgaaaaccactccccatgaatccaggtgaaaaccaaaagccatcttaaattcctcctgtcctcgtgtattgcaaattcaaacactcatcaaatgctattattcgacctttaaataattttccagatcatcatcattgagctgatctcaggttcttatttaatctcagtaagtgaaatgtagaaaaccttttatcggtaccctgtctttgacttttactctcttaagtcattttgccacactgctatcagtattatcctttcgaaaaatatgaat

SEQ ID NO: 662403 - DNA, 417 bp, Homo sapiens
aagaggccaacattcaaattcaggcaatgcagacaacccctgtaagatacttcacaagaagatcttccctaagacatactcatcagattctccaagattgaagtgaaagaaaatatatgaaaggcagctagagagaaaggtcaggttgcctacaaaggaaagcccatcagactaacagcagacctcatagcagaaactgtacaagccagaaaaggttaggggacattattcaacatttttaaagaaaagaaattttaaccaagaattttatatcttggccagatgtggtgccttacacctataatctcagtactttgggaggccaacatgggtggatcacttgaggccaggggttcaagacaagcttggmcaacatggtgagacctcatctctactgaaatacaaaaattagccggg

SEQ ID NO: 662404 - DNA, 562 bp, Homo sapiens
gctaacatggtgaaaccccgtctctactaaaaaatacaaaaaattagctgtgtgtggtggcgggcccctgtagtcccagctactccggaggctgaggcaggagaatggcatgaacctgggaggcggagcttgcagtgagagacatcacgccactgcactccagcctgggcgacagagcaagactccgtctcagaaaaaaaaaaaaaaagtgaatttaagcatggaacttacactctttacaaatattaactcaacttacactctttacaaatattaactcaaaaagggtcatggacctaaatgtaaaatgaaaactatacaattcctagaatttaacgtaagagaaagtttagatgacctttaatatgtgctatggtcygaatgttcatgtctctctaatattcatatgttgaaattctaacccgcaagatgatggtgttagacggtgaggcctttggaaagtgattagatcgtgaggtgaagccctcattgttgagggtactgcttttataagagacctcagagagctatctagccctttccaccatatgaggacacagag

SEQ ID NO: 662405 - DNA, 523 bp, Homo sapiens
gaggacattaagttaagtgaaatatatgagacacagaaatacaaatactacatgatctcatttataagcagaatctaaaaaatgttaaactcatagaagcggagagtataatggtttttaccagaggctagaaggaaataggaagatattggttaaagaatagaaagtttcatttatacaggatgagtacactttggaaatctaacgtatagcattgatatggtttgactctgtgtcttaactttgaagtgtgaaacacatttgatgcattgttttgctggcccaggaaatccattttcacagagtcttggtgcccttcctcaatattcctcaaaattttttctttacaactgttctagatcaatacacatgctcaatgtggccctaaagtgagtttttctctctgttccccattatgtattccactccatgagatcaaggactaygccttaatcatcattacattcttggaacataagaattaataaatgaaaaaaatggaaaatccttttttagttgctga

SEQ ID NO: 662406 - DNA, 613 bp, Homo sapiens
tcaccctgtccaccttctactctgagatccaaaaaatgatggagagtagactttcaaccaatctgggtacattagtgcttataccaaataaatgtaagaaaattaagaagtgtgtcattatttacacttcaaggcaaaagaaaaatcaattcttacctcttgtactgcttgtgcttcttaatttccctctggagggctccagccagacagttgtctagtacagacactgctcaatgtctcaaatcawctttttcattctatataacaatattcctcttcctttctcttgttcataacaggcagaattttttagcaaaattttataaaaacctcttagttaaaagtttatttacttttttgtcattttactagtttgaagatagggaaaaaaggtgtctttgttaataatagaagtgacatatttggagcaggttttaaaatataaaaagatgatgtacctagctcatagtttgcaaggtaggggaaattacttccaagcagtttgaagggaaattgacattttggagaaacatgatctagaaaagaaacagaaaagacatcacgtcctcctatcatgtcttccctcagtgtgattttattttgttattctcca

SEQ ID NO: 662407 - DNA, 605 bp, Homo sapiens
atgaacctcatagaagcagaaagtagaacggtggttaccataggctaagggatggtgggaatggaaagatgttgttcaaagctacaaagttagagttagaaaggaggaataaatgataactatttaaggtgataggaatgataagtagcttgatttcattcagcactatctacctatatggtaaaatcactgtgtatcccataattatatacaattataaggtgtcaaaaagctttctccggattcagaaaacctcttcacaaaggtagaagagaaagaaaacaattttatcayagaatatgcattaaaccagaatgtggtatgcattccatgcaatccactaagagactgcaaagacaatctttatgataggaggtaattctgcaccttggaacagagtactctgacaaattaggctcctaactttccatataaactggaagataagggcactatcttccttgatgcttacatttcaaagagatgattaccagttacttaagaaagatgttgtgatcataaagctggcaagtggattatttagcttttaaaagtttttacgtacgtttacaaaagacaaaaaattaccttacaattacgtattt

SEQ ID NO: 662408 - DNA, 605 bp, Homo sapiens
atgaacctcatagaagcagaaagtagaacggtggttaccataggctaagggatggtgggaatggaaagatgttgttcaaagctacaaagttagagttagaaaggaggaataaatgataactatttaaggtgataggaatgataagtagcttgatttcattcagcactatctacctatatggtaaaatcactgtgtatcccataattatatacaattataaggtgtcaaaaagctttctccggattcagaaaacctcttcacaaaggtagaagagaaagaaaacaattttatcacagaatatgcattaaaccagaatgtggtatgcattccatgcaatccactaagagactgcaaagacaatctttatgataggaggtaattctgcaccttggaacagagtactctgacaaattaggctcctaactttccatataaactggaagataagggcactatcttccttgatgcttacatttcaaagagatgattaccagttacttaagaaagatgttgtgatcataaagctggcaagtggattatttagcttttaaaagkttttacgtacgtttacaaaagacaaaaaattaccttacaattacgtattt

SEQ ID NO: 662409 - DNA, 625 bp, Homo sapiens
aagatatgaattcattaaaggtggcttaagaaatatgaagaagtagaattctaccttgaaaataagaggattttaccctaatgtagagaaaaaaagggtaaggtatggaatagagattcagtttcctttttggttcatcaaatctmtacagccataaaacaattctgtaatatataaagctcgcatggtctcttttgtacattggaagaatctccagctagttactgtaaatcttccatattatttgaaaatactaattttctgctgatgtctaaaaaatgttttacattgttacatcctcactgaattttttttcctctgggctttggattaggcttttcattcgactttctgtgtagtaagtgatatgtgccagtgccatcattgactgcaatgcatcccaaatccaagtgtaattagtatgtcttgcttagacagagataaagtaaaagggtatttctcatcccaagttgacttcaactaaattttaaaatatttttatgtttgcatatgttcaataaatttaacaactttaaaaatatttgttttgaaggcatatttgacaaaacttgaaattaagagacaggcatttgaaagagtcaaatataatttaaaccatgtattt

SEQ ID NO: 662410 - DNA, 625 bp, Homo sapiens
aagatatgaattcattaaaggtggcttaagaaatatgaagaagtagaattctaccttgaaaataagaggattttaccctaatgtagagaaaaaaagggtaaggtatggaatagagattcagtttcctttttggttcatcaaatctatacagccataaaacaattctgtaatatataaagctcgcatggtctcttttgtacattggaagaatctccagctagttactgtaaatcttccatattatttgaaaatactaattttctgctgatgtctaaaaaatgttttacattgttacatcctcactgaattttttttcctctgggctttggattaggcttttcattygactttctgtgtagtaagtgatatgtgccagtgccatcattgactgcaatgcatcccaaatccaagtgtaattagtatgtcttgcttagacagagataaagtaaaagggtatttctcatcccaagttgacttcaactaaattttaaaatatttttatgtttgcatatgttcaataaatttaacaactttaaaaatatttgttttgaaggcatatttgacaaaacttgaaattaagagacaggcatttgaaagagtcaaatataatttaaaccatgtattt

SEQ ID NO: 662411 - DNA, 544 bp, Homo sapiens
tatctatgctttgactcttagtagtttttcatgttataaaattgatttgcattgggaaaacacatttttaaaaaggagtaaagagcagaaacaagatcaataaactcaaccagaatatatctytgtgtataccatctggcatgaatctttcttaaaacatggtatttattaccactacgcatatttgtggttttatttaggtaaagttgtcttttttatatctttaatagatgtatgttttctttaactgttagtgttttcaataaggcactctgtgcatattctggatttcctttgtttgacactcatatgcagaacatatttgtttccttgtatgactttcaccagattgttctccatggcattggattcatgttcagtggtatcttttccagttcatgatgtttttaatgcatatctcatttttgtaatggttcaattgttttctttccttagctttattatcattcatcttcttttgttttctcagatgcaatagaggaaaataactaagagcacagattttggagccatacagcttggg

SEQ ID NO: 662412 - DNA, 456 bp, Homo sapiens
gaaacatggatgaagctggaggctgttaccctgagccaaactaatacaggaaaaataaaccaaataccacatgttctcacttayaagcaggagctaaatgataagaacacatggacacatagatgggaacaacagacactggggcctaccagagaatgcaggttcagagaaaggggaagatcaggaaaaattactgatgtttataaggcttaatacctcagtgatggaataatctgtaccacaaatccccgtgacacaagtttacctatagaaacaaatttgcacatgaacctcaaactaaaaataaaattaaaaaaaagaattgaactgttctgtttcttcattttacttcacattttttttacttcctaacatttgtgattatatcttgtggtggtttaatttatgactagacatgttgaacaacattttaagaactaagttgccatctgcatc

SEQ ID NO: 662413 - DNA, 570 bp, Homo sapiens
ttgtttttaaaaatctgtttatactaaagtatacatatatttataagcctgtcttcagataaatacatcatacattctacaagtactgaattgtctttttagtttccccagtggttactgaggctaaataatcttttacacccttggcaatatcaacattttctgcattaacatctccttttgccctttaatggtgtcacttacttttggcctagctattgccttctcatatatacttaaagaaggatatgctgttttatgactgacccaattttacgycttttcctttatttgtcattttttaaattgttaagatttttgttgttttcattgccttttttgttatccattatatttaaactagagataaatatttatctataatactattttaaagattttttttctataaagcaaaaagccatgtttttctacaaagtaaatactattttaaggggcaaggtagaggaaaaaaattactcaaaaaagttctaattagtttagagacatcttcctacttattaacttccattacactctgagaacccatgatctcatataattcccatt

SEQ ID NO: 662414 - DNA, 570 bp, Homo sapiens
ttgtttttaaaaatctgtttatactaaagtatacatatatttataagcctgtcttcagataaatacatcatacattctacaagtactgaattgtctttttagtttccccagtggttactgaggctaaataatcttttacacccttggcaatatcaacattttctgcattaacatctccttttgccctttaatggtgtcacttacttttggcctagctattgccttctcatatatacttaaagaaggatatgctgttttatgactgacccaattttacgccttttcctttatttgtcattttttaaattgttaagatttttgttgttttcattgccttttttgttatccattatatttaaactagagataartatttatctataatactattttaaagattttttttctataaagcaaaaagccatgtttttctacaaagtaaatactattttaaggggcaaggtagaggaaaaaaattactcaaaaaagttctaattagtttagagacatcttcctacttattaacttccattacactctgagaacccatgatctcatataattcccatt

SEQ ID NO: 662415 - DNA, 579 bp, Homo sapiens
tccagtaacttttaggctatctgtgtacatacagtaagaggagtttttgaattgagaactcactgtgcattattgatccctgagtccgcatttggtcttcagaaaatatctttcagttagttagatattgtgtactgggaagactgaagttcagaaatcttatgtcaccaggtaataagtgggggatcttcaatttgaacttggctaactcaattctttctacggtaccaaatttatcttcttaaaaacaaaacaaatatatttttattccttctttcagaaataaaaccacagggtgctattttgtgtcagaattgaaacattttatcaaatgtctcttttaaggtttcagttatcatatggtcacctactaaattctgggcacaccatgaaagtcctcctgaaaataagttcactttcatatttagtctcaagtgctgtctgacaacagtacaaaccatggacagtgtaacagcaaaatttgatccacattttaacaccaaaatcacacagcaatttacaaacctakgaaacatcggaatttttaaaatattttgttttatcttaacaagaatattg

SEQ ID NO: 662416 - DNA, 571 bp, Homo sapiens
gtcataaatttcttttcccatgtaacaatgtaaacatttcatttttaattaacttggaaacaactttttagygcattattgtgcaacctagttctcttaactctttattactttatatcttcacatatatacacatgcgcctaatattgtaaagtatttgatatgactcatgcataaacatttcttctctagaaaagaaaaacaattctacaaccaaaggaaagagaaaacagtatatttgttgatggaaagaggggtcccaatccaaacttcaatagagggttcttggatctcatgtaggaaggaattcagagtgagttacagagtccaatgagaagagagagtttatcaaaagctactagatacagaatagggtgttctcagaaagcaagaggaagaaaacgctatctttgttttaaactcttctcaaatagtagtcttatctatgtaaaagctaagccatgtctacatgtttgtgggctgtctgacaaaatttagtactttgttgatatgaaagaaagttatccgtagcattttcatatataagtacatcaaagcataattataatta

SEQ ID NO: 662417 - DNA, 612 bp, Homo sapiens
aaatatacttacatattctaaatatttccaagccctgatcagtagggtaacgggcttatagaattatttaacaaaatctccccttgycaaattttcatctgtcttatattcttgagggaggtgctataacttaggagtggtgtaacattttctctaaaaagttctgtatgcagattggtctcactatcattttggtatctaattgtgtctcactgacatttcaatagacactgaggaagaataagtcccttttaatgtcctgtgatagagatttaaaatacaggaaactggcatatttttgcatataatgggaatgtttggaagtgctatattttaatggattgtataacgcaaattgaaaaaaaagacttcttcggatcttatattttacttttataaagaaagaatatcatattcagattaaacagacaggcatcatcacattacagttactccacagagaggaaattaaagcctccgcatttcaagtaaaaggcgcactacagcttttcaaacacctaatttctctcagtggtgtgggagatataatgacaggtagcacttccgtgacttaagtgactcatatatcatctgcttttaaacagcataaac

SEQ ID NO: 662418 - DNA, 576 bp, Homo sapiens
atacaccatttagtattactattgttcctgtttgtgttatttagaaaaaaatattgctctccttttgaattgaggtttttgtttgtttgtctatatgttagtttaattttaacattaccttyctagtgacatatttatactctttactattattataattgttatattagatattacactatgcacacaactcattaaaatctaatataaatttttatttttatattttcctaaacaactctagggcattagaatcttttaacttactttaatcctttccctaaattatgtgccatttttgctatatattcgaattctccatatattttaatacccaagccaatactgatatttttctaagtcatttgtatgtataacttatctgtacatttatcaaatgtttttttttaagtacactggatattggtccccagtcttttctggcttgtagggtttctgctgagacatttactgttaggatgatgagcttccctttgtacatgacctgacctttttcttaaactaataaacaacttcagtgaagtctcaggatgcaaaactgatgtacaaaagtca

SEQ ID NO: 662419 - DNA, 576 bp, Homo sapiens
atacaccatttagtattactattgttcctgtttgtgttatttagaaaaaaatattgctctccttttgaattgaggtttttgtttgtttgtctatatgttagtttaattttaacattacctttctagtgacatatttatactctttactattattataattgttatattagatattacactatgcacacaactcattaaaatctaatataaatttttatttttatattttcctaaacaactctagggcattagaatcttttaacttactttaatcctttccctaaattatgtgccatttttgctatatattcgaattctccatatattttaatacccaagcyaatactgatatttttctaagtcatttgtatgtataacttatctgtacatttatcaaatgtttttttttaagtacactggatattggtccccagtcttttctggcttgtagggtttctgctgagacatttactgttaggatgatgagcttccctttgtacatgacctgacctttttcttaaactaataaacaacttcagtgaagtctcaggatgcaaaactgatgtacaaaagtca

SEQ ID NO: 662420 - DNA, 594 bp, Homo sapiens
atataacaaacctgcacatgtctgttacaaaatcttagtgatggaataagggttaaccttttttgaaacaagttattaaatagtaacaacaaatcatctaaccatctttttacttatttgtaagtaatttcactgaaggcaacttatttttaataacctcactaacagcctctgtctacaaatcccctgaaactttacagttgtcaattatcaacagtcatcttacatatgttcctataaactctatatatttctaaaactttcaytcttcaattgttatttttaccaatagcctaatgataaaatattctgtcacatatcttgaaagctgcaagagctttaaaactgccatatcagtaatgttacaagatgggggtaatagtattttccctgacaatctgccaattatggttttggagaagaatgaacaacatatagcatggaagtattcattaagtttctttgaagtcatggaaatagtttgataaataattcaggacaaaatacaaattagaaaacaaacaaaaaaagagcaagctcttaaagtcatctatcacatcattgtgaaaatttacagagctggcacaagaggca

SEQ ID NO: 662421 - DNA, 501 bp, Homo sapiens
ctctagaatagaagttccacaggggcagaaatgttggactatttggtttgttctggatgtatcccaagtacatagaatggtggcatgtacttggatggtggaggaggtgttcatccatttgtgcctccattccacagacattactgcacgtctgcaatgtgtcaggcactgtctaggcaaacacagccttcatcctcattccttgcccctttgttttcgttcccttacttggcctctgctgccagaccctctggccctgtgctggcatccagagtgccagccttccaggctacagccagagctgggcctgtaatctgctgtattccatggctgggatctcagagagtgaccgagccccttctgggtgttatgatcacaggcgggcctctcccrgctgcctcccactgctgtttgaggccgagctctatgaagccggagtttctgagtttgctcatttttaaacaatgataagatttccgtattcagcacttcttcacaggc

SEQ ID NO: 662422 - DNA, 501 bp, Homo sapiens
ctctagaatagaagttccacaggggcagaaatgttggactatttggtttgttctggatgtatcccaagtacatagaatggtggcatgtacttggatggtggaggaggtgttcatccatttgtgcctccattccacagacattactgcacgtctgcaatgtgtcaggcactgtctaggcaaacacagccttcatcctcattccttgcccctttgttttcgttcccttacttggcctctgctgccagaccctctggccctgtgctggcatccagagtgccagccttccaggctacagccagagctgggcctgtaatctgctgtattccatggctgggatctcagagagtgaccgagccccttctgggtgttatgatcacaggcgggcctctcccagctgcctcccactgctgtttgaggcygagctctatgaagccggagtttctgagtttgctcatttttaaacaatgataagatttccgtattcagcacttcttcacaggc

SEQ ID NO: 662423 - DNA, 408 bp, Homo sapiens
cagcactgaggtttggaggcaccaagccccagagatgagaggccgcctgtcttagtccattttgtgttgctatacataaactgagctggggtacgtataaagaaaagaggattacatggttcatggttctgcatctggtgaaagcctcaggctgcttctactcatggtggaaggggacctgtgtgtgcagagatcacatggcaagagagggagcaagagaggtgcggggaggtgccaggctcttcttaacaaccagctctcaagggaactaacggactgagaactacttcccccacctcccccaacagggagggcatcaatctattcatgagggatccaccccacaacccaaacaacaccccaccttaggacccacctccaacakgggggatcaaatttcaacatgag

SEQ ID NO: 662424 - DNA, 617 bp, Homo sapiens
ctgcttggtccttgttggaaagatacagttggaaacccaactttcatacttactggccatggtggacatttattattctgtttcccagcatccaaacccctttattttatggtgaatctcccatctgaaaaggtggagcctgcctcccactctagcagttgaaaatgccagattctggcagggtgtggtggctcatgcctgtaatcccagcactttgggagggcaaggcaagcagatcacgaggtcaagagattgagaccatcctggccaacatggtgaaaccccgtctctactaaaaatacaaaaaattarctgggtgtggtggtgtgcacctgtagtaccagctacctgggaggctgaagcaggagaattacttgaacccgggaggcagaggttgcattgagctgagatcacaccactgcactccatcctggcaacagagcaagactccatctaaaaaaaaaaaaaaaggaagaaaatgccagattcttccagtccctgcctccctcacttctaaggcacgggaacatgacccaggccccatgtattccttgaattcagcctgtgtgttgactgtctctgcttgaaaacctggggtgttttctgctttcctggct

SEQ ID NO: 662425 - DNA, 617 bp, Homo sapiens
ctgcttggtccttgttggaaagatacagttggaaacccaactttcatacttactggccatggtggacatttattattctgtttcccagcatccaaacccctttattttatggtgaatctcccatctgaaaaggtggagcctgcctcccactctagcagttgaaaatgccagattctggcagggtgtggtggctcatgcctgtaatcccagcactttgggagggcaaggcaagcagatcacgaggtcaagagattgagaccatcctggccaacatggtgaaaccccgtctctactaaaaatacaaaaaattaactgggtgtggtggtgtgcacctgtagtaccagctacctgggaggctgaagcaggagaattacttgaacccgggaggcagagkttgcattgagctgagatcacaccactgcactccatcctggcaacagagcaagactccatctaaaaaaaaaaaaaaaggaagaaaatgccagattcttccagtccctgcctccctcacttctaaggcacgggaacatgacccaggccccatgtattccttgaattcagcctgtgtgttgactgtctctgcttgaaaacctggggtgttttctgctttcctggct

SEQ ID NO: 662426 - DNA, 632 bp, Homo sapiens
acgtaacagcttagaggcaggatgataaaccacaagtaaaatggggctgaggttgggcaatgaggcaaatagcaactctggaaaaaacaaacagcagagagggaggtcgggccatttgttcctcccctccctctcttcctggcttgggcacagtccttacggtgactgcgtcccaccacagcttcggctcctgccaggtggctcctctcccaagacatagctctcacctgggttctacgagcaccactccctctccctgcccctctggcctcaggatggtgatggcttcctgctgctgtgggtccccgggggcctcagcaccccttgttgcttcccttattgcactcataccttcattaataggccctttaccttgaygctttccattgaggtccctgactaataacccctctgtatctgcaccactcctagactctggttaatacagaattctggtcaagaaaatcctgagtgtcaccttgcactgggggtcagcaaaccacttatttttataaataggttttactggaacacagccatacctattcttttgcaaattgtctacagctgctttgagctactccgctggcagaggtgtgcagctgtgacagagatggtatggcacgcaaagc

SEQ ID NO: 662427 - DNA, 591 bp, Homo sapiens
caattttgttctttatcaacattgtttgggccaatttaggtcctttgcttttctatataaatattagaatcagcttgtcagtttctccaagaagcctgctgagattttgattgagattgcattgaacctggagatcaatttggggagaactagcatcttgacagtgttgagttttcagatccattaacatggtatatatcacttacgtctttttttttttttttttttttttttttttgagacagagcctcactcttgttgcccaggctggagtgcaatggcacaatctcagcttactgcaaccttcgcctcctgggttcaaatgattctcctgcctcagcctcccaagtagctaggattacaggcatgagccaccatgcccggttaattttgtatttttagtagagagggggtttctccatgttggtcaggctgatwttgaactcctgacctcaggtgatcctcccacctcggcctcccaaagtgctgggattataggcgtgagccacctcacccagcccacttaagtctttttaaaatttctctcatcagtgttttgtggttttcagtttacaaatattgcacattatt

SEQ ID NO: 662428 - DNA, 591 bp, Homo sapiens
caattttgttctttatcaacattgtttgggccaatttaggtcctttgcttttctatataaatattagaatcagcttgtcagtttctccaagaagcctgctgagattttgattgagattgcattgaacctggagatcaatttggggagaactagcatcttgacagtgttgagttttcagatccattaacatggtatatatcacttacgtctttttttttttttttttttttttttttttgagacagagcctcactcttgttgcccaggctggagtgcaatggcacaatctcagcttactgcaaccttcgcctcctgggttcaaatgattctcctgcctcagcctcccaagtagctaggattacaggcatgagccaccatgcccggttaattttgtatttttagtagagagggggtttctccatgttggtcaggctgattttgaactcctgacctcaggtgatcctcccacctcggcctcccaaagtgctgggattataggcgtgagccacctcrcccagcccacttaagtctttttaaaatttctctcatcagtgttttgtggttttcagtttacaaatattgcacattatt

SEQ ID NO: 662429 - DNA, 497 bp, Homo sapiens
tttgcgtgttccccagtctttgaaggaaagtgtccagtgtctcaccactaaatgtgatgttagctataggtttttttagatgcyctttattagagtgaggaaatttcactttagtaaactctagtttttatcatgaatagatgtccaaccttttagtacatttcttttatgcttaaagcagccagagatggtgtctgtttcaagtagaaaccctgactgatataccagccttgcaatgttgggtaagttccttaacctcacctgatctgaacagaagcctaatgatgaaaattttaagtcctcttaattttaccgcccaaacatagtcaccataacaatcttcaaacgtatccattgtgttgtataaatagcttgacttcaatttattatttttctcccactccaccctcagtcactttactgattatatgtaattatgtaaataatatatacccattgtaaagaaactgaacagttcattaagatataaagagagc

SEQ ID NO: 662430 - DNA, 549 bp, Homo sapiens
ggatgaaaacaaaataatctccaaacaaagaaagcatactggaaagaggtgtaggagccaagagacagggattccagaattggtcctgattttgggtaagtcatttccctctccagctctctactgcaaaataggagatgtgacccattcgtcaataacatcccttctagctctaacttcaatcccaaattactatgttgctagtgagttattttttgtttgtttggttttggtttctggcttttgggttttgttttggtttttgttttgagacagggtctcactctgttgccccagctggatgcagtggtgygatcacagctcactgcagcctctacctctcaggctcaagtgatcctcccacctcggcctcctgagtagctgggattacaggcaggaaccaccatgcctggcctggtgagttgttatgcaacatgtccataaacatcagaactggagagggagaagttttcacaggtttgggtctagcttgtttccaacattaggagaaagattatgtctgtacttctttgtaaacacctcgtttgt

SEQ ID NO: 662431 - DNA, 626 bp, Homo sapiens
agagtggggtttattggagaaataaatctctttggctaaatatgaaccatgctgaggaaacaaaggaactgctttttaatgactgaggtttaaatgaagcccagcagcctaaggcagaatcccatttaagaaaagatggaaaatcagggtcccagagaccacttaaacttacataaatatttacaactatccactctataccaggaatggtggtagttgctggmattttaaagataaataagatacccgccctgctttccaggggctgacattggatgggggcgattgctgtgtgggggtaaagggacgaagacagagcatggtgggaagtgctgtaatcacggcataacatcacgctgcagaagcaaacgctcatcaggagggaggcaggaaggcttccggaggaggtgctgtttgatcttgtcctaaaagataggtaggcatttgcaaagtgggaacaggaaagacagtcctccaggcaaaaggaagagcatgtgtagaggaattggaaaagggtagagcccaggatgttggggaacaatgacaagttcaatgtgagccgggttccaacaaaggaggctggatagatagacgagaacccaactgagtaggtcacaggtgccatc

SEQ ID NO: 662432 - DNA, 598 bp, Homo sapiens
tgggggtctttggaaaacatcaagagggaggcagaacctaatattccagtccaggcttggcagggtgagcttaggcaaaccctgtccctctctgggcctccctatgcagacacttgggccacctcctcatagtcagtgctgctgtgcctgtcctccttgctgatgtggctggaggttcaccttcccagccccmggggttggagaaggactagtccaagtcagccatggtaactccgcccctctgtcagcgattggctgagacctgagtacaggactcaagcctggccaatgaagggaagacaccactgggatgctgagaaaggctttcttcccttgataccacagccccacaggagaacctgccttccaggaagacacttggatgcccagaactgctgcagccaccttatgactatgaggagctggggctgggtgtggtggagctcctgagttaaccagccctgcagctagccggactacttttcaaggagatcaattccttgctgtttaagtcactctgggttcattattctctttcttgcagccaaatgcattctaaattatatttagctttctcatttgttcagtgagaataata

SEQ ID NO: 662433 - DNA, 546 bp, Homo sapiens
ggtagtatcggcttcaggaagtaacaaagcacaggcagggtcctctgcgaagtgatgcagatgaaaccccaggaatgaatgacacgctcagtacctgccaggcaccgctctgagaacttcatccgcattatgttacttaatcatcacggccccctgccaggaggatcattatgcctgctttacagaaaagacttacaggttaaagtgcctaaggtcctgcagtctccaaacctggccaatccacccgcagagcccatgctctgaaccaccgcaccacatggccaggtgagggccgtcycggtccccaaatgagccgcctacgcatacactgccaagcctttgcccacgctgttggctctcccctgctgtgcttggaacgcctacttgaccttcaaattccagcctgagtcctccacctcctctgtgctcctgactccttgtgcatctccacacacattagagctgtgtgtgtgtgtgtgtgtccctcagggcacacacgcaagggcaggttctgcgcttcattcatttgcatccacactgcacagt

SEQ ID NO: 662434 - DNA, 573 bp, Homo sapiens
gccagcctcagcctcccaaagtgctgggataacaggcatgaaccactttgcccagcctaaacatgaattttctatgggatcaaacaatcccactcctggatatttaccctagaaaaatgaacacttatattcacacaaaaactcgcacacaaatgttgatagcagctttatttgtgatcaaataatagctcaaaaaaaaaagcaaatattcttcacctggtgaatggttaaacaatagaaagggatacaactcagtagtaaaaaggaatgagctattaatacctaacagtttggatgaatctcaaaggctttaagccgaggaagagaagctgatctcaaaaacttacataacatatgatttcatttatgtaacatcctcaaaaagacaaaactgtagtagtgagagcagctcagtggctgccaggacttacgggtggagggagagtgtgtctgtaaggggaaccttctggggtgayggaactgttctgtatcctaattgtggtggtagttccacaaatttatacgtgtgttaaaatttatagaactgtacaccaaaggaagaaaaaaagccaa

SEQ ID NO: 662435 - DNA, 583 bp, Homo sapiens
gcctggtccccagattcctcaggtgactttggtggaagataaagcccagactcctcagccaggcctggggtgaggagtgagagggagatggggactagggtaggggggaataacgactccccagcctcaggatccagggccgggagaagcatacttcctgcatttagctgagacatggaaggaagccatctcttgacttggccccrttcattccatttgtttgggatggttttttattccccttttccttagttcaagttcatttaacaagctgaatttctacaattggctgagatctgatttcctgctttaaaaaaataatacattgaaacaacaaaagtcactctaaccacccatgagcctaatagcaatgaggcacctctgcttcagcagttgcctagattcaggtcagcagggggtgggggatggaagtggagagtttctctgagtcctgaggtccaaggtaggtaacccaggaaacctatgggctatttgggacaagtcagacctcagagggtcatagtgaattgttggagcgatggtttgagctgacatggtgctcctgggactctcccagtcccaa

SEQ ID NO: 662436 - DNA, 583 bp, Homo sapiens
gcctggtccccagattcctcaggtgactttggtggaagataaagcccagactcctcagccaggcctggggtgaggagtgagagggagatggggactagggtaggggggaataacgactccccagcctcaggatccagggccgggagaagcatacttcctgcatttagctgagacatggaaggaagccatctcttgacttggccccattcattccatttgtttgggatggttttttattccccttttccttagttcaagttcatttaacaagctgaatttctacaattggctgagatctgatttcctgctttaaaaaaataatacattgaaacaacaaaagtcactctaaccacccatgagcctaatagcaatgaggcacctctgcttcagcagttgcctagattcaggtcagcagggggtgggggatggaagtggagagtttctctgagtcctgaggtccaaggtaggtaacccaggaaacctatgggctatttgggacaagtcagacctcagaggktcatagtgaattgttggagcgatggtttgagctgacatggtgctcctgggactctcccagtcccaa

SEQ ID NO: 662437 - DNA, 642 bp, Homo sapiens
ttaacagttctactttgtttttcaggtcccaggtagactctcatgttaagttctgatgtcccgtgtttaaaggaatattaacaatttagaacacatttaaaggagagtgaaaataatgatagcgagggtatctcaaaactttagggaatcatttggcttgaagaggaagacctgggaaggccagggaattatcrtcaaatatacaaaggctgccatagaggagagttccacttattccatgcagccaaagaggacagaactaagggtgttgggtataagatacacgaaggcagacctgcgttccccaatctaaaggtgaactaacaataaggtttaaccagcagtggaagggagcagttttcttaagaggaagtaagttcctcattgctggaagcatccaagtagaagttaggtctggaatagtgtagaagagatgactcggactagatgagagttgagtcagtcccaaccagaggagtctttggttctaacatatatttgctactgaccctaagcaagtcatttgacccatctgagtctcaatttcctcatctatacacgtcggagtccctgccttgtatcgttcaataagaatattgcaagagtccaataacaaaatggcaaaagcccgtttaagtgtaa

SEQ ID NO: 662438 - DNA, 506 bp, Homo sapiens
ggaaaatggtgcagccagtgtgaaaaatggtatgccagttcctgaaaaagttaaatatagaattaccatatgatccagcgattttgcttctgggaatatatccaaagaattgaaatcaggaactccaacagatatgatacacccatgttcacagcagcatcatacacaataaacaaaagatggaagcagcctaagtgtccattaatgaataaatggataaacaaaatgtagtatatacgtagagtgaatattattcagccttaaaaaggaaggaaattggggggasgttccaagatggccaaattcgaacagctccagtctacaactcccagcatgagcaacgcagaagatgggtgatttctgcatttccaattgaggtaccgggttcatctcactggggcttgtcggacagtgggtgcagcccacagagtgtgagctgaagtacggcgggacatcacctcatccaggaaacacaaggggttggggaattccctttccgaaccaag

SEQ ID NO: 662439 - DNA, 589 bp, Homo sapiens
aggtgaaattccagtagagtccagatttgcccttggaaattctttaaatctccagagagtactgttgatgtggttttatgcatgtagctctatgtagtaatgtatgctagatgcagagtgtatggggtactctccttacaactttttgtctggcactgtcctttaatcttgcctatagggagcatcttctcctatacttggatgaacakttggggcagcctttggttttgtttttttaattcagaaaaaatttacatgacataaaattaaacattgacgattgcaagggtacaatgcagggacagttaggacattcccagtgatatacaaccaccagctctgtctagttccaagacatttacatcatcctggaaggaaaccatgtacccactagtggtccccttaccccgtcccccaggccctggcaaccatgagtctgctttctgtccctatgaattaacttcttccgatgtttcatatcaatgaacccatacactatgtggccttgtgtctggcctctttcacttaggacaatattattattaaggtccatccacattgtagcatggatcagtacttcattcctgtt

SEQ ID NO: 662440 - DNA, 525 bp, Homo sapiens
aaagatcagagagttgtaagtgtgtggtcttatttctgggttctctgttctgtccccattgcttgtttttgtcagctttgtcaaagatcagacagttgtaggtgtgcggtcttattttagggttctctattctgttccattggtccatgtgtctttttgtgccaatatcatgctgttttggttactgtagccctatagtatagtttgaagtcaggtagtgggatgcctccagctttgtttttttgtttttgttttttgcttttgtttttgtttttttgcttaggaccaygttggctattgaaatccctttatttttttaatgatacatacaaattacaaagaattcaaacaaggcaaaaatgtaaaaaggcagtaaaaaaataaaatgtacttcaaagctaactacccaagagtaataaatatttaacattgtttataaaacattccaacatctttcactgcttattatgtagctagaagaatgtatggatgtttaaatgagtgaaagacatagctatttaaaca

SEQ ID NO: 662441 - DNA, 648 bp, Homo sapiens
tcactgcttattatgtagctagaagaatgtatggatgtttaaatgagtgaaagacatagctatttaaacaattaggataattttctgaagctaatatatagtagcatttatttacacttaagcagaagaaaagggaactgagtaaaagagcctattgactttgaaataactrttttttattagaagagatattatatgctgaaatccctctaaattttaaaaaataggaaagtcattaataggttacagtcatatgttaactatatgttaaaccttagacaggattggttgaatccttgctatgaaagataaggatatttgcactattacatttcttcccacctaccctctccttaccttccaatttctgtttattatatgattttcagaaaaaaactgataaaacaatatccagtcctcaaactagtgcttatttcaaacttgttgcagagatgtaggaagaaaaacaaaaagtcagcccagactgtatcagatctggaacttgcacagaaaaaaaataggggaagcaagaaaccagagacaacatatagtctttgttggaatactctgctcttctgaaattttattaatgtccagtgctagaatctttcttcctagataagggtttagctcatcattatgtgagga

SEQ ID NO: 662442 - DNA, 546 bp, Homo sapiens
tttctctggtgcttccctgattagcttaataactaatcaataatcttcagaattctttttcaggtaaatcagggattttttcttggtttgtatcaattgatggtgagctagtgtgatttttggggggtgttaaataagcttgttttgtcatagtaccagagttggttttctggttccttctcatttgggtaggctctgacagagggaagatctagggctgaagtctgttattcagattctttggcccacaggggtttcccttgatatagtactcttccccttttccaatggctgtggcttcctgagagccaagctgcagtgatggttatctctcttcttggtctagccayctaccgcgcctacccggctccaggcttgtactaggggttgtctgcacagagtcctgtgatgtgaaccgtctatgggtctctcagccgtggataccagcagctgttccagtggagatgacaagggggtaaaatgaactctgtgaggggtcttagctttggtggtttaatgctctatttttgtgctggttggccccct

SEQ ID NO: 662443 - DNA, 546 bp, Homo sapiens
tttctctggtgcttccctgattagcttaataactaatcaataatcttcagaattctttttcaggtaaatcagggattttttcttggtttgtatcaattgatggtgagctagtgtgatttttggggggtgttaaataagcttgttttgtcatagtaccagagttggttttctggttccttctcatttgggtaggctctgacagagggaagatctagggctgaagtctgttattcagattctttggcccacaggggtttcccttgatatagtactcttccccttttccaatggctgtggcttcctgagagccaagctgcagtgatggttatctctcttcttggtctagccatctaccgcgcctacccggctccaggctkgtactaggggttgtctgcacagagtcctgtgatgtgaaccgtctatgggtctctcagccgtggataccagcagctgttccagtggagatgacaagggggtaaaatgaactctgtgaggggtcttagctttggtggtttaatgctctatttttgtgctggttggccccct

SEQ ID NO: 662444 - DNA, 428 bp, Homo sapiens
tcaaagataatccccctattttaaggttcataaccttaattacatcaacaaagtcccctttaccatgtaatgtaacatattcaatttccagggattggggcatggacatatttgggggtcattcttcctgctgcaaaagacactgaagccagtttatggccaagtgcagagaggagatagcttagaccaactgatggcatttttgcatgtgatttttttttttagttatcttatttaattcagtgtacttggaaaacgctatgaaaataaattgtttcaatatgctttttctaattacatatgtaaatatatgatatactgatatacatgtagaatatatatatatagtgaaaaccttggagctacatatttagctcattcagtttataaaaaaaaaatctaccacwtagcctcgttagcaaagccag

SEQ ID NO: 662445 - DNA, 586 bp, Homo sapiens
gcgggaggctgaggcaggagaatcacttgaacctgggaggcggaggtggcagtgagccaaaattgcaccactgcactccagcttggtcaacaaagccagactctctctcaaaaaaaaaaattatagttaatgtaatttttaacattcttttgttttaaamcacatattttcatctagttatttatcctttctattattcttgtgttttaaacccccatatttccacctagtttttgtttaatctctattttttcttccatttgcctctttttctgccttcatttggatgattattttatatttgatattagcttattaatgactatgctttctattattttaagtggttgttctaggtcttaaaatacatatatttgacttaacatagtctatctccaaatattactttaaccgcttcacgtatattgtaacaactttacaagggtataattccattttctttctcctgtcctttatcctaatatgtatacttctataggtgttataaattccacaacacattgttattattgttgtttcaagcagtgaattttttaaaaaaaatttaaaattaggacaaaagtct

SEQ ID NO: 662446 - DNA, 576 bp, Homo sapiens
gtgggtgtgggaccctctgagacatgtgtgggatataatctcctggtttgccgtttgctaagagcattagaaaagagcagtattagggtgggagtgtcccgatttcccaggtaccatctgtcatggcttcccttggctaggaaagggaattccctgaccmcttgtgcttcccctggtgaggcgatgccctgccctgctccatgggctgcacccactgtctgacaagccccagtgagatgaacccagtacctcagttggaaatgcagaaatcacccatcttctgcgttgctcacactgggagccgtagattggatatgttcctattcacccatcttggaaccttccttgtagatttttttaagtacataatctaaagagctgaaattctgcctctgcacagattcccaagagtagaggccacctaatggaaaaatttctgaagttctcaaaaattactgttctcaaaaaatttctttctggatgcatcccctatgtgtcactactctgatggaagtaacattaaggcatactgtacacctttagctgtagcctactgggaacagagaggctagcact

SEQ ID NO: 662447 - DNA, 612 bp, Homo sapiens
aattctcatgttgcttctgctgtttcaatctaatcccttatcctcaaccttagtcaggggccctctttctttagtgcattcttctaacattaaatcaacatgaggatcattccctaatttgggaaagacagtgattggaaatcagcattactcttttcatccccaaaatatcacattctactccatccttggatattaatgccttccttgccttctgaggtgcttgtccttgcaccatttctaatccacatattctcagatttctctcttctcccttttcttccctttcttctttcattctactatcctattactaactatattcagagcataggacctcaatgtaaccttttgtatgactttcctgttcaatgcaatttgattacaaagactttcattgacttgaaacttctgtcttcccacagacctattaaatggtgaaaacaaaaaagattgatytggtatctaatgctgactttcttttagagtatgtaggggaacattactgaaacaaccatttatctttttcattctaaggctttgtcccctgaatatctgacattcaggctgtctaatgactatacagactggatggggctaaaagtcaccaat

SEQ ID NO: 662448 - DNA, 649 bp, Homo sapiens
gagagggcagaatctcttcatgggaatgtgtggtcatatgtaagtttgcatctggtaggacattagcaataactatgcctatgccactagcagcttgctacaaacaagagtccctactaccctattgtccaggtgcctcaatccatttcattagacagctactgggaacacacaaaatcagtagcatggccccattgttggggtctcacagtttagctctacagatgttccctggattatgaaattcccatgagcaaacttccccttaacaaattgttctcagaggcactggatacagtttaagagatgggtaacagtatacatwactcaagtagacataaagcactcttgagcatagatgaaaaccaaagagaggaggcaggagcaggaaggaggagaatttgcatccagccccacgtttctgagtcatctaaacttttccttcatcagctcacattatttctgtgtttgtgtgttatccctctccgtctatccacatgcatgcaccgttgttacattttcattgtgattggaagctacagttcgggcaaagggtacaaatctctttaagaagataagaaagaaaatgcagagatcctaagtcaatgggtggctagccatggctgacacaagagatttaaaacccatg

SEQ ID NO: 662449 - DNA, 585 bp, Homo sapiens
gggagatactactcaacccagtgtagtacccaatttccctttggtaattatctgtccctttgctgctctcccacatgggaagcctaaagactcctcccaccagatctttccttccctcacccagcataagcatgtgtgtgacctcacctcaggtggggtgtttggggaggtgattagatcatgaggcctcagctttctgtctgagcacctttaatctggaagctagtaataacagggttgaaaaagaagtttggaattgaaggtccctcaataaaatgaaactccaagaattgtttgtttgttcactgctatatttccataatctaaaactgtaagtggcaagtatttgttgagtagaagaataayatattcggagtggggaaccactctgaatgctggccctttaggtctttagctgtggacattcctagctaaagctcataaattggctactggttttctgcattctgtgctgctctagatctagggttggcaaactttctctaaaggtccagacaataaacattaggctttgcaggcaatatggtttctgttatgcaactacataactctgccattaaaatg

SEQ ID NO: 662450 - DNA, 432 bp, Homo sapiens
gagctatgtctatgtcacctccatattcagactgccatatttccagtcccagtctggttatgtgactgtcatttacagaagctcattggaagccccagaattcctccccctgactttgcattgactaatggctcctgtgaacaagctatgagaaagacaaagatcgcaaagataatctcactgcttcacaaaggcccacttttgctaaacaaatgtttttagccagaaattcaaactttaaatatgaagaaaatatagtgtttctacccaggcagcacacaggttttcatctarcaaatgtttattgagtacctactctgtgccaggctctatatcagtctctaggatatcatggaaaaaagacagggccctgctttcatggttattacattctagtgtagggaagacaatgaaaaataactaaaatataat

SEQ ID NO: 662451 - DNA, 602 bp, Homo sapiens
acaccgttcattaattaacattttaaagtgccttctacaacaatgttttgggagggatttaaggatgaataagatgtactctcttagggagcctgtgatctggcagatgagcaataaaaatatacatgagtataatacagggaaaaacatgctgttgcacaaaagtggggggaatcaaaatgtgatgggtgtttggaggagtttcatgcccctgtaattamggtatgcattaaaaaacacctctattagtcaaaatagaatagttaatgctgaggtgaccccaaaatctcagtgacttaaatattttatagttatgtaagtaacacccatgggggaagtactgaagaaggctatatgggatttttctctattatttttgcaacttcctgtaaatctatacttactgcacattaaaaatataaatagatggcagacagctagacataggtggagggcagggcaccaaacaacatttcatttcctgctcatgctccctgtccaggcaggttggcttggggactctgctctccacagtcctcacacagggagcaggcagagggaggccccactcctgtgcttccacaaagcaagaggaaggaaat

SEQ ID NO: 662452 - DNA, 558 bp, Homo sapiens
cttgatcaaaaattaaaacttgtcctctttaaaagagactgttaagagaatgaaaagacaagccacagactgggagaaatatttgaaaatcatatacctgataaaggacttgtgtgcagaatacaagaagcactattgaaactcaataataagaaaaaaatctaatagtgaaatgggtaacagttttgaacagatacctaatgaaagaagatatatggctagcaaagaagatatatggcatttgtagcacagaaaaagcaagtggcatagaaaaatctaatagtgaaatgggcaayagttttgcacagatatctcatgaaagaagacatatagctagcaaagaagatatacagcatttgttgcatagaaaaagcaagtagcaaacaaaaaattcaaaatgatgatccattagggaaagtcaagttaaaaccacagtgaaatgccactacatgcctattagaatggccaaaatcaaaaggactgacaatagcaaatcttggtaaggatgtgaagaaattgaactcttgtatactggtgggaatgtgaaatagtacagtc

SEQ ID NO: 662453 - DNA, 569 bp, Homo sapiens
atcaaatgctttgctgactttttttatttgtagcctaagaaaaataatttcccacacagaagaataaggggtaagtatggccatatatatatwaaaggagaaataggactacctcataatataacatatcatcaagctacaataattaaaatagtatacaatgagtatagtactaaacagatcaatgtaacagagtaggaagcttagaaacagacttaaacgaaagcaaatatttagtagattgtaaaggtagtaattcaaattacaggataataaataattagtaaatggtgttgatgattggttaatttgaaaaaaacatgggtttctacattcattaaccaaaacaaactcaaaattgattaaatgataaaatgtaaaaaaataaaatatttaagagaaatagaaaaaatgtgaatttgtttaacctcaaactgaggtttttaaatgtaaaacaaaaggaagaaacagaaaggaaatcaataatacatttgaacacacacccacatacgataatatttctaatatgtcaacaccattaaaaacatcaaataacaaactgataaata

SEQ ID NO: 662454 - DNA, 569 bp, Homo sapiens
atcaaatgctttgctgactttttttatttgtagcctaagaaaaataatttcccacacagaagaataaggggtaagtatggccatatatatataaaaggagaaataggactacctcataatataacatatcatcaagctacaataattaaaatagtatacaatgagtatagtactaaacagatcaatgtaacagagtaggaagcttagaaacagacttaaacgaaagcaaatatttagtagattgtaaaggtagtaattcaaattacaggataataaataattagtaaatggtgttgatgattggttaatttgaaaaaaacatgggtttctacattcattaaccaaaacaaaytcaaaattgattaaatgataaaatgtaaaaaaataaaatatttaagagaaatagaaaaaatgtgaatttgtttaacctcaaactgaggtttttaaatgtaaaacaaaaggaagaaacagaaaggaaatcaataatacatttgaacacacacccacatacgataatatttctaatatgtcaacaccattaaaaacatcaaataacaaactgataaata

SEQ ID NO: 662455 - DNA, 569 bp, Homo sapiens
atcaaatgctttgctgactttttttatttgtagcctaagaaaaataatttcccacacagaagaataaggggtaagtatggccatatatatataaaaggagaaataggactacctcataatataacatatcatcaagctacaataattaaaatagtatacaatgagtatagtactaaacagatcaatgtaacagagtaggaagcttagaaacagacttaaacgaaagcaaatatttagtagattgtaaaggtagtaattcaaattacaggataataaataattagtaaatggtgttgatgattggttaatttgaaaaaaacatgggtttctacattcattaaccaaaacaaactcaaaattgattaaatgataaaatgtaaaaaaataaaatatttaagagaaatagaaaaaatgtgaatttgtttaacctcaaactgaggtttttaaaygtaaaacaaaaggaagaaacagaaaggaaatcaataatacatttgaacacacacccacatacgataatatttctaatatgtcaacaccattaaaaacatcaaataacaaactgataaata

SEQ ID NO: 662456 - DNA, 569 bp, Homo sapiens
atcaaatgctttgctgactttttttatttgtagcctaagaaaaataatttcccacacagaagaataaggggtaagtatggccatatatatataaaaggagaaataggactacctcataatataacatatcatcaagctacaataattaaaatagtatacaatgagtatagtactaaacagatcaatgtaacagagtaggaagcttagaaacagacttaaacgaaagcaaatatttagtagattgtaaaggtagtaattcaaattacaggataataaataattagtaaatggtgttgatgattggttaatttgaaaaaaacatgggtttctacattcattaaccaaaacaaactcaaaattgattaaatgataaaatgtaaaaaaataaaatatttaagagaaatagaaaaaatgtgaatttgtttaacctcaaactgaggtttttaaatgtaaaacaaaaggaagaaacagaaaggaaatcaataatasatttgaacacacacccacatacgataatatttctaatatgtcaacaccattaaaaacatcaaataacaaactgataaata

SEQ ID NO: 662457 - DNA, 639 bp, Homo sapiens
ataagtacccaataggtagtttttcggcctttgcccctatccctctctctcccctctagtagtcctcagtgtcaattgttcctgtctttatgtccatgtatacccaatggttagctcccacttataagtgggaacacggagtatttggttttctgttcctgcattaattctcaggtttaggtaatcgccttcagccgcatctatgctactgcaaaggtcagttcaacctttccraaaggacatttgacaatttgcatcaaaagcctgaagaacattcacatcttttgacccagaacttccacttccaggaattcacaggaaataactagaaaagtgtacaaacaaccacgtataggaatgttcagtatcagggggtattataatttttttcaaatgggaaaaatctgaaggctcagtaatatgaaacttgattattgtagtacatctataggatggaatactaggcagactttaaaaccatgaagaagaaaaatagttaatgatgtcagaagatgttgaaaatacccagaaaactgaaaaaaattaagccactacacagtacacagaagatgatcccaaatgtttttggcacacacgtatatatgtctgtatattaagatataaaggacacataccaaa

SEQ ID NO: 662458 - DNA, 544 bp, Homo sapiens
aatggtttctctatatctgtttaatcaatactctttataaccattaaaccaaaaggtaagttcagtgaatatgattttaatattaatacattacatttgcaatggagtgctattatctttgaaagtgtttttacattgattttctcttcctgtatccrcatctcacttaacaacatcactatccacccacatgtctgagccggaaacttaaataattcttaagtcttcttcatctccaagttctaatcactgtatttcccaatccctcttgctctccactgccacagtttcggctccactgtgtctcaatgtggaagtctccttaacctcccatgcctcaccgtattctactcctaccttccacattgctggagtgctttataaacacaaatctgagagggcttttatatcaccaaaaataccaaattactctctattgttaacagagaataaaatctaaagttcctactatggcctgttcaccaacccattctcagctaccccttccccaggaaaatcttgtcatgcatagaactactacttg

SEQ ID NO: 662459 - DNA, 550 bp, Homo sapiens
tcactaatctactctctgtctccatagatgtgcctattgtggacatttcacataaatggaatcagacaatttattttttcacttatgatgttttcaaggttcatccatgttgtaacatgtatcagtattccatttctttttattgatgaataatactccattgtatgattataccacaatttgtttattcagtcatgagttgayggacatttaggtttttccactttttggatattacaaacaatgctgctatgtatacatgagttttttgtggcatgttttcatttctcttgggcataaacctaggataacaattgctgtgttgtatggagacagcgtgtttaaccatttgaggaactgccagactgttttccaaatcaattgtaccatttaaaaatcccactgttagtgtatgaaggttctaattattccacttccttgccaacacttgccattttctgtcttttaaaaaaataacttagtggggtgaagtagtatctattgtggttttgatttgcatttccctgactactaatgatgttgagtatct

SEQ ID NO: 662460 - DNA, 550 bp, Homo sapiens
tcactaatctactctctgtctccatagatgtgcctattgtggacatttcacataaatggaatcagacaatttattttttcacttatgatgttttcaaggttcatccatgttgtaacatgtatcagtattccatttctttttattgatgaataatactccattgtatgattataccacaatttgtttattcagtcatgagttgatggacatttaggtttttccactttttggatattacaaacaatgctgctatgtatacatgagttttttgtggcatgttttcatttctcttgggcataaacctaggataacaattgctgtgttgtatggagacagcgtgtttaaccatttgaggaactgccagactgttttccaaatcaattgtaccatttaaaaatcccactgttagtgtatgaaggtwctaattattccacttccttgccaacacttgccattttctgtcttttaaaaaaataacttagtggggtgaagtagtatctattgtggttttgatttgcatttccctgactactaatgatgttgagtatct

SEQ ID NO: 662461 - DNA, 555 bp, Homo sapiens
aactttgttcaaatatttataccaggcactttgggaatacaaaaatgaatcagagtctgaaccatttttcaagatgtttacaatgaaaccatggagataaaatgtgtctgtaaataattgaaatgcaaattaaagtcataagaattaggaaaaagtcatagaaaaagtgcaatggcaggtaagaaactatagagattactgccacctaaagagatcaagaaaaccttcatgggataagaggtaacagattaggctttgaatgatgtaggatttgtacataaggagttgatgaacagagcttactctggtctaaaggaacagcaaaggcatgggagagagaaattctgaggcatttacagagaagagtaagtcagtctattatttctacagcaaagggtatgcaaagtgggaaataaaaatagaaaaatctgttgggtcaaatgtgaagaacctagaatgctagattagggtgtttgacttgtttgtggagaagagtttaaatgasagatataacagatattatttggaaattgatagaaccaaataattaaaatg

SEQ ID NO: 662462 - DNA, 242 bp, Homo sapiens
gtgctctctgaaacatgtgctgtgtccactcagggttaaatggattaagggcrgtgcaagatgtgctttgttaaacagatgcttgaaggcagcatgctcgttaagagtcatcaccactccctaatctcaagtacccagggacacaaacactgcggaaggccgcagggtcctctgcctaggaaaaccagagacctttgttcacttgtttatctgctgaccttccctccactattgtcctatga

SEQ ID NO: 662463 - DNA, 242 bp, Homo sapiens
gtgctctctgaaacatgtgctgtgtccactcagggttaaatggattaagggcagtgcaagatgtgctttgttaaacagatgcttgaaggcagcatgctcgttaagagtcatcaccamtccctaatctcaagtacccagggacacaaacactgcggaaggccgcagggtcctctgcctaggaaaaccagagacctttgttcacttgtttatctgctgaccttccctccactattgtcctatga

SEQ ID NO: 662464 - DNA, 598 bp, Homo sapiens
cagtctgtagtttgccaaggctcggctggatggctatgacatttgatccttcatgaaactgcagtaagayggcagcaggagctagagtcttctcaaagccagactaggctggacatccaagatggcttcttccctcaagtgactggtgcctgagctgggatggctggagcagctggagactgggcagacatctcccttgccacatggctaggttgggcttcacagcattggcttgcaggaggcagggtgtgtgaaagaggcagtgggagtgatccactcatgggaagggatatgttatcgctgagccttgtttagaattgcttgtgcatgctgataagaaaaggaagaccaacttttagttggttttagtaaactttttaaattctttatagacaatgcatccctttaatctctgtacttttaagtggaccattcccactgcccccagccttggtacaccacttcctcacagcatggctgtttccagagagttggactttttgcctcatgactagcctcccccagagccttccaggaagaaaggcaaaatctgtgagccttcttatgacctagcctcagaagccacagagcattgcat

SEQ ID NO: 662465 - DNA, 598 bp, Homo sapiens
cagtctgtagtttgccaaggctcggctggatggctatgacatttgatccttcatgaaactgcagtaagatggcagcaggagctagagtcttctcaaagccagactaggctggacatccaagatggcttcttccctcaagtgactggtgcctgagctgggatggctggagcagctggagactgggcagacatctcccttgccacatggctagsttgggcttcacagcattggcttgcaggaggcagggtgtgtgaaagaggcagtgggagtgatccactcatgggaagggatatgttatcgctgagccttgtttagaattgcttgtgcatgctgataagaaaaggaagaccaacttttagttggttttagtaaactttttaaattctttatagacaatgcatccctttaatctctgtacttttaagtggaccattcccactgcccccagccttggtacaccacttcctcacagcatggctgtttccagagagttggactttttgcctcatgactagcctcccccagagccttccaggaagaaaggcaaaatctgtgagccttcttatgacctagcctcagaagccacagagcattgcat

SEQ ID NO: 662466 - DNA, 622 bp, Homo sapiens
atttcattgagccttaggatcctctgatgaattttctttaactatttcttgctgaaataacagaacttctagtacatagggctagactattgccacgacttctgagtcaatcaatgtaactcatcttagcctcaggccaaaatttttgcaaatggctatattcgtactcaattccatttctcacatgtactcatctgaccaatgggaaactttccagagccagctctggagtcataactcaaaacttttcacagagatcctaggccaggtgtgaatagaatcttcaggtttcctgaacccacaaacyatagccaacctggatgtcaagaccctataggcttaactatttcttaaaatagcaatagcaagcccttcttatgtgccagacactgttctctgctttaccaatagtaactcatctaaaactcataacaacactatgggtagtaacccttattattattatttacagatgaggaaactaagacccaaagaggttaaggaatgtgtctcagattccaaagatagcaagtagaagaaatgttatagtcagattccagaaaccaagctcttaatcatcatgctattatacttcataagttgtacagtcagtattgctggc

SEQ ID NO: 662467 - DNA, 596 bp, Homo sapiens
cagttactgaaaaagatatactatttttcatgcgattaatttaacaaaagtctgtctcaacatttttgaaacattaaaagctttctcacaaagaaatcaggataaagctgttgcaaaaaygataaaaatatctataagatcacttaacctattaaacaactacgtaattgcataatttcttagtataataaacataattatatgttcttgatgccattaattgtgtcagccccattaattaacactaaatactatagggaaaacaatctatttatattaaaatttataaaagaacaaaaatcttattttaaatccccaataaacaccacacatcctcagtcacagaattccaatggtcttaattgacctagttttagttaaaagtaaaaactacacttaggttcaaccacagaaaagaagaggccgcttttctagattaattattatgcttcagttatctgggagctgttagttcagctctcataattctaggaaagagtcctaacaccgtgtcacagaaaccttaaattatattctagtccacgcttagaactgtcttactgtcccttccatacttttaaaagctgcattcaaca

SEQ ID NO: 662468 - DNA, 596 bp, Homo sapiens
cagttactgaaaaagatatactatttttcatgcgattaatttaacaaaagtctgtctcaacatttttgaaacattaaaagctttctcacaaagaaatcaggataaagctgttgcaaaaacgataaaaatatctataagatcacttaacctattaaacaactacgtaattgcataatttcttagtataataaacataattatatgttcttgatgccattaattgtgtcagccccattaattaacactaaatactatagggaaaacaatctatttatattaaaatttataaaagaacaaaaatcttattttaaatccccaataaacaccacacatcctcagtcacagaattccaatggtcttaattgacctagttttagttaaaagtaaaaactacacttaggttcaaccacagaaaagaagaggccgcttttctagattaattattatgcttcagttatctgggagctgttagttcagctctcataattctagsaaagagtcctaacaccgtgtcacagaaaccttaaattatattctagtccacgcttagaactgtcttactgtcccttccatacttttaaaagctgcattcaaca

SEQ ID NO: 662469 - DNA, 476 bp, Homo sapiens
aaaaggaacaataacaatattaaaacaaattggtagcataaataaaaaccatacaacctcattatctttgtggagtaagtgattacagtgctgctggttacctgcagaggmaaaatgctaccagcggcaattttggtgaattaactggggtttattggcatactgtcaagaatttagaatgactcatggaatgagtgttaatggagtgaaaccttcattccatctatttggcaaatggcaaggcaatctaattgtttttccctaaagcaacacaacaatcagatatttagacagcacattacttcctttcctactggaagaaacaggagtcatgagataagagaagagatctaaaaagcactgagatttttctttgagttttattagatttgctgaacctgcactacatgtttgaaatgcaggactgaacaaaaacgactgcatttctaaggtaagcagagtatccaagggagaaa

SEQ ID NO: 662470 - DNA, 476 bp, Homo sapiens
aaaaggaacaataacaatattaaaacaaattggtagcataaataaaaaccatacaacctcattatctttgtggagtaagtgattacagtgctgctggttacctgcagaggcaaaatgctaccagcggcaattttggtgaattaactggggtttattggcatactgtcaagaatttagaatgactcatggaatgagtgttaatrgagtgaaaccttcattccatctatttggcaaatggcaaggcaatctaattgtttttccctaaagcaacacaacaatcagatatttagacagcacattacttcctttcctactggaagaaacaggagtcatgagataagagaagagatctaaaaagcactgagatttttctttgagttttattagatttgctgaacctgcactacatgtttgaaatgcaggactgaacaaaaacgactgcatttctaaggtaagcagagtatccaagggagaaa

SEQ ID NO: 662471 - DNA, 469 bp, Homo sapiens
gatcacctgagcccaggaggtcaaggctgcagcaagatgtgattgcgccactgcaccccagcctgggcgacagagcaagaccctgtctcaaaamaaaacaaaacaaaacaaaacaaaacccaaaaaaaaacctcacttctacacttccattcttacaagtaactaagagctggctatggtcagaatggcaaaaatattccaaaatgagttttacaaaaagatatataaggcgaagtatttgagtccaagacacagcaaaccgctagtgtatacctatatactgatatgtgctgccaatgatggtgtggtaggactgcatattttagaaacaggaagacaccagttgtgtgatataagaaataataatgtttagcaaataaaatgtgctatctgtacaataagattggcagggttttttaaagtgcttttagcctaaataatttttggaaaactctaaaggagagtgggg

SEQ ID NO: 662472 - DNA, 607 bp, Homo sapiens
attgaccacataaccagaggctgtaaaaactgcagttatttttgcatcaacctaataaaaagaaatcacaaagcaaaattttcaactggggttagctgcaggcagacatagatcatagacatagatttggcttttaaatgtgctcatctctatcaagcaaaagaatacggaaagagtacccagagatcctgcccaccaaaaaggccataaagaataccaaatttctcagtttataatattcactaaggataactgaattagtcacgcttgctatttctgatatagcacatcagggcatatagcatattctctatatgaataaatagagaaatatacctgaggaaagagacagcaaaggtagagggatccctggggcacaaacagaagatacttacagttagagaaagttcattttttttttctyatttaaaaaaacaacttatttaagattttgcatgagatgttttgactttcccttcagcgcagaaccatttttccctcaaatgatttacctaacagacatgaagaactgctatcaagcctttacccacgcagttataaccgtgagaaaattattttacatcagctgctgacaactagtccccct

SEQ ID NO: 662473 - DNA, 572 bp, Homo sapiens
catcatcacagaaaggggaaggagaaaaacaacagatgttcactcacacacaactgtgatatcacacaacttccttttgcttagtcttcagtaaaaatgatgaactaattattgttctaagtatcacaaacatcactacccattttaaaaaacaggccaggtgcagtggttcacccctgtaatcccagcactttgggaggctgaggcaggcagaaaacttgaggccaggagtttgagaccagcctggccaacatgatgaaaacccatctctactaaaaatacaaaaattagcygggtatggtgacacacgcctatagtctcagctactcagaggttgagacatgagaatcacttgaatctgggaggcagatgttgcagtgagctgagatcatgccactgcactccagcctgggagacagagtgagactctgtctcaaaaacaaacaaacaaaacatctgtaggtctccctacagtttcctgttctttataattcctattctcctttatcaaggccagtagctaacttagctatttttagtctcactttttattttagaaattatttgctata

SEQ ID NO: 662474 - DNA, 517 bp, Homo sapiens
agtgagccaagatcgtgccactgcactctagcctaggtgatggagtgagacgctgtctcaaaaaataaaaagagagagagagagggaaagaaagaaattatttgctatataaggattgttgttaggaggaaatcaacactataactgtttgtttctgtctttgactctggttaaattactstacgtcccgccagcatacctgatttctattgataggggtagcacagcctcgtagttatgagcatggatcagaagctaggggctggtttaaatcttgatctgccacttactagctatgtttcttacctctctgaaccttggtttcctcatctgtaaaaggggctcatcatagttgtgaggagaattaagtgaactaatatttgtgcctggtatgcagtaaccactatgtatgtttttgaaataaataaatgttgttggagtgaaaccccccaacacatctctaatgccgccttgtgactagtggattaagtgagcactttgaaaatatgtattactt

SEQ ID NO: 662475 - DNA, 517 bp, Homo sapiens
agtgagccaagatcgtgccactgcactctagcctaggtgatggagtgagacgctgtctcaaaaaataaaaagagagagagagagggaaagaaagaaattatttgctatataaggattgttgttaggaggaaatcaacactataactgtttgtttctgtctttgactctggttaaattactgtacgtcccgccagcatacctgattyctattgataggggtagcacagcctcgtagttatgagcatggatcagaagctaggggctggtttaaatcttgatctgccacttactagctatgtttcttacctctctgaaccttggtttcctcatctgtaaaaggggctcatcatagttgtgaggagaattaagtgaactaatatttgtgcctggtatgcagtaaccactatgtatgtttttgaaataaataaatgttgttggagtgaaaccccccaacacatctctaatgccgccttgtgactagtggattaagtgagcactttgaaaatatgtattactt

SEQ ID NO: 662476 - DNA, 517 bp, Homo sapiens
agtgagccaagatcgtgccactgcactctagcctaggtgatggagtgagacgctgtctcaaaaaataaaaagagagagagagagggaaagaaagaaattatttgctatataaggattgttgttaggaggaaatcaacactataactgtttgtttctgtctttgactctggttaaattactgtacgtcccgccagcatacctgatttctattgataggggtagcacagcctcgtagttatgagcatggatcagaagctaggggctggtttaaatcttgrtctgccacttactagctatgtttcttacctctctgaaccttggtttcctcatctgtaaaaggggctcatcatagttgtgaggagaattaagtgaactaatatttgtgcctggtatgcagtaaccactatgtatgtttttgaaataaataaatgttgttggagtgaaaccccccaacacatctctaatgccgccttgtgactagtggattaagtgagcactttgaaaatatgtattactt

SEQ ID NO: 662477 - DNA, 517 bp, Homo sapiens
agtgagccaagatcgtgccactgcactctagcctaggtgatggagtgagacgctgtctcaaaaaataaaaagagagagagagagggaaagaaagaaattatttgctatataaggattgttgttaggaggaaatcaacactataactgtttgtttctgtctttgactctggttaaattactgtacgtcccgccagcatacctgatttctattgataggggtagcacagcctcgtagttatgagcatggatcagaagctaggggctggtttaaatcttgatctgccacttactagctatgtttcttacctctctgaaccttgrtttcctcatctgtaaaaggggctcatcatagttgtgaggagaattaagtgaactaatatttgtgcctggtatgcagtaaccactatgtatgtttttgaaataaataaatgttgttggagtgaaaccccccaacacatctctaatgccgccttgtgactagtggattaagtgagcactttgaaaatatgtattactt

SEQ ID NO: 662478 - DNA, 528 bp, Homo sapiens
tttctagtaatatctatttgtgatcaaatagaaatagaaataaataccttagactgccatcttgtgcaggaagtaaaacagcaggacattcaagtaaaaaagagttttatgtctgtttatttgtggcctttgaaacctgcttgatcttttcagtctttttgatcctgaagatgtttgcccacaccctccttgtattttgttctctgaattgttcattgttgttctttcccaagcatagtaaggttattctttttattatataactagtagaaagaggctttgaaaattttcattttcaaatggaattccaattcagttttagcctactgttctccctcattctgaaatgtgccctgaccatggaacayggaatttctatctaattttacagaattcaaattatcgagttctgtttgcaaaacattcttgctaaatttctttgtctaataaatatcaagagttaatttttctctgacaatgctgttctcttttacttctggtttggagtctgtgtttttgtactttctc

SEQ ID NO: 662479 - DNA, 475 bp, Homo sapiens
tttttttaggttatcttttcatattttgctccttcttatccattaggtctcagcttaaatgtcacctcctcagaaagactgtcttgacaacactgctgaaagtactgccctctctaaaagtcctccttaccctctacaactgcatcctgttcctttccttcataatacttaagtcttaactgcatatgtatttgtctgtaaatttgttattctttttcttcctgctatactatcggatttttragaacaggaactagagctgttttattcaccaccctatcccagcaccttcaaaaagtccctctctatagcagacactcaaaaattggtcaaatggtgatattcacaacaacctaataaagtagataccattatcttaatttttacaaaagaggaaattggcattcacagaatgacttgctccagttaatcaataatctgccaaacccagattcaaacccagtctacatgatct

SEQ ID NO: 662480 - DNA, 476 bp, Homo sapiens
ttgccccagctgtagccaacatttactattaattagagattaaatattctttctttctgggaaaaggtacaacctctttggggttctcttcagcagctctgggatggggcagacactatgctgagtgatttacctgagtcacttcacttcatcctgtgaggacaggtgttagctgtatttcctaaattaaaaaacccagagaaacagatgatttgtccaagctcatagggctcataaatggctcaacctaggatttgaacccagacctccctgactctggaagttctctctttctgtgcagctgcttagtaaccagaaatctaagatgaatgaagtgattgcatataagctgtaagtcgctattatccacagccctgggaataatatgtaaaaagtaggcgttgttctctyccttccctttgaaaattcctttcctgttgtgtagtaaatgaccgcttcctaaaaacagtagttag

SEQ ID NO: 662481 - DNA, 579 bp, Homo sapiens
aaatataccagtgagatcatcaaccttattttaaatgatcacactgcgagagccatcgtgagtggtgataatgatgctaaatgagcaaggtagttgagaaaaataagcatacagaatcattctctaacttctcaattatacccaacccctagagctccactgtgaaaccactggtgctgggagagtagggacccatttgacattggacgggaagagctgtgagctcgtgagtcactccagacacccatgccaaggagagtgctcttttgagaggcaagccactgcagagaagaggggagcctgggggcttaagggcctyatggagcacagagcactgctcgccttgacgatctgagctagcatctggagtctcaagctggtcaccttgcctcagccaggtggttcatgtagcttttaattatcaacagagctttagtcttccctgcccataagctaagcatcgggttgtggtggcatagaccataaacctgtgcagaccactttacattggaacacgaattaatgaatatatgagtcccttttgtgtcattttggccaaccaaaaagaaactcttattg

SEQ ID NO: 662482 - DNA, 530 bp, Homo sapiens
tggtggtgtttaaccctatgctatctcttggatcttcaggaagtttagatcaactgtttagggacttgtactgtagagaccaagcccaacgacctagttttctacacgcaaattagttttattcaattctgcaaccatacccaacatcatcwtcttagccatctatcttacagttgatgctgttgattaaaacagagcacagcatgtactgaggtgtcaccattaatgaaaaagcaatttacaaggtacttccttttgaccatgagtgagtaatgtcatccttatatgagaagaacagtatactgattttagggtaagttgtgaagtttcccagaagcaccatatttatggatgtatttggatctctgcctatgaggatgagcaatgaggaagttcaaaagaatgagctttaagaaacagaactaaaaaggtacattttgaaagttggatgttatgatgatatgtgctgcctggctctccactgcttcaaagaatttgttctaaattgtttctgttttccatgtttctat

SEQ ID NO: 662483 - DNA, 585 bp, Homo sapiens
taagctaccattttttaaaccactcataatgtgggatcatttgttactccagcataacacacatatgccaaattgtcactggcaccttccagcctaaggcacccgggaagacttcaggaggagctgatgtttgaagtcctaatggccatgagtatatggtctggattcaaaacctagctctacacaccaccagcagtgtgaccttatgctagttgcttagcctctgaattttcattcccttgtatgaaaatggagatattaccactggttatcttattgagctgataaaagggtgaggataaaatgagatcttacatgtaatacattttagaaaacaactggcagacagaaaggtaagtakgtaataaatggtcattcttgtttttctggttttaacattctgtgagttaacgatttccttatctttttatatttcttattgagctcactgcgaggactgaggaagtttataagaaatatggcaataggtaatggcttaggaagaaagtggaaggagtagtaccttagcccctgtaagccagctgcttctaatgggaatcagtttctattagtgtatgagcatta

SEQ ID NO: 662484 - DNA, 569 bp, Homo sapiens
ttggccggcccatttccaaaaataagagccaaagccactgaacaaatctgtagtaatcctttctaagtagccatcatccaaccagtgatattttcctacaaaaacttctttgggaaaagagattatatatttgtatcacctcawatcttgcaaatttgtgtcacattttgtctttaaagctttcaagtaaacattaaattgattatataataaagccaatagctcatttggaatatttacaggaaaacccccatagaatgggcataatgagaaaaataatgacgcagtaattataattctcaaggctaataattttaataataatttatacttaaacagctctacacataaggagatttcaaaggtttataaatattaagtaaaagctccgtatgctctgccattcctaaaacaatgccttgaacctaacatttctgaaacattcatgcatcattggtattattttacaaatggataaactgaggcaaagaaaatatgcctggagtcaggaatgtgtagcaataaattcttgtcttctgtacctatacccaaaatccaccaaattaaga

SEQ ID NO: 662485 - DNA, 566 bp, Homo sapiens
tggtccaagtagagtgctccccaaaccttgctgttactttgagaatagttttaatgargcttgcagctgagccaagctctcctgttgtgctattatgtgggcatgtggaagccctagtgattgatctgtgtgggggaactggcaacactcgcatgccctctgggtagaggcagagcctccagcaggaaaaattagggaaagagaaaaaacggagaggaaatgtttatcactcatttcctagcattttatggcagtgttacggtgaactgggagatggatgtgtatattcatggattttgcaccactttaagcactaataacattaaatcaaccttaatacttcatgccaaatgtgctctaaaagagggaataatgggaatttttgttgactttagtaaagcatcaaaagttacactggaaacacataaaatgctacaatgcagaggtcacaattatgctaatatcatgataatataaaatattaagtcaccaaaatgacaggatttacaaccaaccattcttagtccccagaagccttagcgataagctcctggtaaacacaacag

SEQ ID NO: 662486 - DNA, 567 bp, Homo sapiens
ggatcatggtttcaggtgaactgtcatgtcataggggcttaagtagcttctccattagaaaagtgactacaggattatgagactgctaatggaaactagttgtcacctcacatgcttttctgtcatcaggctactgcatgacccaagcacctccctcgaacagctttcccctccgttgaaatatgctccttttctccacccaaagtcagcctacggctgaccttttttctggacctcaacagctttgcagatatttccagcagaaatactgcctttccccctaaaacagcyttttagaaaggcttcctggttttgtaactttatacatttttccaaattccactatgcaattccatgctatatattcatttagcaaatatttattaagcacctactgtatgccaggtactgtttctaggcactaggagtacagcagtgaacacaacaggcaaaaagtgctgccttcatgaaatttatatttttgataagggatgttagaaattcaaataaataaaaggatcctatggtatgtttgaaggcaatagattctagggaggaaaataaggc

SEQ ID NO: 662487 - DNA, 567 bp, Homo sapiens
ggatcatggtttcaggtgaactgtcatgtcataggggcttaagtagcttctccattagaaaagtgactacaggattatgagactgctaatggaaactagttgtcacctcacatgcttttctgtcatcaggctactgcatgacccaagcacctccctcgaacagctttcccctccgttgaaatatgctccttttctccacccaaagtcagcctacggctgaccttttttctggacctcaacagctttgcagatatttccagcagaaatactgcctttccccctaaaacagccttttagaaaggcttcctggttttgtaactttatacatttttccaaattccactatgcaattccatgctatatattcatttagcaaatatttattaagcacctactgtatgccaggtactgtttctaggcactaggagtacagcagtgaacacaacaggcaaaaagtgctgcyttcatgaaatttatatttttgataagggatgttagaaattcaaataaataaaaggatcctatggtatgtttgaaggcaatagattctagggaggaaaataaggc

SEQ ID NO: 662488 - DNA, 534 bp, Homo sapiens
cacaaagtcatgtatggactggctgctgttctggtaccaacacaagtcatagagagaaatagatagtctaacggcggccaattgtgataacattttccacctgtccccaaatttctgctgtataaattgtttctttctcccggcgtcctcatctgtcttgattttccttcagcttttctcagccctgagcatgccttcttttttcagcaaccactaaggttcacagaatagactatgttactaaattaacataaaagctctctgtgtttacttaactactcaaatcacttatcttaccagaagcaaccctgggctaacaggggaaggacagtggctaagttttattgcaactctaggctgtagatgcactaaactcctgttagctataacccctgttatacatgaagggaagataattgtctcccaagttttcagttgagaagaagctctcaagyagtcttgcttgactagatatttaagttggctagtcagctcggtcagagtacattctaacaacccaacacctgtgaccca

SEQ ID NO: 662489 - DNA, 508 bp, Homo sapiens
ggctccccccgtgaacccatctctcagttccaaaggactccttctctgtcatctctcaccacacagatttgaggagcagcacakctcacttaggaggaatggggtgagggtggggacagagctagtgacatgggcctaacaccctggccagtctgggtgctggttccaccctgggtgtgcccagggcctgtgcgttataccttaatgaggggttgggccaatggtgatgtgtttcatccttttttaatgaggtgctgttttgcatagataaatagtatgattgtgatgtgggaaccaaatggcagatcattttgcaaaaagcactgggcagaggtgagattatgaaaccagttctgcttcaggcctgctgcctgagcgtgggaacccggaggtgtctgagtctgggcctcaatctgggccaactggatcgaggccgccctctctagttcacctctcagcagctgggctgggacaggaagatgcctctccactttttacctgcgattca

SEQ ID NO: 662490 - DNA, 508 bp, Homo sapiens
ggctccccccgtgaacccatctctcagttccaaaggactccttctctgtcatctctcaccacacagatttgaggagcagcacatctcacttaggaggaatggggtgagggtggggacagagctagtgacatgggcctaacaccctggccagtctgggtgctggttccaccctgggtgtgcccagggcctgtgcgttataccttaatgaggggttgggccaatggtgatgtgtttcatccttttttaatgaggtgctgttttgcatagataaatagtatgattgtgatgtgggaaccaaatggcagatcattttgcaaaaagcactgggcagaggtgagattatgaaaccagttctgcttcaggcctgctgcctgagcgtgggaacccggaggtgtctgagtctgggcctcaatctgggccractggatcgaggccgccctctctagttcacctctcagcagctgggctgggacaggaagatgcctctccactttttacctgcgattca

SEQ ID NO: 662491 - DNA, 600 bp, Homo sapiens
tttatttatttgaagtctgtaatcgaaaggataccatttttcaatttgctttgttcaacaattcaatgtagattccccaaaatggcacatgtatctccactggatgctactaagtggagcctcagtatcctaaattgtaatacattgggaaaataaaaggcatttttctggttagattatatagtgtatatcatggtaaaaagtaaattaatctacatgtctttccttaccagaactatgatatcttgactattaagtttaagagataaaatgaaatgtcagtattttgataggcaaataatgcatgatataaaaagaatgtaaaaatattttcaaaggtactttttggtcagttacaaattatagaagccctcaaaattatagaaattatcataattcaattcaaatttctttaagcaraaaagggagttgtatttcctctgtgatggctttagacagggttagattcagatgccaaaaaatgcagtctcatttttatctgagttaacttcattttcagtcaggttcttcctcttctcataatagtggtaagatagccactagcaatgccaggctggtgttctactagatttgaaacac

SEQ ID NO: 662492 - DNA, 553 bp, Homo sapiens
cccaccatttatcactctaacgggtttattagaagagatagactcattcagggtgcaagcagagagttactttattctctctagtcactttacatgcagttccattctgaatattatgttttctgctccttgataaaatgctgtttaagtgctgttatttgcatctctactctattcttgcttctctgctgctgcttgctttttttcttctcaatttttttctttctctctctcattctttcattccttcttttctcactctggcattttaaaatagactaaattttcaartaatgaagaaaatgtttaatgaattaaagttttaaattctcctccaatataaaatgtcttttctacatcaaccttgctcaaagagggtttaaaaacctgaataaggaaggaaataggttggtcagctagtaggctgttgcattaatttttttttttttttaaccttatgttttcaccctcctcactgtgcatcacctaggttttctgaagttcagggattagaagtagggaagaactaattggtagtaaaagtatgttggaa

SEQ ID NO: 662493 - DNA, 500 bp, Homo sapiens
tttggcccaaattggaacacaagtacaaatgctaaaagaagttctttcaccatgaaaatacargatatcattataaaatatgaaacctgttcccaaagttatacacaaaactcagaattgtgattcacagtcaagggagctacaaaacagatccctatcccttttacaaaagaagtcagattcagctgaccttaatttcatgacagtaaaagctgagattcaccaggtaacagttgctctatcattttaacaaaaagtctctgaaactctttctatcatcccagagtcctacttttcattttcttcctagatgaaaatttctcctaaatagtctggattcctcatggatgcttccttgaatactgggtgcatcttgcaattccactatcctgcccaatcccatcaaatatagaatgaactcagcactctctaccatctggtcctaactcattaattcagtctaagcttttcacccatgcaatttttccacttgagacagg

SEQ ID NO: 662494 - DNA, 529 bp, Homo sapiens
ctagcttggctaacagagtgaaaccccatctctactaaaaaaagaaaaaaaaaatacaaaaattagccaggtgtggtggcatgcacctgtaatcccagctactcgggaggctgaggcrgaagaatcgcttgaacctgggaggtggaggttgcagtgagctgagattgcgccattgcactccagcctggatgacaagagtgaaactccatcacaaaaaaaaaaaaaaaaaaaaaaggaagaaacgctctattaaaacaataccttttggcccacatcataaaaacaaagtagagatatccaagatggagatggtagtaacagacaaagtatccctgcatagaaatctaactcatacaaatccgtggcttgaccagtattattggttgctggtttttaacaattctcacagcccggatcttcaaaatatgggtcctctatttttctttcttattccagatctgacagacccaagtaagtagcagacaagtaatgctagaaaaaaatcagccagcacatttctagcagctgg

SEQ ID NO: 662495 - DNA, 529 bp, Homo sapiens
ctagcttggctaacagagtgaaaccccatctctactaaaaaaagaaaaaaaaaatacaaaaattagccaggtgtggtggcatgcacctgtaatcccagctactcgggaggctgaggcggaagaatcgcttgaacctgggaggtggaggttgcagtgagctgagattgcgccattgcactccagcctggatgacaagagtgaaactccatcacaaaaaaaaaaaaaaaaaaaaaaggaagaaacgctctattaaaacaataccttttggcccacatcataaaaacaaagtagagatatccaagatggagatggtagtaacagayaaagtatccctgcatagaaatctaactcatacaaatccgtggcttgaccagtattattggttgctggtttttaacaattctcacagcccggatcttcaaaatatgggtcctctatttttctttcttattccagatctgacagacccaagtaagtagcagacaagtaatgctagaaaaaaatcagccagcacatttctagcagctgg

SEQ ID NO: 662496 - DNA, 617 bp, Homo sapiens
tgaaactcaatagataattcctgccctttattataaaataaatcctaccttgcatttatttggttttgtgtcctgctcagatatataagcattttgctacaaagaagaatttgtttaggtacaraagcagtgctttcccaaactaaatcacattaaagtacaaaagggtagtagtgtgtatgcatgtttgtatctctgtgtatgtaagtctctcatttgcgagtgtatgtgtgagtatatgttactgctactttgatcttcagtctctcacacatatgtgagatgccagtttgtgagactcttagaactgaaggaccagccaaatacataggactttaccgtgccaagtcttaattcagcactttccaagaccacctatcaaagaaagtttaaaacagagaagggaaaaaaggaaagagaacaaaactaatatagatttgtgcattaggtagaactgcttctataaatcttgagataatacaacaaattacaagatgaatgcacttagtcttctgtttttatggtttgccatgaactgagtcttccatcttctcaagttcctatatgagacacacggtatttgtgggaacaccaaactactccagagtctatgaatc

SEQ ID NO: 662497 - DNA, 597 bp, Homo sapiens
atgtaaaagaagaatgccacccactcttactctcagaagatattttaagaaatctgcttagtgggttcattgtgaggtatggcagacccagagacaaggattcaagtgcaagttatttatttggtgtgtggttcctggaaatgctgataatgaagaagtagaatggggaggaggggaaggcctcagaaagtcaagaaaactttctttccaagcaagtttccaatgagagattgcaattccacccagatgggttctctgggagccaaagcatcataagtggatctgcaacaccccacctcaagggtgaggcaactggtgcattttgcaccaactcccagtgagtcactggctgagggctgctcctaggggcccttttttccccagtactacagcaggcagagtgagatcttatgactagagaagggcctcaggcaaagtgaaacagactcgcaagttgaaaattagccctgcaggcactgacatggttaaggcccaagggcatctggcccttgcagcctcagctccatctgctgctaccattcaytcagtcaggaatggcttgagttccttaaatactaacttctactgtgataatgg

SEQ ID NO: 662498 - DNA, 518 bp, Homo sapiens
ttcactaactttggtctagttattccacttccagcagcccatcctcaggaaatgatacaaagttcaaagaattatttatttaatagggatgaagaagtgaaaacaaatgtgtttaataatattaaccactaattttattaagtacctactataaactgtgaaaaacacccggcatgccttgtctcatttagtcttcccagcaagcctctgaactaagttaaataaacgcagctagggagcgaagaaggtaggttgtctgactcaggtctgaagcccttgtgcagtgcacaaaatacaaaattgcacatgaaagccctagtttgactctaggggtcacactcttatcctctacctacttttatcacactgtcttttccagaatgtgcwtctcacatttattaaagacccctctaaattgccctggttagatgctactttagatcccataaaaataattgagaggcggttctgaaaagaacagaggactgggaaatagaattccagtgtgttattctctt

SEQ ID NO: 662499 - DNA, 597 bp, Homo sapiens
ctcttacctttgagaatagaaatactgttccatagcatagtgtttgatattatttaagaattaattttagaatggcttcttctagttttattgatcagaggctggagctgcttctttaaaaggaattgtgctaaagtgtaaaagtttaaggattcagaaaagtcttatgtktttatgttggctaggtcaacgagaaatagctcaacaaggtagaaagataatagaagaccacactttgttaacaagactttctttggtcgctcatcaactttaaaattattggagtcctctaataacatttaccttctgcttctcttttggcagtttttgcttcatattaaacttaattatttatgtgtcctcagattgtgtgttgcttatagtcataaactgtcttttccctagagtttctctgcaccagctagcacaatgtctttcaagtgggatgagtataagtgtttgctgaatgaactaaaatacacatgtcttcataggtatacatatatactcatcctaagacattacttacttattttccactgatctcaacatatgtttcggttcatatgactctaatactctaatttcttttagaat

SEQ ID NO: 662500 - DNA, 597 bp, Homo sapiens
ctcttacctttgagaatagaaatactgttccatagcatagtgtttgatattatttaagaattaattttagaatggcttcttctagttttattgatcagaggctggagctgcttctttaaaaggaattgtgctaaagtgtaaaagtttaaggattcagaaaagtcttatgtttttatgttggctaggtcaacgagaaatagctcaacaaggtagaaagataatagaagaccacactttgttaacaagactttctttggtcgctcatcaactttaaaattattggagtcctctaataacatttaccttctgcttctcttttggcagtttttgcttcatattaaacttaattatttatgtgtcctcagattgtgtgttgcttatagtcataaactgtcttttccctagagtttctctgcaccagctagcacaatgtctttcaagtgggatgagtataagtgtttgctgaatgaactaaaatacacatgtcttcataggtatacatatatactcatcctaagacattacytacttattttccactgatctcaacatatgtttcggttcatatgactctaatactctaatttcttttagaat

SEQ ID NO: 662501 - DNA, 597 bp, Homo sapiens
ctcttacctttgagaatagaaatactgttccatagcatagtgtttgatattatttaagaattaattttagaatggcttcttctagttttattgatcagaggctggagctgcttctttaaaaggaattgtgctaaagtgtaaaagtttaaggattcagaaaagtcttatgtttttatgttggctaggtcaacgagaaatagctcaacaaggtagaaagataatagaagaccacactttgttaacaagactttctttggtcgctcatcaactttaaaattattggagtcctctaataacatttaccttctgcttctcttttggcagtttttgcttcatattaaacttaattatttatgtgtcctcagattgtgtgttgcttatagtcataaactgtcttttccctagagtttctctgcaccagctagcacaatgtctttcaagtgggatgagtataagtgtttgctgaatgaactaaaatacacatgtcttcataggtatacatatatactcatcctaagacattacttacttattttccactgatctcaacatatgtttyggttcatatgactctaatactctaatttcttttagaat

SEQ ID NO: 662502 - DNA, 646 bp, Homo sapiens
gaatctcagaaagtggtgaggtactgtaaaccatgaatgccttcatgaacatttgacaaatatctgaaataacagcttaatatcaataaaatcatagtyaaaattattatactctgaaaataacacattttaaaaagataagcttttttttttactattttattcagaaaattaatcagttatctgagggtacgttttgcatcttaaccccattggtggccgcatcaagaagttatcctgttcagctttgtgtctaagatgatttttctattctttggtactgtggatgattaagaagttaaaaggtgtttttaaataaaaaattagttaaatttaattcaacaaatgtcttttaaatgcctaatataggccacatcctttgctaggtaccagggattttacagtagaaaaaatagtcaaaatctctgccttcaggaagattacctgaagtttatggatacttatttaagtagtaattgaaacatatataattagactgtatgttacaaaacactctgacatcagaaattgtatctattatagataatcttggggttattctacttacttagtcttgtaaatatcctaattttaccttgaataaaattaaatcaatagaaaatcatacatagggacaatgttagtg

SEQ ID NO: 662503 - DNA, 577 bp, Homo sapiens
acagtgaataaattaatgcctataaaatgcctggaccagtgggtgatacaaacttaatagtatcttttttttctttttttttttttttgagatggagtctcgctctgtcrcccaggctggagtgcagtggtgcgatcttggttcactgcaagctccgcctccccgagtagctgagactacatggtatgtggcaccacgcccggctaattttttgtatttttagtagagatggggtttcactgtgttagccaggatggtcttgatctcctgaccttgtgattcgcctgcctcggcctcctgagagatttttctaatgtatgagaaggaccaggaaatatttttggtgggagaaaaccaaagctttaagaaaagccttatggagcctcatcatttaaaagtagataaataaattggcaaagaaaaaaggatgaaatatggagaccaaaagaatggacaaaaaggcctagagagaattatgttattgaagccaatggagaaaagattttctgagactgtttaacatgggcaaatgcacacacatgattcaactaaggttaaaaattaggagtgtctttgg

SEQ ID NO: 662504 - DNA, 591 bp, Homo sapiens
tcatcatttaaaagtagataaataaattggcaaagaaaaaaggatgaaatatggagaccaaaagaatggacaaaaaggcctagagagaattatgttattgaagccaayggagaaaagattttctgagactgtttaacatgggcaaatgcacacacatgattcaactaaggttaaaaattaggagtgtctttggatttgtcaacgttaatattttcagtgaagtgagcctattttcagcaagaggatcatgaccagtaggctgagaatgaatgaaggacaaagatgtgaaaatcctttctatgtggtgctatttcaggaagcttggcaatgtgagggaggagggagggacaagtgtgtctggagggataaggaaggctgaggaagtatttccgttattattattattggtaatttttgttgtttttagtgtgggagagacataaccatgcttgcaagggaagaggaaaatgagcttgaacatacatgaaagagaatatatgaagccagattcctgataagaaagaaagaagaattttctttgctttcagtgagagcagaaaaaaggcctggaatggctgcttttaggcaaag

SEQ ID NO: 662505 - DNA, 578 bp, Homo sapiens
actacaaattgaagagtttcttaatcagtccactgttcacttgattcccagacacagacaacatgagtttaattatccggagacatttcaaaggatgttgatgtttcatgatgggaaaacggctacttctacaaagaattgatctttctgaatagaaagaaggtcattcctgtgagcactgtatattttgccaacagaattagactggtcagttaagaagtatgccttaattattaagagcataggatcaggcagtctgagctctgagttcaaaatcctaaccttacccttaccaaccaagtgcctattgggtacagaatcataacacttcggtraaatgattcccgtgaacacaaaatatacggtactctcatgagcaccatatatttttccaacagaattagactggtcagttaggaattagactgttttaattgttaagagtacaggatcaggaagtctgagttctgagttcaaaatcctaaccttgcttttaccaaccaagtgcccattgagtacagaatcataacaattggatgaaatgattagcatgacagtgcctagatgatatggtgttg

SEQ ID NO: 662506 - DNA, 461 bp, Homo sapiens
gtggagtagtttgggaaatacaaaaataaataagacaaaatctcctttctgatttccatgataaatagggagagagatgaaaaaatataatttgaggcacatatatgagataagcccttttacagagggtcaaagkgctttggaaaagcagagcagaggataactactttcttttaagggtgctggagaaggtttcacaaaggaggtggtatctgaggtggctcattagcttatactctggaaggttctatgtataccagcagacataaattatttcagttctgaagaggtgcttttagattttccctcagctactttaaagtctttattgagaaactgcaataagcaaatatattctccgtagaacgaatccacccaaacaccttgagattctcattccacatatttcacacatgatatcttttaagtctgggaaagtagactaggaaatgtttcaaata

SEQ ID NO: 662507 - DNA, 578 bp, Homo sapiens
ttgttctccttctgtagcctcagttttctcatctataaaattaagacaatacctgccttkcaaggttttatgtggattagaaacaatatatttatgggccaggactttgtcttgttaactattatgtatttggctcctaaatcaatgcctggggcataaaaggtgttcaatgaatacccattaaatgagttttttaaaagtctaatgtagtatctaccaaaagtaaggactcaataagtgacagcaatggttatcatcatcatcatcactatgagattattgactttagcataaataacccaacgttccaatgaagtactaagtaagctgaatcacagtgctaccataccctgcatggaatggaaatacaaataaatttagccagaggcaatgcaaacctggaaagaacaaaggagaactttaacaactccaatgtgacacaaacactgaagttcattttaaattaacttttacttacttgacattgttgaatatggaaaaggctagaaaacattgtgccagatagggcaaaatgttcaaggtttgacagaacaactggaaataaaaaaacctaccac

SEQ ID NO: 662508 - DNA, 551 bp, Homo sapiens
agaaggccctgttttgttcctatgtcttctccaggaaatttgtgaactatctgataactaccaggtaatatgtaattatcattttcatgcatacagaatataattttagccagatgtaaaagatggaggagaaagaagaaaagacatgacctttgacttccaggagatttgtatgttagagagacagagcctgtgagaccaagtacaagagcgcacatacgccaccttaaatctttcttgaaaacagatggtgatgaatgaaattagttttaaaatagatggcacatatgtagtctaatatcctatgcagtgagaaaaaatatatactttaaaaaacttttgtctttttgtctttaatgtttttaatatactttaaatattcagataacactggatgcagtagtaataaaataaaaaccaacakaaagatttagatttcatttgaaaggcaggctcattcacattctaaaatatttaccaatactgctagtaatattatatactacaactaataataaagggaaaaataccattatactgtggtaccttct

SEQ ID NO: 662509 - DNA, 551 bp, Homo sapiens
agaaggccctgttttgttcctatgtcttctccaggaaatttgtgaactatctgataactaccaggtaatatgtaattatcattttcatgcatacagaatataattttagccagatgtaaaagatggaggagaaagaagaaaagacatgacctttgacttccaggagatttgtatgttagagagacagagcctgtgagaccaagtacaagagcgcacatacgccaccttaaatctttcttgaaaacagatggtgatgaatgaaattagttttaaaatagatggcacatatgtagtctaatatcctatgcagtgagaaaaaatatatactttaaaaaacttttgtctttttgtctttaatgtttttaatatactttaaatattcagataacactggatgcagtagtaataaaataaaaaccaacataaagatttagatttcatttgaaaggcaggctcattcamattctaaaatatttaccaatactgctagtaatattatatactacaactaataataaagggaaaaataccattatactgtggtaccttct

SEQ ID NO: 662510 - DNA, 546 bp, Homo sapiens
gtaactttttcccccggaaaaacagcaattatacctgcaggtcccaccagaacagacactgmgactatagatgctactcactcaccctgagatgaaaaaggaaaaagctttttccccagaagtctgctaaagagtgaatattgcatttgggcagacgggggtctcaggaaaagcaagaaacatgcagccagtgcacatggagataaaagagggggctggagtgccctggaaaaaaaaatcacccattaaaaaaggaagcctcagaagagataaaatctatcctacaaaaatttctggaaaatggactgacctgtcgttataagttcctatataacactcccatcctgcctgtaagaaagccacattccaatgaatatcgatttaagacctgagcgctattaatgaaatagtccaggatattcatccaatggtacctaacccatatattttactgctatacctggaaactacagatggttttcagtgttggatctaaaggatgcatttttctgcatcccaacaattgtttacttttgaatggcatga

SEQ ID NO: 662511 - DNA, 546 bp, Homo sapiens
gtaactttttcccccggaaaaacagcaattatacctgcaggtcccaccagaacagacactgagactatagatgctactcactcaccctgagatgaaaaaggaaaaagctttttccccagaagtctgctaaagagtgaatattgcatttgggcagacgggggtctcaggaaaagcaagaaacatgcagccagtgcacatggagataaaagagggggctggagtgccctggaaaaaaaaatcacccattaaaaaaggaagcctcagaagagataaaatctatcctacaaaaatttctggaaaatggactgacctgtcgttataagttcctatataacactcccatcctgcctgtaagaaagccacattccaatgaatatcgatttaagacctragcgctattaatgaaatagtccaggatattcatccaatggtacctaacccatatattttactgctatacctggaaactacagatggttttcagtgttggatctaaaggatgcatttttctgcatcccaacaattgtttacttttgaatggcatga

SEQ ID NO: 662512 - DNA, 546 bp, Homo sapiens
gtaactttttcccccggaaaaacagcaattatacctgcaggtcccaccagaacagacactgagactatagatgctactcactcaccctgagatgaaaaaggaaaaagctttttccccagaagtctgctaaagagtgaatattgcatttgggcagacgggggtctcaggaaaagcaagaaacatgcagccagtgcacatggagataaaagagggggctggagtgccctggaaaaaaaaatcacccattaaaaaaggaagcctcagaagagataaaatctatcctacaaaaatttctggaaaatggactgacctgtcgttataagttcctatataacactcccatcctgcctgtaagaaagccacattccaatgaatatcgatttaagacctgagcgctattaatgaaatagtccaggatattcatccaatggtacctaacccatatattttactgctatacctggaaactacagatggtttkcagtgttggatctaaaggatgcatttttctgcatcccaacaattgtttacttttgaatggcatga

SEQ ID NO: 662513 - DNA, 608 bp, Homo sapiens
tatttataaaggatgcctcgttccccactaaagtgcatttgttttgatagagggttttcactccacttggtcaaattacaaatatgttgttattaagaaatttcataactatgtttatgtaaaatgtggttttaaatgtaatttttgagagaatttatttaaaagkgaaaaacatgcttatatgtgaaaagtgggtaatataaacatgttgcttgtttttgagagaaagtctgtggaagaactaatgagaatctaggctaaggctcctataaacttcaatctctagtgagagttttatcataaagtccaggcagctgtgctgtcattgaacattgagcatcagtatccccatatctctaaaggggaatgctaagctgagttttctgcagaccacgaccaccagcttttgaggtaactttagcctccttatgcagaaatgaggaagaaaatcttgtaggtgaggatcaatgatgcactagctgggcatcagtggcagcctgacagtaagacactgattgttcctcttaagttggtgtatgtctgtcactattaccctacacattagcttgctccctgctagcttattgacagaaacaaatgtaaatgct

SEQ ID NO: 662514 - DNA, 608 bp, Homo sapiens
tatttataaaggatgcctcgttccccactaaagtgcatttgttttgatagagggttttcactccacttggtcaaattacaaatatgttgttattaagaaatttcataactatgtttatgtaaaatgtggttttaaatgtaatttttgagagaatttatttaaaagggaaaaacatgcttatatgtgaaaagtgggtaatataaacatgttgcttgtttttgagagaaagtctgtggaagaactaatgagaatctaggctaaggctcctataaacttcaatctctagtgagagttttatcataaagtccaggcagctgtgctgtcattgaacattgagcatcagtatccccatatctctaaaggggaatgctaagctgagttttctgcagaccacgaccaccagcttttgaggtaactttagcctccttatgcagaaatgaggaagaaaatcttgtaggtgaggatcaatgatgcactagctgggcatcagtggcagcctgacagtaagacactgattgttcctcttaagttggtgtatgtctgtcactattaccctacacattagcttgctccctgctascttattgacagaaacaaatgtaaatgct

SEQ ID NO: 662515 - DNA, 529 bp, Homo sapiens
cagctgttactcagctctaattgatacaacaccaatggtgcaccaaccaccatcatgtgatttttaaagataagacagtaatgaaaacttttagtgaactattccaatgtcaaactttatcttccaaaccaaacatcataaatagcaytgtgtatgctgaaaagaagcactgtttagccaagtacctgccctggggctgcagtctatgtcttttgcctcatactatagacacttaagtgcaaatgtttctagccagtgtggctgtcagcatcacagaggggatactctacgtatcattcacctttacattctcatcacctacaaaaatgatctccacacaatatacatgaaaaaataaacttgcctcatgataaagctgctaatgaatgtcggccagaacaggacttcaaggcagagcaatattagctgcgcattgagtcctcaccaggtcaccattgtgtccacatttacctaaggaccccagtgataaaattattgcatttctaaatgacaggaaaattggacggta

SEQ ID NO: 662516 - DNA, 543 bp, Homo sapiens
acaagggagccgatgacatagatgtcaacccaagtgtgggaacgatgacacaagatgtcctagcttaggaagtgaggcaagaaaaatgatgaattcctcctttctccacttttcattctattctggcccttaacagattggatgatccccatccagactagcaatgcaaactactttacttaatcaaccaattcagctgctagtcttatagaaacaccctctcagacacacccagaaatcattaattatttaattaattattaatctgggcacccacaggcccaggcaacttgaaatataaaattcaccatcatgatgacctatggtttccmaggtgcaccagtagatgttaccaaaatggcaccaccagccagaacccacatacattcaccaggtcagtgcacttctcaattcgccggagattcattttcttctgtgacatcacgttcacctggagtggagccaagaaccaggccacagctaataatgagaaagaaaggattctttatttgcttttttacaaatgagagaaaaatttgccaa

SEQ ID NO: 662517 - DNA, 611 bp, Homo sapiens
cattcaaacaaaggagatgtaatcaagtaaaactaaaagaaccataacaaggcagcactggatgacctggaaggctgagggtcactcagctcgccacccctcaccccccagctgggaatcagagagtgatggagctatccctcactccacctcctgctctcttccttctscagtccagccacctggtcacagagtgaggctctaaactggcccgtattacatgtgtctgtccctccccttctcactttggaggaagagtgtgactatcccaagtcagcacgtagagtgagacagagcgtgagacctgctagctgaggaaccgtaagaaccttgtgctttgaaagccgatctgctttgtgatattgaaatcctccgagtccattctctcattattacaggaaaggtgtgtaaaatatccaggtcatgtcactacaggacaaaagctctggatgttcagccataatcaaagctcttgagatccagcaatttccttgaacaatttttctaccacacacacttctcaaaatatagtgcatacccatatttaggattgtggtagagggccattacatgatcttgactgtatcaataaaagtctcagggcaaaactc

SEQ ID NO: 662518 - DNA, 584 bp, Homo sapiens
ttgttatttcatacacacacacacacaaattaccacattaaatttctcctacaaaccaatgtatgtgttgttgttttttacagattataaaacagaggcatagagaggacgaataaccgtgcaacttttttttatttgtttgttttttttaagagacagagtgttgctctgtctcccaggctggagggcaggggaatgatatcagctcactgcagcctctgactcctgggttcaagagatcctcctacctcagcctcctgagtagctgggattacaggtgcaagtcaccatgcctgactaatttttgtgtttttggtagagatggggtttcatcatgttgggcaggctggtttcgagstactcgcctgaagtgatccctctgtctaggcctcccaaagtgctgggattacaggcttgagccaccacgcttggccctggactactgttatagtaagagtgtcaaatagaaaaagtcagagctggtatctggacaagactatacaaaatctacacctgacatcactgtgacacaaaacttatataataactgcatttacagagacactaacctatataataattca

SEQ ID NO: 662519 - DNA, 480 bp, Homo sapiens
gcagaggatctaattgagctcattaacacaagccacctgtggatggctaaactgaaagaatgcactgcaacacatgcacactggggcctcaagagctgtaaacactgaaccctagacactgctgtggggtcagagccccacaacctgcccgtctgcatgctcctcctagggtatgagcagcagggtaccaaagaagtgagccctgggagggggataagggaacttttcccatttcaatttgatatgtgaagaatcaataccatttcaaggcagttattattatcagttcataggtgaagaaactgaggttcagaatcttccccaaataacaaaattagtaaagggyctacctgtgatttgaaatcagatctagttgaattaaaaactcagacttttccttcatttataacaaaaagtgccaacgaagaaaaatctctcacacaaatcttggaagggaaacattcagcaacataactgcct

SEQ ID NO: 662520 - DNA, 543 bp, Homo sapiens
ggtttagcaatgttgttgatcttctcaacgaaacaggatttggttttattaaattcctctctcatttttctgttttttatttcattgatttctgccctgacctttattgatttctttctgcttcctttgggttaaattttatctttttctattttcttaaggaggatcctaagatcataatttgagattcttccacttttctaatataggtatttagcgataaaaccttttaacctaagtaacaaacagagagagggtctttaaaagaaaaaggtatttatttgggaataaagtattgcaatgggaatacacgtgccatagtaaactatgtgcatattcagggaggtaaaggragacaaaggttttcaaaagaaaaacgaagaggattacaaaattgttttgaaatgattatccttggctacaaagatcactaacaaggatgacaccaatttgaggttggataggcagttgttgagtaaaaatccttgcagaaatatttttagatgatgttgcaatggcctttatgcaagatggtggtttttg

SEQ ID NO: 662521 - DNA, 583 bp, Homo sapiens
caagctgaccacgaaaaagtcagaaagagtatctaggacttaccaacatttatctacctagacgtatcctcctaaaattagaatcagcaaatgataccagtaatatttattattatttgatattgtttcggaagtcctggccaaatcaataagatatgagagaaaatggtggttagggaatctgaaaagaaagaaactactgtmgcattttctgtaagtaattaagtaggagaaaaaacatagatcatttttaagcttctagagttatagcaagagtatagaaatgaccagacacagaggtccatatatgattatctttttgaaaatagttctatatttgaagtagttatatatcaattagacgattgtgttatgaagaaaaggaggataaagacacacacaaaaaaaactaatgtgacctatgttataaaaataacattttatttggaaattgttaatgtttgaaagcagacaaaataaggatagcaacacaaaatgccttctgacttagtgtgataatattcacaatatagcatttacctggtgaattattcatcacatatcatggtgcttaggtttgctg

SEQ ID NO: 662522 - DNA, 525 bp, Homo sapiens
tgattaactctttctagaaaaagcctaaaggcaaagaaaaaagtcaaaattgactgagttttaggtcaatgtatccagtaatattctgggatgaagtcaagataggaaaattgtgaagatgagttcatgagagaaaggtaaaatgtgtttatttagtatatgcaaataaaaatgtctaatacgtagttaaaatataggattggctcgttctttttcatggtatttcagagggaagtacctcttcagagtgaacatgaatgtttccctctcagtcactagctgctagaaacgcactgaaatggacagtgaacacaaacatcataccttttatgagaagmgtatggccatagaagttgctgttaatgctgactgcagagtgaaaagcttatgtcatctgaatcagtgatgggaactgcaaacaaagtttccccatgaagcagaatgtcttgacccatggctgtgtttgctgctactaagtaaggagtgttcctatcacatggcaaggtgaactggagaaagtacaaa

SEQ ID NO: 662523 - DNA, 525 bp, Homo sapiens
tgattaactctttctagaaaaagcctaaaggcaaagaaaaaagtcaaaattgactgagttttaggtcaatgtatccagtaatattctgggatgaagtcaagataggaaaattgtgaagatgagttcatgagagaaaggtaaaatgtgtttatttagtatatgcaaataaaaatgtctaatacgtagttaaaatataggattggctcgttctttttcatggtatttcagagggaagtacctcttcagagtgaacatgaatgtttccctctcagtcactagctgctagaaacgcactgaaatggacagtgaacacaaacatcataccttttatgagaagcgtatggccatagaagttgctgttaatgctgactgcagagtgraaagcttatgtcatctgaatcagtgatgggaactgcaaacaaagtttccccatgaagcagaatgtcttgacccatggctgtgtttgctgctactaagtaaggagtgttcctatcacatggcaaggtgaactggagaaagtacaaa

SEQ ID NO: 662524 - DNA, 556 bp, Homo sapiens
aagaatgggaaaagaggttaatggcacatataagagaggattatctttcagtaagcttttacaagttaataagaaaaagacaaagactatgayacaggaacttcacagtggtataaataaaaatgaccaataacaccatgaaaagatgttcagtcccctagcagccaagggtatgcatattgaaagcattttatacctttcaagttagcaaaacaaaaatgtaatttgatactgtatagacaagttcaagtggccatatgtcacttgaactaggcttgcttgagtagcatttcttggggaatactcaggtggcaggagcaatagcaggggctgtggggcactacacagcagcctagtagagcttaactctcaggtctgggaaaagactcagatctttgggctgtgatgcttttatgttgcgggattagggaaacatcaacttcatcccaggatgcggggcaggtgggcattaaatgccaggattcaacagcaaggtgatatggagaaccattgttagagctttaagctgatagtttggtgttcttgtttgggaata

SEQ ID NO: 662525 - DNA, 564 bp, Homo sapiens
atgcaattctcttaacatcatttagggaaaattctgtactttctccatgaaattgcctttgtacctttgctaaaaatcaattggtcaaatgtgtgtctrctgttgactctcaattccgttctgttgatattcatgcctgccctttcaccaataccacactgctttggttacaatagttttatagtaagccttaaatcagcttaggtgagtcttccaaactcttcctcttcaaaattgttttggctattctagttcctttgactttccatgagaaatgtagaatcagattgttaatttctacaaaaaaatactgctggaacttagattggaattgtgtaaaatctatgtaacataatttttcggacataaagaaacttctgcaaagcacaactaaaaatcctaagaggcatcctaaaatcaattcatatgagctaacattcctgtttgtgaacttggcatttgatagttatgtgacatctctcttttaaaatggtacccattagataaagcattggagaaaatattgagattacaaaacctgtttattggcccaatacactatgt

SEQ ID NO: 662526 - DNA, 581 bp, Homo sapiens
attcatcccctctgtaggaacaccaaattttggtaactacacaaaaaaatcaccatcacaggaascaaaaatcatgtgagcaatcatagtacctggttttaacttcataccacggaaagagtcattgaagagggcaggaaagacaatcttgaagtaccaatgacacccctcccccatatcccatgcagcatggagaatctgtgcacttaggaggaaaagactgcagcaattgtgaggctttgcattgaacccagtgctgtcctgcagaaggcagaatcagtctgtactcagctaatgttcaccacagagggagcatttggactgggcctagccagcaggaaatcgtccatcccagtggtcagagattgagtttcagcaagccttgctactgtgggctagagtgctctggggccctaagtgaacttgaagggcagtctaggtcacaagaacttcaatatctaggaaagtcctagtgctgagctgggcttagagccagcggactcgggggcatgagacctactgagataccagccaggttggcttacatcacccatggtgcactgctggcagcagcagcatgg

SEQ ID NO: 662527 - DNA, 539 bp, Homo sapiens
gcttaattgactcacagttctggagactgtacaggaagcatgtctgaggaggtctcaggaaagttacaataatggcagaaggtgaaggggaagcaggcaagtcttacgtggcgagagcaggaggaagagcgtaggggaggtgccacacacttttaaacaagcagatcttatgacaactcattcactatcacaagaaacacaccaaaggggaaattcatcctcatgatccaatcacctcccaccaggacccatctccaacatttgggattataatttgatgtgagatttggrcagggaaacagacccaaaccatatcagcagtactagaagggaaatttatagctataagtgcctacatccaaaaagaagacaaacttctaataaataaactaatgatgcatcttaaggaactagaaaagaaagaacaaaccaaatgcaaaattactagaagaaaaatgataaagatcagaacagaaatacatgaatttgaaatgaagaaaacaatgtaagagtcaagaaaatgaaaagttggcattttg

SEQ ID NO: 662528 - DNA, 587 bp, Homo sapiens
atgtaagagtcaagaaaatgaaaagttggcattttgtagagataaagaaaattgacaaatctttaaccagactaagaaaaaaagaaagaagccccaaataaataaaatcagagatgaaaaaggagacattacaactgatactacagaaattcaaaggatcattaggagctactatgaccactatatgctaaaaaattggaaaagctagagaaaatgaacaaattcccagacacatgcaacctagcaagattgaccatgaagcaatccaaaatctgaacagacctaccaagattgaccatgaagcaatccaaaatctgaacagaccaataacaagtaatgagatygaaaccataataaaaattctcccagtaaagaaaagcccaagacctgatggcttcattgctgaattctaataaacatttaaagaactaataccaatcctactcaaactattcaaagaaatagaggaggaggcaatacttccaagctcattctatgaggccagtattaccttgatatcaaaatcaaagatacattaaaaaaattacaggccaatatctctgatttgatattgatgcaaaaatcat

SEQ ID NO: 662529 - DNA, 617 bp, Homo sapiens
gaccattctgaaaaactgagggcccttaagaattacattaaatcagttcagcctgagttctataaatggaacaacaaagcctgagtgacatcacatctctttacagaatgttttactgaatagcttaagcccactgttgagacctactgctcagacgaaaaggttcctttcaaaatattattgctcagtgaaaatgcacctgatcatgcaagagctctgacagagatatacaaaaagattaatgttgtttccatgcctactaacacaacatctattctgctgtcaaggaattatttcaactttcaagtcttatttaagaaatacatttcataaggctatagctgccatacacagtgattcctctggtggatctgggcaaataaaattwaaaaccttctggaaaggattcaccattccagaggccatcagaaacattcaggattcataggagaaggtcaaaatatcaacatcaacatgagtttgaaagtcaattccaacacttatggatgacctgaaggggttggagacttcagtggaggaagtaactgcagatgtagtggaaatagaaagagaactggaattagaggtagagcctgaagatggaactggattgctgc

SEQ ID NO: 662530 - DNA, 619 bp, Homo sapiens
aaaactatttttaaatccacaattaaaatcaagtatatatctatgagttttatatcacattctgatgcactggagaacaccaaacccctttgtttgggctcctccttcatttttgtgcagactttaaaataaaactcctccttccccccaccaaccctgcacatacttgagtattagaaatgtgtcatcacctgggagaattatagttctgcattgttttttaaaatttaaatccagattgatgtatgttgatttctgcaaaatttaggkagtgctcattggtcacaaggacactatgcatgctaattggaagttttctgcatgcgcctgtccattctttatagttttcctgcattcttctgggtatcatctttcatgttgactgctggaagttgttaaagcagtgaccaagacttatactgaggccttaagttgttcataggtctccatccgagctctgagctccaaacaagatgctcaggtgagcaacagtcatttgagcagtaataaattcatcacatactacattgtcacataggtagcttggtatgaattaggaattctgagcaccttcagtcatacatttatattcagaatagtaatgtcaatcacttttgta

SEQ ID NO: 662531 - DNA, 619 bp, Homo sapiens
aaaactatttttaaatccacaattaaaatcaagtatatatctatgagttttatatcacattctgatgcactggagaacaccaaacccctttgtttgggctcctccttcatttttgtgcagactttaaaataaaactcctccttccccccaccaaccctgcacatacttgagtattagaaatgtgtcatcacctgggagaattatagttctgcattgttttttaaaatttaaatccagattgatgtatgttgatttctgcaaaatttaggtagtgctcattggtcacaaggacactatgcatgctaattggaagttttctgcatgcgcctgtccattctttatagttttcctgcattcttctgggtatcatctttcatgttgactgctggaagttgttaaagcagtgaccaagacttatactgaggccttaagttgttcataggtctccatcmgagctctgagctccaaacaagatgctcaggtgagcaacagtcatttgagcagtaataaattcatcacatactacattgtcacataggtagcttggtatgaattaggaattctgagcaccttcagtcatacatttatattcagaatagtaatgtcaatcacttttgta

SEQ ID NO: 662532 - DNA, 510 bp, Homo sapiens
gagacctcccagcagggactgacagacacctcatacaggagagctccagctggcatcagcctggtgtccctctgggacgaagcttccagaggaagaagcaggcagcaatcttggctgttctgcagcctccactggtgatacccaggcaaagagggtctgaagtggacctctagtaaactgcagcaaacctgtagaagagaggcccgactgttagaagaaaaactaataaacagaaagcaacaacatcaacgtcaacaaaamtgacccctacacaaaaagcccatcgaaaggtcatcagcctcaaagatcaaaggtaggtaaatccacgaggatgaggaaaaaccagtgcaaaaaggctgaaaattccgaaaaacagaatgcctcttctccaaatgatcgcaactcctctccagcaagggcacaaaactggatggagaatgagattgacaaattgacagaagtaggcttcagaaggtgggtaataacaaactcctttgagctaaaggagca

SEQ ID NO: 662533 - DNA, 572 bp, Homo sapiens
agctgcacctgttgggaaatgctcttgacaccactcaaaactgccttatggattaccaataaacaagttacagcaatatgttcaaactcaacatatgtggcttccaatatccagagatccacaaaattgtgcctatttctttgtggtgggcattacaatgtgtgcctcattttagaatgggcatcacaacaagctctagactgtatagatgcctagaagcttcactgaaagatgaataatatatatattacttgccttttyctcactaaggcacatatatatatatacatatacgtatacatgtatatatttgacttgtctttggaaagtgtatgaatatgatacctattcactttgaatgtggagagatgagatcatggtttatattctgtaatagaatcacttatttgcattttaatgatatgccatggaaaggctgtaattctaacattagcaaaaatgcattaatgtaaaatggcaacattagcctgagatttaagcaacaatgagtatgcattcacattattcaaaatgtgtgaagtgtgtgtgtgtgagtgtgtgtggtccctttg

SEQ ID NO: 662534 - DNA, 529 bp, Homo sapiens
tgtttagatggattgtgaagcatattgggctcatttattcactcatcaaaaatttagtgagaatatgttatgagccagtactatgaaaaggacttggaatgacaaagtagaccctgcttcattgagcatataaatgaaaggagaaaaagaaccatgggcatgtggggagaagacatgtttacaattcgtttaccagctatgcgttaagaaatgcggacgtattgagggtttgcaaccgagtagtgacctgaatataactgcatgtcatggaaatcattcagttattgagaaaaatgtattgctctgggaaaagaacagasgccaagagatctacaaaagactgttgtaataatctgggaagaaattatgaggtctatcattagaggaaaagcagtgggaatggagaagaattgtcagagtaaaattgtattccagaagcaaaattgattgagttctgtatttaactgggcacagagagtgaagatgttgcagaagcctctgattattttagcttaggttattaccgatt

SEQ ID NO: 662535 - DNA, 630 bp, Homo sapiens
aattcagtttgagtccaaagtcctgaaaaccatgaaagccgatgctgcaacttccagtctgaggctaaaggactgagaaccatatgtgtgaggaggaaatgctggtgttagtcctggagtctgaacaccaagaaccaggagctgcaatgtccaatggccgaagaagatgaatgtcccagctcaaagagaggaaaaaaaaaacacaacaaaactgcccttccttcaactttttgttctattctagccctcaatggattgtatcatactcacccaaattggtgagaacatatctttttacttagtgtatgggtttaaatgctaatctgtacctaccctcacagacacactcagaaataaagttttgccagcaatctgagcattccttaacccagtcaagttggcatataaaatcaatcatcacaactagtttcataaaataaactgggaattgtcccattttctcctattttctggaggaattttgtgtagaattggtgttaattcccctctaattcaagagtttggcagaattytccagcgaaatcatatgggcatgaaggtttcttttttggtagttttaaaattataaattccatttccttaatagtgtaaactaaaaataaaatctta

SEQ ID NO: 662536 - DNA, 543 bp, Homo sapiens
ttatttgtgacaataagatacgaaattacaaagaggacctaaagccatgttaggcaaggattaagtcaggcctgcacggcaggccatcagttttgctaaacaagtcattttattgtggctgactctgagagggcatagtatcctaacttatatactccttttggctgactccaagtttcagacagagccttactctttaactaactgcaaagtaaagaatctctgaatccacctatgactggtaaatccctgcttcaaaatatcccaactgtttgggccaaactgatgtataccttccgtgtattaacttatgtctttgtctgtaactcctgcatgtctaaaatacataaaaccaaatgtaatccaaccatcttagggccacttactcaaggcttcktgggtttgtgtttttcccaggccatggtcactcatgttggctcagaataaacctcttaaaatattatacagagtttgatttttccgttaacaatagagatatgcaaattatctatttcatattatctatcaaataatctgtttgtg

SEQ ID NO: 662537 - DNA, 562 bp, Homo sapiens
acacaaaaacttacttaaaaacaccctaacccttacaatcacaagggctctggaaaatgctcttgtggttagtacacagtaagtatccaaacacaacaagtaatacaaaatgatgtgaatttattgtctagagggcctatatgaaataaggatgttaaaattacattaaaaataacttctgtttttatgtacctttttaagaaaaattttaattgactgttttatttatggtagaatcactttgttcttcattttaaaagtgagaaactataggcccaaagaaatgtattggaatatctaaggtcatatagcttgtgacagcagaaatccatcttaatttttggtggttgtcatacttgcagtgattcctgcagatgtgggtattttccttttcataatatagagtgaatttgtctgggggtcatctattaaaggtgagtgtagtcagcaagtggagggaatcttgccacctggttggaggcctagaagagtttgcggaatgaaaaggagaatwccccccaaattaccgggatatcatgcctatgcttttgaagactgttga

SEQ ID NO: 662538 - DNA, 628 bp, Homo sapiens
agatgtgggtattttccttttcataatatagagtgaatttgtctgggggtcatctattaaaggtgagtgtagtcagcaagtggagggaatcttgccacctggttggaggcctagaagagtttgcggaatgaaaaggagaataccccccaaattaccgggatatcatgcctatgcttttgaagactgttgaatattgtgatggtcagtaaacttttgactgggctaggacaggtaatacatttgccaagtgataatagggatagatacaaagattacttaaatgcctaaacaactatatctatgtgatttttgtgycccaaatttacctttaaaatctgtacagttgaattaaaaactgttgtactgttactgagaacattgctatgtgtttgcattgtggtaaagtagccatttattccacttttggggggatatttattttaattcttacacagttcttggaagtagtgttttgactcattgccacctggtttcccaaagaataaaatatctgattggttgttttggatagctataactgctaagctcttttagctgattaaggaattttctcatgtggtaacattcctatcttttgggatgttacatacactgcttaagggcaaga

SEQ ID NO: 662539 - DNA, 573 bp, Homo sapiens
gttcatttatcccagtgtgccatacagatattataattttctaagtgtaccataacttgaaagaggttggaaaacactcttctaagataccaattccttgtttgctttagatgtttcaaatatcttatttttattttgtaatttctctgccaatacctgttttgtaggtactctgagaatatctccaatttttttctacttcactctcacagtccctctgtgagacttgtggagaatggctattgcctccccatgaatgtaaagctaaacccagagccctggaaagatggcctttccaaagtatttaaaaagggttatctttcttagtctcttttccttcttatctagttycaatgaaaactctgacaactcatccttagatgaaggaataaaatatatgggtaactttaaatgtgtacttgcctcccacctccacaaaataactgggaagctctgtgaccagatagctccaaataaatcagaggaaataatttttaaaagaaaattgactaatatgatctactgtaaaatagacaattaaagaaatctgatgtcctctaatcttgtagtagc

SEQ ID NO: 662540 - DNA, 572 bp, Homo sapiens
taaattggtgattgagtctgagcttgtcattttctctccttaaggcattaatggcacttaacaacagctaccaaataccacaaattatatagttattatttaccctgaaactcgtaagcatcaggaacatgacacaacctaagtccatctgtatctcatccaagatcactagagatgaaactctgagcatttgtattgctatagcaggtcaggaatgatcaatacactaccaaccaccagcaatcgagtctctattgctatcckgatggtgaatgatttaactctagagtcccatttgtaaagatgactttctagaatcatccctggcaccaactgtcttagattgggtttcctaaaagcagagtcagagacagggatttatgtgcaaatgatttaatgaggaagttctctcaggatagctcttacattagtaaggaaagcagaatagggcaggggatgaagcatctcctgcaaagatgtagcagaaagtctagcctcagcctgatcctgctttgagctcagtgtgcatggcacactgagtcgtccaccctggggcaagaggatgatgtttt

SEQ ID NO: 662541 - DNA, 553 bp, Homo sapiens
tgaattcatttcaaaaccaaatataaattatttaaattttaaattgtaaatgcctgtgtatctctggtgtagtgtgtaggtaatcaagaattgacaccacaataaggccagcgtttgaaattagaagaggagcaaagattttctttagaacctgmcaaccaggatctagtgttgtgcagccaggagtcatgggttattaagtgaaatcaaaatcacatcaggcctaggagcaccttaacaagcattagtgtttcatttaaagggagtgtcttgtttctgaaatattcatagctggaatccaccaccactgctgcgatttacatctccctctccccattatgctcactgaatctctttacttgctattgtaggaaaaatattcaaagatttataggcagcaaagagaaggcagcaaattatgacatccattattggcatctgctcttgtctgtatccccaggaaatgcaaatacaaatgacttccaattttctactacaactgagttgcaaagggaactgttatatgcagatgaggcaacttctatttggacag

SEQ ID NO: 662542 - DNA, 579 bp, Homo sapiens
tcactatggtaccattatcctgtccctgggtaatcattaggcatcagcctgccaaagtgaagggcggcaaattactcatttattgttacctgagctgtgcagaagattgaaatctggactactaatgattttttttcaccttgtttaggagattctgtagaaaagttcacatgtagcacacatgctggcttgctggcraaagtgcttttagacaaatatgaaagggaagcaaagcatcaccttccttcaaaagtaaagctgaaaagctcctatcatttcatgaaagcagttctaagggagaaatactaagagtcatcaagatctataactgaagaggaaactagttagttgactgtgagtagatttttatctgctctaaagagatcagacactcagtacatgttgaatttaacacaaatcaagcttaaggtaaatatttaccaacagtttgtagggaaaaaattcttatttaatgacatcatctaatgaattagattttttttttgtgcactgtttttgcaagtttcaaattcaataaagcctccaagtctaggtgcagtgaaagacaatcaaaccatt

SEQ ID NO: 662543 - DNA, 469 bp, Homo sapiens
gactttttaataatcaccattctgatgggtgtgagacagtgtctcattgtgtgtgtgtttttttgtttttgtttttgcttttttttttagatggagtttcactctgttgctcacactggagtgtagtggtgtgatctcagctcactgcagtctccaccttctgtgttcaagtgattctctagcctcagcttcctgggtagctaggattacaggtgcccaccacaatgcctggctaatttttgtgtttttagtagagacggagttttgccatgttcgccaggttggtctcaaactcttgacctcaagtgattygatcaccttggcatcccaaagtgctgggattacaggcatgagccaccgcgcccggccctcattgtggttttgatttgcatttctctaatgatcagtgatgttgagctttcttcataggtttgttggctgcctgaatgttttcttctgagaagtgtct

SEQ ID NO: 662544 - DNA, 387 bp, Homo sapiens
atccatgcttgagtgtgtaatagacatttcacactcaccatgtccaaagctgatattatcttgcaccaaacctctcttcttttagccctgtctatctttggtgatggcaactccattcttttagcactaatgctaaaaatggtatagtcttcattgaattctctcttctcacaccccacatccaatccacaaagaaggtgtgttgttcaaaatataatgaakttccaaagtacaaataaaatccaaccactttcttcatctccactgatatatccccataaacccactattacgtcttacctgggcatgataaattcgctatcatgtctcacctggattatcactgtaatattcttctaactggtctgcttctacctttgtcctcct

SEQ ID NO: 662545 - DNA, 544 bp, Homo sapiens
aatagctgggacttaattaaattgctactctgtttgaaataatctgccttgcactctttgctgacagctgtaggtgatagaattggcatgaacaggatcatgggacatagggagctttttcctcaccaaaaaggggaaacttgaatgctgatgggactgctggaaaagatcccttcactatcaacaagtagccacctgcaatttttagtgtccctgcaatgggtaggtctttctctggcrtctctgagcacctcaccttccccaccctgcctcaggcaatgctttcctctccctctctctctgtgtgcaaactggttgaatggtaaaaatcactgtttatctcctctgcaaagttttaattaattggaaaaaggatttgcgaaactagtcttaagctataacaaatctgttgtactttgtgctattgtattagtccattttcacgctgctgataaagacatacttgagactcggaagaaaaagagcacttacagttccacatggctgggaaagcctcagaatcatgacagaaggtgaaaggtac

SEQ ID NO: 662546 - DNA, 407 bp, Homo sapiens
ttctttttaatgccttcctaaaagagtgaccaacacatgggtgatattcaacaaatgattgaaaaagaaaaaacaagaaaaagaaaaatgctgtttataatcaggttcaggggagactatgagaatataaataagacataagaacatcttgttataagagaagttcatataaaatacatttcaggcacagactagacactcaataaatattgcctgaaaatgaatacaaagaaagaactcaaaataagaggctttggggaatcattatatatatataattataagggaattggtttttttggtctctaactttctaactttctaagagtaayaactggaaaatttagaaaataaaagtatgaaaaaaatataaatcataccacttaaaatttaggcatacttcttaa

SEQ ID NO: 662547 - DNA, 556 bp, Homo sapiens
ccttgagcccatgagttcatgaccagtctgggcaacatagtgagaccttgtctctataaaaaatgtacatatatgtaaatgaagttaaaaaaatatttctgggttctcggctgggcatgaaatattatattatattatattatattattacaataccattttataatataatgcaatataatataataatacaatattgtattgtaaaactatatatagtacaatatcacagtcaggatattgatactgtggctcatgcctatagtcccagcactatgggatgcyaaggtgagtagatcacttgagccctggagtttgagaccagcctgggtaacatgacaaaaccccatttctacaaaaaattcaaaatttagctgagcatggtggtgtcagtggaggcctagtgggttgctggaactctcacccccacacagtagagatacagagcaccctaccttggtgtcagaggaggctcacctttaccccatctgttagtcacaaggcagtgcccccttctactgctggggtagtgtcacacacacacacatacacacac

SEQ ID NO: 662548 - DNA, 556 bp, Homo sapiens
ccttgagcccatgagttcatgaccagtctgggcaacatagtgagaccttgtctctataaaaaatgtacatatatgtaaatgaagttaaaaaaatatttctgggttctcggctgggcatgaaatattatattatattatattatattattacaataccattttataatataatgcaatataatataataatacaatattgtattgtaaaactatatatagtacaatatcacagtcaggatattgatactgtggctcatgcctatagtcccagcactatgggatgctaaggtgagtagatcacttgagccctggartttgagaccagcctgggtaacatgacaaaaccccatttctacaaaaaattcaaaatttagctgagcatggtggtgtcagtggaggcctagtgggttgctggaactctcacccccacacagtagagatacagagcaccctaccttggtgtcagaggaggctcacctttaccccatctgttagtcacaaggcagtgcccccttctactgctggggtagtgtcacacacacacacatacacacac

SEQ ID NO: 662549 - DNA, 556 bp, Homo sapiens
ccttgagcccatgagttcatgaccagtctgggcaacatagtgagaccttgtctctataaaaaatgtacatatatgtaaatgaagttaaaaaaatatttctgggttctcggctgggcatgaaatattatattatattatattatattattacaataccattttataatataatgcaatataatataataatacaatattgtattgtaaaactatatatagtacaatatcacagtcaggatattgatactgtggctcatgcctatagtcccagcactatgggatgctaaggtgagtagatcacttgagccctggagtttgagaccagcctgggtaacatgacaaaaccccatttctacaaaaaattcaaaatttagctgagcatggtggtgtcagtggaggcctagtgggttgctggaactctcacccccacacagtagagatacagagcaccctrccttggtgtcagaggaggctcacctttaccccatctgttagtcacaaggcagtgcccccttctactgctggggtagtgtcacacacacacacatacacacac

SEQ ID NO: 662550 - DNA, 556 bp, Homo sapiens
ccttgagcccatgagttcatgaccagtctgggcaacatagtgagaccttgtctctataaaaaatgtacatatatgtaaatgaagttaaaaaaatatttctgggttctcggctgggcatgaaatattatattatattatattatattattacaataccattttataatataatgcaatataatataataatacaatattgtattgtaaaactatatatagtacaatatcacagtcaggatattgatactgtggctcatgcctatagtcccagcactatgggatgctaaggtgagtagatcacttgagccctggagtttgagaccagcctgggtaacatgacaaaaccccatttctacaaaaaattcaaaatttagctgagcatggtggtgtcagtggaggcctagtgggttgctggaactctcacccccacacagtagagatacagagcaccctaccttggtgtcagaggaggctcacctttaccycatctgttagtcacaaggcagtgcccccttctactgctggggtagtgtcacacacacacacatacacacac

SEQ ID NO: 662551 - DNA, 523 bp, Homo sapiens
ataatttgagtaattgtgaagcccttgcttgctatggtttgccaggcataagtggtcatctgttcactcattaagtrtgtaagcaactcagtcccagaatcccaccactatattctatgccttagggacactgtaggtaaaaacactatatcagttttggaccatgcaggaaacgtaattcctctcaggtgttttacctgaagaagctttacaaggggactatttgcagagggcagacatagttaaagggagcaacagtgatagtaaaatatccagagactagcaatggaagaaagatgttacagtctctttgcttagaggggggataagatagatagatggcattactaaagcccagtcaaagctggaatggagtagggaccaccctttaagaggtgtaatctaggaagctcacagccaccacaaaaccacaccaccaaagcaagaagaaagaggatgaaaactaccttaacttctgtctccttctcctttcttaactcctgctgctgcatttcatttgcca

SEQ ID NO: 662552 - DNA, 523 bp, Homo sapiens
ataatttgagtaattgtgaagcccttgcttgctatggtttgccaggcataagtggtcatctgttcactcattaagtgtgtaagcaactcagtcccagaatcccaccactatattctatgccttagggacactgtaggtaaaaacactatatcagttttggaccatgcaggaaacgtaattcctctcaggtgttttacctgaagaagctttacarggggactatttgcagagggcagacatagttaaagggagcaacagtgatagtaaaatatccagagactagcaatggaagaaagatgttacagtctctttgcttagaggggggataagatagatagatggcattactaaagcccagtcaaagctggaatggagtagggaccaccctttaagaggtgtaatctaggaagctcacagccaccacaaaaccacaccaccaaagcaagaagaaagaggatgaaaactaccttaacttctgtctccttctcctttcttaactcctgctgctgcatttcatttgcca

SEQ ID NO: 662553 - DNA, 661 bp, Homo sapiens
caaaaattttatacaatagtttcacagtaaacattaaagcataggtgcatggtctatttatgataaactttctataaaataatttgaattatgactgaaatttggcaactgtgttctctggttaagagatagtttaaaaactcaaacagtgtatttgttagctatgtacatcagtttgtttggcaaacatcggatgtttgatttaataccaagtctcttctgtttaatctccagttgttcaggccttgtttgaagatacagatatagagaagactgtagtgcttcccgggtacagcagcttcctcatcacaagcattttagataataagaatgcattagccattgctaccatgcctgaaagtgcacccaacaatatgacctttctaaagagcacatggttcttatacaactttgggcaaaggaatggacgaacatggaaaatatattcaaaaccatgtaattattggtttcaacatgatgattcaccatccctcaacatygtgaaatacattgatctgggaaactcttatgttttaaaagctaaggtcatacggaatgcaaaaggtaagtttgttttgatcggaaaatataaaaaggaaatgttatttcttttcttgaatgtgaaatatactctttgatactgactgactttatccttggt

SEQ ID NO: 662554 - DNA, 566 bp, Homo sapiens
taagtgaaaattagaagttttgaaaaaaattgagaacatctatttccctcaatatcgtggattaaatgtcctgaaaaccttccttctatctgaaacccttggaaatcctttcttgttgattgtatgactaattgtccctatttccttcaagtaattttagaagttttaattttatggttttaactttctatttaatttttaggttacctctattttattttggtatattatgtatggttagctagttgttccaatattatttattcactaatgcatcctttctctgctgatttcaaaatataactttatcttagtatacaatttacctgttattctgaccatttctgaatttttaggatctgttccattgtaatctctctatattctgtcaccaacaccgcaatgttctaattattttccctttaaaatatactgaattgcttattaaagggctcaatcagttatatgtgttcagtttgatggaagyaaataataatcaacaaatcaactaagttgcctgtttctgcagaaaaatctagtcaaatctactgaaggtgtggtccctg

SEQ ID NO: 662555 - DNA, 648 bp, Homo sapiens
ggcaaagttgcaaacaggtggcctgcaggcagaaattggtctggtgaaatattttgtttgaaatgcataagagttttctcttggcaacaattaactggcagccctttcaactgggcatgtacccttcagtttttctactcagtcaaccaactcagtgtagccagtattattggagaccttgattagcatttgagaagcaggctgaggaatgagggaaacatttctctgagaaaatatttgtaaagttacatttttctgagaactgtcagaggcgtttgaaccacagcaacttcatcttgaataggagctgggtaaaatgaggctgagacctactgggttgcattcccagatggttaaggcattctaagccacaggatgagatacgaggttagcacaagatacaggtcatagagaccttgctgataaaactggttgcagtaaagaagctgggcaaaacccaccaaaaccaagatagcaatcagagtgacctctggttgtcctcagtgctacactcccaccagcaccatgacagtttacaaatgccatggcaacatcaggmagttaccctatatagtctaaaaaggggaggcatgaataatccaccccttatttagcatattatcatgaaataaccataaaaatgggcaa

SEQ ID NO: 662556 - DNA, 632 bp, Homo sapiens
ccttctccgtgatttatctcatttaattcgagccacagagaagtcaggcaatttgtcaaagatcgcattattaacatgcaytggggctggctttgagttctgacgccagagcccaagtttacagattgtgcccgcaagactgactggctgaaagagtggcaaaaggagggtgagcaatctatgcacagcctcctgggatatgatttagccaaaaaaagtttgagtgacatcatagtaaattcctgtgaaaagggcctatagaagtgatgagttttgttaccacaatgtatatactgcctttggagttcacattgattctgctctaagacattttcatgactgaaaaggcagaaacccctcaggagcacatgtcattgaacagccaaactattggcaatatatcttttcgttttttaccaggaaatgaagtgactattgactttcccaagtttacattcattcttggaatttgtattttaggttcctcgctttaagtttccaattacacaatatccagtttctttggaaattatcaacgaggatggacgtgtcccattgcaatctccatatctggttactgtgactgaagtgaacatgaggcacaactggaaactgagtagggtttgctttca

SEQ ID NO: 662557 - DNA, 608 bp, Homo sapiens
tatctactgaaaatatctttcaggaataaaaaatcaagactttctcaaatgagagaaaactaagagaatccattgtcaggagaacttctcttttgaaaatgcttaaagaagttattcaaacagaagaaaagtgataacagcaggaaccttgaagcttcaggaatggaggaagaacaaaaatggataaaagataggtgtgactgcaccattaatgaaggaaaagaattgttaagaaaatatagagaaagtgtataaagcttcttgggactgtcggaacctgcttttgaaagtaccctgaaataggctgggcatggtggctcaygcctgtaatcccagcactttgggaggccgacatgggtagatcacttgaggtcaggagttcgagaccagcctggccaacatggtgaaacatcatctctactaaaaatacaaaaatcagccaggtgtggtagtgcatgcctgtaatcctagttactcaggaggctgaggcaagagaattgcttgaacccaggaggcagagattgcagtgagccaagatcgcaccactgcacttcatccagcctgggcgacagagtgagactctgtctcaaaaaaaaaggaaaaaaaag

SEQ ID NO: 662558 - DNA, 608 bp, Homo sapiens
tatctactgaaaatatctttcaggaataaaaaatcaagactttctcaaatgagagaaaactaagagaatccattgtcaggagaacttctcttttgaaaatgcttaaagaagttattcaaacagaagaaaagtgataacagcaggaaccttgaagcttcaggaatggaggaagaacaaaaatggataaaagataggtgtgactgcaccattaatgaaggaaaagaattgttaagaaaatatagagaaagtgtataaagcttcttgggactgtcggaacctgcttttgaaagtaccctgaaataggctgggcatggtggctcatgcctgtaatcccagcactttgggaggccgacatgggtagatcacttgaggtcaggagttcragaccagcctggccaacatggtgaaacatcatctctactaaaaatacaaaaatcagccaggtgtggtagtgcatgcctgtaatcctagttactcaggaggctgaggcaagagaattgcttgaacccaggaggcagagattgcagtgagccaagatcgcaccactgcacttcatccagcctgggcgacagagtgagactctgtctcaaaaaaaaaggaaaaaaaag

SEQ ID NO: 662559 - DNA, 608 bp, Homo sapiens
tatctactgaaaatatctttcaggaataaaaaatcaagactttctcaaatgagagaaaactaagagaatccattgtcaggagaacttctcttttgaaaatgcttaaagaagttattcaaacagaagaaaagtgataacagcaggaaccttgaagcttcaggaatggaggaagaacaaaaatggataaaagataggtgtgactgcaccattaatgaaggaaaagaattgttaagaaaatatagagaaagtgtataaagcttcttgggactgtcggaacctgcttttgaaagtaccctgaaataggctgggcatggtggctcatgcctgtaatcccagcactttgggaggccgacatgggtagatcacttgaggtcaggagttcgagaccagcctggccaacayggtgaaacatcatctctactaaaaatacaaaaatcagccaggtgtggtagtgcatgcctgtaatcctagttactcaggaggctgaggcaagagaattgcttgaacccaggaggcagagattgcagtgagccaagatcgcaccactgcacttcatccagcctgggcgacagagtgagactctgtctcaaaaaaaaaggaaaaaaaag

SEQ ID NO: 662560 - DNA, 519 bp, Homo sapiens
tgcaggacttttcttggccactttgccaaccggggacctccacagctggtgacatcctccacctgggccttgctcagccctgagcctgccactggaggcaccctgcccacttgtcccaactrtgttgtagtgtgtacccatgttcctgtcctgcatccaagtataatgaggaaacactaacaattgaagagtgaggagggcaaagaataattttactgagtgatggaacagctctcagcagacaggggacgtagggtgtggtccctcacccctgcagtcaggtggtttctttgccagtgtggctgagtggggcctttatgcactcagaataggggagagtgtgctgactggcttatgagtaagcaaagaaaggctaaagcaaaggtaccactcaaaggtgggcacagcagtgtagaaaaccaattaggaagggtaggtatatgtaaaacagttgaagggtgggatcagtcagaggaaagcacgccaaacaggaagacaggttctgaattcggtatgtgg

SEQ ID NO: 662561 - DNA, 519 bp, Homo sapiens
tgcaggacttttcttggccactttgccaaccggggacctccacagctggtgacatcctccacctgggccttgctcagccctgagcctgccactggaggcaccctgcccacttgtcccaactatgttgtagtgtgtacccatgttcctgtcctgcatccaagtataatgaggaaacactaacaattgaagagtgaggagggcaaagaataattttactgagtgatggaacagctctcagcagacaggggacgtagggtgtggtccctcacccctgcagtcaggtggtttctttgccagtgtggctgagtggggcctttatgsactcagaataggggagagtgtgctgactggcttatgagtaagcaaagaaaggctaaagcaaaggtaccactcaaaggtgggcacagcagtgtagaaaaccaattaggaagggtaggtatatgtaaaacagttgaagggtgggatcagtcagaggaaagcacgccaaacaggaagacaggttctgaattcggtatgtgg

SEQ ID NO: 662562 - DNA, 519 bp, Homo sapiens
tgcaggacttttcttggccactttgccaaccggggacctccacagctggtgacatcctccacctgggccttgctcagccctgagcctgccactggaggcaccctgcccacttgtcccaactatgttgtagtgtgtacccatgttcctgtcctgcatccaagtataatgaggaaacactaacaattgaagagtgaggagggcaaagaataattttactgagtgatggaacagctctcagcagacaggggacgtagggtgtggtccctcacccctgcagtcaggtggtttctttgccagtgtggctgagtggggcctttatgcrctcagaataggggagagtgtgctgactggcttatgagtaagcaaagaaaggctaaagcaaaggtaccactcaaaggtgggcacagcagtgtagaaaaccaattaggaagggtaggtatatgtaaaacagttgaagggtgggatcagtcagaggaaagcacgccaaacaggaagacaggttctgaattcggtatgtgg

SEQ ID NO: 662563 - DNA, 583 bp, Homo sapiens
atcatatcagtaagcctgacctaaatatttatggtctaaagggaccatctaggttttattttttattctgtaaattaagcttttacattattatcaccaaaacaaatgaaaataatatagcaaaatgaagaaaaactgtcagttaagcttcatgttgttattattttttaaatatataaaaataaatattgattagaaatgagttatctctgctcttctgtgctcaaaaaaaggcatatttctcttagtctctcaatgtaattattttttataatactactgcacatcttatagaagttcagtaacataatgagaaatacatttagaataaaagaaacttctcactatatgcatttcatagattcacatggcttggaaggattactctttgaacaaactttcaaatatcttgttcagaagtttatctsaaaagttaacagtaaaatttaagaaacaagtcgagcaaagtacacccaatcatattttcctaggatctttttctccattgctccctctatttgggaatattgcaggatgtctttcatattagagaaatttctcttttcagtagcttggaatagta

SEQ ID NO: 662564 - DNA, 609 bp, Homo sapiens
ggtgggtccccaagcagccatttcttacttgtgtgtaatgcttctataagyctcagagtagcttttgagtctcatttggttctttaaggatgctgctagtaacataaaaactaggtgggtggtgtgaaggaaggatgtttctgttaagggtgcacaatctctgcagaagaaaagtggatgttcttcctggttttttcactcaatcataacatatccttctacttttagtaaatggagtaaaacacaggcaaatatgtgaactgggataataagctggtgcctttgggattctaggtagaaataataattggagaaacaaaaggatatggagcctggactgggagtggtgactcatccctgtaatcctaacactttgagaggccaaggctgggggactgcttgaggcaggagtttaagaccagcctgggcaacaaagcaagaccccgtctctacaaaaaaaattttttgaagtagccagatgtggtggtgtgcctgtagtcccagctactcaggaagctgaggtgggaggatgacttgagcccaggagatagaggctgtaatgagtgttgatcaaaccactgcactctccagcctgagtgacagagcaag

SEQ ID NO: 662565 - DNA, 574 bp, Homo sapiens
caggtacactgcagatagtggggttcaaaagcatttggcaggcagacatatttggctctcaagagaataattccaggctttaacttaacaacagaatgggtccctgtgactctgataggaaccatctcaaaaatgctaaatgctgaaaaaagtttattccaacgttaaaagcagtgatcagctgcctactgtcccattttatttgctgcctagacaggtcctcttcttacctttgtgtctggatgctgccctggtaacaatgtcatttttaggacttaatgaygacatgatttcatctaagatccaaaggagggcaggcctcatgcctcacacaagtgtgaaccagcattgcttctgcctcagggttgggattcttatgcatgggtactgggaggcaagagtggtgagtgggaagttctgtgggtatttgcagcctgcagagctttagaggtaacctcttctagtaatcccagggagcttttggattttggaagggaacagagtattgagggaggtagcgctaaagcaagttttgtgagcacatcaacatttaatggagtggtaatttttcagc

SEQ ID NO: 662566 - DNA, 574 bp, Homo sapiens
caggtacactgcagatagtggggttcaaaagcatttggcaggcagacatatttggctctcaagagaataattccaggctttaacttaacaacagaatgggtccctgtgactctgataggaaccatctcaaaaatgctaaatgctgaaaaaagtttattccaacgttaaaagcagtgatcagctgcctactgtcccattttatttgctgcctagacaggtcctcttcttacctttgtgtctggatgctgccctggtaacaatgtcatttttaggacttaatgatgacatgatttcatctaagatccaaaggagggcaggcctcatgcctcacacaagtgtgaaccagcattgcttctgcctcagggttgggattcttatgcatgggtactgggaggcaagagtggtgagtgggaagttctgtgggtatttgcagcctgcagagctttagaggtaacctcttctagtaatcccagggagcttttggattttggaagggaacasagtattgagggaggtagcgctaaagcaagttttgtgagcacatcaacatttaatggagtggtaatttttcagc

SEQ ID NO: 662567 - DNA, 559 bp, Homo sapiens
aacacaggctatgctcgcccagarggtcgggagggtttgaaggaaggaatcccaccaggtgccatggaagtgtcacgtacaatggagacggaacactgtcctctgaaattggccctcagcaggtcactatgccatgatgataggagttttaggggaatgggaggaaacagaagcagaagcctgtaaaccagttggtgtgaatgggtgaggggccatggggtacagaattgaagacttctcaagatacgtggtggaaaaggaaaattagaatggtcactggagcagaattttcaacatttatcttgagtaatgaaaatgtttccatgtgcttttattcaccatcctgccttttcagttcactctcaaactgtgaaactaagccatgttctgagcctgggtccttggcatggaggaaggaaatatacacacacactcatgcattcacctcacttccatttattgctgcttacagaaggagaaaatgcttctctgtaagcctgcgccttttcttcaaacacatccagatcttgtcctcttgggttcagatctgagaccccca

SEQ ID NO: 662568 - DNA, 559 bp, Homo sapiens
aacacaggctatgctcgcccagaaggtcgggagggtttgaaggaaggaatcccaccaggtgccatggaagtgtcacgtacaatggagacggaacactgtcctctgaaattggccctcagcaggtcactatgccatgatgataggagttttaggggaatgggaggaaacagaagcagaagcctgtaaaccagttggtgtgaatgggtgaggggccatggggtacagaattgaagacttctcaagatacgtggyggaaaaggaaaattagaatggtcactggagcagaattttcaacatttatcttgagtaatgaaaatgtttccatgtgcttttattcaccatcctgccttttcagttcactctcaaactgtgaaactaagccatgttctgagcctgggtccttggcatggaggaaggaaatatacacacacactcatgcattcacctcacttccatttattgctgcttacagaaggagaaaatgcttctctgtaagcctgcgccttttcttcaaacacatccagatcttgtcctcttgggttcagatctgagaccccca

SEQ ID NO: 662569 - DNA, 605 bp, Homo sapiens
aaacaataaacatgttacacagtttctgtgggtcagaaatatgagagattctggcttaggattcctcaaaatggtatgtgggctgcagttgtccaaaggcttatctgggctaggagatctgcttccaagatggttccctcatatggctggcaacttggtgctaggtattggcacgaggcctcggttcctcactacaaggacctccccattgggttgcttgcatgatgtcacaacatggcagctggctttccccagagtgagtactcggagacmgcaaggggaggccataatgccttttataacctaatccataaagtcacataccgccatttcccctacattctatttactgaaagtgactcactgaatccaacctgcactcagaaggaagggaattaggctccacctttcaaagaggtgtgtcaaataaatagttaacatattttaaaccacaataggtataacttacattgtctctgtaactcctttttattatacttctgttgctcaccaactgtgattatccatgtactctattaatacatttatataatgtttataactattacatatttgtatgcatttatatgtaattctgtatcata

SEQ ID NO: 662570 - DNA, 605 bp, Homo sapiens
aaacaataaacatgttacacagtttctgtgggtcagaaatatgagagattctggcttaggattcctcaaaatggtatgtgggctgcagttgtccaaaggcttatctgggctaggagatctgcttccaagatggttccctcatatggctggcaacttggtgctaggtattggcacgaggcctcggttcctcactacaaggacctccccattgggttgcttgcatgatgtcacaacatggcagctggctttccccagagtgagtactcggagacagcaaggggaggccrtaatgccttttataacctaatccataaagtcacataccgccatttcccctacattctatttactgaaagtgactcactgaatccaacctgcactcagaaggaagggaattaggctccacctttcaaagaggtgtgtcaaataaatagttaacatattttaaaccacaataggtataacttacattgtctctgtaactcctttttattatacttctgttgctcaccaactgtgattatccatgtactctattaatacatttatataatgtttataactattacatatttgtatgcatttatatgtaattctgtatcata

SEQ ID NO: 662571 - DNA, 480 bp, Homo sapiens
tggggtgccggcacagagactcaggcctgtgatcccaccactttgggaggcctaggcgggcagatcacttgaggtcaggaattcaagaccagcctggccaacatggtgaaactctatctctaccaaaaaatacaaaaattagccggacatggtggtgtatgcctgtaatcccagctactcgggaggctgaggttaaggaatcacttgaacccaagaggcagaggttgcagtgagatgagattgtgccattgcacttcagcctgggcaatagcrtgagtctcagaagagaaaaaaaaaagaaaaagaattggcagtgatgccttcttggcatctgttcctacttggatctttggttaccaggactctttaaatggctttctcaaataggtaggattgttgagttacagctacatgaactgaaacagtacctcagtggaataaccaagcaaacactgaagatactgcattgatattgctaca

SEQ ID NO: 662572 - DNA, 620 bp, Homo sapiens
gagctcagatctcccctccagaaagtttcattcaaacactcatgaccatatcaacacttatatgtcaataatatctctttaagaaaatgcgaatgtcattgctgtactcctctgtgttgcctatggtggttcaattgtgtgagtcaaaactccaagcctttgggtcacttgttcactcatgcctctatcaataaaccctgagcacctgggaggcagcctgacagagggaagaacaaggactttggcatcaacgcctcctaggtccaaatcccagacaggcaatttgctaactacagcttggccaagtaatttaacctctctgatcaaggtgcccacttgtaaaactggaacattcacaatatctacctttgagggctgtagtgaaggtaaataagattatgtaaatrcccagcctggttgcagcagcaacagtaagcactccaggggtacctgttagatgaataaatgaaagaaactgggaaagacggtgaggagctaagtgttaacactgatatgcagagtctttgccctcattttcagttctgatgggcgcctgacataagcaccttaccctgagcccagagccatgcgcagtattctaaggggccttgaatatgctg

SEQ ID NO: 662573 - DNA, 556 bp, Homo sapiens
cctcctgctgtattcagcattaactacatactacgtgaaaaatctaatacggttttggtccccctaattttaaaaaagaatgtgaaaaaatcagtaactgctacctggagtgtgaagggaagtctggtggacagggtgrgggaattatttatcatcctgctctttgaagtaagcaccatattaatgtcatgtattacctattaaaaatatataaaatgagaaatacatgaggatattagtgaagaaagaggggaaaaagaagatagcctaaaataaaaagcaaaatgattcagcctggaataataatgctaaataaggggtgatctgataatttagaaacgtattagagtttattaataggaaacacagtatcatgagttccttagtctctgccatatagaaagaaaagaaaattggcaaaaataatactggtttaaggtcatggtgatgatgaaacttcaggagcatgctacagttataaatgtggattctaaagaaaaaaaaatcagaggatcaccaagttctgttgcttggcacctgaatcacaggccacttg

SEQ ID NO: 662574 - DNA, 556 bp, Homo sapiens
cctcctgctgtattcagcattaactacatactacgtgaaaaatctaatacggttttggtccccctaattttaaaaaagaatgtgaaaaaatcagtaactgctacctggagtgtgaagggaagtctggtggacagggtgggggaattatttatcatcctgctctttgaagtaagcaccatattaatgtcatgtattacctattaaaaatatataaaatgagaaatacatgargatattagtgaagaaagaggggaaaaagaagatagcctaaaataaaaagcaaaatgattcagcctggaataataatgctaaataaggggtgatctgataatttagaaacgtattagagtttattaataggaaacacagtatcatgagttccttagtctctgccatatagaaagaaaagaaaattggcaaaaataatactggtttaaggtcatggtgatgatgaaacttcaggagcatgctacagttataaatgtggattctaaagaaaaaaaaatcagaggatcaccaagttctgttgcttggcacctgaatcacaggccacttg

SEQ ID NO: 662575 - DNA, 569 bp, Homo sapiens
tttggacatttcatatagatggaatcatatgatatgtggtctttaataactggcttctttcacttagcataatgtttttgaggcttattcatgttttaccatgtatcagtacttcattccattttattgctgaatgctattctgttgtattgatataccacattttgtttatccattcatcagctgatggacagttgggttgtttctgttttttggttatgaataatattgcagtattgctaagaacgtgtgtataagtttttctgtgggtatatgttttcatttctcaaggagatacctttaaagctgcatccatccatatctctactttgyggttaacattctcctaggttatgcagtttgtttgaggaagaacagtgttttagtaaactcttgatcctactgtggtgttgcggatattgccctgaatcaagaaaaggtgccaccaaaaaaaaatccaaaacccaaaaacaaaaagagagaatcctgtttttaagtttgaactctccagtagcattgtttccaaatatttggtgcagaactttaaccattggtgagagttgacagac

SEQ ID NO: 662576 - DNA, 405 bp, Homo sapiens
atgcagccataacttccctgccaaaattcattgccaaaaattttgtgatttgaagcaggccttacctgttaatgcaaatttgattctcaaatcctaagagtttccaaaggttgagtgaagtgagatgagactcttagttgaagatccagatgcttcactgttgctatctagatgctaccaaaactcccagcacaacaaagtatatgaagagaggytctaggttcatgaaatgttagagttggaaaaatgggcctttggggttcttcttattctacctcctcattttaaagaaatgcaagtgggaaatggatgctcagagctgacttgcctgagaggtgaaagggctagtggagaagccagagcccctgattcctagtctagtgcttttccctcccggtgtgatca

SEQ ID NO: 662577 - DNA, 573 bp, Homo sapiens
cctcagcctcccaaagcactgggattacaggcatgagccactgcacctggtgtgaaaaataaattttatctgaatttgtagagggcagtgagacacattaaccaacaaatatctacacttgaagggagagagaccagctcaagcctgacattggtagactaactccttattttttatttctaacttgattttattctgatatgggatgaatcctctgatagcttttcctgtctcttttccagtgtgttaagtgattattgctgtaagactggaattacagtctgtaacgttctgaggacatagatataaaacatgggtaaatgccctttttagatgtgagcctaagaaagggtttttatcctttttcagtttcagaggatactgtacttgcaaatgcttttaaggccacagagttctcacccttgtactcaayactaggccttcctaaatattattccagtgcacaaaaagcattagtgatggaatggagcctccattgcctcctggcttgcattattcctgacactgaatctgctgtaattctttgctcctctgtctgccatgtgtctaatt

SEQ ID NO: 662578 - DNA, 576 bp, Homo sapiens
ttgttaatattttgttgaaaatttttgcatctgtgttcatgaaagatactggtctgtagttttctttttctccttttcttttttttctttttttgagacagagtcttgctctgtcacccaggctggagtgcagtggcaccatctcagctcactgcaacctcctcctgccaggttcaagggatcctcgtgccttagtctcccaagtagctgggattacaggtgtgcgccaccatacctggctaagttttgtattttttattagagacatggtttcaccatgttggtcaggctggtctcaaactcctggcctcaagtgatctgcctgcctcggcctcccaaagtgctrggattataggtatgatccactgtgactggccagtctgtagttttcttataatgtctctattaggttttggtaaggtaattctagcctcattgaatggattaggaaatattcccttggcttctatcttgagaaaaaaagattgtagataattggtatagtttcttaaatgtttgatataattcatcactgagcccctctgggcctggtgctttctgttttggaagggcatt

SEQ ID NO: 662579 - DNA, 503 bp, Homo sapiens
tcttgtgaaatgagtatacagattacactatctagttttaacaagttaaccctcatagactgcatacatggctctgaacatttcctgcaataaagctgcaagtcatactattagcacaagtataagcatacaacaaggaaaagaagtgctgacattttccccgcccctacaagagctgtgttaactctattacaataggtaggaacaactatgatctaatcagacctaacaaggagttggccccctacttttgaaataattaagaaattattcttaattattgaatgcagtggcacaatcagggctcactgcagcttcgacctcccaggctcaggcgatcctcccacttcagactcctgagtagctaggactataggtgtatgccactacaccgggccaatgttttgtaacttttagccrtgagtcacccaggctggtcttgaactcctggacccaagtgattctcccaccttggcctcccaaagtgctgggattataggcat

SEQ ID NO: 662580 - DNA, 581 bp, Homo sapiens
cacggtacagttacctgaccctacctgtttatagcaattgcacctttggttccagagttgtagaagtggggaacccatctggattctgattcattctcacagtgcttgtgtgacagacagggcagaaatcatgatcccccattctacaggttggggaaaccaaggcacagagaagcaatcaayccaaagtcactcagtaagccagaaaacaaactaggtaaaggtccaggcaagaccacctatgttcctttcagtgccttatctgaaaaatcagattgtctcctccaatgaatgcacatactttggaagtaagtagttttaaagcggaattttctatggtttcaaaagccctttaccaactcaagaaccacaaggtaagaaccagaatcacattaaccttttagttaaatgcttctgactcatggataataccaattatttcaactcactgacaacctggttatcaacaagaagaaaatttaaggaaaaaattcacccattcaataaaaaaacctcggtaaacagctcctttccttgtttcatgatatcttgagcctaacacccaagcactgcttccttct

SEQ ID NO: 662581 - DNA, 622 bp, Homo sapiens
ttcatccagccagaagatagccttcacgttccccatctgtcttcagagaaaaagagctgggacaccaagaacaagctgttagatcactgcctgggaggcttggcttagtactctcatctctggttccattccagttcagctaagtcttgctttaaaatttttacctcctagctgggtgcggtggctcacgcctgtaatcccagcactttgggaggctgaggcgggcagatcacaagatcaggagttcgagaccagcctggccaacccagcctggtcaacatggtgaaaccctgtccctactaaagatacaaacaattagccgggcgtggtggggtgcgcttgtaatcccagctactcaggaggctgaggcaggagaatcgcttaaactcgggaggtagaggttgcagtgagccaaggtcacaccattgcactccaacctgggcgacagggcgagactcygtctcaaaaaaaaaaaaaaatttacctcctttgcaggccataggactagcccaactatgagaaatagctgttctgtgaacgtgaaaaggggacagcagttttcccagttttggccaggcagtcaagcctttaacagctcatgcacagtttaggccatgtacag

SEQ ID NO: 662582 - DNA, 486 bp, Homo sapiens
ggagtaatattatcttctcattccctggatattacgaacagtatcacagaagggtgtacacctcttgcgatattggaagaaatataatccgcttttcttttggatattacgaataatatcacagggggttctatacttcctgtaatatcattttctccccacctggatattacaaacaatattacaraggggtatacacctcctgcgatactgggagtaatatcatcctctccctctctggatattacaaaatatcacgggaaggtgtacacccctgcgatatagggagtcatgtcatcctcacccccccaatattacaaacaatatcacaggagggtgtacaccctctgcaatattgactgtaatatcatcttctccccacctgaatattatgaacagtatcacagaagggtgttaaccccttgagatatgggaagtaatatcatcctctcccctcctgggtattacaaataatatcacaggaag

SEQ ID NO: 662583 - DNA, 535 bp, Homo sapiens
aatcctctgcaagtacagccaagccttttctgaggctatttttaaacttacaaatcagaggacaatcgcgacattagaggaaaattacccaggtttacgccatcactaacgatgatagcttacgatgatagctaacccagctcttcaacttcytttcaatctccagaaaaggctctctgcgtgctaatggtaacgtggctttacagatttttacccacttcaaatatggccgccaagctccgttctcttttaccgcctgatctgcggctacaattctggcttcatgcccgcctccaaaagtgcttcctctcgaggggttgtggttcttactgcgcaggcgcaaaagcaagtcctcttccgggcaaaatggcgatgggactaatgtgcggacgccgggagcttctgcgcttgctacagtccgggcgtcgggtaaggatgccccggggcagagcaccgggatgctgccctgacccagtgaaccaggccccaggacagctcgtgctaggggtatcagcagacgctgacctgctcaccg

SEQ ID NO: 662584 - DNA, 535 bp, Homo sapiens
aatcctctgcaagtacagccaagccttttctgaggctatttttaaacttacaaatcagaggacaatcgcgacattagaggaaaattacccaggtttacgccatcactaacgatgatagcttacgatgatagctaacccagctcttcaacttcctttcaatctccagaaaaggctctctgcgtgctaatggtaacgtggctttacagatttttacccacttcaaatatggccgccaagctccgttctcttttaccgcctgatctrcggctacaattctggcttcatgcccgcctccaaaagtgcttcctctcgaggggttgtggttcttactgcgcaggcgcaaaagcaagtcctcttccgggcaaaatggcgatgggactaatgtgcggacgccgggagcttctgcgcttgctacagtccgggcgtcgggtaaggatgccccggggcagagcaccgggatgctgccctgacccagtgaaccaggccccaggacagctcgtgctaggggtatcagcagacgctgacctgctcaccg

SEQ ID NO: 662585 - DNA, 591 bp, Homo sapiens
gggggtgtacacccctcctgtgatgttaatatccaggttaggggaggataatattactcccagtaatgcaaggggtgtacaccctcctgtgatatttttcctaatatccagggtggcagaggttgatattactttcaatattgcagggatgtacacatcccttgtagtattgttcctaatatccagaagaaaaaagatgacattactcccaatattgcagcagttgtacaccccctttgtgatattgttcttaaaatatagcagggagaaaatgatattactctcaatatcgcggagagtatacaactccccgtgatattgttcctaatatccaggttcggaaaggatgataytactttcagtatctcaagaggtgtacaccttgcctgtgatattgttcctaatttccatgggcgaagaggataatattactcgcaatattgcagggagtgtacagccctcctgtgatattgttctgaatatccagaaaggaagaaaatgatattacttccaataacgcacgggatgtacacccccacctgtgatattgtttctaatatgcggaagtggagaggattatattactcccaa

SEQ ID NO: 662586 - DNA, 524 bp, Homo sapiens
gatagtctcgatctcctgacctcgtgatccgcccgcctcggcctcccaaagtgctgggataacaagcgtgaccaccgcgcccagccgtgatattactcttaacatcgcagggggtgtacacttcccctgtgatattgtttctaaatccagaggggaagtggatgatattactcctaatatcgcacggcgtgtacacctttcccaccatgatattgttcctaatatccagggcgggagaggatgatattactcccactatcgcaggggttgcatacsccctctgtgatattgtttttaatatccagggggcagaagatgatattactcccaatattgcagagggcgtacaaagccccgccccgtgatattcttcctaatatccaggaggggagaggatgaaattactctttatattgcaggaggcatacacatccgtgtgataatgtttttagtatcagttggggagaagatgatattactttcaaaatcgtgggggtgtacaccccccgttgtgatatcgttta

SEQ ID NO: 662587 - DNA, 594 bp, Homo sapiens
aggaaacactatgcaagaggaaaatacgaataaaattggggaaactttttttgaaaatcagtagcaacattttaggagcaatgtcagtgaataattactgcccaagagatagaatatactctaaaatagtgttagaataaagtacttaaaagttttaatactattttaaaaaatattagaaaaatagtcattagcttacatacactgtatttggatggatactagtattgtgaccaagatgtcttttagtacagtgtagtaccttcctggcatattttttcctctaagattttattttcaagcattttgtttccttaatttgcttaagagctttattaaggcatacttttataacataaaattcatccattataagcaagcaattcaatgaattttagtaaatttatagagttctgaaatcatctccacaatccagtttagagcaatttgtcctaaaaagggttctcatacaggtgatttctggccccagtgatgttctgccttctgtcttcataaattttcctactatggagaytttatatacataaaatcaatatgtagtctttatgcctggcttttttttaacttagaata

SEQ ID NO: 662588 - DNA, 632 bp, Homo sapiens
caccccctggccttggggatcacattctaaacaaactgaactctggtaagggatcttagtgtgaatattgggtctgaaaataaaggtgctaaattacttcagacctttacaaagacatatagttgcttatagtagcctctaatgatcctttgaatttctctggtataattagtaatgtctcctttttcatctctgattttatttatttggctcttctctctttttttctcagttagtctggctaaaggtttgtcaattttgttttatcttttcaaaaaataaacttctcattccattgatattttgtattgttttcttcttggcaatttcatctatttctgttctgatctgtattatttattttcttctactaaatttgagtttgatttgctctttcttttctacttctttaagatgcattgttaggttgtttatttgaagtttttctactttttttagtaattcttcagaacttctcacttaatatttacctccttgtaatgrttaactttatatgttaacttacaggttgttttggggtgagatgaacatttaaattggtgaactttgagtaagtagctctctataatatgggtggggctcgtccaatcaattgattgcctgactagaac

SEQ ID NO: 662589 - DNA, 632 bp, Homo sapiens
caccccctggccttggggatcacattctaaacaaactgaactctggtaagggatcttagtgtgaatattgggtctgaaaataaaggtgctaaattacttcagacctttacaaagacatatagttgcttatagtagcctctaatgatcctttgaatttctctggtataattagtaatgtctcctttttcatctctgattttatttatttggctcttctctctttttttctcagttagtctggctaaaggtttgtcaattttgttttatcttttcaaaaaataaacttctcattccattgatattttgtattgttttcttcttggcaatttcatctatttctgttctgatctgtattatttattttcttctactaaatttgagtttgatttgctctttcttttctacttctttaagatgcattgttaggttgtttatttgaagtttttctactttttttagtaattcttcagaacttctcacttaatatttacctccttgtaatggttaactttatatgttaacttacaggttgttttggggtgagatgaacatttaarttggtgaactttgagtaagtagctctctataatatgggtggggctcgtccaatcaattgattgcctgactagaac

SEQ ID NO: 662590 - DNA, 582 bp, Homo sapiens
aaattctctagctgtacctatgaaatagctttaatattttaatcccctgcattttctttgaataatatggagtttgaattgaagtggtcctgaatttgagtgctgcatatgctacttttgagatatgtgatcttgagcaagttgcttaatcacattaagcctcaattctctcatctttaaaatagaaaaaataatagctactttacagtgttgagaaaagaataagatgaaacagtttattaaaaacatagaagagtgattaagacataataaagtctacataaattgtgcctattgttattactaataaaaaaaaagaaattctaygtgtcaggaatttgaacaaattacagctggatttgcatatttcttccacaagatgtatgtggtcccatctgataatagggaattggctggtaactggaatcttcttggaaacctcttaaatcacagatcttgcacttgtactgggataatctggagtgtgtgctccgctgagtttgttgaccaaatcacctacaggtgaactctccatatatgtattttcctagtcaattcctacactgacctcaagcaaacact

SEQ ID NO: 662591 - DNA, 582 bp, Homo sapiens
aaattctctagctgtacctatgaaatagctttaatattttaatcccctgcattttctttgaataatatggagtttgaattgaagtggtcctgaatttgagtgctgcatatgctacttttgagatatgtgatcttgagcaagttgcttaatcacattaagcctcaattctctcatctttaaaatagaaaaaataatagctactttacagtgttgagaaaagaataagatgaaacagtttattaaaaacatagaagagtgattaagacataataaagtctacataaattgtgcctattgttattactaataaaaaaaaagaaattctacgtgtcaggaatttgaacaaattacagctggatttgcatatttcttccacaagatgtatgtggtcccatctgataatagggaattggytggtaactggaatcttcttggaaacctcttaaatcacagatcttgcacttgtactgggataatctggagtgtgtgctccgctgagtttgttgaccaaatcacctacaggtgaactctccatatatgtattttcctagtcaattcctacactgacctcaagcaaacact

SEQ ID NO: 662592 - DNA, 582 bp, Homo sapiens
aaattctctagctgtacctatgaaatagctttaatattttaatcccctgcattttctttgaataatatggagtttgaattgaagtggtcctgaatttgagtgctgcatatgctacttttgagatatgtgatcttgagcaagttgcttaatcacattaagcctcaattctctcatctttaaaatagaaaaaataatagctactttacagtgttgagaaaagaataagatgaaacagtttattaaaaacatagaagagtgattaagacataataaagtctacataaattgtgcctattgttattactaataaaaaaaaagaaattctacgtgtcaggaatttgaacaaattacagctggatttgcatatttcttccacaagatgtatgtggtcccatctgataatagggaattggctggtaactggaatcttcttggaaacctcttaaatcacagatcttgcacttgtactgggataatctggagtgtgtgctccgctgagtttgttgaccaaatcacctacaggtgaactctccwtatatgtattttcctagtcaattcctacactgacctcaagcaaacact

SEQ ID NO: 662593 - DNA, 603 bp, Homo sapiens
tataataataaaaaaaagaatgaacaaatacagacaagatttactgacactcactatttgtacctcaattatagaccttaattattaagttataattttgtatcttagttattacctagttactacraaaaattgaaatgcgtttggagttttaaaatcataagtcctgtactttatgttcagaaaaaatgctaacccaaatgttacttagacttgaagttgagaaagaaaagtagctgagagtgttattggactgaactgggatccattcacccagcacagcaaaaacaaacattggcatcaggactgcagctagaagtgacgcatctattgcaaggcatcaagcagtgagaatcaggcaccagggatgcttaagacgcaaatgcttaagactcaaactccctaatgcagcagttcccagctttcttagcaccagggacgggttttgcagaagacaatttctccatggactgaggagtgggggatggttttgggatgattcaagaacattatatttattgtgcgctttatatctattattactacattgtcatatataatgaaatagttatacaactcaccataatgtagaatcagtggggg

SEQ ID NO: 662594 - DNA, 603 bp, Homo sapiens
tataataataaaaaaaagaatgaacaaatacagacaagatttactgacactcactatttgtacctcaattatagaccttaattattaagttataattttgtatcttagttattacctagttactacaaaaaattgaaatgcgtttggagttttaaaatcataagtcctgtactttatgttcagaaaaaatrctaacccaaatgttacttagacttgaagttgagaaagaaaagtagctgagagtgttattggactgaactgggatccattcacccagcacagcaaaaacaaacattggcatcaggactgcagctagaagtgacgcatctattgcaaggcatcaagcagtgagaatcaggcaccagggatgcttaagacgcaaatgcttaagactcaaactccctaatgcagcagttcccagctttcttagcaccagggacgggttttgcagaagacaatttctccatggactgaggagtgggggatggttttgggatgattcaagaacattatatttattgtgcgctttatatctattattactacattgtcatatataatgaaatagttatacaactcaccataatgtagaatcagtggggg

SEQ ID NO: 662595 - DNA, 603 bp, Homo sapiens
tataataataaaaaaaagaatgaacaaatacagacaagatttactgacactcactatttgtacctcaattatagaccttaattattaagttataattttgtatcttagttattacctagttactacaaaaaattgaaatgcgtttggagttttaaaatcataagtcctgtactttatgttcagaaaaaatgctaacccaaatgttacttagacttgaagttgagaaagaaaagtagctgagagtgttattggactgaactgggatccattcacccagcacagcaaaaacaaacattggcatcaggactgcagctagaagtgacgcatctattgcaaggcatcaagcagtgagaatcaggcaccagggatgcttaagacgcaaatgcttaagactcaaactccctaatgcagcagttcccagctttcttagcaccagggacgggttttgcagaagacaatttctccayggactgaggagtgggggatggttttgggatgattcaagaacattatatttattgtgcgctttatatctattattactacattgtcatatataatgaaatagttatacaactcaccataatgtagaatcagtggggg

SEQ ID NO: 662596 - DNA, 644 bp, Homo sapiens
gtagccattcttttatccctctactttcttaacaaacttgccatcactttactctatggactcgccctgaattcttacttgtgcgagatcaaagaaccctctcttggggtctggatccagacccctttccggtaacagttttgtttgtctaacactttcctaaaatgaaaccagcttggctatttcatgaatattctccactaactaagagagaaaacagtgtcaaaattggagtagatatattgcaatgtgagatgtgcctaggaaatacatgaatggttggaaagatgatttagtagaaagaagcagtttgcataataccatataattacagatttggagatttgctaaggactaggcatatttttacaacattacacaaaacctattgtttggaggctattctttttcccttgttaatattaaatsctgaatgatttagataagtatttttgtattttaatttttaagcatatttactgttatatcatgagggtagctattaaaagtaggaaactcttactcctaattttcttgttacttattttatttatgtaacttctcctttgaagtataggaaaatgaaaaaaattatttcaaacatttagattgtgtttacgttttagtcaatattcagaacgtct

SEQ ID NO: 662597 - DNA, 550 bp, Homo sapiens
caggggcaggtacattgatttattgggcagagaagcagctgttgttttgggacactgtggcccagtactgtggttcagattcgctaaggcattaatatattcttcatccatactgcttcttactacttggaagctcagctttgtttactccattattctttagactatattacattgtattcgtcctcataaaaatgtagtttgtgttggaggtagtttgtgttgcaagcmccatgagaatagagtcagcatttacctctaggacattttatttattttaagagctagttaagaattgttggagtacagaaactctcctggtacaacaaaacttgaaaggggccataaattctgctcttgttgctcttgtccttgttattgacagaatgccagcatctgtggagatgagcatgtaacaatgcatgaatgtgagactgtgttatccatcttcattctcacctactcagagtaggcacacaaacttatttcctgtctcacaaagctgttgttttaagcaagaaggtaacacattagaattatattttattac

SEQ ID NO: 662598 - DNA, 602 bp, Homo sapiens
ctacagtaaccaaaacagcatggtactggtaccaacatttttatttattcaaacattaagctaagaaaaattgttgtatgaaataatttataacacttctccccttcccttcagaatcttaaacaggaatccatttatctaccttataatcctaggaaggtattatttgattattcaagaaattcctcaatgatgctgccttttcccatgaaagaagttcctttttttccccgaatagacycctttcatgacccaccaaaaaccacaccaaatcttgaatacaatttcagctttattgaccccctaaagtctacaaatccttgggactctactgacccttgctgtaaagtgaagggagtgaaagtatttggaatataggtaggacctctaatataataaagatgtcactttaaaatcaatttattcaacaaacatttattaaacattcatatgccaaaaactatgctatggagatgcaaaaaataaaaaggttccttttcctgcccttaaggagctcacattctagtaaagacttttgaaaaataaaacaatacagtacgatttaagtgacatacaatagaggtaggttgtaattacagtgg

SEQ ID NO: 662599 - DNA, 602 bp, Homo sapiens
aattgatttctactaattaattacaatagtaacttaaaatagatcattgctggtgatatggagatgcctccattaataccacggtttctaaaatgatagatttcaggagtagtgtgagcaggctgagattaagaattaagtgtgatagtggcaagacttggttattagacgtgtgtkcagacggatgtgtggtagaagaagactatgagcattcagacttaaaatcttggttagtaagatccatagacaggcagggtttttttgtttgtttgtttgttttaacaggttggagtgcagtggcaggatctcaactcactgcaagctccgcctcccgggttcacgccattctcctgcctcagcctcccgagtagctgggactacaggcgcccgccaccatgcccggctaattttttgtatttttggtagagacggggtgtcaaccatgttagccaggatggtctcgatctcctgaccctgtgatccaccctccttggcctcccaaagtgctgggattacaggcgtgagccactgtgcccggccaacaggcaggtttaaggtttgttctgtaggtggtaatctgggttagggcagcaaagaaggtg

SEQ ID NO: 662600 - DNA, 631 bp, Homo sapiens
aggatgtgcattccatttacccacctattccattttwtgctcagcccaatccagatcattgaagttttgtaccaagactgcattgtatcctgggtagagtcgtcttttctgacctccactttgacaccatactttggcctacagcaacatatttgtaaaatttcttgtaaggaaagtttattttaaagccataattgtataatgttgttgaggatattgtctatacagtgtctccagaaaagatattttgcccagattcagtacctaaaaactggtattggttaaatccttctttcctctggctgctatgttcagaggcaaatatgtggctcacctctgtcagccatggtgatcttatgatatctatttttggtactggctctacctctaggttcatctcagtttcttacccaccattccctcacacacacacacatatatttccatatttatttttattttctgtatatctctgtaattgcttcaaattctcttgtgcagtgagagtggtataaataaaaaatagaatcaaatatactttatatttcttttgtcaggtatatcaatttgaaattaatatggaaaggccttagagagagtgtattaagtgattaaaagatggaaactggcc

SEQ ID NO: 662601 - DNA, 635 bp, Homo sapiens
tttgaaattaatatggaaaggccttagagagagtgtattaagtgattaaaagatggaaactggccrggcgcgggggctcacacctgtaatcccagcaccttaggaggctgaggcaggtggatcacttgaggtcaggagttcaagaccagcctagccaacatggtgaaaccctgtctctactaaaaatacaaaagtcagctgggcatggtggcacatgcctgtaataccagctacttgggaggctgaggcaggagcattgcttgaacccaggaggtggagtttgcagtgagccgagattgtaccaccgcactccagcctgggcaacagagcgagagtccttctcaaacaaacaaacaaacaaacaaaaagatggaaatttaggatcagagagataaggatgtaaatcccagctctactgtttattggctgtgtgaccttagtcaaattgcagcatctttaagcttcactttcctgatctgcaaaatggagataatgatagtgctctcatgggttgctatgaggataagagctgtccataccttataaggttgttgtaaggattaaattaaaaaatacataaaatgcttggtatattgcctaccactaaaaaattgcttataaatgttatttattat

SEQ ID NO: 662602 - DNA, 565 bp, Homo sapiens
tgatcactcttttcttattcaactgtgttcaagcattttaaacactgcctcttatgtcccccatagaataatgcaagccccttttccctctaggtcacttactgagttatattactgaaatccaaccctttgctctgtttctttgtgctccttctatcatttaaaacaatctcagataacacttactgaattaaatcctacaggtctcctactaccacattttttcaaatctaagatgccattactgatagtaagatacacaattattttatgtatcattaagaagaaaaaagtattaatcataagaatataagatgatggccactgtaacatgcatactgatttcagtgacagtaaaatatgaaaatgtgcacttcttggttgataaaatttagtaagtttaatcaactaccataaatttttttttttttttgagacggagtctcgctctgtcgcccaggctggagggcagtggcgcgatctcggctcactactrcaagctccacctcctgagttcacgccattctcctgcctcagcctcctgagtagctgggactacaggcga

SEQ ID NO: 662603 - DNA, 462 bp, Homo sapiens
aatagaaaagcttaagcctaaaatttacacaggaaggttgcattataggggtgtggatggaaaaacaaaacaataacaattctgttcaaggaatgagggtataatgaaaaggaatacaggggaaatgggaaagaatcatatgaaacttttttccaacttaagacagatgacagagaaaacccatgggaaaatggaatgtaggaaaggctagaaaaagtagagatgggagggtggttcctaagggagcaggttcttcasgcagtgataaataatgggatccgggacagaagagactcaagaattcaagaacagagagaaggatatgttaaggtgtcaagggcaggaaaaaaacaaaccataggctttctcaccaacacaaatggtctctgaaggaagtaccagagaagcagtaccctggagcaacaatagaatgcctcagcagtcagcttggccaaaaacaca

SEQ ID NO: 662604 - DNA, 462 bp, Homo sapiens
aatagaaaagcttaagcctaaaatttacacaggaaggttgcattataggggtgtggatggaaaaacaaaacaataacaattctgttcaaggaatgagggtataatgaaaaggaatacaggggaaatgggaaagaatcatatgaaacttttttccaacttaagacagatgacagagaaaacccatgggaaaatggaatgtaggaaaggctagaaaaagtagagatgggagggtggttcctaagggagcaggttcttcacgcagtgataaataatgggatccgggacagaagrgactcaagaattcaagaacagagagaaggatatgttaaggtgtcaagggcaggaaaaaaacaaaccataggctttctcaccaacacaaatggtctctgaaggaagtaccagagaagcagtaccctggagcaacaatagaatgcctcagcagtcagcttggccaaaaacaca

SEQ ID NO: 662605 - DNA, 549 bp, Homo sapiens
atctacttgacagacccactcttcactggaacagaccactgtctayataatatgagtcctgggtatatgtcatcccatcccatcagaaagacttctcatgcatgaaatggtaccatcatccatccatccatccatccatccatccatccatccatcctttccatgaatccattcatttattcttgttcactttttgcatgcatgtatatttcagttgctgatttaaccctttttttgaagaatgcaaatagtcctagtaaggcaacatgaactgtctaacacattagtatgaatgactttattaggcaagattgagaaaacactgggtaacttgaaggggtaggaaagaccaaattctaagagggggaataataaacccaaagataaaaaagaataaaaatttttttttctaccttaccatcttgtgtaggtttgacaacgctaatgttatgtttaacgatggtaaacaaaactgtctttaaaaaaagattatttcttaaagatagatgtttcctttttatagaattttaaaaattcaaaagggctaat

SEQ ID NO: 662606 - DNA, 499 bp, Homo sapiens
aataaaacattactatagttacagagatttttaaaagtaaggaaattctgaagaaactgatgtcaaagaatttaaaaagataataccattttctataaaaatgttaacattcaagaagaaataaaaactctaaatatacttgtaaatattttaaaaattaaatcagtatttgaaaagctacttgcactcacttaaaatgaaaaaaaaaaaaaaaggaaaaaaacacactctggcagatttgaaagtkaatccacacaaacctttagaagaaatgtactttatcttacataaaccattctaaatccatttcatggtgctaggacaaccttgatactaaaatgtgacaaatgcaattttatacaggaaaattataggtcaacttagaaaataaaatcctaagtaaaatattagcaaataaaatccagcaatgtataaaaaatacatatcatggaaagttaagtttgttccaggaattgaaagatggtctaacactgaaaaa

SEQ ID NO: 662607 - DNA, 599 bp, Homo sapiens
ctgttttggaaaaattatactctccccttgtgttccacgggcttacattatgaagcctgaagagtggcatgaaacttcttattattgttagtctaggaagtacatagtggctcctaaatgaagccctattaaagaattttttcctaagggtttttttttacaaaaaacttatcttggyacagttttttttttttgagacagagtctcactctcttgcccaggctggagtgcagtggcactatcacagctcactgcagccttgacttcctgggctcaaatgatcctcctgcctcagcctcccaagtagctgggactataggtgcaaaattttgtacttttagtagagacagggtttcgccatgttagcctggctggtctcgaactcctgacttcaggtgatctgccctccttggcctcccaaagtgctgggattgcaggagtgagccaccatgcccggcctagattttttttttttttgagatagggtctcgctctgttgcctaggctggagtgcagtatgaaccctgggcggttttctcgaaaaaagtactgtacctttaacgtagtacaaaattttggcacgattccaaaattgtaag

SEQ ID NO: 662608 - DNA, 540 bp, Homo sapiens
ggcctggctgcttctaaaagcctattctcatttgcaaaagcaaataaatgacctgaaactagaatttatatttaaaagggaagcagagcataaaagtttggaaaattttcagcctgaccatgtggtagaaaagaaaaacacatttttttgaggaggaattcagggctgcagaactttgcataagtaaagaagagtcaaatattaatagccaggatgatgggaaaatgcctccagtacatttcagagacctttgtggcagcttctcccatcacaggcctggagacctaagaggaaaaaagtggtttcatgggccaggcccagggccccactgctctgtgcagcatcaggacatggygccccgaatctcagccactccatttccagccatgattaaaagtccacagatacatctcagtccactgctccagaggatgcaagctataagaagccctggaagcttccatgtggtgttgggcctgcaggtatacagagggctagagttaaagcttgagagcctccacctagatttcagaagacatg

SEQ ID NO: 662609 - DNA, 373 bp, Homo sapiens
ataggaggttggagcccctacatggagtccccactggggcactgcctagtggagctatgagaagaggccaccatcctgcagaccccagaatggtagagagcttgcaccaggcacctagaaaagccacaggcactcaatgccgctcagaaagcaggactgtgacacggcctttcctctctyggatttggatgcttcagcttgagtttgtaggattttgtaagggtgagtcacagtatttcactggatacagagaaatctgacactccacagattctagaataggccaaattccatgaattatgtgagatattgaaatactcttttcaaataccttgtttctttatacttaaggttataaggccaatcagaactt

SEQ ID NO: 662610 - DNA, 501 bp, Homo sapiens
gattattctggtatcacttcaggaacaaatatagtacatgtttacttcctgagtgaaaggcttctcaataccacatggaggagagacaaactctccaggctcagccctactcaaattcctaacccacagcaatccaacagtcattgtttccagctattaagtttttagtcatcagtaaatcagggactctagtgatgaattttcccctcccaacccaaagccatgttccatctagccgtggaattcttgtggaccatccctggaggttttccattgtgtatcgccatgcaatctcagctttccttcacaacggatgcatccatcatttccctctgccctctcagactttcttccaagggtcatgtagcttggaggctgttgactccacaytgaccccagcctgttctgaattcttcaggtcaccatagaggtggtcgacggtcctgactctgaagcagataaagatcagcatccggagaataagcccagctggtcagtccc

SEQ ID NO: 662611 - DNA, 362 bp, Homo sapiens
tgctctttggtttttgtccttggaaggctatattttgaaagatgttatctgtcagatagagcttattttaataacattaggttctccatgttttattaaagacatccataacttccaactaaagcttctgatcacagtataagcaaattgagttgatgtcatttcatgcaagagctggtgtgacctcatcttggttgggaatgtgatgttccctttgcaatttaaaaatattgaaaatagttctcagatccccattactattcctgaggaacctagcctcagtaccacyggtaatatggcaagactgcaatacctgagtcttagaaccacctctgtaattctgtgaaatggaaagagtgtag

SEQ ID NO: 662612 - DNA, 362 bp, Homo sapiens
tgctctttggtttttgtccttggaaggctatattttgaaagatgttatctgtcagatagagcttattttaataacattaggttctccatgttttattaaagacatccataacttccaactaaagcttctgatcacagtataagcaaattgagttgatgtcatttcatgcaagagctggtgtgacctcatcttggttgggaatgtgatgttccctttgcaatttaaaaatattgaaaatagttctcagatccccattactattcctgaggaacctagcctcagtaccactrgtaatatggcaagactgcaatacctgagtcttagaaccacctctgtaattctgtgaaatggaaagagtgtag

SEQ ID NO: 662613 - DNA, 537 bp, Homo sapiens
actaatcatcctggggcatggcagtaatggggaggaggggagctgggggcaggggtgcctcagcacaagyctagccacgcatgagatctcactcacaccccacgcagcccatacacctggggttttcttgatgccattttacagatgaggaaactgaggcccggtgtgcagggaaacgtgggtgtcactggtggcctgcagatgcccaggaaattgggtcttgttgtagaagtatcaccccaggacttgggagaaatgcagactctcaggcctccctcctccctgcagaattagatctgcattttaacaagactcccccaaggtggccacactaaagggcttccccagggtcacctcactgagcagggcagcaccatgatgtgtctgtctgactccaatgcaagacttctttccatttatgtgttttttgccctcaaaaagccatcagaaggaactttttaaaaatgcaaatcaatataatgcaaatgacttgcttataatttttctgtcgattccgatgtccttcagagcaagccc

SEQ ID NO: 662614 - DNA, 553 bp, Homo sapiens
tagaactgttttgacccaggaaacaatttgactaaaggatatttcaatccaacaaatactctctgggcccttccaatgtttctggcactggtttgatgctgaggacatagagatgaataagaaatggtctctgtcccccagctgataaattatcattgatgatctaccgtgtgccagggactttacaaatgtgattaccatttcttacaacatagtaaggtagatagcatttttgtgttacwggtgaggagtaggaagttcaaaaagtttataaggtcaaagtcacacaactagtcagatgtagaactaacctttggatttgggactgttcaccatcaaatcctatatgcttttgatacagacaggagacccagaaatactgggtagaagagggtggttccctggcaaaggccctaccctcaaacctggaaacctgcagccctaaatgggaagaggcattcctgttttcatgcccaaaagttgccttttggcccgtcatgtcccctatcctatacctgtataaaccccagaccccaggctccagaagcagatg

SEQ ID NO: 662615 - DNA, 529 bp, Homo sapiens
gtccttcttcacatgtcgtcgtcatcaaggagaagtgctgagccaaagggggaaaagcccttgagaaaaccatcaagtcttgtgagaactcactcactatcatgagaacagcagcatgggggtaacagccccacctgattcatttacctcccactgggtcccttccatttatcaactttggygtccccacagctccagggtggggaaagaggaaataatactttccctcttttacagaagacgggttgaagatccgagaggctgagtcacttccacaaagtaacacagctggtaagttccaaggctgggcttcttgctccaagactggtgctagttctggaggaaccaggacgctcctggatttatcctctggagtttatggagcagaccgtgcactgccctactcaaagtatcttgggtgtaaatgagaagtagactacacatgagagggaaattttgggctgagctggactttataataagagaaagtgattggaaagctgtgggatttgctgagagacctttggga

SEQ ID NO: 662616 - DNA, 529 bp, Homo sapiens
gtccttcttcacatgtcgtcgtcatcaaggagaagtgctgagccaaagggggaaaagcccttgagaaaaccatcaagtcttgtgagaactcactcactatcatgagaacagcagcatgggggtaacagccccacctgattcatttacctcccactgggtcccttccatttatcaactttggtgtccccacagctccagggtggggaaagaggaaataatactttccctcttttacagaagacgggttgaagatccgagaggctgagtcacttccacaaagtaacacagctggtaagttcsaaggctgggcttcttgctccaagactggtgctagttctggaggaaccaggacgctcctggatttatcctctggagtttatggagcagaccgtgcactgccctactcaaagtatcttgggtgtaaatgagaagtagactacacatgagagggaaattttgggctgagctggactttataataagagaaagtgattggaaagctgtgggatttgctgagagacctttggga

SEQ ID NO: 662617 - DNA, 411 bp, Homo sapiens
ttaacgagttaatggcaataaagggatgtaaaactggagttaaagctggaatgtgaggtgggtgaacagagatgaccrggtaggctcacttgttctttgagctgattcactttctcttgaagaagccttttcactagtttcagtttctgttcaacttctatcattcgttcctccatgacagttaccagttgttcctggtttccctgaagggaagaaaagtatattattcgaaaatcatgtcacactgaaaacactggtttattttccccacaagatgcctagagaaaggacagcaaatgttttgcctttgtaacaggaaggatggatttctcatgaaatgagagttttgagccctgcatggattgcatatgtcagaaaagtaaccctatcagataaaggatcagactgaaa

SEQ ID NO: 662618 - DNA, 569 bp, Homo sapiens
aggttatatattttctgtttcagcaggaaagaatcaaagtgtctgatagaagcatggggtgggggaagggatttccatctgataagacttaagacaataaaggaaaagactggaattctgttaaaaaaaaaagtctatcctgaagacatcatagatgtaaacatgtaaacatgtaaaatgtttacaatttatgttggggctttaacatgtacgaactaaagcaaaagtaaaatatgatcaaaagcaattcataacaagatttcttttcatacattcyacccaggagaggaggccaaggtggcagatcatttgctaccccctagtgccaacataggctctcccacccgtgccaccatatcacagtgggcactatgaataggcaccagatgagctccaagtcgcttgtaagtaatgaagcctgaagcttcacagtggacttacattaaatataaatttagttgcttcaaagcaatctccataatagcctccctctcacatgcctgtgtttctagatgttttcttgagtgggagatgaagggtggagttgtaagtagactgcagtgaatgat

SEQ ID NO: 662619 - DNA, 590 bp, Homo sapiens
gacatcacagagcttccacaggtgagagtatctgctccaatcaccagctccaagaagggacatgaaatgcctggccaatatggcgaaacctggactctattaaatacaaaaattagccaggcgtggyggctcgtgactgtagtcccagaaacttgggaggctgaggcaggagaatcggttgaacctaggaggcagaggctgcagtgagccgagactgcgccactgcactccagcctgggcaacagggcaagactccatctcaaaaacagaaacgaaacaaaacaaaaagaaatgctatcaaaacaaagtataaatgactgccatgctttcagtgtttcagtgtttgagttccttgaaagtgtatttatgattctccctggattgttaagcttctgagtcatttttccttctttcccattttccatttctcctatttggcatcactacaaaaattaaagtgggcttcaaaggaaagcagacaagcccagcttgcctggaggtgtctcagaccccatccctggaaagcttattatgagacacaccaatcagaggaaggtggctttgaggcagtccaacctgacctagtttaa

SEQ ID NO: 662620 - DNA, 617 bp, Homo sapiens
gctaaccctccccccgccacaagaggccaagaatggctccagtttttgcaaagaagtcacatatttttttcaagtgtgagtcccatttaacatcacactcatgtgccaagtgcctgagaatatcatcttttgcacatgaatttcaggatgatggctactcctgtctgtctcaggttacagaaagccaatacatggtactatatctgaagtcacttacctctcttgtcagctaaaagacagtgaaaatgaaatgaagaaaaggaagctcagtcactagaataaagttaagcctcacaactgcttcctcaatttatacgtgataaaaaccagaatgaagcaacagactgcaaaaagtgttgtccatctttttctctcatcattccaaaatccaacagcaagagacttgactcaaagccatataaacctattgattataaatagctattaattataaataaggcaaataataaaarctattaattataatgaggagaattgaaggcaatctcaggtcatggcagatcaaatatccaccattggcaagaggaaaaaaagaccctctctcacttcttactcacatctgtgacttgatctatggtaataacatgactatttgt

SEQ ID NO: 662621 - DNA, 642 bp, Homo sapiens
ttccaaaattaatagggcaaaaatctttgatttagcaattagaagcatttgaaaattctaatacctctatgagaataaaaatattgatttatctttacattaggatttaaattattcatagcagattcttcctccaatggatttttatagggtggtgtggacccactgggatacttgaagaggaacaaatttgtttcaaataaaccttacacacttcaaaactttggctaggtgggaaactagtgatagattagaagagtagtagattaatgtcggagagacttaactgtccattgaataaaactgcacaatagaaatgagttaaaaattaccacaagcaactatttttgttgctataggataacatggtgaacaaccaattaaatgacactgaaattgraactgtcagctcttagcacttatttcctttggccacgataatggaagaaatgagagtacatgctggggcaaagaatcaaatcactgataatgaaaataataacacttttgaagaaaaatagatgcaaccactaagttaatgaaaataggaagaaagtattcaaactttgctttatcccaaattaaatcactcatttccaggttttgagtgttctctctacagcaaggaactatgatggaagt

SEQ ID NO: 662622 - DNA, 575 bp, Homo sapiens
tagtgactgggtctctctatgttcagtgttgggtctctctaggctggtctcaaactcctgaactcaagcaatcctcatgcctcagcctcccaaagttctgggattacaggcatgagccactgtgcccagccaatttactgctattctcactagatgtgtgtttctattcctgggttctctatttttgtattagtttctggattagctggacttcatctgactagagttttaaaaaaaaaaattcttttttttttaattgtagctctgaggcattttattataaaaacttagtactcatatatataaactaatatgaacttaaaattcatcatacatttacttcattttttagcttgaccttctagtaaatctttagcttcattgattttggctgctatataaggagatcctcctttgtcaggatgatttgaaagcataattygtcagtgagcatctcttattttccctttattggcagtagggcttacacctagtattaatgctgcttcccgttttgtcattttgggttcaaacccacctctataatagccaccactgaaggcagattttggtag

SEQ ID NO: 662623 - DNA, 593 bp, Homo sapiens
aatcctccatagaaccacaggcatgagatgaatgaaagggcactgttaaaacagtgataggtgccatgggggtctgtaatacctactcgtgaagcttgtttgagccatctggttatgattatacttgctcctaaatgtaccaactccatcttgcaatgtactgttgcttgggctatctgacctttctatttggtaagtctgataggacccagctcatgatgggaatttatataatatatacatggttacttgatactccatggtcaggcatcctgtctccaccagggttcaggagcacatcaaaaggtatatcattctctaccaaaaatggcattgccttgctccaaaaaccaagggactaacattataatttgcccactgggacttgcaacaaactccacatagaatcttgtcttatcacttacacctttatgatcataaattctgctaaattgtatgacccaagtgacagggctgcttgcaccccagcctggatctgttgctatttcctactcckgatctgatttaaagttggcagcattttatgtcatccagtatgttggctggagaagtatccctaggtgtagaaatgt

SEQ ID NO: 662624 - DNA, 572 bp, Homo sapiens
aaacaaaaatctatatactagtgggaccataacagcacagccgatctcagattccttagaggttttgacttaaaccacatagttagttgtcattttattttaaagttccagtccagcttttctgagttagtaagcaccctgaagtccagagtcctttgtccagagtacatccacttttatcatacaaatttctcacataataaggaaggcaagagcctttctccaactgacttactacgttcctatacttgttattagtaaatatgcaaaaaaacaaaacatgaaaaagggctttgaaggaagacaggtttgagtgaattatttgctgatagagatatacaatttcattcatacagttgatttgctgctagcaagtttctcagattataggaaatggaaacrgcatgtttttgttgtgtgtctgctgcctctgttgcaaagataaacccttaattggcaagcctttgacatctaatggcatttcatgttatggtcttatagaaataatctgtctgggcttcgtgacaaagttgttttgtcataatggaggaaaagctgtgataatgcatgcg

SEQ ID NO: 662625 - DNA, 584 bp, Homo sapiens
tcccagctaatcctgaggctgagatggaaggatcctttgagcctgggaggcagagactgtagtgagccaagattgtgctaccacactctagcttgggcgacagagaccctgtctcaaaaagaaaaaagaaaaaagaaaaaaaaataaatataatttcaaacagcaaaaaaaagacactgaatgtttccaacaccagaagaagataaatgtttgagatcatggatatgctaattaaccagatctgatcaccawgcattacatgtataaaaacatcaccatgtaccccatgaacatgtacaataactatttgtcaattaaaaaatttaaaagaggaaatgttcttgtacaaaagctttgcagcatttttgattgcccttattgaccccccccataggaaaagagcctgttgcatgacaagagtgatgccaccttgaagtgaaactaccatgatgaccatgatgactcctgcagcaaggtctttaagaatgcctgtaacatggaaaacgtctcataaataaacaatccctgtagcataaataaagatgcttatctaatctccccagtagtcacgtttcacaagaaag

SEQ ID NO: 662626 - DNA, 584 bp, Homo sapiens
tcccagctaatcctgaggctgagatggaaggatcctttgagcctgggaggcagagactgtagtgagccaagattgtgctaccacactctagcttgggcgacagagaccctgtctcaaaaagaaaaaagaaaaaagaaaaaaaaataaatataatttcaaacagcaaaaaaaagacactgaatgtttccaacaccagaagaagataaatgtttgagatcatggatatgctaattaaccagatctgatcaccaagcattacatgtataaaaacatcaccatgtaccccatgaacatgtacaataactatttgtcaattaaaaaatttaaaagaggaaatgttcttgtacaaaagctttgcagcatttttgattgcccttattgaccccccccataggaaaagagcctgttgcatgacaagagtgatgccaccttgaagtgaaactaccatgatgaccaygatgactcctgcagcaaggtctttaagaatgcctgtaacatggaaaacgtctcataaataaacaatccctgtagcataaataaagatgcttatctaatctccccagtagtcacgtttcacaagaaag

SEQ ID NO: 662627 - DNA, 416 bp, Homo sapiens
ctgttgaaactaagttggtatcaatccaaactaaggtagtatagatttaggtggaaacaacccaaatgtcaatggaggaacagataaataaaatgtggtatacacacacacacacacacacacacacacacacacacaaaatatggaatactgtttagccacaaaaaggaatatagtactaatctacaacrtacaatgtttgatatataaacctcagaaaaaaactgtgaaggaagctatacataaaaggtccatattgtaatattgtatgattccatttatatgaaatatccaaataggtaaattcatagagacaggaagaagattggtggttgcctaggactgtggggaggggagaagagagagtgactgcttaaggggtatgagatttccttttaggatgataaaaaatgttt

SEQ ID NO: 662628 - DNA, 481 bp, Homo sapiens
atcacctttcatgtcccatgaccattttctgttttgtatattttttaaagttgatttattaggtctctttgaatgttatttaaattagccctttgtcatatgtgctgagtatttttttcaagtgtatcatttgcctgttaacttaaaattctattttccccctaattctatgtcccagttttggttagtgtgctctgggatttttgacccattccatagtaatagttattactactaccactacagtaaattcttacaagaactttccatgttttttgggaggaggaggaggagtagttacattcaggatcatatacataattgtttagcttcagttctgtatttatatrtgtcacttgtaactgactgggatacgttctgagaaatacattctcaggtaatttttgtcattgtgccaatatcatagagtgtacttataaaaacccaggctatatattataacctattctgggcttcaaac

SEQ ID NO: 662629 - DNA, 592 bp, Homo sapiens
tttaattttattcccaaatgttcttcttgatctcttttcacttattattccttttttttattattagcaacttgtttttgtttcaggaataaaatatctcctcacatttctttaatgttataagctagatccttttggaaattttcctttgctcactgctttgtttctatttcctttgagatctgtttttgtttgcttttgatagtcaatctgtctaatatgaggacatttacttaacagtaatattttgctgtccatttatgtttaaaagttagaaattgaaaggctgtgcatgcatgggtagggtytgcctactagggatgtcacagagctcaatctagtggtaattggccatactgatggtcatcccaactgccagatggactgccaactgccagtcccatcctgcctattcatcaggataggctatgcccaaaacaaacaaacaaacaaacaaaaaaattagtggttcaacatactggggcagtgtgttcactacaaatcaaagtggctcttaagggcaggtatacttctcatggtagctcagccatctaggctgcttccaggttgtagttccttcacaccagaacac

SEQ ID NO: 662630 - DNA, 592 bp, Homo sapiens
tttaattttattcccaaatgttcttcttgatctcttttcacttattattccttttttttattattagcaacttgtttttgtttcaggaataaaatatctcctcacatttctttaatgttataagctagatccttttggaaattttcctttgctcactgctttgtttctatttcctttgagatctgtttttgtttgcttttgatagtcaatctgtctaatatgaggacatttacttaacagtaatattttgctgtccatttatgtttaaaagttagaaattgaaaggctgtgcatgcatgggtagggtttgcctactagggatgtcacagagctcaatctagtggtaattggccatactgatggtcatcccaactgccagatggactgccarctgccagtcccatcctgcctattcatcaggataggctatgcccaaaacaaacaaacaaacaaacaaaaaaattagtggttcaacatactggggcagtgtgttcactacaaatcaaagtggctcttaagggcaggtatacttctcatggtagctcagccatctaggctgcttccaggttgtagttccttcacaccagaacac

SEQ ID NO: 662631 - DNA, 592 bp, Homo sapiens
tttaattttattcccaaatgttcttcttgatctcttttcacttattattccttttttttattattagcaacttgtttttgtttcaggaataaaatatctcctcacatttctttaatgttataagctagatccttttggaaattttcctttgctcactgctttgtttctatttcctttgagatctgtttttgtttgcttttgatagtcaatctgtctaatatgaggacatttacttaacagtaatattttgctgtccatttatgtttaaaagttagaaattgaaaggctgtgcatgcatgggtagggtttgcctactagggatgtcacagagctcaatctagtggtaattggccatactgatggtcatcccaactgccagatggactgccaactgccagtcccatcctgcctattcatcaggataggctatgcccaaaacaaacaaacaaacaaacaaaaaaattagtggttcaacayactggggcagtgtgttcactacaaatcaaagtggctcttaagggcaggtatacttctcatggtagctcagccatctaggctgcttccaggttgtagttccttcacaccagaacac

SEQ ID NO: 662632 - DNA, 561 bp, Homo sapiens
tgtttatttgttccaccacctacatgtgccaggtgggacactggagaaacagggatgaatgagacagacaaggtccctgttgtcacagagctggtagcctagtgacaacaacaacccaagaaattaatggaaataactatgataggggaagtacgggatgctatgggggcttattgaggggcacccaacccggacttgagggtcaggggcttctcaggaagtaatgtttacggtagccttcatcaaggctctttagatgcttgatccctccattttattctcattcatcatcactcccacatggctttgcttccctccctcacttycctaaactccataatgcaaccttctaactaatctcttcctcatgtgctcattactgatactagtccccttatctttctcccacagccattctgaatactttcaatcttggataaacttaacaattagccttctctgatcttataccttggctgttgagagcttcttgagaaaaccacatcaatgtgccaactgatagcactgaattctggatctctgatctccactgagccccat

SEQ ID NO: 662633 - DNA, 579 bp, Homo sapiens
ggcacccaacccggacttgagggtcaggggcttctcaggaagtaatgtttacggtagccttcatcaaggctctttagatgcttgatccctccattttattctcattcatcatcactcccacatggctttgcttccctccctcacttccctaaactccataatgcaaccttctaactaatctcttcctcatgtgctcattactgatactagtccccttatctttctcccacagccattctgaatactttcaatcttggataaacttaacaattagccttctctgatcttataccttggctgttgagagcttcttgagaaaaccacatcaatgtgccaactgatagcactgaattctggatctctgatctccactgagccccatatacataatccttattctagccagatcatttctagttcygacaacaactatttcagtgttttctcctctgttcacaactttactatttcactaatgttgccatcacacacatgccaaattctaaaaactcttcacaaatttcatcttccatgacctctttggagcatctagaaacttagatctctcccattatcttt

SEQ ID NO: 662634 - DNA, 482 bp, Homo sapiens
cattaagcttaggaacaaggaatgatcttcataaaaggctggattctgagctacagattcaaagtgattgcataagagtccaaacgagttcarctatgtcattggagattaaacgttcttggctggatttgtgtgagttttccaggggatgggtctcagggagctttgggagaattcattggctgtctctgcacccagcttccttactcaccatcccctggtgacagctgtctgtgagcatcaccagcaagaggacaactttgcagaaacaataacaagattttaaagaccgaaaaaactactgggttttatttcagttgccataaatgatactgatgtattatatttattttgctttgatctttacccttctcattatgaaatcatatttagcttttagttaacattagttacttaatgctgatactattgattgtcactcttgatgagttatggtcctgaaagaaaggctgagactgggt

SEQ ID NO: 662635 - DNA, 574 bp, Homo sapiens
aaagtgcgtcagcaatcaacatataaaagcgcatgggccagacatggtcactcactatcccagctacttgggaggctgagacaggaggtttgcttgaggccacaagttcaagaccagtctgggcaacatagcaagtctccacctcttaaaaaaaaaagttaaaaagaaaaaattgactgggaatggtggcacgcacctgtagtcccggctacttgggaggctggggtggaaggatcacttgagcccaagagttcaaggctgcagtgagctatgacagagcaagaccctgtctctcttaaagaaaaaaaaaaaaaggattggggtgggggcatgggaactgtatgctaaataacacaggarcagcagatggttttaatctaagacaagatatgtattccgagtattctcttgcttctaattttttatgaatatatgatctgttgtttggttctttgtacccattgagatatgtttatcacaaatggaggggttttttttcacacttttggttagaactgactattgggtctgtgccaaggaagaggcaaagaattaaaaagacttcatcaatgta

SEQ ID NO: 662636 - DNA, 574 bp, Homo sapiens
aaagtgcgtcagcaatcaacatataaaagcgcatgggccagacatggtcactcactatcccagctacttgggaggctgagacaggaggtttgcttgaggccacaagttcaagaccagtctgggcaacatagcaagtctccacctcttaaaaaaaaaagttaaaaagaaaaaattgactgggaatggtggcacgcacctgtagtcccggctacttgggaggctggggtggaaggatcacttgagcccaagagttcaaggctgcagtgagctatgacagagcaagaccctgtctctcttaaagaaaaaaaaaaaaaggattggggtgggggcatgggaactgtatgctaaataacacaggaacagcagatggttttaatctaagacaagatatgtattccgagtattctcttgcttctaattttttatgaatatatgatctgttgtttggttctttgtacccattgagatatgtttatcacaaatggaggggttttttttcacacttttggttagaactgactattgrgtctgtgccaaggaagaggcaaagaattaaaaagacttcatcaatgta

SEQ ID NO: 662637 - DNA, 559 bp, Homo sapiens
atccattttagcaaatttcctgataattcaaataatcttctaacctggctacatgtsccattgctttcccacttcagttttgatcgctgatactgttccatgctggttgcctaatatgaagatttgagaacgtagagaagtaaattaaaggaaggaaaagcagcagttgttccaaatgatgctattcaagtctgagcatgtgggttgcatttattataaaggcaggtggttgaaagacctaagtttacaagactcataattaactggctttcagcagaaggtgcagaaggatactgccaaaatgctctgggacaaatatgtggacagttctcaagagctctgggagacaagattgcagaaagcctagcaattgggtaattgtctcctagcaaccaacactgtttaagtaatcagtatgcattccagtcaggagagtccagaacatttcagttatacttaacactaagtagaccagtaagtagaatcagttgtgaccatattttcaatagcacttcctggagaaacatttcagcatacctgatcagcttgagtaattcaa

SEQ ID NO: 662638 - DNA, 604 bp, Homo sapiens
ctagcaattgggtaattgtctcctagcaaccaacactgtttaagtaatcagtatgcattccagtcaggagagtccagaacatttcagttatacttaacactaagtagaccagtaagtagaatcagttgtgaccatattttcaatagcacttcctggagaaacatttcagcatmcctgatcagcttgagtaattcaagtaggttttctcttttggtgcaagaatttgaaatgagaattttttaactgtaaatatattttctaaataaggataatttgagccattttattgaaattactgaattctgatagaaaatccaaagatgtggacactttagttggaatatataggacacagtaaagaaaatgggttgcctgtcattaaatgtccccttatctcatgaccaatggaaatactcaagacctatgcattttcatttcagtcttggcagtgcattatataattcacttgaactgctctcttttctactcgcaaatgaatactcgggatctatttttttccatgatgtctcctttttcctccctccagagtcatgacaccctgttcaaactctctggacttcagccagttgtttggctagataca

SEQ ID NO: 662639 - DNA, 507 bp, Homo sapiens
tgcttcttattcactatgatggtgaatagggcattctggaagtccatggttggtgrttttggcagaggcattgcatgcaggaaaggcgaattcatctccagagtcaatgtccattccagtaaggataaaacactgtgccttccttgatggaagaggtccagtgtaatcaacctgccaccagttagctggctgatgaccctggggaatggtgccataaagggggctcagtgttggtctttgctgctggcagattgggcactcagcagtggctgtagccaggtcagccttggcgagttgaagtctgtgttgctgagcccatgcctaacctccatccctgccaccatagccactttgttcatgagccactgggcgatgacaagtggctgggaaaagaggctgactggcatccatagaataggtcattctatccacttgaaatcctcctctgctgaaggttactctttggtaagcattcacataggaaactaatatcttcatgtttttagc

SEQ ID NO: 662640 - DNA, 591 bp, Homo sapiens
gcctcaggactttcatctaccaggaggacatatcaaaagtatgccggcttggccacttttacaacttatttctgctcagaaaggcaccaactcaactgttcagtagataagacaccaggctagcagggggaccccttgcccttgctcactacccccttaccttataaagatgtctgttttctgctccaaaggtgaagtggcgtatttaaaggcaggacgctttgtgccccttccccaagctagctttggagtaaattcacttgccttgtatcagaccttactcttgttaattggacttcgcatgcagtgagcaattaacctgctttttggatacactagaaggtgctgctgttggaggaggaggaggaggaggaggaggaggggaggtgggaaggtcagcaaaagccatgtcatgaagggacctttacctgctaaggaatttggacttyatcttggaaagaatgggaacctgtaaagctttctatcaccttgtcttcctaactagattataaattccttgaaatcaggatctgttattcatctttttattctttataacgtctggccctggtcctggaatgggtaggacag

SEQ ID NO: 662641 - DNA, 507 bp, Homo sapiens
tgctgccctgttcccacattgcatcactggttcttattcatggatgcccttgttatactggttgaccaacattttgaacattgacctgcagatgtttaccaaagccatttggtaacgtgtgtccagagcttggaacattcctrttccagaaagtgataagagatgcagaagaggaattatgtgcgagaatgtttttggcaatgttgtctctaaaagccaatgactgtaaacaacttagaggaggatagctacactatagccatagtcatactatgtatgcagacagcagagcattttgcagccagtgaaaagtcatgtttctaaagaaattttaatgacatgggaatctgctcagtatgtaatggcaagatttttaaaaagatacagtagtctcctcccctccctccgtggttttgctttccgtggtttcacttatctgcagtcaactgagatccaaaaataagtgactacaggacaataagatattttgacaaagagagagaccgc

SEQ ID NO: 662642 - DNA, 570 bp, Homo sapiens
gggggatttgtctaatctctaagatatattgttgaaacaaaatatcttatgcttttaacacactttacaactccaccaagatactgttagagaccttggaaatttcagatctctcttcttgggttatgccatgtaaatgggaaacttggttacaagccagaccatgaggacacctcatacgtctccttgtgccaccccttcccactctcacattgaaatgttccatgctgtttacgctaatctatgccttactctctatcagtctctgctatcatcaccccaaggtttccttaatacgatgtcagcgcatcacagggccagttgtattcgccatgcctttttcttttctgtaattgtgatgctgtgacatcttggggctttgctgaccctggagggactgcccctcctagggctagccaattcctagagattgcaaatgaccagcttaggagcaagcctttcggatgcaagctagccaatcctagcccataccccactatcccctccattggsctgtcacagtcacgtccagtattcccctgccctaatcaccggagggtcagtaccagg

SEQ ID NO: 662643 - DNA, 573 bp, Homo sapiens
gatctttctgaagtgtgctaagtaacagtacctaatttaagattaaacatttttcttggataatccaccaagtacaatgcaaatgttaataaatgacccttcattcttttttgagaaatggtgtgaatgattgcagtcacagactacttggcaagctagggcagrggaaaaatagcaacaattagtaaacaagtacacaaattgatttgttttgtgggatttttataatgtctttaaaaatgttaagcattatattacagtgataaatatatcatgaaattgataaatcaataaaataataataatttctttcttccaggcatacgaaaccttgctccagaaggtacttaatgagaattgagtctctgtttcttagtaaccagaataatcaaacccaaagaaatctatgttcatctccaagtaacataacaccagaatttagctaactaaatcaatgttattatgtcatatagtttctgttaaaaatgatactattatgattatcaaaagatacagatacttattgcactgttttcataaaaattgaaatatgaaattgtagttgagaaatat

SEQ ID NO: 662644 - DNA, 573 bp, Homo sapiens
gatctttctgaagtgtgctaagtaacagtacctaatttaagattaaacatttttcttggataatccaccaagtacaatgcaaatgttaataaatgacccttcattcttttttgagaaatggtgtgaatgattgcagtcacagactacttggcaagctagggcaggggaaaaatagcaacaattagtaaacaagtacacaaattgatttgttttgtgggatttttataatgtctttaaaaatgttaagcattatattacagtgataaatatatcatgaaattgataaatcaataaaataataataatttctttcttccaggcatacgaaaccttgctccagaaggtacttaatgagaattgagtctctgyttcttagtaaccagaataatcaaacccaaagaaatctatgttcatctccaagtaacataacaccagaatttagctaactaaatcaatgttattatgtcatatagtttctgttaaaaatgatactattatgattatcaaaagatacagatacttattgcactgttttcataaaaattgaaatatgaaattgtagttgagaaatat

SEQ ID NO: 662645 - DNA, 581 bp, Homo sapiens
gatcatgaggttacgagttgagaccagcctgaccaacatggggaaaccccgtgtatactaaaaatacaaaaattagccgggcatggtggcacacgcctgtaattccagctactcaggagggctgaggcagaagaattgcttgaatctgsaaggcagaggttgcagtgagctgagatcattccactgtactccagcctcagtgacagagcaagactccgtcttaaaaaaaaaaaaaagaaaggaagaaagaaagaaaaggaaaagaaaaagaaaaaaaaaacaacaaaacacaccagctggatgcagtggcacacctgtaatcccagctacgcaggaggctgaggcacgagagttgcttgaacccaggaaggaagtgggggttgcagacagccattgcactccagcctgggcgacagagtaaaaacttttgtctcctccaccaccaaaaaaaaaaaaaaaaaaaaagacaaagaatgtctaccccaattccaaagtaaaagcattacaagacatgtactaagaagaggttttcaaagggaagcttcttaaatggaaattctgaccataagacattagctgca

SEQ ID NO: 662646 - DNA, 604 bp, Homo sapiens
agaagctctttatcaaacttgagaatatttagagaatctctagacagattattgtgcgtattaagactactgatgttatgaggggctcrgagactctcgcagatacaagcaaaaatgctagaccagacatttacaggtgaaatctctctctgagaaccaaattttagaggagtagtcaaagggaaacatccttatatcatccatgtacaaatcaatgaatgctactatcatcacctatttggtaggaggaattttaaaaaggcccaagctgtcagtagtttgaacaaaatggtgttcccttctggggcttttcaacatcgactcacacgcccatgtgattctgacctgctactcttttgttgcattattttgttaagtgtttactcctgagagatgattctgtcctaattatctcttacccacatgtctttcgttttttagtttgtgttctagttcattttcagagcgttcgctctcatgactgctgtctttcttttggtttttagatcttcttccttctctttctttagttcctggtggttgagcagggataatgctgaactggggccaggtgttaattaagcaaaataagtcaagcaagtca

SEQ ID NO: 662647 - DNA, 604 bp, Homo sapiens
agaagctctttatcaaacttgagaatatttagagaatctctagacagattattgtgcgtattaagactactgatgttatgaggggctcggagactctcgcagatacaagcaaaaatgctagaccagacatttacaggtgaaatctctctctgagaaccaaattttagaggagtagtcaaagggaaacatccttatatcatccatgtacaaatcaatgaatgctactatcatcacctatttggtaggaggaattttaaaaaggcccaagctgtcagtagtttgaacaaaatggtgttcccttctggggcttttcaacatcgactcacacgcccatgtgattctgacctgctactcttttgttgcattattttgttaagtgtttactcctgagagatgattctgtcctaattatctcttacccacatgyctttcgttttttagtttgtgttctagttcattttcagagcgttcgctctcatgactgctgtctttcttttggtttttagatcttcttccttctctttctttagttcctggtggttgagcagggataatgctgaactggggccaggtgttaattaagcaaaataagtcaagcaagtca

SEQ ID NO: 662648 - DNA, 424 bp, Homo sapiens
ctatagatagccctttatttgcttagaataaattctgatttttcaaattgctcgcagtacctttttcctctgaattctatgcaagaagtttactacatcaagggaagaagaaaatacagataggacaagatctgataaaggattcaatagttacttatcaaaagattaaaatggacttaatctccttcatgtagctggggcccttttctattcaggcrgaaatttaggttagaagaggatatctctaaaatactgaagaagattttttgcttgcttgttttttgtttgcttgtttttagagacagggtcttgctctatcacccagtctggagtgcagtggtgtcatcatagctcactgcagcctcaaactccgggattaaacaatcctcctggcttagcctcccaaagtgctgggattacagac

SEQ ID NO: 662649 - DNA, 610 bp, Homo sapiens
gcttaccatttctcaagatgttcttatcctttcctatcaagacacatgcttttttttttctttgatgtaacacatgtatgtccttatatggctatacaaacattatttgttgcattttaggtagctagaagacaggcagtttttactgtttaatctagtttatggaatgctcaattgaaagatttrcaaatataaactcttactaaatcttttaaaataataattttaatcataactctacttacagaagattattttataaatcaagtgttcttaaaccaggatggaactatatataaaattaagtatttgtgtataaatgtatatttttctctgtagagagggtgcatagctttcattacatacaggagtttgttacccagaaagagtaagaaccattcttatgaatcactacttctacagcaatgtttttactttgtcctaactcattacttgcaaaggaattttttaaagtaccagtagttgtttcatagacaacagaaccagtcaaagaatcatttaggatagttcctgatgctacttccaaacctctaccttgtccccactttgctaccagtcttgccttcagcttaattgaagaacaaaataa

SEQ ID NO: 662650 - DNA, 610 bp, Homo sapiens
gcttaccatttctcaagatgttcttatcctttcctatcaagacacatgcttttttttttctttgatgtaacacatgtatgtccttatatggctatacaaacattatttgttgcattttaggtagctagaagacaggcagtttttactgtttaatctagtttatggaatgctcaattgaaagatttacaaatataaactcttactaaatcttttawaataataattttaatcataactctacttacagaagattattttataaatcaagtgttcttaaaccaggatggaactatatataaaattaagtatttgtgtataaatgtatatttttctctgtagagagggtgcatagctttcattacatacaggagtttgttacccagaaagagtaagaaccattcttatgaatcactacttctacagcaatgtttttactttgtcctaactcattacttgcaaaggaattttttaaagtaccagtagttgtttcatagacaacagaaccagtcaaagaatcatttaggatagttcctgatgctacttccaaacctctaccttgtccccactttgctaccagtcttgccttcagcttaattgaagaacaaaataa

SEQ ID NO: 662651 - DNA, 610 bp, Homo sapiens
gcttaccatttctcaagatgttcttatcctttcctatcaagacacatgcttttttttttctttgatgtaacacatgtatgtccttatatggctatacaaacattatttgttgcattttaggtagctagaagacaggcagtttttactgtttaatctagtttatggaatgctcaattgaaagatttacaaatataaactcttactaaatcttttaaaataataattttaatcataactctacttacagaagattattttataaatcaagtgttcttaaaccaggatggaactatatataaaattaagtatttgtgtataaatgtatatttttctctgtagagagggtgcatagctttcattacatacaggagtttgttacccagaaagagtaagaaccattcttatgaatcactacttctacagcaatgtttttactttgtcctaactcattacttgcaaaggaattttttaaagtaycagtagttgtttcatagacaacagaaccagtcaaagaatcatttaggatagttcctgatgctacttccaaacctctaccttgtccccactttgctaccagtcttgccttcagcttaattgaagaacaaaataa

SEQ ID NO: 662652 - DNA, 597 bp, Homo sapiens
cttttttaaacatttttagggaataaattatgatgctctcccttccaactcaagacactcaaataatcctcacagatagaaaaatgtatccattgaacaatgagaatgagtttatgtaagtaataacaatcggagagtaaataaatgcagtttgctcatcaaaaaaaaaaaaaaaaaaaaaaaaaagaaaattctttaatgaacccttctttctcatgccaacayttctggccaatcctacagttttagataagaatttattttaagaggaataaaatctcttataacagtgccaatttgaagtgctagatccattagcttttcctgataaactttagaaaaagggaatgggaagtaaacttctggcttactattaaaaacctgcttcttggtcagttttctgcaaaagctgtctctccttcttcctctctctcatggattattaataatttttctgtatctttctcctttctatcgtattccctttgggattcactcttccccagtgatttaatttagttaatgttctaattagtgcaacttccacccaggagattccttgagctttcacatcagtgcttttccatatgataaact

SEQ ID NO: 662653 - DNA, 556 bp, Homo sapiens
gggatttttaaaagctaatatagcagtaggcaaagatgagaatccayaatctaaggtagtcagcacgactaacacaatcagcttcaatcaatgaagctgaaacagtgtcataatactgtcataagacagcagagggcagagttggctcacatttacatagagataaaccatcttacataggaaatagtaagtagttaatgtaattttaactttgtactttgtggttgtcttttgccataaagctttccttcactgttaaggcaaaattactttttgtacattggaaattactgggaagcccctggggggcagctgatcaataaggtcattgtataatttattgtccaaaccagtacatttttgagagtgccaagggagcactattaacgattatgccaggataacaggtgcaaacctgttttgcgcaaactggaacatatggtcaccatgtcttatgtgggatccaggagatgagctagaatctgtaacatagctttattcattaaagcaactagtagaaactatgtacttatgctgtgtacttatgcgtattaaa

SEQ ID NO: 662654 - DNA, 556 bp, Homo sapiens
gggatttttaaaagctaatatagcagtaggcaaagatgagaatccacamtctaaggtagtcagcacgactaacacaatcagcttcaatcaatgaagctgaaacagtgtcataatactgtcataagacagcagagggcagagttggctcacatttacatagagataaaccatcttacataggaaatagtaagtagttaatgtaattttaactttgtactttgtggttgtcttttgccataaagctttccttcactgttaaggcaaaattactttttgtacattggaaattactgggaagcccctggggggcagctgatcaataaggtcattgtataatttattgtccaaaccagtacatttttgagagtgccaagggagcactattaacgattatgccaggataacaggtgcaaacctgttttgcgcaaactggaacatatggtcaccatgtcttatgtgggatccaggagatgagctagaatctgtaacatagctttattcattaaagcaactagtagaaactatgtacttatgctgtgtacttatgcgtattaaa

SEQ ID NO: 662655 - DNA, 556 bp, Homo sapiens
gggatttttaaaagctaatatagcagtaggcaaagatgagaatccacaatctaaggtagtcagcacgactaacacaatcagcttcaatcaatgaagctgaaacagtgtcataatactgtcataagacagcagagggcagagttggctcacatttacatagagataaaccatcttacataggaaatagtaagtagttaatgtaattttaactttgtactttgtggttgtcttttgccataaagctttccttcactgttaargcaaaattactttttgtacattggaaattactgggaagcccctggggggcagctgatcaataaggtcattgtataatttattgtccaaaccagtacatttttgagagtgccaagggagcactattaacgattatgccaggataacaggtgcaaacctgttttgcgcaaactggaacatatggtcaccatgtcttatgtgggatccaggagatgagctagaatctgtaacatagctttattcattaaagcaactagtagaaactatgtacttatgctgtgtacttatgcgtattaaa

SEQ ID NO: 662656 - DNA, 553 bp, Homo sapiens
ccttgttttcctttagttcactgctgttttgttcttgttctcaccatcctctctatcaaagcttgttcgcaggtaaggatctcatatctgctatttatatttaactatattttcccccacattgaaaacaactttattatttattataaaatattctatgcttatgaaatacccaaaccttatagcaaaatagagaaggaagtaagaattactctaaatctcaccatctagaaatcacttagattttttggagtatctttcctgatatgaaatgtcttatttcytaatcaaatagaaattatttagagcctacttaaaaaaaatcaacagtatgccatgacatctttccctatcagtaagcataaaaccacatcacttaaatgactacatagaatttatgtgtgtgtgtgtgtgtgcatgcgttcacaccataattggtttaaccaatcccattttgatgaacattgaagtgatttccaatttttcattattataatgaacatctactatgttcttagcataagtgtaaaacatagaaagctaaagctaaaag

SEQ ID NO: 662657 - DNA, 668 bp, Homo sapiens
tacttaaactctttcttaatttcttaatatagcagtaaggataatgatagcaatttacttcaygaaattgaataaaaatgacataaggcatttggaagagagaaaatgataaatgcacttttaaaaatagaatttttcataccaaaaaaatgaggaaaatgatatttctgagaagacccagttatattctgtatgaattctataaaacatatgtttgaattgaatcatagtttcttgtagaccagaccttaaatcattgaagaaatatccaaacagaaattgagcagctgtagaaatatccaatagaaaagaaaatgagatgaatttgcagaagtaatggagtcttttattgcaatgtctttccaaactttattgaaaatttcccaaaggtcttggttaatattaagaacaaatatttgtgaatttggaaactgctcactaacaaataaaagcaattaacaagaccatttatgctggcagtaattatcatataaacacaaaattgttttattggttaaactgttagaactccagctgtcattccatattaacaaatttgattttttaaaattatattttctacccttgatttgagtttctggcttgataaatattaataaaggaagagaacaaagttttcatggttagttactctcagttgtctactt

SEQ ID NO: 662658 - DNA, 668 bp, Homo sapiens
tacttaaactctttcttaatttcttaatatagcagtaaggataatgatagcaatttacttcatgaaattgaataaaaatgacataaggcrtttggaagagagaaaatgataaatgcacttttaaaaatagaatttttcataccaaaaaaatgaggaaaatgatatttctgagaagacccagttatattctgtatgaattctataaaacatatgtttgaattgaatcatagtttcttgtagaccagaccttaaatcattgaagaaatatccaaacagaaattgagcagctgtagaaatatccaatagaaaagaaaatgagatgaatttgcagaagtaatggagtcttttattgcaatgtctttccaaactttattgaaaatttcccaaaggtcttggttaatattaagaacaaatatttgtgaatttggaaactgctcactaacaaataaaagcaattaacaagaccatttatgctggcagtaattatcatataaacacaaaattgttttattggttaaactgttagaactccagctgtcattccatattaacaaatttgattttttaaaattatattttctacccttgatttgagtttctggcttgataaatattaataaaggaagagaacaaagttttcatggttagttactctcagttgtctactt

SEQ ID NO: 662659 - DNA, 668 bp, Homo sapiens
tacttaaactctttcttaatttcttaatatagcagtaaggataatgatagcaatttacttcatgaaattgaataaaaatgacataaggcatttggaagagagaaaatgataaatrcacttttaaaaatagaatttttcataccaaaaaaatgaggaaaatgatatttctgagaagacccagttatattctgtatgaattctataaaacatatgtttgaattgaatcatagtttcttgtagaccagaccttaaatcattgaagaaatatccaaacagaaattgagcagctgtagaaatatccaatagaaaagaaaatgagatgaatttgcagaagtaatggagtcttttattgcaatgtctttccaaactttattgaaaatttcccaaaggtcttggttaatattaagaacaaatatttgtgaatttggaaactgctcactaacaaataaaagcaattaacaagaccatttatgctggcagtaattatcatataaacacaaaattgttttattggttaaactgttagaactccagctgtcattccatattaacaaatttgattttttaaaattatattttctacccttgatttgagtttctggcttgataaatattaataaaggaagagaacaaagttttcatggttagttactctcagttgtctactt

SEQ ID NO: 662660 - DNA, 547 bp, Homo sapiens
tttctggcttgataaatattaataaaggaagagaacaaagttttcakggttagttactctcagttgtctacttgcagactacccactgtctggagtactcaaggtagagtgttaatatcaaaacaacattaactcactccttataatgcgtttggattcatcttcctatgttcttaatcctgtgtactcaaggctttggcatattggagtatgggagttggagcagggccattgcccaaggatgaggactgaaaatgacactgagagggtggagcagacagagacaaaagctaaccgaatcatcattattgtgtttgctatcccttgttataaagacgttggaagatggcagacccctgcctccatagatgagctcagtggtaactgtgagcataaaacctactcgattcactccatttctcacccattgacaataagttaggtatggatgcatcagggtagctgaggacctggtgaaattcaggcacaaatattgccagctatgtttcagggaatgtgaattcatttaaataaccttattcgaaca

SEQ ID NO: 662661 - DNA, 547 bp, Homo sapiens
tttctggcttgataaatattaataaaggaagagaacaaagttttcatggttagttactctcagttgtctacttgcagactacccactgtctggagtactcaaggtagagtgttaatatcaaaacaacattaactcactccttataatgcgtttggattcatcttcctatgttcttaatcctgtgtactcaaggctttggcatattggagtatgggagttggagcagggccattgcccaaggatgaggactgaaaatgacactgagagggtggagcagacagagacaaaagctaaccgaatcatcattattgtgtttgctatcccttgttataaagacgttggaagatggcagacccctgcctccayagatgagctcagtggtaactgtgagcataaaacctactcgattcactccatttctcacccattgacaataagttaggtatggatgcatcagggtagctgaggacctggtgaaattcaggcacaaatattgccagctatgtttcagggaatgtgaattcatttaaataaccttattcgaaca

SEQ ID NO: 662662 - DNA, 528 bp, Homo sapiens
gctaaccgaatcatcattattgtgtttgctatcccttgttataaagacgttggaagatggcagacccctgcctccatagatgagctcagtggtaactgtgagcataaaacctactcgattcactccatttctcacccattgacaataagttaggtatggatgcatcagggtagctgaggacctggtgaaattcaggcacaaatattgccagctatgtttcagggaatgtgaattcatttaaataaccttattcgaacatagataggaaagttaatctcctgaaaaaaatcacaaatatgcatttttaagccaaatagaaatgactttttgaattacctgttctttggttgatctccaagattgcaacctcctttaatttccataatgtgttcattcatttatttactcatttgctcattaggcctttattaagtatatcttttgtgtcagatactatgctaagtgccrggaatcttaaaactatatcctgaaagcaatggggagccactggctgatttaaagaagcag

SEQ ID NO: 662663 - DNA, 556 bp, Homo sapiens
gccaggaatcttaaaactatatcctgaaagcaatggggagccactggctgatttaaagaagcagagtgacaagaccaaccttcctttttagaaagtgtactttggctactatgtggaagcagaattgaaggagagggaaactggagaacggatgaacaggtaagaggctccagaagcaattcattgtgagaaaagatgaggctgtgtgatggacttaattgtatccccctaaattcacatgttgaagtcttagatctcaatgcctcagaaagtgactgtatttggagataaggctttacagaggtagtgaaagtaaaactgaggtcatatggatgggccctaaccaaatataactcatgtccataaaaaaaaaaaagagagtaggacataggtgcacacaragtggagactatgtgaagacagagggaaaagatagccctctacaagccaaggagagaggcttcagaagaaatcaaccctgccgaaaccttgatcttggacttctagaccctagtactgtaagaaaattaatttttgtgtttgagtcacccagcat

SEQ ID NO: 662664 - DNA, 646 bp, Homo sapiens
ctcctaagtgaattattctgtctcagggcccctcctcctcttgtatcctttaactmttgcttgcaacttccctaaactattgctcctcctgaatctgttttggtttcctctgattttgtttctctgtgaatcagatcttgcatcttttctgtatctctggatttcttgaacattgttggaacactgatccccttttccttattttcctgtgcttttagatgcctgtttcagacatatcttctaatgaaatttggggtagaagagaagctaaatgcgtgtattcaatccaccatctccatccaatctttactttttaatttatttatcatctctacttattattaaacaatacaagcttattgtgaaaaactcaaagactacagaaatggaaagtgaaagttccctcttatgttagatgattctaacataagtctcaacttatatcttcttggcctcacctgttggtttcagctagacctgagtagacagttctgtgaaggtttaccccccactctctggctgtcaacatctattctcaaatgcacaccttctcttctggccccagaactcttccaaatctgcagactgcctatgtggagcttgctgggtagctcggaagtgtaggttttcaacatgggtgggagac

SEQ ID NO: 662665 - DNA, 646 bp, Homo sapiens
ctcctaagtgaattattctgtctcagggcccctcctcctcttgtatcctttaactattgcttgcaacttccctaaactattgctcctcctgaatctgttttggtttcctctgattttrtttctctgtgaatcagatcttgcatcttttctgtatctctggatttcttgaacattgttggaacactgatccccttttccttattttcctgtgcttttagatgcctgtttcagacatatcttctaatgaaatttggggtagaagagaagctaaatgcgtgtattcaatccaccatctccatccaatctttactttttaatttatttatcatctctacttattattaaacaatacaagcttattgtgaaaaactcaaagactacagaaatggaaagtgaaagttccctcttatgttagatgattctaacataagtctcaacttatatcttcttggcctcacctgttggtttcagctagacctgagtagacagttctgtgaaggtttaccccccactctctggctgtcaacatctattctcaaatgcacaccttctcttctggccccagaactcttccaaatctgcagactgcctatgtggagcttgctgggtagctcggaagtgtaggttttcaacatgggtgggagac

SEQ ID NO: 662666 - DNA, 646 bp, Homo sapiens
ctcctaagtgaattattctgtctcagggcccctcctcctcttgtatcctttaactattgcttgcaacttccctaaactattgctcctcctgaatctgttttggtttcctctgattttgtttctctgtgaatcagatcttgcatcttttctgtatctctggatttcttgaacattgttggaacactgatccccttttccttattttcctgtgcttttagatgcctgtttcagacatatcttctaatgaaatttggggtagaagagaagctaaatgcgtgtattcaatccaccatctccatccaatctttactttttaatttatttatcatytctacttattattaaacaatacaagcttattgtgaaaaactcaaagactacagaaatggaaagtgaaagttccctcttatgttagatgattctaacataagtctcaacttatatcttcttggcctcacctgttggtttcagctagacctgagtagacagttctgtgaaggtttaccccccactctctggctgtcaacatctattctcaaatgcacaccttctcttctggccccagaactcttccaaatctgcagactgcctatgtggagcttgctgggtagctcggaagtgtaggttttcaacatgggtgggagac

SEQ ID NO: 662667 - DNA, 474 bp, Homo sapiens
tttttttctaacaaaaatagatgaaggatttcttcttgagatatataatagtctcagcttttgaagttggcctgtttttcttgagctttccttgccagaatttgacttttaaacattttttttcacaaaacagaactttctctttttaactcagtaatagamaaatgcattcttaaatgttgtcaacaaaggggaggaggggatcactgcgaatctatcgatgaccatgaatgtttttgtatcctctttcccatattactagtgtctcttggaaaattgagctgtaataaggatccagccaagaggagggtggagtgaagaattctgtggctctgtaatacctggggcgtttgtcccactcagcacatctcagtgtctaaatacccaccctcaagaagtgggactgcagcaggaagtgaagtatctttgcatatgttcaatatataaactaaactcgaacatctggcaaacacc

SEQ ID NO: 662668 - DNA, 474 bp, Homo sapiens
tttttttctaacaaaaatagatgaaggatttcttcttgagatatataatagtctcagcttttgaagttggcctgtttttcttgagctttccttgccagaatttgacttttaaacattttttttcacaaaacagaactttctctttttaactcagtaatagaaaaatgcattcttaaatgttgtcaacaaaggggaggaggggatcactgckaatctatcgatgaccatgaatgtttttgtatcctctttcccatattactagtgtctcttggaaaattgagctgtaataaggatccagccaagaggagggtggagtgaagaattctgtggctctgtaatacctggggcgtttgtcccactcagcacatctcagtgtctaaatacccaccctcaagaagtgggactgcagcaggaagtgaagtatctttgcatatgttcaatatataaactaaactcgaacatctggcaaacacc

SEQ ID NO: 662669 - DNA, 474 bp, Homo sapiens
tttttttctaacaaaaatagatgaaggatttcttcttgagatatataatagtctcagcttttgaagttggcctgtttttcttgagctttccttgccagaatttgacttttaaacattttttttcacaaaacagaactttctctttttaactcagtaatagaaaaatgcattcttaaatgttgtcaacaaaggggaggaggggatcactgcgaatctatcgatgaccatgaatgtttttgtatcctctttcccatattactagtgtctcttggaaaattgagctgtaataaggatccagccaagaggagggtggagtgaagaattctgtggctctgtaatacctggggcgtttgtcccactcagcacatctcagtgtctaaatrcccaccctcaagaagtgggactgcagcaggaagtgaagtatctttgcatatgttcaatatataaactaaactcgaacatctggcaaacacc

SEQ ID NO: 662670 - DNA, 644 bp, Homo sapiens
caattcaagatgagatttgggtggggacacagacaaaccataccaaatgggaagcccccaacgtggggccactgctgtgtccaagcaatagcaaagaggccagtgtggcctgagtgcagggtgtcatggggagagctaaccacagtgctggagagaaaagcgggtcttgatggtgcaggctttgtgacctttgagttttagtccaagtgtcataggaagccactggaagttgtgggcaggggagtgacttgttgggatttgtgtctcaagcagatctttctggcggccctaaggaggattgattgtggggcacaagagtggagrcaaggagtcccatgaaagctactgcggtggttcaggacgagaggatggatcaggatgatagtcctggtgagatgcagttgggttctgagtatagagattatgagatttggatatagaggatgagagaaaaagaataagatgattccattgtttttggcctgaacaactggatgaacaaaaaggtcgtttactgagatggtgatgtattttatcaaatgtaccatgggctatttttttttaatttctgtttttgtcgaggtgttgacttggaatagtcttggcagacttttcatttaaatacaccaaaaaggagatgtttt

SEQ ID NO: 662671 - DNA, 545 bp, Homo sapiens
atgagtggtcagaactaacagatgggatgtagatcccaccaatccacaaaagcagatgcacccctgaaatgttcacttggggcatagtccgcgtggcatctcagaagagggagctgtattgatctttgccttggcagtgtactgtttcgaggcttttcttctcaaggtgagtcaaagaagagtgaaagtggttcctataatttatttccacagatactgtscatttgtctttatccttttctttttaaatagctctttgtgtgttaagcccttgccctttcatccttatgttttcctctgaagtagaaacaaagggtttacacaataatgctgaggcatgaactctattgagttatcatctaaagtccttcactgattaagtgaagtgctcttacatcaacttcaaatttggacctcatcaaaataagcacattattatgagccatgtcatcatagtcatttgggataattagtaaatagatgaaacaacaaattttaaattcgtggttgtcaaatatttaccactttagcctgtactgtgcaca

SEQ ID NO: 662672 - DNA, 510 bp, Homo sapiens
cccctgaaatgttcacttggggcatagtccgcgtggcatctcagaagagggagctgtattgatctttgccttggcagtgtactgtttcgaggcttttcttctcaaggtgagtcaaagaagagtgaaagtggttcctataatttatttccacagatactgtccatttgtctttatccttttctttttaaatagctctttgtgtgttaagcccttgccctttcatccttatgttttcctctgaagtagaaacaaagggtttacacaataatgctgaggcatgaactctattgagttatcatctaaagtccttcactgattaagtgaagtgctcttacatcaacttcaaatttggacctcatcaaaataagcacattattatgagccatgtcatcatagtcatttgggataattagtaaatagatgaaacaacaaattttaaattcktggttgtcaaatatttaccactttagcctgtactgtgcacaggtattatgagatgggattacgtgg

SEQ ID NO: 662673 - DNA, 617 bp, Homo sapiens
tatttcacaaagattaataattattatattattagtggtcatattaaactaatataactaataacataagctaataatatagctgataaaaatattagctataaaagtaatagctaataattttgtgctaggtgtcatgttaattgctttatagtttgtccrattcttattaacaatgataataacaatattgatgatagctaatatttaatcagtgcttattacatgcccactattttgctaagccctctgcctactttatgtcatttaatcctcacaaaagctctgtcacatatgtactatcattcttggtattttatgagtgaaaaaaactgttccacagaaacacagtttaccttcagaggtaaagctattttccagtgagaccatgctcttatgctgtttgtattgagcctacactggatggggtggaaggaaaataaactgtcccgtgaagtgaccttccttccaatagtgtctctgatacttataaattgcattgcatgggctaattacataactttcttgagccttgattttctaattggtaacatgtatgtgcataataccatctatattttgaaatattacaggtaatgcatgggccgggtgtggtg

SEQ ID NO: 662674 - DNA, 515 bp, Homo sapiens
tttctatctgtcactcgtagagtgtggctctcatctctgttatgcctacaaagccctgcacaatcttatccctgctgtctgtacatcctcaggcagatctgtgttccttcttgctcatttcccaaccaagttgttttctttctatccttccaaaatgcaagactaaatgtgatggttaatttttctgtcaacttggatgggccacagtgctcagatgtttgatgaagcattatgctggctgtttctgtcaaggtgtttttttgtatgagattaacatttaaattagtagaattagagtaaagcagattgctctccataatgtgggagagcatcatccaatcagtggaaggcctgagtagagtgaaggctgacctctcctgagcaagaagcaatagtgcctgtagactgactttggactcracgtgcaactcttccctgggtctccagcctgttgaccgactctgcagattgtagacttactaagtctgcaatcatatgaaccaattccttaaata

SEQ ID NO: 662675 - DNA, 518 bp, Homo sapiens
tgaatttaggagtaatctgacttgttcattactgtrttcaaagcacctaagcagtagttggaacataacagatgcaaaacgctggttgaatgaatgagtgagtggtgaatgagcagcaactaggtcaggggattgctagctcagtgggttgatggcaggctgtgacaggaagatgctacatcctactgggtggcatggaagagctgccatggaccgtgttgcctagtggagtgatggtggccactgtcaggaaaggtgggccagataagtagcaggtgaggcaataatgccatgattgtatccaatggggaagtgatagaacattaaatctactggtagatgggttcatgaatacgtgtaaaatatccactaagatacataggcatacctgggtgggtagagagagaatgctttacattggtagggacaacagtccagtgaaatttgaattattgttgcttttcaggggtcatctgtgcccacaggctggtagtaagtgaacatttgggatataacct

SEQ ID NO: 662676 - DNA, 585 bp, Homo sapiens
attaataatagaattattaatattattttataattctaatattattaraatttgtgtgctcattttttctctggaaaattgtatagtaaaaaattaataacaaattagcttgtcattcaatgtcccctctaatctgatatcattgtacctattcaactttactgccctctacccactatataaattatctccctctgttttgctttctcaaatatactgatttcactcaacataaaagcttttctcagttattttcttttcttacctggactgtccattttattttctgcaagattaacccatctttccattttagactcaaaagtaactttttttatgctctcaccaacaacccctttttacttttaattccttttttcactgatgacagcttttgcctttttacacagtttgtatatcctcatttattcacaataattatttatctcccaaacatggtatagagtacacaggcttttccctgttggtaatgatgctgggtatataataggaactcaatgaatgaaagagtatgtgcataaaagtctcagtttaaaataaattcttcaggatgaagagtgttta

SEQ ID NO: 662677 - DNA, 586 bp, Homo sapiens
attcctggagatgaacacacccctctttaacactggtgtagtgcaacattcctgtgtttaaccttactgagtaaacctgagagccagtacagagcacatatcccagcattagtccacccaaggttgagggaggtgtactgtttacaaaccaacttccattggctgggaattacttccccatatttccattttgtagtgtatataggtagagctggttgtggtggccagagagaaccctcaggtgaacccaggcaagtgyggggggcaggtagaagtcagatactgtgaactgtattgtaagggtgcaggactacaggtaagttactgatctcaattgctgtatctaccctacactggccaccccagccaaaccctaattttcatgccttaaaatgtgttgaaaccctgaacccttcttaaatcttgcttcctataaggtctcctctgactcaggcctgggtactttctgtgtgctgatggccacagcagcaacgtctgtagcagggagatgagtggttggttattcatgccatgcctgtgtggttccacacaggagatgcaaggatgagtttattcattcacacgc

SEQ ID NO: 662678 - DNA, 614 bp, Homo sapiens
aagcaacttgtccgctgtcatgtagctggtaagttccagagcaaatgttacaaccacgtggtctgaggcctctcctaatgctcaaattacagatgtcaaaaagcctgggctttcgtgaggaagataaccaaaaaagaaatgcctaataaaaatgaatgatatttattgagtacttcctatatgccaagcaccaatctgagtattttatgtgtttgacttttctcaatcctcacaatcactctttgaagaggggactgttatcattatttcaatttacagatgggaaaattgaggcaccaagcagttattcacacagctggtggaggacagagtcaatatttcacagtctagccccatagcccgtactcttgactttttctctctgtctttgtctctgtctctgtctcattcctgatatttggaagtataaagagaaagggctgtgatcacaaaggaaatttgtcagaaatagcttaggtaaggggtgggcagggaggagtcggggaaagtaagagaggaagctccaggtgtaccctgcaggtctggcagtagggggccaggtgataygttagcaatgggaggggcctacgagaggacttgcagacaagagggag

SEQ ID NO: 662679 - DNA, 507 bp, Homo sapiens
ggcctcaccagaaaccacagctctgcttgcacagcctgcagaactgtgatccaaagaaacctctttcctttatcagttacccagsctcaggtatttccttgatagcggtgcagactaacacattgtcttttgtcaatctaatttgcagggccctagccaatgaaacaaagatgagtgaaaggaaaatatatatatattttttctcccccgcactgtttagagagctgtggggaacattctatacctgaatgaggttttcactagatggtatccatggtttccaacgtggaggtcttcaagagcagtctttatttaatatatctccaaaattcttaggccaacaatgcaaatatgtattgcatggtcataaagggtatgtttaaatatattctatatttttatagacaaaacgtttaaaaattatgagatctatgtggaacattttaatcataaagagttctaggtggttaaaaagaagctactgtttcaagttctcagtgctaaaac

SEQ ID NO: 662680 - DNA, 578 bp, Homo sapiens
aaactgcaggcataatcagggaagacctgaagattcacattacctggtgtgcagacctattataaaaccactctaatactgtggtattggagaaagcatagatacatagaccaatgaaacacaatagggaacccagagattgacccacacatacatagtgcattgattttcaacaaaggtgcaaataaattttaataaataaatgatagtattttcaacaaatggtgctgcaacaactggatgtccatatgcaaaatcacaaacattttcttgcaaatcacaccctatgaaattaacgcaaaatgaaatatgaatctaaatatgagatctaccactatagaatgtgtagaagaaaacataggagaaatgtttttgacctttgattaggcaataatttgtaggacacaaaaagcacaattcctgaaataaaatttggtaggtatgacttcttcactgtgatgctaatgttagktgtcaacctgtctgaattaaggaatacctagagagttggcaaagcattatttcttgttgtgtctctgagtgtgcttccagaagagactggtctgtgaatggtggat

SEQ ID NO: 662681 - DNA, 578 bp, Homo sapiens
aaactgcaggcataatcagggaagacctgaagattcacattacctggtgtgcagacctattataaaaccactctaatactgtggtattggagaaagcatagatacatagaccaatgaaacacaatagggaacccagagattgacccacacatacatagtgcattgattttcaacaaaggtgcaaataaattttaataaataaatgatagtattttcaacaaatggtgctgcaacaactggatgtccatatgcaaaatcacaaacattttcttgcaaatcacaccctatgaaattaacgcaaaatgaaatatgaatctaaatatgagatctaccactatagaatgtgtagaagaaaacataggagaaatgtttttgacctttgattaggcaataatttgtaggacacaaaaagcacaattcctgaaataaaatttggtaggtatgacttcttcactgtgatgctaatgttagtkgtcaacctgtctgaattaaggaatacctagagagttggcaaagcattatttcttgttgtgtctctgagtgtgcttccagaagagactggtctgtgaatggtggat

SEQ ID NO: 662682 - DNA, 406 bp, Homo sapiens
aaaatgctaatgaaactacacagtggatgtagtggcaggagaattcattgagatcatgctgtacatcagaagccatgaaattcgaagtcagaaaaacttggcttgaattcctaactgtgtaacctgttaggtgatatctatgctctcttctagaaaacaggagtgcttatatataaaactaccacctcaggcagtagtcccaatgggcaaaccgaaagataaacgtaaactctcatagtgccatgggtgtgcctcttacttgccataatttggaaaacaagatctgtcttcgaaacttaccttcatcactggttatctgtataagttagggagaatcacttamcctttgagttgttagtttttattttttgttttgttttgtggagggaggtattaagatgcagag

SEQ ID NO: 662683 - DNA, 503 bp, Homo sapiens
gattccatttagcagtggtgactttgatctctccagtttaaaagtttctataccctctcacctctgaacattcccttcagttacatggatgctgccttcccrtttctcgggacatctctggccctcccttgttacttagttacctatgctttattcctgtgtattcagttctttatgctctggtagtgtaccctacttatctccccttgcctgtatttacagaatgcttgcttctgctaggagccaagcagtactgtctgagaagatattggtatacagtggcagtgctcaaaaagggtgtcctaaaatgcctgtccactgattattcaagcaaatattaatttaatgttataaacgggctttgaagatagaattaatgtttctgatcactaataaattgactttaaaatagagggactatctgggattatctgagttggtccagtgtaacagcaaggaagaagaagacaacaatctaagaaatgcggctgaagatggagact

SEQ ID NO: 662684 - DNA, 547 bp, Homo sapiens
tcattcttctctctcctgtcacaatatgaggaaggtccttgcttccctgcttccccttcaccatccatcatgattgtaagtttcctgaggcctactcagcaatgtggaactgtgagtcaattaagcctcttttctttataaattacccagtcttgagcagttctgtatagcagtgtgaaactagactaatacaatgtgaaaagaaatttccaccccagtacctttgcacttgctgttccctttgccccgaacactctttcttcagacatctgtgtagctgacacctcagcttcatcaagtctcaaccaggtcttatcttttaggcctttcctaaccacaggacagaaaagacgattccatcaatctttatccctttttttgttgctatttatttatttatttaattttttatttttttgagacggagtcttgctctgtggcccaggctggagtgcagtggcgtgatcttggctcactgcawgctccgcctcctgggttcacgccattctcctgcctcagcctcccaagtagctgggactacaggtgc

SEQ ID NO: 662685 - DNA, 604 bp, Homo sapiens
ccatgggcacagccagcactaagcatcctttgggcaaagrggaaattataacttatttgtgcaagtatccaaggcacaccaaagtggggactaaggggagttactgtttgagcagatgagggtcttagagtcattgtaatttaggagtaaatgtgaatgtggcactattgtataatcacagacagaagagaaatggaaataccagttatcaaaaagttatcagaatagaagctaaggggagactgggtccctttagcagactgtgggattccaacaggcagccccaaacttagagagaacttgcaaaagccagtaagatccagagattggttttccataaagatgacactggaactggctgtgagacaaaatgtcttagtgacatggtttggctatttccccacccaaatctcatcttgacttgtagctcccataatccccacatgtggtaggagggacccgatgggaagtaattgaatcatgggggtggttttttcccatgctgttctcatgatagtgaataaatctcacaagatatgatggttttataaagggcagttccctgcacacgctctcttgcctgctgccatgtaagatatgcctt

SEQ ID NO: 662686 - DNA, 559 bp, Homo sapiens
tggaacatggccctggtaggtgtgacatatggcatttgtggcattttcaggaaggaacaaaggagaagggaagtcaaactgactttacgaaaactaagatcagcctttactagtaaacttgaaggcaattcattattctttcttttcttttttcttacacttttactgaagtgtaaccaacaaataaaaattatatatatttgaggtctacaaaataatgttttgatatttgtttacattgtgaaacratcaccacaatcaagctgattagtatatctgtcacctcatatagttgcccttttttgtgatgagaatacttaggatctactctcttagcaaatttcaagtactcaacacattatcattaactatagtcaccatgctggacattaggtctccagaacttgttcctcttataacctcaggtatgtactccttgagcaacagcttcctctctccccaacccatcccctggtaaccacccttctacactctgtgtctatgagttccaacttttgtagattccacatatgagtgaaatcatgctgtagttgtgttt

SEQ ID NO: 662687 - DNA, 559 bp, Homo sapiens
tggaacatggccctggtaggtgtgacatatggcatttgtggcattttcaggaaggaacaaaggagaagggaagtcaaactgactttacgaaaactaagatcagcctttactagtaaacttgaaggcaattcattattctttcttttcttttttcttacacttttactgaagtgtaaccaacaaataaaaattatatatatttgaggtctacaaaataatgttttgatatttgtttacattgtgaaacgatcaccacaatcaagctgattagtatatctgtcacctcatatagttgcccttttttgtgatgagaatacttaggatctactctcttagcaaatttcaagtactcaacacattatcattaactatagtcaccatgctggacattaggtctccagaacttgttcctcttataacctcaggtatgtactccttgagcaacagcttcctctctccccaaccyatcccctggtaaccacccttctacactctgtgtctatgagttccaacttttgtagattccacatatgagtgaaatcatgctgtagttgtgttt

SEQ ID NO: 662688 - DNA, 608 bp, Homo sapiens
gggcagcattctcattggcttctatgtgcctggagcccagtgcagttgtgcaacactgcagctttgctttagtgtagtccctgatgggttcagtcaagaaaatgtctatagaatcagctaatctcccatgcagttaagtctctaattgaaatattttctctgctcagcccagggacagcaatctttcctggatttgctatttacaaggatctctagaaattatccaccagaaatatgggctttctcagagcttgagtggacagggaattaaggtggaaggcagggcgttttgactgcatttgacccaagtcctgaagagccagctcctctctcttcctaattattagaaggttttgtttggacccagtgtttcacgtgtatacaatacaaacttctctcttttctacttggatcaaatttgttctctcaaaataagattcccagcagtgagagaagacaagacagagagatccaacatctctaaagccatgaatcagataaccagccacttgttctcttcagtgctgggaacagatacactgttaaataaaatgattttatakattcttctcactgcctttccaagaaggggatttatcaacttcagg

SEQ ID NO: 662689 - DNA, 590 bp, Homo sapiens
cagttgattaatgattagcaaataacaacaaaaaacaccttaatactttagtccttagaatccttaagtctaatcataatgcttaaaaaaacagcacttcatattgacgataatgtagttcttcaggtaataaaaaaaatttaaaaaataaaagcacttcatagataagggacaaatattattttttttcatctccctttcttatgttcccacaaatgggaaaactggggttatcttcaagtttacatggtaatttaaaaaatgaaagcaaaaatctaaaggatgttgataaatatgctaatatattgcctgctgaagtccatgcctgttttccattcggtgaggtctaagcttatggcttcattttgtgaatataaattagtgaaaaacaaaaacaaaggcagaaccagtcgatatgggctttctgtcawcttcaaatggggaactgcaaacgtttaaatcaatccccagtcctatttttggtttgagggagacatatatcaacacagattttttttttttttttacctctgaaaagtaagtcactacttacgtaaaacaaacaccccagaaaggaaagcttcatcatc

SEQ ID NO: 662690 - DNA, 455 bp, Homo sapiens
ccaattctactaacagctgtgttgaatcttttcaactacattcttgcttcataaggtaatacagttacaacattttgccagttcagtgggtgaaaatggtatcttgtgtttgatttaatgtgatcattctttgtgaatcatctgtttgtgtctttgcccatttttctttttgcccatttgtcgttctgttatttttaagcacgacttgcccataaaaatgtcctatgtgctgcaatcaagttgtcatctttagcctttcaactttatttcttctatttcttgtgcacagaattttgaaatgttatgtagtcaaattacttatataattatacatgcatatagcattaaatttcacagtktttccccctctcctttttgtacattgaaaagacatttacttactctctgactctcaaaagtaagtctctacccctcaaggctagatactatattca

SEQ ID NO: 662691 - DNA, 444 bp, Homo sapiens
tctgaggatatctgggctgcctccggagtcgcagtgtcttgggccgcctgaaggtgagtgacatgcggatcctcttttttgcgtgtggctgcggacacctttcaacacgccttcttggcctttaaagccttcgctttggcttcggctttaggaggagcaggagcttccttcgctttcggtgccatcttgtgaaaagcgaaaaacattatttcaaaaataatttgtttacagtaaatctgcctaagaatagtttccaaagtacttttggtaatttttaaccttaaagttaatytaagtaaaagatttgcattaaatatctagaccatttataaataagatacaatactaaaacattaattactgaacataaataattcaagtttatatacttttggcttcctatttttacagagagactaaagatattttggcccgttaataaac

SEQ ID NO: 662692 - DNA, 594 bp, Homo sapiens
acggataaaagcccttgccctgggctgggcacggtggctcacgcccataatcctggcactttgggaggctgagacgggcagatcacaaggtcaggagttcaagaccagcctggccaacatggtgaaaccccgtctctactaaaaatacaaaaattagccaggcgtggtggtggacacctgtagtctcagctacttgggaggctgaggcaggagaattgcttgaacccgggaggctgaggttgcagtgagccgagattgggccactgcactccagcctgggagacagagtgagactctgtgtccmaaaaaaaaaaagcccttgccctggtggaccataattatgttcagggaggaggacagccagccaacagatgaatagccaaaatacagagtacccgcaatggcggcaagtgccaggagagaaataaggtgtcggggagagggagacttgcaggaggtgttagggaggccccagaaggtgacatttgagacaagcatgttctcagtcatcgcagccaagttttacctgccctttgtctcctgaacaaacatgccctaacttgaccctcttctctgaggcagaaatagaaaaca

SEQ ID NO: 662693 - DNA, 513 bp, Homo sapiens
caggggtgcaaagtcagcatgctgaatgaatgagtgaatgaatgggtgagagcagaggctgctgagtacagggccaggttgggttttgccaggcaatacagagacgggccagggaagacggaatgtacactgtgaggccagaacacscttgggggcagagggtgaagcggtgatgggctggagaggggctggggcggccggagtggctccagaacctacaggcagggtgatggtaggagcccccgccacgcccgtggtggagctctccgtggggagaggaaaagcatccccagcttggagggctccaggacgtccctttgggccggcaccccaaggccctgtctccccgcttcccgggcccgccccctaatcccaggaccgcagcctctcccaccccgccctccagggggcgctgctccaccggggggaagggggggcgtcccagggccttgcttagctggggccccctggtatgtggcccctccctcctcgggcgtcgccgccgcaccgccc

SEQ ID NO: 662694 - DNA, 551 bp, Homo sapiens
atttggcggggaaagcaatctttcttttagtgtttaaaaaaaatggaacatgatgggtcccaaaaggtgtcaagaaatccttgctctaaagaagtcattttcttgtcctctgggaacttgccagtccaaaggtattgtcacctacactctggggccaagatagaaaggatggtattctacctcctggtggtattccagggatccagaaacactcctgggccacattctcttctcasctgctccagaattggctgtcttgatgccacccttccccagattgcagaatcagcgtgccctgatctctgtgagatgattttgatgcaacccaagtctttatcatgttgttctgttaaacaattctatagtcctttccactcctcatcccaatacaatacccagtttctttaagtgcctattatgctcctccaccacagtggaaactttcagaatgagcacaagattcaagttcttgaaaagggggaactgggggttaattttcaagaggctttttagctttctccttgaaggtctgctgtgatctgctgtggagt

SEQ ID NO: 662695 - DNA, 551 bp, Homo sapiens
atttggcggggaaagcaatctttcttttagtgtttaaaaaaaatggaacatgatgggtcccaaaaggtgtcaagaaatccttgctctaaagaagtcattttcttgtcctctgggaacttgccagtccaaaggtattgtcacctacactctggggccaagatagaaaggatggtattctacctcctggtggtattccagggatccagaaacactcctgggccacattctcttctcacctgctccagaattggctgtcttgatgccacccttccccagattgcagaatcagcgtgycctgatctctgtgagatgattttgatgcaacccaagtctttatcatgttgttctgttaaacaattctatagtcctttccactcctcatcccaatacaatacccagtttctttaagtgcctattatgctcctccaccacagtggaaactttcagaatgagcacaagattcaagttcttgaaaagggggaactgggggttaattttcaagaggctttttagctttctccttgaaggtctgctgtgatctgctgtggagt

SEQ ID NO: 662696 - DNA, 551 bp, Homo sapiens
atttggcggggaaagcaatctttcttttagtgtttaaaaaaaatggaacatgatgggtcccaaaaggtgtcaagaaatccttgctctaaagaagtcattttcttgtcctctgggaacttgccagtccaaaggtattgtcacctacactctggggccaagatagaaaggatggtattctacctcctggtggtattccagggatccagaaacactcctgggccacattctcttctcacctgctccagaattggctgtcttgatgccacccttccccagattgcagaatcagcgtgccctgatctctgtgagatgattttgatgcaacccaagtctttatcatgttgttctgttaaacaattctatagtcctttccactcctcatcccaatacaatacccagtttctttaagtgcctattatgctcctccaccrcagtggaaactttcagaatgagcacaagattcaagttcttgaaaagggggaactgggggttaattttcaagaggctttttagctttctccttgaaggtctgctgtgatctgctgtggagt

SEQ ID NO: 662697 - DNA, 611 bp, Homo sapiens
ctccttaagttcccaccttcattgacaccagccacagcttcttgatgatgaggtctcactgctcaacagaaaaccgttctaaacacaacactaggaagaatgtgcaagctggtcttccttcccagatgttgtctactattatgtctcaacatcctgctctatctctttaattccttttctttattaaacaataggctcagaagttaaacaatcaaatctactactgcagcagaacttctgctgctggatgaaaatcctgtcttccttttttgaagggacctctaacatctacaatttcgaatcatgagtcctcccctttccattgatctctgttacaagagagcaaccagttcccttcctayacaagataagggtgaaaccatagtactgtcttctaggacaataactctcctacctaaaaaatttttatcaaaactcaaacttccagatatataactggaccagagaaatagagttatgttttttcttagcaagtcctgcagagattttcagcagcttatcctgaggttactttagtataaggggataaggggcacatattatttttatctttcaactccagccaacatcccaacacaagaaaaaaattc

SEQ ID NO: 662698 - DNA, 517 bp, Homo sapiens
aaaaaaaaaaaaaaaaaggaagaaagaaactttgtagctagaattcaggactaaggcattcatagggtagacagtgtaaaagagagccgggtgggggtatttgagggagtgtaaaaatgatcagagaggtgcagaaatggcagataaactgagaatgaggtacaggcagaattttttctgactgttgagacttggacatgatgcagaaaatagaggagaggctcatggtctgaaaatgggaagacctggacagcactcacccttgtcagtcatgagaggccatcasaagattgggactaaggagatcaacctgctaagcttacctagaattctgcggttttgtggtcagtcactaacagtactaagtgcaacctacttccccctctttatattcatcttatccttgactcccagtttcctggatttgcatctttcttgtctctgtctggacagtgctattcaggaccataggattcatgatctgtatttaagcctaggtacaaattatttctcacat

SEQ ID NO: 662699 - DNA, 631 bp, Homo sapiens
tatagagaaaggaggtagcaagggaaggaaagagagttggggaaagataaacaaatatgaaaagccaaaacagatggacaagtagctgcttcaattaatgaagaggtttctgtcctagtttcaggttgcatatgacttagttgtactccattttgatgagcttattatattattataataagcattttttcctgaactagtttaactggatttctcatctttgtaaacacacacacacacacacacacacacacacacacacacacacaggcctagatacatgcattcattttcgaggtgttttgagaaaacctgttatgtgtaacaaaggtcatatactctctgcagagggtatgaagataaacaaaagtttaattctgcttggtatgttttgctatagccaagataagaccaaagggtgtgtttattcttttctttttgttgtataaaagatgagtttagggccaggcacagtgtctcacgcctgtaatcccagmactttgggaggctgaggcaggtggatcacttgaggtctggagttcaagaacagcctggccaacatggtgaaaccttatctctactaaaaaatacaaaaattagccaggcgtggtggtgggtgcctgcaattcca

SEQ ID NO: 662700 - DNA, 614 bp, Homo sapiens
tttcttatttttaaaaggagtcagaatctcacaacaatgaatattgtgagaatctaatttcaaaaatgaacaagacaattctaagaaaaatgtacagtaccaaatttataagatatcatatttgttctcaatatgtttgtattttaacccctagaaggaaagacgtcatctaagctggtacccccacaatgtggaacatgattggtgttaagtatcaaactattagaaaaactaattaacatttaaactagggacagggaagtgtaaaggtggggttacagaaagaaggaactaaatcgttctcaaaataagtttacctaacagcaagtgtatccacctgagttataaatgactgaaaatagtacttcctgtgaaagcataaatcttatgttatagtagccttgtcaagcaaaattctaataagattttcacggaaaatgatacagcccatgacagaaaaatgggtggtatgatgcagaggttaatgcgaggtccttgmtttttgtgcttttggatttcagacacactcagattgaacctccaccattaaaaagacatcttgatctcttcaaaggtagccctgggacctcagtaacctttttctgtttctatgt

SEQ ID NO: 662701 - DNA, 582 bp, Homo sapiens
atggaaacgattggcatcaccaatagttcttccacaatcacagaatttcaaatctttttttttttcctttaaaagttctgaaatgagcctcaaaggcacaatctagaacaaatttcttcattcatattagattgcctaaatctctcatttgaccaaaaaaagccttcaaatatacagaacattaatatttgtttaaaaggggtgggtttataaaaataagccctaatttcccacaggtgcagcacacacacacacaacgccaattatttgaacaaatactttatttatttatttatttttgagacggagtcttgctctattgcccaggctggagtgcagtggcatgatctcgcctcagttcaagctccacctcctgggtttacgccattctactgcctcagcctccctagtagctggcactacagacgcctgacaccacacctggctaattttttgtakttttagtagagaggggtttcactgtgttaccaggatggtctcgatctcctgatctgcccgactcggcctcccaaagtgctgggattacaggcgtgagccaccgcacctggccctacaaatact

SEQ ID NO: 662702 - DNA, 587 bp, Homo sapiens
cttgagtagatgggtagtcaataaaataagttctcaataatcatagagaagaaagaactttaggaaagatgataaatgtcacagggatctgagaggtaaaagatggcaaatgaggaaaaacatctaattttgatgttgaagacatttttggtggtttttgaacatagtgattccaaaactccttttattttgtaacatatgtaactaatgtatatgttacaaaagaaaagggagctttggaatcactatgttatatttagaatcactatgttatatcttatgttacaaaacaaaactctcatcagcaacaatatattaccatggcaggaaattcatgaaagcagtttcctgtattagaatcgcaagcagcaatgtatagtttagaaaggtttcaagttattmtgatccactgccctagggaccaggcaactctttcgtctaccccaatgataaccattattctaaagtgtttctatcaaagtgccttctgtgcagtgcttgggttcacagatatagtcttgggatctgtggttcacaatgaagttcaaaattctgtgttttaaaatgtaaaatatatatacatatat

SEQ ID NO: 662703 - DNA, 408 bp, Homo sapiens
ctttaattagaggagttgctaatgtcccgtgaggactgtgagatttctgcattactcagagtaaacctcagcacaggcatgacacgggattaggtaaggtgcattacagtctctgggtgtcagatatagttgagcaagcaacgragttaggaaaaagtgtggaaagcaatttcaggcaaacaaattcattgaccttgattacctgagatgtctacctgccattttatagcacttgtggaagccacagtatttgctttcagaatgcttcactgcaatttagaattttataggaaacactgcattctaggcagagaataaaacagtgataactatcttatacttcgtaagtccttaactaagttttccctgaagaactgaaccattcaggaacattggaatcctgtaccc

SEQ ID NO: 662704 - DNA, 560 bp, Homo sapiens
tagcacactgctaggagtgaagaaacattgtatgatttctccatgcttgtcaatattcacaaagagcactttcctctagagaaaaaaatggcagcaatttttattctgtccctctacattaagtaatacagatgtggcatactatatcacccagtaaaacacaactccaaaaaaaacttcatagagaaaataatagatacttgctccttcaaaatgaatgcagactctggaatagttgatttgattctccacagccattttacatagctgtcacagaaaatggaaacctcactaattttaaaattaaaactttgttttaaaagttattattttttagcccctgcatacttcctggaagatgcagtagtgatttcttttttttagtatgaattgccttaaaaatgatgactattggccaggmgcagtggctcatgcctgtaatcccagcactttgggaggccgaggcaggtggatcatttgaggtcaggagttctagaccagcctggccaacatggtgaaaccttgtctttacaaaaatacacaaattagccagtcgtgat

SEQ ID NO: 662705 - DNA, 577 bp, Homo sapiens
tgagtagcttaaaaatgccattgttctcattccttagttgctacctagaagtgccataatatgacaaggagttgcaaatgctcttatagtcacttgtacacatcaaggagactttaagaaagttgcataaatcgaatcttacgggttctcattttagcaccctagtcatctgygccacgtaactccatccttgcagctcagtttttgaaaattgtagatcagacatattatgaaatattttacagtccgtcaaatgtttgctttatttgttatattttatccctatggcaagtagccaaaaagtaataaggccttttctacctcctcctgtgacccagacccttttgtctattttacctgctgtatctatggccaaaagaatgcagtttacagcttacactttctaaaaatttgtttaagaaaattaacttcatgaaactctattcatccttattatatttctgaaaactacattaaagtggcataaagtaaacagccaaatatgaatttgagagaactagttaaacttcatagtgaaggttagataaattcttgtgctgtcaatcatgagataaat

SEQ ID NO: 662706 - DNA, 577 bp, Homo sapiens
tgagtagcttaaaaatgccattgttctcattccttagttgctacctagaagtgccataatatgacaaggagttgcaaatgctcttatagtcacttgtacacatcaaggagactttaagaaagttgcataaatcgaatcttacgggttctcattttagcaccctagtcatctgcgccacgtaactccatccttgcagctcagtttttgaaaattgtagatcagacatattatgaaatattttacagtcygtcaaatgtttgctttatttgttatattttatccctatggcaagtagccaaaaagtaataaggccttttctacctcctcctgtgacccagacccttttgtctattttacctgctgtatctatggccaaaagaatgcagtttacagcttacactttctaaaaatttgtttaagaaaattaacttcatgaaactctattcatccttattatatttctgaaaactacattaaagtggcataaagtaaacagccaaatatgaatttgagagaactagttaaacttcatagtgaaggttagataaattcttgtgctgtcaatcatgagataaat

SEQ ID NO: 662707 - DNA, 366 bp, Homo sapiens
gaattcaaggctgcagtgagctatgatcacacaactgcactccagcctgtgcaacagagtgagaccctgtctcttggaaaaaaaaaaaccataaacgataacaacaaaatgtggtcttgatttatctaggctgcgtctcatagctatagtcaaatctctcccacacttcaaatttgtgctctgctcctctttcatttcttgtttataaatttccctcttgtcattggtttctacacctttcttaaagaaaawacatggcaatacatggcttttttttttttttttttttttggccatactcttgatttctaaggctcacttgttcctttttaaatctctcttctcacttcatccctgtacttacaa

SEQ ID NO: 662708 - DNA, 516 bp, Homo sapiens
ttgaaaaataagagaaaatttgaagaaaacttagcaaatggtgtttccagtaaaatggagatagtaaaattaattaamtgttgaaagaaaaaatatgaacaaatatgaatagctcacacttttacagtatttgccctgtagccaggcactattctaaacactcatatgtgaattcgtttaatcacccagcctttgagtatttactcaaaggattgttttattattgtttccattttgaagattaggtaatgcaggcatagatggttaagtagcttgtctaggtggggccagggtacaaatcctgtccgctggctccaaggcagatgctcttatccaggatattgacagcctcttgattatctttctaatgtatttagccatgctgtcacattaaatttttaaaatgctttcacaggcatagagctagagtagtaacacaaattttaataatttctaaaagtactaggaaacaggatcacactgtgatcaagaactgagttgcaagctgtaccattt

SEQ ID NO: 662709 - DNA, 598 bp, Homo sapiens
ctttcacctttgtgtatttttcaataataaaaaatattcttgtcaaaatatgtgtccacctcattgaactattttcattcatcgttcacactagggttttcaggccaactaggagcagaagtgtctgctcaraaagcaggaaaaaagctcatagtgtagaatgtagttttatctactctgaagcagtaaaagtatgtttcaaagtggagtgaggccttcctgtcttgcatgtggtttaatttctaatagaaaggaaggctttcaaagtgaaaagtgaccaaagccaaacagagtgcttggaggcatagttaggatgactctgagtagttggaatattgcaaatagcatcttaatgtagcttcctgatttagtcaatataagctagagatttattagaataccagatctggtttcttttcatatgatctaaagatggttctgaggtgaaccaaaaaatactagaaagtaatccctaaacagaaaggcatctcaagtgaagttctacagcctggagaagacaaattggacctagcagatttgaggtatataatatgaataatgtgggctgttttccttagtagcaggatgggaatagcat

SEQ ID NO: 662710 - DNA, 573 bp, Homo sapiens
tgtagaaactttctctgtatcttcctattaaatttctgattgttctactagtcttttcattgccccaatcagtattctaacctaacagagttgcaacactggccttccatgcatcagtattccaacttaaagagagctgcaacattgtccttccatgactgtttgcaaccgacattgctattgtcagccccctccattagcaaggttccttgtttttcccagcctgcctcactctagtagaactgccttttcagagggcagatartaggggataatgggagcaagctaaaaggccgtagattcccattattcttacttagttttagtagtttttctcaaataaatgcttagtaatttcatgtctgctcttggccaatttctaaagtcctaaatttgttgtttcaacaacttttccagttatatcattgccctttgggaaaggatttgctgagggtttcatgttgctattctagaagtccccagagattatgttaaactaatttaagaatgttcataagacattaaacaaaatttatataatctattataaatgaaaatacaaaatgagttaga

SEQ ID NO: 662711 - DNA, 573 bp, Homo sapiens
tgtagaaactttctctgtatcttcctattaaatttctgattgttctactagtcttttcattgccccaatcagtattctaacctaacagagttgcaacactggccttccatgcatcagtattccaacttaaagagagctgcaacattgtccttccatgactgtttgcaaccgacattgctattgtcagccccctccattagcaaggttccttgtttttcccagcctgcctcactctagtagaactgccttttcagagggcagataataggggataatgggagcaagctaaaaggccgtagattcccattattcttacttagttttagtagtttttctcaaataaatgcttagtaatttcatgtctgctcttggccaatttctaaagtcctaaatttgttgtttcaacaacttttccagttatatcattgccctttgggaaaggatttgctgagggtttcatgttgctattctagaagtccccagagattatgttaaactaatttaagaatgttcataagacattaaacaaaatttatataatctattataaatraaaatacaaaatgagttaga

SEQ ID NO: 662712 - DNA, 578 bp, Homo sapiens
tttaattcatagatttttgcgaaagccatggtttaatttggatgggtccaagtcctaacttcgagacttgtatgaaattagacaaactactttaaactcactgagccttattctactcaggagtagaactgcaatgacaataactgcaatgaaataacagtgtatcaataatgcatacattttatcaactcttttaattaaatgtatctatttttaattggcaataattgtgtatatttatggaaaacaatgtgatgtttttatctatgtgtacatrgtagaaagattaaatcaaggtaattaacacattcatcaactcaccaacgtatctttctttttagtggtaagaatgttaaaaatgtattcttttagcaattttgaaatatacaacaaattataattaactgtggtcaccatgcaatgcaacagatcactaaaacatattcctgtagtctgactgaaactttgtaaactttcatcaacatctccactttccccatccctctacttgctacctcagcctctggtaaccacctttctactcagtttctatgactttgagttttttagatttcaca

SEQ ID NO: 662713 - DNA, 529 bp, Homo sapiens
actatctcaacccggccactaacaaacagctctcactccttcaatttaatctgctcaactaatacccattaatagtytttttattacccatatagtatatgaatgaataataaactcagctaatacctactaatagttttttttcacccacatattatataaacactggtgtctggttaaacatgagaatcaactcacttctctggaggttcccttacgtatctagaattagagcttaatgtaaagtaatgtattactgcaaatatgcgatgtgtttttagagacaaaactcactctgtggagactgtgttccttgtaaaatttttatttatttatttatttatttatttatttatttttaaacagactctcgctctgttgcccagactggagtgcagtggtgcaatctcggctcactgcaacctctacctcccatgttcaagcgattctcctacctcagcctcccgagtagctgggatcacaggtacacatcaccacgccaggctaatttttgtatttttagtagaga

SEQ ID NO: 662714 - DNA, 543 bp, Homo sapiens
tctaacacaaaaaatacctttatgtttgtcatcatatataatttgccaaatcaaatcatttatatgcatctatctcactaccatattttacagtgatgtcaattcttacaaaagatccacacctgtaagttgatccaaactcctccaattcatagaacatatggctaatataaaaatataaaattttaaaaaatgcattctcttatatgtgttgcccatagttataaaaaacgaaattttaaatgtgctctttaagttttgagccrtttttttctctgaacatattaatgaagcagaacaaaacagactttccaaagcatttcaactttccctcctcttctcattaaaaaaaaaaaaatcattctgcagatttttcaggttcaccaaatacatggggccaaattggaatagagactaagagtgaaaattaatttaaacaccatttagttaacctaataaacccagtaaaaccttcaatagtgttgacggtaaggaagaattttcactttattatagttagctttaaagaaaggtgttatttaa

SEQ ID NO: 662715 - DNA, 567 bp, Homo sapiens
aagcaatgctttactcaagtatctgcccacagttcatgtggccccagatctgtcaacattaaaccattgttcttgtaaagcagawagaattatgctgccggaagacagcctggttgaaaatcaagttgtgttttattgtacaatgggttatgttctgatttgttatgaagataacacataaaagtgatgtgatggacccatttttccaaaaataatggtttatctctgactataaactattatttccaaatgaatcaaggcttattatcaggccagccacaagcagaatatgattctgaattgtatttgtcttactctttgtctaatattttgggatatcatgcctcattacaaattctagttggtaatttatttcgaaaattttctgaaaggattttctttgctaaggagaaatgacctttcttgtcatttcaagtgataacaacatatagttcataaataaaagtaattcagaatgtggtcatatgaaaaaccacatttctgtcctttctgttagaagtgtacatattacgggcttttctcttagagttcaggtttaataaatca

SEQ ID NO: 662716 - DNA, 482 bp, Homo sapiens
ggataagctcttttttggccatgaatacacaagagaaaatgtacgcttgtatgctttgtttttgaaagccaataatatgcatagtgctttaatccaatcatattcatgtatgatgtgtgccattgcactttttgtttgcttggctatattttagtgtttagttaaatagtgatatttgacagcaaaacaaaactttggcacatgcttgaagtggactatgtaactcaattgctgacattttgtatcttatttttccataatgtcttaaaaacaggagtgtgttctactgctgatagctcttgtatgtagtaagtaattacatgaaattaaggtctaattagaagacagtattgtcctacrctattaggaaatttatctcccattcccttctaatcagactttttaataaattttataatttcatttttaattaaaagtaattatatatctgtcccggatcgtatataaagctcctcttcaag

SEQ ID NO: 662717 - DNA, 577 bp, Homo sapiens
aaaacaaaaaaaaatgtatttttattcttggttatgtttccttttcatttgaaagatcgcttatatgtatgtgagaatagctaataatacatgagattaatgtttccagggcctaacaccttgtggatattggattctcatctaatttgtcattcaactaggtaacaatygttttgcccctctgtacttcagtttcttctccccggattgtagatacaaataacaaaacctttaaaagacattgtgaggattaataaaataacagatgtctgataccaataagtaaaaggttttacaagtgttttgactttattcttttctttgcatagtaccgttgccatggatcagccttatttaggacgccaaaaaaattgttgctataatgattattttatattcaccgaacaatagtaatattcttggcataacacagtacaataaggaaaatgaatttcttgtcctggggaggatgcagaggtagtgaactacaggaataacagaggaacctcagaaacatgcagtactgttcagtagtcagttactcctaaaacaaaacaaaaccaaaatagtgatgatt

SEQ ID NO: 662718 - DNA, 577 bp, Homo sapiens
aaaacaaaaaaaaatgtatttttattcttggttatgtttccttttcatttgaaagatcgcttatatgtatgtgagaatagctaataatacatgagattaatgtttccagggcctaacaccttgtggatattggattctcatctaatttgtcattcaactaggtaacaatcgttttgcccctctgtacttcagtttcttctccccggattgtagatacaaataacaaaacctttaaaagacattgtgaggattaataaaataacagatgtctgataccaataagtaaaaggttttacaagtgttttgactttattcttttctttgcatagtaccgttgccatggatcagccttatttaggacgccaaaaaaattgttgctataatgattattttatattcaccraacaatagtaatattcttggcataacacagtacaataaggaaaatgaatttcttgtcctggggaggatgcagaggtagtgaactacaggaataacagaggaacctcagaaacatgcagtactgttcagtagtcagttactcctaaaacaaaacaaaaccaaaatagtgatgatt

SEQ ID NO: 662719 - DNA, 579 bp, Homo sapiens
agacaactcatacaggagagctctggttggcatcttgcaggtgcccctctgggacgaagcttccagaggaaggagcaggcagcaatctttgctgttctrcagtgtccgctggtgatactcaggcaaacaggatctagagtggacccccagcaaactccagcacacctgcagaagaggggcctgaatgttagaagggaaactaacaaacagaaagcaatagaatcaactttaaaaaaaatgaccaagcaaaaacttcatccaaaggtcaccaacagcaaagaccaaaggtaaataaatccaaggaagatgaggaaaaaccagtgcaaaaaggctgaaaatgccaaaacccagaatgcctcttctcctgcaaaggatcacagctcctcgccagcaagggacaaaactggttggagaatgagtttgacaaattgacagaagtaggctttatttagaagatgggtaataaactcctctgagctaaaggagcaagttctaaccaaatgcaaggaagctaagaaccttgataaaaggttagaggaattgctaacaagagtaaccagtttacagaagagcctaaat

SEQ ID NO: 662720 - DNA, 579 bp, Homo sapiens
agacaactcatacaggagagctctggttggcatcttgcaggtgcccctctgggacgaagcttccagaggaaggagcaggcagcaatctttgctgttctacagtgtccgctggtgatactcaggcaaacaggatctagagtggacccccagcaaactccagcacacctgcagaagaggggcctgaatgttagaagggaaactaacaaacagaaagcaatagaatcaactttaaaaaaaatgaccaagcaaaaacttcatccaaaggtcaccaacagcaaagaccaaaggtaaataaatccaaggaagatgaggaaaaaccagtgcaaaaaggctgaaaatgccaaaacccagaatgcctcttctcctgcaaaggatcacagctcctcgccagcaagggacaaaaytggttggagaatgagtttgacaaattgacagaagtaggctttatttagaagatgggtaataaactcctctgagctaaaggagcaagttctaaccaaatgcaaggaagctaagaaccttgataaaaggttagaggaattgctaacaagagtaaccagtttacagaagagcctaaat

SEQ ID NO: 662721 - DNA, 596 bp, Homo sapiens
agtataaatcactaacaaacaaaatttttaaaccaaaggtaatgaagaaataaaaattaaaacaacaataaaaaaacctctagaagacgccaaaagctacctttctaattttaaaggtttgaaatagatgtaatgttcagtgcatgtattgggataggatgacaagcatgcccaaacacaagcgtaacaaagtctttaaaagcatctgtggtatttaacccaataattccacytctgagaatctaagccaataaaataattagaaatatagtcaaatatctatatataaataaactactcaccaaatgtttttaatcaaaagaatttaaaaagaaacaacctaactgcccagtaatgtataacctaaccatataataaattgctgtgcagtgtgttagttaaaagaagaattattaaatacaggaaaatgattatattaaaacattaacaaaaaacagaaatctggaaatacatagaaactgtctagacttgtttaggtgctacaatgatagcatagatggttttgtctaaaatgttgagtgtgacaatgtaactttcttccttattttccctagctgtttacatgtattgctttc

SEQ ID NO: 662722 - DNA, 540 bp, Homo sapiens
aaaccaaacacggtatgttctcacttacaagtgggagctgaataatgagaccacatggacacatggcagggaacaacacacactgggtcctgtaggcrggggtcgggtggagagagggagagcatcaagaagaatagctaatggttgctgggcttaatacctaggtgatgggttggtctgtgcagcaaaccaccatggcacttgtttacatatgtaacaaacctgcatgtcctatacctgtacctctgaacttaaaagttgaagaaaaaataacaaaaactatatattttttttctctagagagccctaatatatcataatgagataatatcaatttcctagaataatgctgtcatattttcaagtactgacaaatatgaaaagttaacactgagaaaacactaaatctgtatttcattcatttaccaaatatatttgagcatctattctgtgtgagtccctggggatatagatgagaggaatacgaagtgcctgccctcatgcagtacatgttctggtcagggaaacaggcaacagata

SEQ ID NO: 662723 - DNA, 528 bp, Homo sapiens
ctgttggtcctttgcatatctattcatgtccttttaccattttcttatctggttatttggttcttgtgtgtttgcttatttttgctattgcattgttggagctccttatatattttgaatattagccctttatccaatattcagattgcaaacattttctctcattccaaggttgccttttaatttcattgattattttctttactgtagagaaactttaaagtttgatgtaatctgctaaacttaaaatccargtgttttccccctgtgttttcttttaggagttctaccgtttcagctcttacattttaagtgtttatcactccatgtttagttgacattttgtatggtgtaagaaaagagtccaatttcattcttttgcatatggatttccagttttcccaacaccttttattgaagactgttctatccccattgtgtattcctagcacccctgtcaataatcagttgaccctatatgcgtgggtttatttctgggctctatattctgttccattgttttagatg

SEQ ID NO: 662724 - DNA, 525 bp, Homo sapiens
actatgctgtctatcaccatatatcacttcaatttctgagtttgttttagaagactaaatattcttttctcacaatttgccattcttcctgtctcactcttttattgttttaacagagcctgcattctctaattcatattgtaaaaattgtcccaacttactattaactcatttaccttagtaactgggatttgtgcataaatgaaaaaaaaatggctttaggaatttataagtacacataatactacagaagtttagagctgtacataatcttgcaggtcatctattgagactctcattattattattgagacatctcttagtggaacgctaaggcaagaaaactcaagtgaccttgatcctactgatgacaaatgacaacactaggactaaagtttaggtcttcttagtacttcattgtgtctgctgtggttatttattatcasataataaatatgtgcaagtggcataggatgtcactagagaaggagattcagaccagactaaaaaatgtcttgcatatgc

SEQ ID NO: 662725 - DNA, 541 bp, Homo sapiens
gtagtgggagaatcataaatgatccctgagcataagtaaagcctactattgatgttttcttacattctgagattacttttggctccactgagtttggcattgtcctctgcagccctatgcagctrgcacaactaggaaattatgaacttgacagaaagatgccagcaaatttctgcagagtaagagacgcagtcttgcacccagccaggagaaggatttcctggcattcagagaccctcagcatgagtttcatgaggccttcaagttgtcccttctaccttcctcatgtgactttattaccttcctgactttcccagctggctggctatagcctctgccagtacatcaggtggaagaaactagtagcaattactgcttttccttaattattcctgtaacactaggaaagtttgttgtctaattcacagcaataggcccagaacctacatcttctcaggctttcttcaaatgttatttcactgtaatttataacatttactgaaccatttaaaaacatttaaaaaataataatattttccct

SEQ ID NO: 662726 - DNA, 596 bp, Homo sapiens
ttgaacagtgttcattttttactgaatatttattgattatctactatgtatcagtttctaaacatagggactggcaaacaaagttaaagatcctcaccctcagggagcttatattttggcaaggaagatagaaagtaaaaatgaaaataagaaataactaaattccattgtatamaaggtggaaaatgctacaaaaatatagtaaataataataataataataataattaagagacctagaagagggaatgatgtttgtgggagggaggaaatgggtaggttgagtattaaatagaagggtcaaaataagcctgaataagtaaagatttgaaggtggagatgtcaaacaagtgcatatctagaaaaagaacattccaagcaaagggaatgatgtagatggaagaaggactggtatgctcctgaaacagtaagggctcaatactgatggatgatccagatgagtaaagggagagtagttagatggtagggcagagaggtgaggggaacaagatcatttagagcctgttggacaattcaaagactctggtggttttcaaccttagttaaattaagagccactggaaggtttgaatgat

SEQ ID NO: 662727 - DNA, 596 bp, Homo sapiens
ttgaacagtgttcattttttactgaatatttattgattatctactatgtatcagtttctaaacatagggactggcaaacaaagttaaagatcctcaccctcagggagcttatattttggcaaggaagatagaaagtaaaaatgaaaataagaaataactaaattccattgtatacaaggtgraaaatgctacaaaaatatagtaaataataataataataataataattaagagacctagaagagggaatgatgtttgtgggagggaggaaatgggtaggttgagtattaaatagaagggtcaaaataagcctgaataagtaaagatttgaaggtggagatgtcaaacaagtgcatatctagaaaaagaacattccaagcaaagggaatgatgtagatggaagaaggactggtatgctcctgaaacagtaagggctcaatactgatggatgatccagatgagtaaagggagagtagttagatggtagggcagagaggtgaggggaacaagatcatttagagcctgttggacaattcaaagactctggtggttttcaaccttagttaaattaagagccactggaaggtttgaatgat

SEQ ID NO: 662728 - DNA, 596 bp, Homo sapiens
ttgaacagtgttcattttttactgaatatttattgattatctactatgtatcagtttctaaacatagggactggcaaacaaagttaaagatcctcaccctcagggagcttatattttggcaaggaagatagaaagtaaaaatgaaaataagaaataactaaattccattgtatacaaggtggaaaatgctacaaaaatatagtaaataataataataataataataattaagagacctagaagagggaatgatgtttgtgggagggaggaaatgggtaggttgagtattaaatagaagggtcaaaataagcctgaataagtaaagatttgaaggtggagatgtcaaacaagtgcatatctagaaaaagaacattccaagcaaagggaatgatrtagatggaagaaggactggtatgctcctgaaacagtaagggctcaatactgatggatgatccagatgagtaaagggagagtagttagatggtagggcagagaggtgaggggaacaagatcatttagagcctgttggacaattcaaagactctggtggttttcaaccttagttaaattaagagccactggaaggtttgaatgat

SEQ ID NO: 662729 - DNA, 643 bp, Homo sapiens
attatgataaaatcgtttttattatatttgtggaataaaagcagtgtagaaatgatactgtgttgtcagaaaggagaatttctcaggcaatgttaacactcaacatggttactgatggatagaagagacatcttggtaggaaaccagggagctatctcctccaggggacagactgtaaaaccatatttttagagaatcatgttatctaggtcagtctggagcactggttctccactggagatatctggcaatattgaatgatattttggcttctcacaactgggggaaacgacctgtattagtccgcttttacgctgctcataaagagatacccgagactgagcaatttacaaaagaaagaggtttaattggacttacagttccacttgtggggaagcctcacaatcctgggaaaatccaaggagaagcaagtcacatcttacgtggatggcggcaggcaaaaaaatgagagagcytgtgcaggggaatgcctctttttaaaccatcagatctcgtgagacttacacactatcatgagaacagcacaggaaagacttgtcaccatgattcaattacctcccaccaggcccctcccacaacacgtgggaattcaagatgagatttgggcggggacacaggcaaa

SEQ ID NO: 662730 - DNA, 449 bp, Homo sapiens
cttgcccctgccctagagatctatggaacttcaaactttagagacatgatttagggtatctggcaaaagaaatttctaaacaccaaagtgttcaagatgtgacttgggtgttgttaaaagcattcagttttatgtattcacagagatatgatttgcaattggaatttatgtttaaagggaagttaaataaataaaagaaataaaagtttagcaaatttataacctgacaaggtgatagaaaagaaaaacscattttctgaggagaaatttaagccagctgcagaaatttgcataagtaacaaggagccaagtgttaatcaccaaggcaatggggaaaatatctccacagcatgtcagagcccttcatggcagctcctctcatcacaggcccagaggcttaggaggaaaaatggctttgagggctgggccctgggccttgctgctttgtg

SEQ ID NO: 662731 - DNA, 555 bp, Homo sapiens
gcttgcccagaagctggggaatcgggaagttgccagatcatgtgaagacttgggctatgaagaatgctggatttcacatcaatcagagttcaaagccactgaaggattttaagcagcatgattgtttttgttgctgtttttaagtgtatttcagttgtggactaagctctttgtctagtcttagacaaayaaatgtgttaagtcttctaacggaggctgtaaactgcctcttggagagtcaaatatggagtacagacatttatttgtttttcaatacgctggcccagttttaaatgtttgtttgtaactaacatctggatttccaggatttctggaatgatcttccaggagctctgtgaaaggagaatatcaggcaatgttggttggcatttcccatgacaacaatcttcagttgtgtttagatggtatgtccattctccagattttgaagctccatatttatcatggagctactgtatcactgaatctaacagagttacagatttatgttaccatctagtctttgtagataactttgcaatgcctgcctagtaa

SEQ ID NO: 662732 - DNA, 611 bp, Homo sapiens
aagccctaggaatacattagtgaactcaaataacattatatcttcctttataaagtttacaatttagtggagaaaatacatttgtaaactgaaaaatttaatatactatgataattaaggaaatattaggcttctgtgtgaatacagacaaagtacccataaaagaaagcatgaccagagaagcttcctaaaagaattaataactaaaaattttccaagtgatgagaaataataccacmcaaggtaaacaaagacaagagagaaaaaaatagccaggcagtgagatgatcaaatcagtattgattggtcatttgtattgattgtatttgtactgattgcaatagagagatggatagttgaaacatcattagagaaaaagagaaaaaattagatctccagtctcaaccccaaacctcctgaactgtaatacctggggtggagtcagctgatgtagttagttttgtaatctactgcttgggaaaacattggaaatgacctttttttttttttttattcttttacttcaagttctgggatacatgtgctgaatgtgcaggtttgttacataggtatacatgtgccatggtggtttgcttctcctaacaaaccat

SEQ ID NO: 662733 - DNA, 553 bp, Homo sapiens
tgccggtcatcatttagcttctgtccttccttggggaggacttaacaagaaatagggacttttaggtaaatgaaatttatgctgactccctccacagtggaactcactttgaagtccgattaacagaaggaagacctatttggtgcaggtctatgacccctgtgaatttcttaattctctctcaggttttactggttctaaaggattctatatgactttatttgtactaagagaagcctgagaaatatccctttcagaaatttccagccttgatgggcctgagaagtaaaagtttcaaaatgcatcttttttttttttaacaaaaaagtttcattcatcctcccttgcaatcatttgaacaacatttttttttcccaaaacgatccatgcagattarttgaatagttttcttgaggaaagaattgaaatggcaattcaaattcagcttcaatcagaaactccatgatttttagcctgatctttgttgctccatagggttgttagcttactaaggagcctctggtgccattacacaatttttgctttgtaaaag

SEQ ID NO: 662734 - DNA, 601 bp, Homo sapiens
aatcaaagtatacatcttaaaagcatccagagattgactattcataatccagatattatgaatatttcatattcaaaacagttacagaatgattaatagcttattctcaacagttataatggaaagcacaggacagtgaaatgaccttttwtaaagtgtatcaatctagaattatattaaccggaaaatattcctcataaataaaggttaagtaaataaatactcataaactgagcagatgcatcttaaaggaaaacctaaggaaattcttcagaaagacagaagtaaaggcttacaaaaagaaatataaaaaacaaaaggagtaaaactattgataaatccaatgaatatggaagtctaaatcaataatagtaatatcttgtgggatttaaaaatatatttatctaatacaggatgtaaggtctccaaactaaaatttacaaaacactattgaaagaaagaaggcttaattaaatgatggcatatgtgtctttaccagttaaaatactcaatactgtgccaattgtcactcaaagtggtctaactttcaatagattcctgatcaaaattgcagaatgtttcttgtgtagaaatttaaagc

SEQ ID NO: 662735 - DNA, 582 bp, Homo sapiens
ttgtgtggtcctgagtttttacctctctaagataaatacccaagaacgtgatcactgagtcttataggaagaatttgtttaactttctaagaatttgccaaccttttccagagtagctgtactatcttacattcctgccagcaatgtatgagagacatggctgcttcacatccttgtccatatcttcgcttaatgaagaggaacattccctggatatggtggctcagcgaatggctaattctttccagttcatcagtcagacggtcattctacctctcacttaatraaaaggtaagagctactgcttcttctccaagtccgtttctgttcaaatatattgcctatatttcttagaagtactgagtgggagacccatactttattgcgttacgttaaaaaaacactaagggggataaaaatctattattttgcctctaaataaaaacaagattttttaagtgatgtggaaagacagaatacacattctgaattgttcaaaacaataaagatggaattaaaaacaaaataagccacctactggtgaaaggcacagaatttgtaccgtataggtaaagatgctgc

SEQ ID NO: 662736 - DNA, 577 bp, Homo sapiens
tttcaaatctttcaaagtttaccacattagtgtatttttggcacaaaaaaaaaccctgaagaattcttgtcatcaaaagttttataagaaataagtagtatgttttcaaaaccaaagacctttactacgcacagaatcgcgcatgacaatgaatggcatcatttattggtaacatagactcatgcagatgtacccctggaataatggatacctccaaacctgtggcaataacttatataaaaattaatgaagtaaamaataataatttaagcccctactattgattatatttagtaattttttcacatatacaatatatacttttaaaattatacccctttgatttattttctatgatttctccaagtaacaacatctttaacatcttcaagagctactattgggtcagttttgacccaacctacatgagctatataaatcaccttccatccaatctgatgataaatgttgtggtaaacaagtgtgattatgtctatttctgattgattcagtttcactgagatggcaatactcttcaatgttcttaatgttaatattgaatatatttttaaaatgt

SEQ ID NO: 662737 - DNA, 642 bp, Homo sapiens
atctgggtctataatgttgcccagcatgtattttttgttacttctgtgttatctgtcttcctctgatagattttaagtctcaggagggcaatgatgtttgcctgctttgttcactgttgaatcccaagagcttaagtcagcacttgcttacacaatgtcttcagtaaaaatcggctgaatgagacaagtaagacagtggatctatctctttagcatgtataggatataatttatggtaatagatgagatgaaatgatactcatagtctcagatcctgatcacaaaaattttagtaatcatctgaaaaaccgtttttatctccttctccattcagtcttgtgtttcaataactcaagtaaacgtagatatgctaaacatgacttttgtaagttttaagtaaacaaatcatgtcttgctgttagccttgaagtataaagcagaaaagcagaaaaaataatttataaaatgcaaatctttattgtttcttaatgatttttaacattatttgtkcaaaacatttgccaaggagtacacttttccaaaagacagcttaggctggattaattacaggacaggatgtagggcagcaggaccagagtcagtttagcaccattgctcagataatttgggtttaacaagagg

SEQ ID NO: 662738 - DNA, 642 bp, Homo sapiens
atctgggtctataatgttgcccagcatgtattttttgttacttctgtgttatctgtcttcctctgatagattttaagtctcaggagggcaatgatgtttgcctgctttgttcactgttgaatcccaagagcttaagtcagcacttgcttacacaatgtcttcagtaaaaatcggctgaatgagacaagtaagacagtggatctatctctttagcatgtataggatataatttatggtaatagatgagatgaaatgatactcatagtctcagatcctgatcacaaaaattttagtaatcatctgaaaaaccgtttttatctccttctccattcagtcttgtgtttcaataactcaagtaaacgtagatatgctaaacatgacttttgtaagttttaagtaaacaaatcatgtcttgctgttagccttgaagtataaagcagaaaagcagaaaaaataatttataaaatgcaaatctttattgtttcttaatgatttttaacattatttgttcaaaacatttgccaaggagtacacttttccaaaagacagcttaggctggattaattacaggacaggatgtagggcagcaggaccrgagtcagtttagcaccattgctcagataatttgggtttaacaagagg

SEQ ID NO: 662739 - DNA, 558 bp, Homo sapiens
gtgtgcagaggaagcatttgatagtcttttcatagtcttacttttttcgtgagtttatacttctggactgtgaacttcacaagtgtttctcagttttgttctcctcccttaggtgagaaaggatggctacagtgggctgaagttgggtcattccattctcccaaatggaaagttagaactgactagaattgggcatttccctttctcgaggtcagttaggctctgataatgcaccagcaggttaggccttggttaactactttctcctgaggtcaggccttgttaagaaacagcgtgctatcgtatatttcaaaatggttccttttctcctgtctccgcctgaacgagggggatttttctctgatatttactttgggaacctgcttgaagttctgaaggtaaaactcacaatattatgctctctccctgtgacttggtcctcctggaacttttaactctcagagttgtctgcattaagcttagagcaaatcttcarttacagtcgaagttttcctaacaggcactggtccctatagtggttttttgctgatgagtctc

SEQ ID NO: 662740 - DNA, 537 bp, Homo sapiens
ggagtgtgtgctgaatggtttctgartatgcaataaaaggttaaagcaaagacaccactcaaaggtgggcacgacagtgtagaaaaccaattaggaaaggataggtatatgtaaaattggtgaaaggtgggaatcaatcagaggagagtgtgcctaaaaggaagacaagttctcaatccagctggaagatttaacttgtagtttagctttcaggctttaaactgtcttcagcttggaggtggggttttactggggacctacccctatctgcctagccatttgactgcctcctgtcactatcattcttgtctcagccttccaagtagctgagatgataggtttgcaccaccactcctggctatttttttaactttgtttttattgtttagaaacagggtcctactacgttgtgagaggctggtcacaaactcctgggccctggctatccttcctattcaacctcctgtgtagctatgattacaggtgcgagccactgtgctagctagattggtcttgtctttctacagtttcagcttg

SEQ ID NO: 662741 - DNA, 602 bp, Homo sapiens
tgctgggtatatgtccaaaataatataaattgttttattataaagacasatgcacacatatgttcactgcagcactattcacaatagcaaagacatggaatcaatgtatatgcccatcaatgacagattggataaagagattgtggtacatatacaccatggaatactacagcagccatagaaaagaatgagattatatcctttgcagggacatggatagagctggaggccattatccttagcaaactaacacagggacagaaatactgcatgttctcacttataagtgggagctaagtaatgagcacacatggacacacagaggggaacaacacacactggggcctactggagggtggagagtgagaggagggagaggatcagaaaaaaataactaatgagtactaggcttaatacttgagtgatgaaataatctgtacagcaaatccccatgacacacatttacctttttaacaaatctgcaaatgtacccctgaacttaaaagtttttaaaaaattttaaaaaggctatgagctctgccccatatcttagataagcaataaagcctttcaaagaacaacaaaacagaaatgattgtatg

SEQ ID NO: 662742 - DNA, 562 bp, Homo sapiens
tgcacatgtatcccagaacttaaagtataataatagtaaaaaagaatttccatgcattagcaaaaataatgatatatacacttcaataccttactttttttttgctgttagtttttctaaaattaatattttaaaaaaatgtgtaaaacttttatagagaaaattttaacacttcatggaaaacattgaaggtaacgtgtacatggataggaagtgtcaatatttaaatgatctcaatttccttcaaatatatatatatgtatataaaattatttkcaataaaattaccaacagggtattttcatgaggtattataaagtgtatgtagaagagaaagacttaagagcctcatgaaaaagaacaaggaagaagaattttcttatcagttagcaagactcagttttaagatgtaataattcacccagatggttgtttgtgccagaatatataaactgccaaatgcaccagaggagacagacaaaactaagtgtgtttgtgtgtgtatgtataaatataattgatctatgacagccatgatattcatttatactgggaaaaaatg

SEQ ID NO: 662743 - DNA, 437 bp, Homo sapiens
aaagcttgatctagaaacagcgcacataattttcactttttactgcccagggctctgaaacctggacacaccaaattgaaagaaagcaggaaatgtaatcttgctgtgtgcccaggaggatgagaaggattacacaaattttgatgagtgactaacacaccttgtactgcactgagggatgaaatatagttattaattatctgaatataargatgtatttttttaaaaaaacattaggttaagtaattaaaatattattgcagaagagctcaaattccttttggttatattgaccacttcagtatcaaagagaagagatgtgaaacttgttcaataagtagatatttcataaatcaagaaatcagttgaagcaggtgaaacttaaacatgcctctcaaacttcacctgatccttttcatctgggtatatactgcctc

SEQ ID NO: 662744 - DNA, 540 bp, Homo sapiens
gctctgggttgcctcaagtttcctgtgcatgttttatgcgaacaccattttctagtagactatctcaactccatgtgttaccacactcttggagataacctaaatcttgttattatcttgtaytcttacaaatcagaaatcttagattttagttcctcactttttgaaaacaaactgctttccttccaagacttctcatactttaacatacagaacatccattctataacattctagaaatcctcttttcttctcatggtttaagaggggctttcttattttacttttccagacaaccaaagaccctcaattaatcacctgacccactttctcatcttctacctccatcccttctactgcacccattagacaaaacaacagcaacaaaaatccttaatcaaccttaatatttgtctttattgctcctatactcacaccagcaaaaatgcctcagccatgtgcatggttgccagtagaaactgaggaaacttaccgtctattattataatagtttcctaaagcttttcttcttttgttgtt

SEQ ID NO: 662745 - DNA, 449 bp, Homo sapiens
gaaaattatctaatagaggaaattatctttcattaatacatatgccaaaaacttatatattgatttatttcttartgcattttattatattggtgctgttgcaaacaaaataatgcattctataagaaatctgctttcaaagaatttatatccttatttaacaaaaaagagactgctactagataagtatacataagcatgtagaaatactaaaagtaatggcaaaaaccgcaattacttttgcaccaagctaatataaatgtatagcaatgtgtattagtctgttctcatattgctgtgaagaaatacctgagactgggtaactttttaataaaagaggtttatttggcttatggttctgcaggctgtacaagcatggcaccaacattgcttggcttctaggaaggcctcagggagcttttactcacggtgaaaggcaaagcggagta

SEQ ID NO: 662746 - DNA, 445 bp, Homo sapiens
ggaatgaatcgtattttcatgtttctcaaaaccaaatttaccgtttgtatttttgaaacattttatatyactgtgtttatcaaatggtttccttaaacatgttctgatattccaaaacagaatttcactaaagttctctcttcctggcatcataaaataggtggctttttcatattacagacatataataaacaattttttagtgatcacctattctgttacaatacaaaattatatttgaagaatattaaaattaggaaaatatacaacttttacatgtttcattttctgaattctcaagaagagtacataattttatatcaccaaaaagagcatctcttagttttgcataatgaacatgtaggtaatgaatttttataactttagtgatgttcctaattggtttttgattttctctcaaagtgtgtctctaaatatagaaaat

SEQ ID NO: 662747 - DNA, 552 bp, Homo sapiens
tagcaatatccacagaatcattatctgtaatagcagaaaaaaaggaagacaaatacacagcttatttttattatttattcatttttgagatggtgtctcccttggtcgcccgtgctggaatgcattggcatgatctcgcctcactgcagccttcgcctcccaggttcaagcaattctcctgcctcagcctcctgagtagcttggattacaagtgcgtgccaccaygcccagataatttttgtatttttaatagagacagggtttcaccatgttgtccacgctggtctcaaactcccaacctgaagtgattcaccctccttgtcctcccaaagtcctgggattacaggtgtgagccacggcatctggctaacacagcttaaatattaaggtgagaaaggataaataatgttgcatacaatcaaggaaaatgtaaacattaataaaaatgatagaactctgagaactgcagcaatatggatacacctcctatacattaagtgaaaaaagtaagtttcagaaaaatatatataggatgatagtttatataaatgc

SEQ ID NO: 662748 - DNA, 622 bp, Homo sapiens
tgacatatacatataatagaatactatttatccacaaaaaagaaaaaaaattctgcaatatgtgaccacatgaatgaacataggggacaatatgttaaataaaataatccagtcacagtawgacaaatactgtaagattctacttatataatgtatctaaaatagtcaaattcataaaatcaaagaatggaatgatggttgtcatgggctgggattatgggaaaatggggactgactaatgagtgcacataaagttccagttaagcaagttgaataagctctagatagatgatgtccaacaatatacctatagttaacaataatgtgttgtactttaaaaatttaagagagtagatctcattttatgttttcttacctctataaaataaaatctacaaaaatgaaaaactcaagaagacacaattactatattagaaataaaaacaaaattctaacttctcatttcagatacatccaaagaataataaagaaatatttagaataactccatgcccatatgaataactctgtgcccatacgcactagtttcttgaatatactaactacaaaatctcacacatggaatgaatagattttaataggcctatatttactaactaca

SEQ ID NO: 662749 - DNA, 631 bp, Homo sapiens
tgggactgtatttggagacaagacttttaaagttatgatttaaaaaaaaatgcctttagcgatggccacaattctattggctggtgtcctgataagaagaagaaatttggagacactaggcatgtatgggcacagaggaaagaccatgtgaaaacacagagagaaggcaaccatcttcaagtcaaagagagaggcttcagaagaaagccaacctgctgaaacatcttgaaattctagtttctagaatcgtgaaaaataactgtgttatttaagccacccagtctgcggtattttgttatgtcaatccttgcaaactaatacaacttcacaactcattctattaaaccaacattactctaatactcaaaccagataatgacattataagaaaagaaaactataggtcaatgcttttcatgaacataaatgtaaaaattctcaataaaatatcagcaggtcaagtccaaaaacgtgtaacaataattctacaccagaacaaagtgggatttattccaagtatrcaaggctagttcaatgcttaaaacaatcaattaatgtaaactaccaaatcaacagactaaagaagaaaaaaatcatgcaattatatcaattaatgcaaaaaaaggatttg

SEQ ID NO: 662750 - DNA, 631 bp, Homo sapiens
tgggactgtatttggagacaagacttttaaagttatgatttaaaaaaaaatgcctttagcgatggccacaattctattggctggtgtcctgataagaagaagaaatttggagacactaggcatgtatgggcacagaggaaagaccatgtgaaaacacagagagaaggcaaccatcttcaagtcaaagagagaggcttcagaagaaagccaacctgctgaaacatcttgaaattctagtttctagaatcgtgaaaaataactgtgttatttaagccacccagtctgcggtattttgttatgtcaatccttgcaaactaatacaacttcacaactcattctattaaaccaacattactctaatactcaaaccagataatgacattataagaaaagaaaactataggtcaatgcttttcatgaacataaatgtaaaaattctcaataaaatatcagcaggtcaagtccaaaaacgtgtaacaataattctacaccagaacaaagtgggatttattccaagtatacaaggctagttcaatgcttaaaacaatcaattaatgtaawctaccaaatcaacagactaaagaagaaaaaaatcatgcaattatatcaattaatgcaaaaaaaggatttg

SEQ ID NO: 662751 - DNA, 592 bp, Homo sapiens
aacaaaactctgcactgaaataaaaggattgacaaaatagaatgagatgttggaaaactttttgagggatcattatttcttctctcatttggtgtaggtagacatcagaggtgaaaatgagagacaaagataaagaaaataaatttcttagtcatctacttaccacaagcctaagggaaagtcagtggtttatataatagaactaacactgtaagtcatttctaatacctgtgctgatggaaaccacatgcagtttaaaatagtccttattagaagggtttacttggaaatgaaaggtcaaaattacaaaatggaaaaaagcaataggagattcattattcacagttcctttagacatttatagcacagagtcaggaaactcaagtttggaaacaaatgaaaagccgatgaaaaagaaaagatggagcactttttaacaaattaccctattctgtctcagaggcaaataaataagctgaggatatacaagatagaacagaaactgtactgcctgttatggactttattcaaaagttagttctaatttttaatgcagtgaatatcttgaagragagtcggaaagtaagccggt

SEQ ID NO: 662752 - DNA, 597 bp, Homo sapiens
cttgttcataattctttaaaagagcttcatggatttttttttttttttttttttttgacagagtctcactctgtcgcccaggctggagtgcagtggcacgattttggcttactgcaatctcygcctctcgggttcaagctattctcctacctcagcctactagtagctgggattacaggcatgtgccaccatgtctagctaatttttttatttatagtagagacagggtttcaccatgttggccaggctggtctcgaactcatgacctcaggtgatccgcccgcctgggcctcccaaagtgcctggattataggcatgaggcaccactcccgtctgtttgtttttctgagacagcatcctgctctgtcgcccaaggtggagtgcagtgatgcgatctcggctcacggcaacctctgcctccctccccctcatggatggttttaataacagttggtcctggctttggagaacaactaagctgacattttgaatgagtcttagaattaacatttcttcagtgacaattttggtatgtattttttcttatacactttagcaatatgtttggagacagaaccagtttgaaatatcagctct

SEQ ID NO: 662753 - DNA, 597 bp, Homo sapiens
cttgttcataattctttaaaagagcttcatggatttttttttttttttttttttttgacagagtctcactctgtcgcccaggctggagtgcagtggcacgattttggcttactgcaatctccgcctctcgggttcaagctattctcctacctcagcctactagtagctgggattacaggcatgtgccaccatgtctagctaatttttktatttatagtagagacagggtttcaccatgttggccaggctggtctcgaactcatgacctcaggtgatccgcccgcctgggcctcccaaagtgcctggattataggcatgaggcaccactcccgtctgtttgtttttctgagacagcatcctgctctgtcgcccaaggtggagtgcagtgatgcgatctcggctcacggcaacctctgcctccctccccctcatggatggttttaataacagttggtcctggctttggagaacaactaagctgacattttgaatgagtcttagaattaacatttcttcagtgacaattttggtatgtattttttcttatacactttagcaatatgtttggagacagaaccagtttgaaatatcagctct

SEQ ID NO: 662754 - DNA, 626 bp, Homo sapiens
ctatgacacaaatctatcttttcaaattaaaaatatttatgcatatgtaagaattacatatatttatggggtacatattttggtacaaatattcaatgtatagtgatcaaatctgagtaataggaacatccatcccctagtactactactactamtaataataatgatatttcccttgcaactagaggacaccatgtaatatgtaaatagaagtattgtgtgggaattccataaagcctatttgaagggaacttgactgagcaagaaagatggcttgtttgtttttttttattttttaatcctcttttccctttcctgaaatacacaataggatgcctcaggtggagaagtcatgttaagcaacttgcaataccggggactgaagaaagctgagaacctgacagctccatgtttcaatttggaaaatgataggtaactatagacagcccatctggaattgttttcaatcttgtaagcgtgaggaactgacaaattttcaattgtttcctctctctgattataagaaatcagccagtgaagatagagtttaggacagggaatgatgggaccgttagtaatgtaacttcagagcatttaagatactcccacttgttgataactcacat

SEQ ID NO: 662755 - DNA, 626 bp, Homo sapiens
ctatgacacaaatctatcttttcaaattaaaaatatttatgcatatgtaagaattacatatatttatggggtacatattttggtacaaatattcaatgtatagtgatcaaatctgagtaataggaacatccatcccctagtactactactactaataataataatgatatttcccttgcaactagaggacaccatgtaatatgtaaatagaagtattgtgtgggaattccataaagcctatttgaagggaacttgactgagcaagaaagatggcttgtttgtttttttttattttttaatcctcttttccctttcctgaaatacacaataggatgcctcaggtggagaagtcatgttaagcaacttgcaataccggggactgaagaaagctgagaacctgacagctccatgtttcaatttggaaaatgataggtaactatagacagcccatctggaattgttttcaatcttgtaagcgtgaggaactgacaaattttcaattgtttcctctctctgattataagaaatcagccagtgaagatagagtttaggacagggaatgatgggaccgttagtaatgtaacttcagagcatttamgatactcccacttgttgataactcacat

SEQ ID NO: 662756 - DNA, 549 bp, Homo sapiens
ttcatacatatcaaggatctgtttttttccattttttagagtaagtatagttcaaatatatgatgcatttaacggtatagttcaaatatatgatacatttaatggaatttactttattaaggccctcagaattatatagtagaagatgcattctagcaatcacaattgtaagaacargaaagaaagctgtgcttccaactgcgtttttagaattctttcaggtacgcttatgctctcagtgtctgtggaccatgagtagttgtataggtatgtgggaagaaaaaaaaatgttcaaagaaagctgtaagtggaaatgaaaccttattgatcttcagtaagattctttttattacaaacttttccactcttccaaaaatctgagccaattgaagtgaattcagaaatgacatttctggtgggtttgctttgttcagtaagaataacaagtgaaagcatttctactaacctaagctatagaatgacatattaccttttgttgatattgtgtttttacgtagcattggagataagcattgtcctatacttcat

SEQ ID NO: 662757 - DNA, 635 bp, Homo sapiens
ataagcattgtcctatacttcatgggatataatataaacatatatgctggatgtgaagaaataaaataccataatgttcattcaataatatttatcaaacatctattatatgtatcactttatgagtcaggtatctgaggggatacaaagctatcaaatcataatcctcaacttcaagagcttacattaaattagaactgacaaggaacaatggaaaaataagaaagggctactgataaratgtttgtagaagtggagagagattgcttttgtctgagaaatctattgagcgattaataaaaaaatatgtagatgtagatatatatgaactctaaaaatatatattataaaaagtacaattgtttgcagtttttctagtgtaaaaattgcagctttataatgtatattttcagaaaacatactgcatattttcagttaataagatattaacaattaatgaaatattaatgaataatgttaatatgattaacgatttgtatgttaatagagttatttactgcatcataatgttttcagcatattatcacatttaagtaacataaccactgtgcctgtgtgactggcattgttttttttctcgctctcttttacaggtaaggaaaatgaagctcaat

SEQ ID NO: 662758 - DNA, 628 bp, Homo sapiens
gggacaacccattctgtaggttgtctgtttactatgttgatagtttctttcactgtgcagaagctctttagtttaatttttgacaccggggcaaataattttttaaaatgaaaaatatatagctatctttatatatgttacttcaattgatgataatttatatatgccatactatattgtaaagtttttttctgtttacctctttgtctgctgttatgaaaaaagacttaaatgaatatataaaatatacatcttttgtaaatgcgtttatggattgtaaaaatgaacaaattgattttatctataaaaatgtatagtttaattgagacaaaacyatatatttgatttgatttaatttataagttaaatttttttaaagtttagtgttaaattatagtgttttttctggctgacttcattaaatgccatagctgtattttcttgtcagctataatattgaaacacatgaaaagtggaaaatttgtattttataattcacaatgactgcctgattatgaaactataaagactgtattaatgtatttcaaaaaccaatattctatggaatattgccatggaaaagtaaaagaatgattgtcagagaaatgttggtatgacattttgtata

SEQ ID NO: 662759 - DNA, 575 bp, Homo sapiens
ctattgtgtggttcaggtctaagataatgagtttggcataaggaagtagagatgagtaggaaaagaaaaactttaatttaatagttatttgaaaaaagctttgtagaattttaagacaagtaaattatattaagacactctaatatatttgacgaggtagwcaacaaacatttatagaatttatcctggtttgccattttcttcacaatacacagcaaaatcctcactgagaaatataaccttttcttttgtgttattggagtgaagaacagttacaatatattctgtattttaatatttttaaaaggtatctcaatatcttttgtttgtaatttcactacaattttaaagatataagtattatcctgtgataaatctatcaacagaacagcttatggcttgtgataaaaatttagagtaagcataagacaaaattatgtctggactgggagctaaaaactccacttgtgttatacaaagttgagaatttaaagcaagcttgactcataagatctttaaactataagtagtgatgatgaggctgtcagtggaaaagactagcacatataaaaata

SEQ ID NO: 662760 - DNA, 520 bp, Homo sapiens
tttaattttcccttgtagctcttgtacatattttcttagatatatgcctaagtattttattcttgggggatgctaatataaatgatattgtgtacttaatttcagcttcaacttgtgcattgctggtatgtaggaaaacatttgacatttgtatagtaagatcgtattttgcaactttgctaaaattacttattaattccagaagtttttttgttgattccttcagattttctacctagatcattgtgtcatctgcaaatgaaggtagttttaatttttcttttccaatctgtatgccttttcttttttttcctttccttttttttttgtcttatgggatttggtagtactttcaatatgagattgaaaagaaatggttacaggggacatcctcacaatgcttctaatcttagtgggaaggcttcaagtttctcactattaagtatggtattacctgtagttttttgggtttttttgcgggtatttttttaagmaggtattctttatcaaggtgagaaag

SEQ ID NO: 662761 - DNA, 547 bp, Homo sapiens
atcattctgatgacatttctcatccactgaaggtcagaactttgcacacctgtctcagcacctagctgccaaaagaagtggggtggaaaagtcgggaaagctgtcagtttcagtgaatctgtctctaatctcttacccatcaactctttctccagcaagtgaaggatgaccattctgtacaactactttaccctccaaycccagttcactttgcaggcctggcacttggccaatctgggcttacctcaagaacagcccacattgtagcagtgactgccagtggtaatatgtagatgggatcggataccgtgagatcctggaaccaccagaggccacctgtctgcaggctgggcacaggaaggttggccatctctctcaaagcaatgaagaaggagatgaagattggggcctattacacaagataaacagtgtcagcatgctttaccagagagaacattttcatcaccccactactgaaagccatgtataatccaccaccacctgttttttgggggacctgggacacatgaaacacagagaggaaatt

SEQ ID NO: 662762 - DNA, 380 bp, Homo sapiens
gatttagtaataattagtggtatgagctaacacttgcatatgttggatgctattataaacatcaatagatttttgatatggaaacactgatttttttttagagattacttttaaaactcaatacaattagaagtaattacaaatatacagctacagaacacttggcagggtgactatcttacagtacactgctactttggtggccccaaatgaaccaggcttcccaatatttgcacctttaggagttctcttctcttgagtctgattgggcctgtmacttgctttaatcaatagtagaatgcgttggaagtgatgttatgccagtttgggactatgccttaagaaggcctgatagcttctgtttttgcattcgggggaag

SEQ ID NO: 662763 - DNA, 528 bp, Homo sapiens
acactccctgttatttgtgtgcccacagctcttgatgcatctgctcagcagcaaagacatgggctccatttgtgattaccccaagatttatacttgtatacttgtttttactctaccagcgcagatgacctccaacctttcccctgtctactggctcactgctgggacagacattaattggaactctggctctgccagcttcttatgacttacaatatgctcttcactccttttacaccccagggccaagttttctggtggcatttgaagcagtttgtctgcctgcataggacctcgctctgctttttttttttttgarttaggactcctttgggaagagggaaattcttcctttgtcatttgcaagttcttaccccaagctccaagtcctgtggaggttactcgtttatgtcaagagggcaaataaatgttgctgtctcaaatccaagggctattttttgtgagcataagaaggctttccttgagtattcctcttgcttccttccacattctccagtagcctccatt

SEQ ID NO: 662764 - DNA, 535 bp, Homo sapiens
ttcttccttattgtggcaaatcaataaaactagttttatttgactacagttgtgatctggtggtctttggctggagggtattgacagcacttacatttacttaaaacattttttttgatgaattaatttcgtaacaaatttaagcactttgaaagggtgaaaagcgagaagtaagtccttttttatcctcaaaccttagaattcagctgccctccctggaggcaatcactgttactaaagccagtctatgtctgtgcaagcaggcatgcatagttgctcatcacatttatcattattactgttgtcccctttccattcatctatccactcagtatgtatttgtattagtcagggttctcttagagagacagaacyaataggatatatatattctttgaatgaatatatatatgggattttattaagtattaatttacaggatcacaaggtcccacaataggctgtctgcaagctgaggagcaaggagagccagtcacagtcctaaaactgaagaacttggagtccgatgttcgag

SEQ ID NO: 662765 - DNA, 628 bp, Homo sapiens
tagtgtttcttctttcaaatgaagaactccctttagcatttcttgtaaggtaggtctggtcccttaaaagaaatgagaagaaaaagttaagaggtgaattctctcaccctttcacccttttttttttgggaaaggctatatctctttcatatttgaagggtagctttgctggatacagtactcttggatgggaggtttttttcttttggcactttaaaaatgttgttycactcccttctggcctatatggtttctgttttggaagtctgttgccagatgaattggagttcctttatatgttatttacttcttttctcttgctgcttttaggatcctctctttgccctcgttctttcagagttttattcttatatgccttggagtagttctgtttgagttgaatctctttagtgttctctgacttttttgtacctcagtatttatctctttcccaagttttggaaagttttctgtcattatttttttgaataagctttctaccccttgttcttactcaactccctcttgaacaccaataatttttagatttggttggtcttttgaggtaattttctatatcttttttttttttggaacaggctctcactttgtcacacaagctggagtg

SEQ ID NO: 662766 - DNA, 628 bp, Homo sapiens
tagtgtttcttctttcaaatgaagaactccctttagcatttcttgtaaggtaggtctggtcccttaaaagaaatgagaagaaaaagttaagaggtgaattctctcaccctttcacccttttttttttgggaaaggctatatctctttcatatttgaagggtagctttgctggatacagtactcttggatgggaggtttttttcttttggcactttaaaaatgttgttccactcccttctggcctatatggtttctgttttggaagtctgttgccagatgaattggagttcctttatatgttatttacttcttttctcttgctgcttttaggatcctctctttgccctcgttctttcagagttttattcttatatgccttggagtagtyctgtttgagttgaatctctttagtgttctctgacttttttgtacctcagtatttatctctttcccaagttttggaaagttttctgtcattatttttttgaataagctttctaccccttgttcttactcaactccctcttgaacaccaataatttttagatttggttggtcttttgaggtaattttctatatcttttttttttttggaacaggctctcactttgtcacacaagctggagtg

SEQ ID NO: 662767 - DNA, 577 bp, Homo sapiens
attcataacaatggattctagtaaggctcaagtaccatttgtgttgagtgtctgtatgccgtcatagtattagaagtttcatacacgctaacattcatcttcacaggaacgtcagaaggcaggtggtattaggtcacatagctaataggggacagattaggaattggctactgctcartttgaatcccaaatcagtgctctctctcttgtgcctctaaagccccaggacccagacagggcagtataggtaacccttagcagactactctcaacagtgtttggcccttgacaaaatgccacaaagttggaacgtgtagccctgagaagggttgttggcagaggctgcagagtggctttcagagtggttggccagctaagacatctgcatcaatgcctcgcaccactgggtgttcagttttccctctgattaaatcttgtctaccctgtgcccatagagtcagcatgtgctgcgagatcacaacgtgggagatcgttccccaatactgagatagagacaccgccccatagacgcagttacacactgccatgtgtaaacagatcaggaaaggagcaggtg

SEQ ID NO: 662768 - DNA, 601 bp, Homo sapiens
tgatactgaggtttgggcttctgttgatcctgttacccagatagtgaagatagtaccaaataggaagtttttcaacccttacccacctctctcccaccctccttttggagtccccagtgtctcttatccccatctttatcatattttgtctatacattcatccatcagtggctattctgtaccatttatctgcacatctgtccttatggccaataccctaccatcttgattactattgctttttagtatgttttaaaatcaggaaatgggaggcccccaactgtattcttctttttcatgattgttttggctatttagggtcccttgatattccatatgaattttaggatagtttttttctatttctgcaaaaaaatgcctttgggattttgatagagattgcattaaatctgcatatcactttgagtagyatggagattttagcaatattaagtcttccaatccataaacataggatgtctttctcttttttgtattttcttttagcaaagttttgtagttctcagtgtatgagtcttctaactccttggttaaagttattcctaagtattttatcctttttgatgcttcagtaaataga

SEQ ID NO: 662769 - DNA, 601 bp, Homo sapiens
tgatactgaggtttgggcttctgttgatcctgttacccagatagtgaagatagtaccaaataggaagtttttcaacccttacccacctctctcccaccctccttttggagtccccagtgtctcttatccccatctttatcatattttgtctatacattcatccatcagtggctattctgtaccatttatctgcacatctgtccttatggccaataccctaccatcttgattactattgctttttagtatgttttaaaatcaggaaatgggaggcccccaactgtattcttctttttcatgattgttttggctatttagggtcccttgatattccatatgaattttaggatagtttttttctatttctgcaaaaaaatgcctttgggattttgatagagattgcattaaatctgcatatcactttgagtagcatggagattttagcaatattaagtcttccaatccataaacrtaggatgtctttctcttttttgtattttcttttagcaaagttttgtagttctcagtgtatgagtcttctaactccttggttaaagttattcctaagtattttatcctttttgatgcttcagtaaataga

SEQ ID NO: 662770 - DNA, 601 bp, Homo sapiens
tgatactgaggtttgggcttctgttgatcctgttacccagatagtgaagatagtaccaaataggaagtttttcaacccttacccacctctctcccaccctccttttggagtccccagtgtctcttatccccatctttatcatattttgtctatacattcatccatcagtggctattctgtaccatttatctgcacatctgtccttatggccaataccctaccatcttgattactattgctttttagtatgttttaaaatcaggaaatgggaggcccccaactgtattcttctttttcatgattgttttggctatttagggtcccttgatattccatatgaattttaggatagtttttttctatttctgcaaaaaaatgcctttgggattttgatagagattgcattaaatctgcatatcactttgagtagcatggagattttagcaatattaagtcttccaatccataaacataggatgtctttctcttttttgtattttcttttagcaaagttttgtagttctcagtgtatragtcttctaactccttggttaaagttattcctaagtattttatcctttttgatgcttcagtaaataga

SEQ ID NO: 662771 - DNA, 537 bp, Homo sapiens
ttttgtacctgaaactttgttgaaattatgtattagtcctcacagttttcttctggaatctttagggttttctaaatataagattctgtcatctgtagaccgatagttttactttggatcctttcctatttggatgcctttcatttctttctcttgtctgattgctctgggtaggactttgagtactatgttgaataatagtggcaagagtgggtatcttgccttcttcctaattttagaggaaaagctttcagtcttttaccattgagtattatttgagctgtggccactcaaatatggcgtttattacattgaggtagtttccttctattcctagtttgttgtgtttttttatcatgaaaaggmgttgaattttgtcaaatgctttttctgcatcagttgaaatgatcatgtggtttttgtcctttattctgtgaatattgtatcacattgattgatttttatgtgttgaatcattcttgcattccaaatataaatcctaatttgtcatggtatataatccatttaatgtgctgt

SEQ ID NO: 662772 - DNA, 537 bp, Homo sapiens
ttttgtacctgaaactttgttgaaattatgtattagtcctcacagttttcttctggaatctttagggttttctaaatataagattctgtcatctgtagaccgatagttttactttggatcctttcctatttggatgcctttcatttctttctcttgtctgattgctctgggtaggactttgagtactatgttgaataatagtggcaagagtgggtatcttgccttcttcctaattttagaggaaaagctttcagtcttttaccattgagtattatttgagctgtggccactcaaatatggcgtttattacattgaggtagtttccttctattcctagtttgttgtgtttttttatcatgaaaaggagttgaattttgtcaaatgctttttctgcatcagttgaaatgatcatgtggtttttgtcctttattctgtgaatattgtatcacattgattgatttttatgtgttgaatcattcttgcattccaaatataaatccyaatttgtcatggtatataatccatttaatgtgctgt

SEQ ID NO: 662773 - DNA, 406 bp, Homo sapiens
tctcaaaaatacatatattcatatcaatcaaaaaggctccccaaaaatctaggccacaaaaatctgaatcaaccatataactaacgttcttgaaacagaggtgctggtagcttcatggcatgaggtttggaaaagtgagyttccaggggaaaaaacaactgaaagataagaaaatagaaactgtgaaaaaggtgaattaattgttgattatttttccattttcttattactttagaggaatcctgcagagaccacctttcagtctatgcagattttaagggaaaaaaaaaattttttttcaccttcaaatatttgagtacctgtttaatgccaagcctggaacacaaattataagatgttggtttaaatttaagctattgtgacttcatttagaataattactatt

SEQ ID NO: 662774 - DNA, 406 bp, Homo sapiens
tctcaaaaatacatatattcatatcaatcaaaaaggctccccaaaaatctaggccacaaaaatctgaatcaaccatataactaacgttcttgaaacagaggtgctggtagcttcatggcatgaggtttggaaaagtgagcttccaggggaaaaaacaactgaaagataagaaaatagaaactgtgaaaaaggtgaattaawtgttgattatttttccattttcttattactttagaggaatcctgcagagaccacctttcagtctatgcagattttaagggaaaaaaaaaattttttttcaccttcaaatatttgagtacctgtttaatgccaagcctggaacacaaattataagatgttggtttaaatttaagctattgtgacttcatttagaataattactatt

SEQ ID NO: 662775 - DNA, 666 bp, Homo sapiens
cttctgtctctgtgtgtttgtctattctaggtgacttatgtaagtggactcatacagtatttgtcttttttgtgactggcttgtttcactcgaataatgtcctccaagttcatccatgttgcagtatgtgtcagaactcccttccttttttttcttttcttttttttttttttttttaagacagagtctcactctgtcgcccaggctgcagtgcagtggcacaatctcagctcactgcaagctccacctcccgggttcacrccattcttctgcctcagcctcccaagtagctgggactataggtgcacgccaccatgcctggctaattttttttgtatttttagtagagacggggcttcacgggttagccaggatggtcttgatctcctgacctcatgatccacccgcctcggcctcccaaagtgctgggattacaggcatgagccaccgtgcccggcagaactcccttcctttttaagacttactaatgttccattgtaagcatcggtcccattttgcatattcatatatctgtccatgggtacctgggttgctcctaccgtttgtctattttgaataatgctgctatgaggatgggtacacaaatatctttttaagtccctgctttcagttgttttgggtttatactcagaagtgggattgctg

SEQ ID NO: 662776 - DNA, 666 bp, Homo sapiens
cttctgtctctgtgtgtttgtctattctaggtgacttatgtaagtggactcatacagtatttgtcttttttgtgactggcttgtttcactcgaataatgtcctccaagttcatccatgttgcagtatgtgtcagaactcccttccttttttttcttttcttttttttttttttttttaagacagagtctcactctgtcgcccaggctgcagtgcagtggcacaatctcagctcactgcaagctccacctcccgggttcacgccattcttctgcctcagcctcccaagtagctgggactataggtgcacgccaccatgcctggctaattttttttgtatttttagtagagacggggcttcacgggttagccaggatggtcttgatctcctgacctcatgatccacccgcctcggcctcccaaagtgctgggattacaggcatgagccaccgygcccggcagaactcccttcctttttaagacttactaatgttccattgtaagcatcggtcccattttgcatattcatatatctgtccatgggtacctgggttgctcctaccgtttgtctattttgaataatgctgctatgaggatgggtacacaaatatctttttaagtccctgctttcagttgttttgggtttatactcagaagtgggattgctg

SEQ ID NO: 662777 - DNA, 666 bp, Homo sapiens
cttctgtctctgtgtgtttgtctattctaggtgacttatgtaagtggactcatacagtatttgtcttttttgtgactggcttgtttcactcgaataatgtcctccaagttcatccatgttgcagtatgtgtcagaactcccttccttttttttcttttcttttttttttttttttttaagacagagtctcactctgtcgcccaggctgcagtgcagtggcacaatctcagctcactgcaagctccacctcccgggttcacgccattcttctgcctcagcctcccaagtagctgggactataggtgcacgccaccatgcctggctaattttttttgtatttttagtagagacggggcttcacgggttagccaggatggtcttgatctcctgacctcatgatccacccgcctcggcctcccaaagtgctgggattacaggcatgagccaccgtgcccggcagaactcccttcctttttaagacttactaatgttccattgtaagcrtcggtcccattttgcatattcatatatctgtccatgggtacctgggttgctcctaccgtttgtctattttgaataatgctgctatgaggatgggtacacaaatatctttttaagtccctgctttcagttgttttgggtttatactcagaagtgggattgctg

SEQ ID NO: 662778 - DNA, 666 bp, Homo sapiens
cttctgtctctgtgtgtttgtctattctaggtgacttatgtaagtggactcatacagtatttgtcttttttgtgactggcttgtttcactcgaataatgtcctccaagttcatccatgttgcagtatgtgtcagaactcccttccttttttttcttttcttttttttttttttttttaagacagagtctcactctgtcgcccaggctgcagtgcagtggcacaatctcagctcactgcaagctccacctcccgggttcacgccattcttctgcctcagcctcccaagtagctgggactataggtgcacgccaccatgcctggctaattttttttgtatttttagtagagacggggcttcacgggttagccaggatggtcttgatctcctgacctcatgatccacccgcctcggcctcccaaagtgctgggattacaggcatgagccaccgtgcccggcagaactcccttcctttttaagacttactaatgttccattgtaagcatcggtcccattttgcatattcatatatctgtccatgggtacctgggttgctyctaccgtttgtctattttgaataatgctgctatgaggatgggtacacaaatatctttttaagtccctgctttcagttgttttgggtttatactcagaagtgggattgctg

SEQ ID NO: 662779 - DNA, 622 bp, Homo sapiens
tgacgtcagtggttgccaaggctggaggcagcaagtggcctgggttttcactgggtttatggttactggccagttcatcccttggggatagggagccagtgaaggctctggagctggggatggagaaggtacatggcttgcttcagtgcagtgggtggaggaattggaaggaggatctggaggcccagaggccaaggaggaggctggtgagatggtcctggggagaaagggtgaggtccacacagaagaggagggacccggaggagggcacagggagatctggcaactgctggggctggggtgctgggacggtgcagtggaggctgagcctgatactgccgcccctattaggagggcccaaaggacatactgtcactttcagggctccrtggggtgacctggcagtgtttcagggctcaactgtaaaacttgtggagtgcgtggagggctgggtaagatccgagccccatgtgccctggccctggacacaggcaggtccctctcctctccgagcctcggcggtctcatctgtaaagtagaggtgacaccataagctcaggggtgtcatgggtattggacgggatgactccttttaactccttatgaactgtggggcacaagg

SEQ ID NO: 662780 - DNA, 555 bp, Homo sapiens
ttattataatattggaataaagagtaattactacaaactaatgattaatgatattcatacataatcatatctaagatctatatctagtataactattcttattttatrtattttattatactggaacagctcgtgccctcggtctcttgcctcggcacctgggtggcttgccgcccacacctgtcctcaagtgatcctcttgctttggtctcctaaagtgctgggattacaggcatgagccatcatgcctggcctctgactagtttgaaatgtgagagtgatgatggtttaccagtcttctttccagctggctgaagtctaattaattcctattgatgttcattgtgtattttctgtcagagctcacaacacttagatgcttccttgtggacccgctgaggagctggatcaggccttgccacttgctgtctgagcccgtgtggtcaagacaacccagcttctaggcacccagggcccccttgcctcatgggtgggttatgttcaatagaatagagaatgtccagctttagcaagatttatccaacgtcttgtttt

SEQ ID NO: 662781 - DNA, 564 bp, Homo sapiens
tccagttagaatgtaagctccaaagagcaaggagcttgtcttcttgttactgctgtatcttacacagaggagggcctggcatgtaggaagggctcacaggttcatggaagaatgaaagttctaaattcacacaaaagtaaatatattgacaatagcaaggaggcaagtagatgatttgagattttggtctgtacaaatcctttctaatagtttggactcatgaacatttaaattttgcttgtagttattttaaatrttttttactttgaagttcttgattacaataactaaatttcaaggaaaacttctgcagatagtaagttttgataggagaaagtattgggagtcaaaaggcttaagtcccctgaatgaccatggggccttggatgttttctcatctttttgggcttcgtgttttcttatgtaaaataaggaacattacattggatgacctgtaagagcctttcaggattaaaagcctgtaatattaggattttagagaagcaatagctgttattagccttcattaatatttgtgcacatcacatttttaacaggaacaag

SEQ ID NO: 662782 - DNA, 604 bp, Homo sapiens
gagtctgcgattgagttgggcttctaaaaccagctgtaatcagagaaaaggtaagacatttgtgttaaagcacaataatgagtcattggtgacacagtggcacattcaggtgctttttttttttttttctctgagacggagtcttgctctgtcgcccaggcwggaaggcagtggcgcgatctcggttcactgcaagctccgcttcccgggttcttgccattctcctgcctcagcctcccgagttgctgggactacaggcgcctgccaccacgcctggctaattttttgtattttttagtagagacggggtttcgccgtgttagccaggatggtcttgatctcctgactttgtgatccacccgcttcagcctcccaaagtgctgggattacaggcgtgagccaccgtgcccggccattcagatgcttttctaaaaaattcattttttgcactttttacttagatatttcctttcttggaacgagttttaagtttttagcaatggcttctcatattgtcagagtgtccatttaaatccatgcttctcctctcttctaatgtatgaggtctttgtacataatggataaaccccatcatcctgacact

SEQ ID NO: 662783 - DNA, 629 bp, Homo sapiens
gctccaccccttccctgatagggcaaacctgcaaattactgttatgtagtgggtccaggtgtggtaaatccctgacaagagggatcattgtaatggtctctcatgagttgcacagtgaaaaggctttggcttcttcacgttttaggtaaaatcagaatcagacgtttatggagggcagtgtggggatagtagtttggggccaagagttccattcgtttttgaaggaaaactgagaaagaagaggaactgagattcctagtaattctgggatattattccctgtggataaaccccactttggtcccctcatcaagaaaggtttgtgccttagtcttcacggtccaggaccaggctctctaagtcatctgctaacttaatgttccatgactaaacaagcagtactatttctttccttttttcttcctctcagttggtgctccatctataccaggttgctacttcatgtttggacttggatgaaacagcatactataaggcatgaaacctggcttcctgagtgrcagctgagaggagagatgtagctgaaccaatcagctacaacgtcattccagtgtccatacttacatagtggaaaatcctctaaagcccacttctgagagaacactaat

SEQ ID NO: 662784 - DNA, 593 bp, Homo sapiens
ccgtgtgtgatggtgaattccaagcccccttgaaacttccctgcaccatctgcatagcgactgttccctggtccccttagaggcctcctgatatacagataaggtcagatcacctgcacctcctaagggtggtgatggtggggagtggtcttgtgattttcttgcatcaggagtattcttgagaagatttctgagttaaattgagagggaaaagtctgagagagaaagttttatagcacacctgggccccagctaggctaggtcaggaaggggaaatatcagatcaaggactgaaagagaaagtgccaaggwggtagagtctgaggatcatggagactcgcccctgcatggccctgcttcctgagattccaggggagagtgctcctgccacagtctaatttacacagtcatcaactctgcccaggcagggagcccaaagagacctctgccccacccctagtccgattaaaaaaacatctggtggtttcagaatgagtttcctgtcactggctggggaagattccgtaagaccataggtgttttggacactacaatgaagaagaaacataggcttgtggcttttcccactaacc

SEQ ID NO: 662785 - DNA, 580 bp, Homo sapiens
taaccctataatttcccctgcacatgccagccatttagaaatagtggaacaacwcttatgtcccccttaattattttatttttttaaagagggctgtctttaattttcgatttatcttctgagattatttcaaatcttcttatccatgtcaaattttatcttcacttcttattgacccaatggatgttaaccatcttcatactccggaacattctttatggtaacctaagtgtagcctgttatttagaataggaaaccatcatcaaactggtttattctgcaggcactagtcatgtatgaaaccacctaacttagtacctggaacaaaattgatgcttaataaacttgtgtggaatataagtcatcataatgttaaagattctattaaaaattataaatatttcaacatttaaaacatggagaaaatagtgccataatacccatgcactcatcatccagattaaacagttgtcaaggcttactatattttaaaaaaaatgctactttaagtattgcacactgaaatctgttctgagtcaaacattagaaaagatttggaaaaaagtatgacctggtatta

SEQ ID NO: 662786 - DNA, 550 bp, Homo sapiens
cacaatggaggcatcttgatgagtgtcaggaggacagattgtaatgctacattcatacgaggcactcctttgccaattattcccatccaagagtcattcattttttatattagaatgatattaaattataacaagaatgaaaggtgaactaagaaatcttactgcccacataaatcttcccttctggtaccatcattcttcaaaaggaagaaggcatattctcccatatttgtagaggtcctgcttctgagggtcctagggaccctgtagatgtctggaggacacagcaaaaaaaaaaaaaaagctttctaattgtgtgtgtgtgtgtgtgtgtatcgtttggagccagtktgtaaattgagatcacaaaattcctgaagaagttcaaggtagtgtttctagaatgttgcaacactccatatgaaaggaaaaagtcaactgtttacttggacttaaagggtgtgtctgcaaaaacgttacctggatttactagatattttgccattgagtaaatgtaacctggtctaaatttcatcctaacttggcaccc

SEQ ID NO: 662787 - DNA, 547 bp, Homo sapiens
tgtaactcatcatattaacagatgaataaagagaaaggataagacccacacatgaggataaataattggaaactaaaatttaaaaatatcatttatggtagcatttgaaaaacatgaaattcttaagatatatttaacaaaatatgtgagagacttataygctaaattgcaaaatactgttgagaaaaaatattaaagacttaatagcgagatataccatattcatagattggaagactcaatgtttctttccaaattgatctacaggtcccaagcaatgccaacataaattcttgcaagaattttgtagaatttggcaaggtgattctaaaattcatatgatgctgcaaaggactagaatagacaaactaattctgacaaagaacaaagagaactcaccctaattttaagacttcctgtaaagttacatgtaatgacaatgggttataggcataagaacagacgtacttattagtggatcagaatggagagctcagaaagagacccatgcgtagacgatcaattgatttttgaaaaaagtaccaag

SEQ ID NO: 662788 - DNA, 590 bp, Homo sapiens
accaccaatggattaatttctgaattgcaaagagagaagtaaatgcatatatatatatatatatatatatatatatatatatatatgtttagggcttcataattagcaaattccatttgcaaacagaacattgcattcctctctgcaatgctttaagtggcttttgataaccagtctcacagagtgggttaattctgagtcactcttagcaaatgagtttcccgagacattgagaagaaagccctgaatcaagctgaaagagggacaagcatgtttaaawggaaactctgatcctcctgtctgacagcatctggtatttccatttgggcttacttatttgcaaattaaactttctacaaaaatcttttgcggggggtgcaaaatggctgactagaagcatcatcttttggaggctcccatcaaaaaaaaaacataataagcatgtgaatccttcaccagcaaccaaggtacccaggttgtctcatcaaaattgactagaaggctggcgtgacccacggagagaaggaaaagcagtgtggtgctgtggcccacctgaagccacaggggaaggggaaccccctcctcccagc

SEQ ID NO: 662789 - DNA, 573 bp, Homo sapiens
aatgagctgctgtcagcacaaagtcttctcgcaccaggaaccctccacatctgctctgacctgctggactctggatctgaagatacgccatgtaggggcgggagtggggcctgctctcccggcctccgatgatctcccctggaaggaagcatttggcacttagctctatgcttgctgaacctgcaatgtgggtaccagattggtggctccagaaaggctggaagatggggayggcaggagagagggtgcaggagagggaggagatggtgctgaggcttggagtctatggggcagcagattgggagggggctccagggttctacaggaaacactgctgtcttgaaaggagcccttttccccatcctaggcctcacctccctcctcctctccaaaagagggagaacaacccttgttccaggcaaggccagcttcagcctcaggtattgaggagaatgctttgctgtaagtacaggattgttcctgaagttcccttatacttttatcctcatggagcttcccagagccctctgagtccaattcaagaccacgtgggactggtgtttaaaaatctag

SEQ ID NO: 662790 - DNA, 535 bp, Homo sapiens
gctcaggatgtttttaaatttccatgtatttgcatagtttccaaagttgttcttgtttttgatttttatttttattctattgtggtctgagaagatacttgatatgcttttgatttttaaaaatttattgaggcttgctttatggcctaacatgtggtctttcctggagaatgttgcatgtattgatgagaagagtgtgtattctgcatcggttggataaagtgatctgtagatgtctgttaggtccatggcctacagtgtggttgaaatccaatggttcttttttgactttctgtctagatgaccagtccaatgctgaaagtagggtgttagagtctccarctattgttttggcatctatctttccctttaaatctaataatatttgctttatatcttggtgctccagtgttgagtgcatatatatttgtaattgttatattcttttgctgagctgatccctttgtgattatataatgaccttctttgtccctttttactgtttttgacttacagtctgtcttatttgatataa

SEQ ID NO: 662791 - DNA, 575 bp, Homo sapiens
ggcagtagtaggctgggtgggctagtcctcaggcccttaggtggcatgtgcaagtggttgatggcagtggtggtggcagccgaatgggcaggcctgtcctctggctcctggtaggtgtgcataggggtgccagtggtggtgggaagaatgggtcaatctctgggacccagatgatgtgtgtgagtgctgttaggctgtgtggggatgatctcagtctcccagaaggtgtgcatgggagcctgtagtagcaggaggggcaggtccatctgtagacacctggatgatgcatgtggtcactgataggggctgtgccagccaaaatagtcctgtcctcaagtcctctgatgatatgtgctggtgcagactgcaatgggtggggtgggttgatatccaggcccccagatggtgcacttgagtggcagcagaggtgatggtagcagcartgggtagggtgggcctgtccacaagccctgggacagactccatgtgggccagtccccaggaccctagaagtggcactgctgtatgggttggggagggtggcgatacagggttgctgtcagtggcagtggtcc

SEQ ID NO: 662792 - DNA, 543 bp, Homo sapiens
tcacattccctaccaaatgcctttctaagaacaatccacactccaggtcataaaggagaggtctagggagaggctaacacccattaaaccttttagggaacacccttcatttttcgatctttgctgagtgtctatctagcctcagatttataagtctgggtgtggaatgggaggtgggctcagattgaggaaaattcctgaccagtgctcatgggtacagggtatcttataagatgggttcaggcctctggaatagggatagtcacttacctgtcccagccccaggggtcagaagaaaggccaacaggaggaggaatggctgcattttctcaggaaggctgcccaggtcagagctgttggtgttgactccttccagaaacaaatgctggagggagatgaaggagggatgggtacagtaamctcagagacctcctagacttgtccccttctggttttgatgggtgtcattatagaaggtggtttattaaaattatctggtttggtttaagttgacatggcactgtcacatttacacccctgctg

SEQ ID NO: 662793 - DNA, 569 bp, Homo sapiens
actacctaatttgttggtgtacaaatgtagatagtattctttttatagtccttttaatttctctaaggttggtagtaatgtctccacttttatttctaattttagtaatataagtgttctacaaacttcaccatctcctatawttttcagggacttggggagaaaaattaaggaggtgctgaagaataaaagtcttttgtctatatctctgatgttagattctgattctgttagaagagagaggtacctcagtggctaccatatggtaatggaaaagtttattcatattacacacgctcttcccttttattccttatttccctgctgttcttaatctgtagaagaatgtcatgccttgcccatgaagggaaatactcttgggtattagcctttcactgaaccacagctagtcccttttcgaagtggccaaggccaatccttacaggtaaatgagaacagcacaatgacatgacattcccacactcatacatgacatttgattctgatgttgtgacctgatttccctgagcttgatcattctcttaagtcatggcaaagtcagaacttac

SEQ ID NO: 662794 - DNA, 569 bp, Homo sapiens
actacctaatttgttggtgtacaaatgtagatagtattctttttatagtccttttaatttctctaaggttggtagtaatgtctccacttttatttctaattttagtaatataagtgttctacaaacttcaccatctcctatatttttcagggacttggggagaaaaattaaggaggtgctgaagaataaaagtcttttgtctatatctctgatgttagattctgattctgttagaagagagaggtacctcagtggctaccatatggtaatggaaaagtttattcatattacacacgctcttcccttttattccttatttccctgctgttcttaatctgtagaagaatgtcatgccttgcccatgaagggaaatactcttgggtattagcctttcactgaaccacagctagtcccttttcgaagtggccaaggccaatccttacaggtaaatgagaacagcayaatgacatgacattcccacactcatacatgacatttgattctgatgttgtgacctgatttccctgagcttgatcattctcttaagtcatggcaaagtcagaacttac

SEQ ID NO: 662795 - DNA, 544 bp, Homo sapiens
aactggcggatactaggcttaatacctgggtgatgaaataatctttacaaccaacccccctgacacgtgtttacctatgtaacwaatctgcacatcctgcacatctaccccttaacttaaaagtgaaaaaaaaaaaaaaaaaagaaaagaggtgcctgtctgatctgaatagctagaacactgggtcaggaatgtgactgggagacagattgctttcctgctggcctgtgaggggatctaaggtgggtccctcccttccacctgaaaagacctcagtgagtttcactgagcactcccctagacacctctgtgaaggctggtacttccgcccaccattggttattgcatttacctaccagctttagccacagccagtttttgcctgtggccacctcttactggcctgaagcctgaactgttcgacccagtgaataaaatactgggtaaataaagaaagaaataattgagtgaacaccactggggaatgagataagcttcaagagacctctgccattccaactccacaggagacagtaaatttgct

SEQ ID NO: 662796 - DNA, 490 bp, Homo sapiens
gaatattataaaaacattagtgctaataaatttgaaattttagacaaaatagaaatatcaccacctaatatggacttaaaaagaaattacaaagttgagtaatactagaacaatcaaagaaattgtgccagtagtcaaaaatttttctacacagagaactgacctagatgactttactgttaatttctactgaaactgaagaaagatttttattattctaaaaacttttccagagaagagaaaaatgaacactacccatctcaatttataatgttggcatcaccttgatacaaagaagagaataaggaaggaaatttataggtcaatcttattcrtgattcactgaatcaaagccctacacaaagtattaactctcaaaattagtccaccaatatacaaaaaggttgatacatcatgagcaagttaggtttgcagatctaagaatgcagatctcatttaaccttagatcaattaacataatttgccacac

SEQ ID NO: 662797 - DNA, 605 bp, Homo sapiens
ggtaggaactagactgctggtattctatagttcatacttagtggtgatgaactttatcacggcaaaagtgggcactagccatacagtggccaatcatctggagtcagtagggggagactgcttccatctaagagtcatcttttcgttttccatttcagttcaaagcaggaatatttttatctttcatggcacaaaattatttttccactcaagagccatttctgggagtgtgcaaagaaaatttcaaaactctagtgtttaacaacacaaacaggagaaatgcaaatgcatttttcgttgtcacttgtacatatggtacatatagttttatttatatatagctctattccctaaccgtatcgaaaagatgatataatgctgagggaaaaaactaggctacagatcgacacacattattaacataaaragaaaaaatactaaaaggaagtatgcaaatactgtaagtggttatctctgagttgagaaaataagaatgttaatttttttgtccccccccccaatttctaagttttgaacaactggtactctgacgtttgtagttagcattaataatttctttcttccttttttcctctcaaaaaatg

SEQ ID NO: 662798 - DNA, 616 bp, Homo sapiens
ctggtttcattaggttgttgtggtagttaagtgagataatacatgtataatgtttagcacagtgctttgcatagactcagtccttaatcaacgttagtcgttattaataaaaktaatataaaattgtaaattatgaataattaataattattaataaagtactatttacaactgtctgattagaatttatgctagattaatgtagattaatctagcaagtgctgacttgtcttcaggagcacatgatccccattttttttaaaaatggaattattataatgacttataaagagtttctttggttttcttgtttgatttgctggatggtctgtttggaaaccatatccaagaattggagcattaatttgaagaaagaggttcagaagtttctttctgaattgtccttgaaggtaatgggaagtgaatcattcaaattcaactttcctttccctgacccatgcacttggatcagaacaacatacatcattagtgttagaacatctttcttttcaagaattctttggctgggtctttacagctatggtgaagtgcaactgggatttctaatatccagggaaacctcatttctatctagttctgactttgcttgggcctg

SEQ ID NO: 662799 - DNA, 616 bp, Homo sapiens
ctggtttcattaggttgttgtggtagttaagtgagataatacatgtataatgtttagcacagtgctttgcatagactcagtccttaatcaacgttagtcgttattaataaaattaatataaaattgtaaattatgaataattaataattattaataaagtactatttacaactgtctgattagaatttatgctagattaatgtagattaatctagcaagtgctgacttgtcttcaggagcacatgatccccattttttttaaaaatggaattattataatgacttataaagagtttctttggttttcttgtttgatttgctggatggtctgtttggaaaccatatccaagaattggagcattaatttgaagaaagaggttcagaagtttctttctgaattgtccttgaaggtaatgggaagtgaatcattcaaattcaactttcctttccctgacccatgcacttggatcagaacaacatacatcattagtgttagaacatctttcttttcaagaattctttgkctgggtctttacagctatggtgaagtgcaactgggatttctaatatccagggaaacctcatttctatctagttctgactttgcttgggcctg

SEQ ID NO: 662800 - DNA, 647 bp, Homo sapiens
ctagataagactttttttctttttaaagctagattgttattgtaaaagtaaagaaagttcatggtaaaaattaagagtatgaaaagataaaaatgaagtttccactaagcagagataattgcaatgagcaattttctgtgtttctttacagaaatgttcaataagtctacatctcaagaacatttttattttcacaagtggcattatactatagttacatttytgcaactagcctttttgtatagttaactgtatatcttgaacacctttttataataatgcatatagatttaccccaatctttataatagctgcagtccattgtatgaattttctacaatttatttaatcaattctctattaatacatatgcaggatgttcctagattattgattattacaaaagacactgcaataaatatctatccatgtttatatttgtgtatctgtgggataaattgttttaagtgtaagtttatgggatattaccagttgtctttcaaaacatggcaccaattcatactctcaccaatagtgtatgcaagcgaccatttcctcacatccttggcaatgatgaggattagcaaatgctttcatctttgtcaatataataggagaaacagtaactcattttggtcacatttata

SEQ ID NO: 662801 - DNA, 583 bp, Homo sapiens
ggactattctattttattttctgtgaaccacttgttcagatcctttgctgattttcctattgaattgcttctctctctatttttttttttttttttgagacagggtctcactctgtcacccaggctggtgtgcagggagatcacaggtgtgtgtcaccacaacacacccagcttttttcttttttccttttttttgtagagatggggtctcaccatgttgcccaggctggtcctgaactcctgggctcaagcaatcctcccacctcagcctcccaaactgctgtgattgcaggtgtgagccactgcacctggcctgatatgcaagccattgtagtgcgtttatggcattatttctttgtcatacttaaaaaacttgtcaaagtttatcatttaccatttgactttgaatacgacattactgtaaataatttcaacattttatagacttargtttaccaatctttttctttgtacttctaaatttcatgtcatgtctagaaaggattttgtcattcaaggttataggcagagttcacttatttttttcccaaatatatttgtgacactattatctatatttaaa

SEQ ID NO: 662802 - DNA, 514 bp, Homo sapiens
gggggcagacactattcagctcactacaaagagaagaatacaatagaaagaaagattgatgtatggattgagagcaggggctagagctgtgactaacattggttgttcattagaaacacctgggcaagggcagcctttaaaatctctatcctggccccaaatccagatattctcatttaatcagtctggagtgggtcctgattaacataaacactcttaggggccaagcatcatacrgtatatggatgaaggataaagagggttggtctaaaaggtaataaggaggaatggtgactcagggggcgggaggagcctggaaacccacatgcaacattaagaagcattcagatttgattttgtaacgtctcctgaagaaaatgggtttgcgggctttgaaagacaagttgccagtttgagatgccaagtctagacttgtaggaattcttctgtaatatcttggatctgtgaaaatggtaacctagcccaaaaatgcacatggtgataatgacacaga

SEQ ID NO: 662803 - DNA, 593 bp, Homo sapiens
ttctttatggcagtgtgagaacagactaatacacagacacacccagaaacaattctttaccagttcttcctcttcttcttatcttcatagagacagagtctcactaggttgcccaggctggtctcgaactcctggcctcaagggatcctcccacctcagcctccacagtagctgggattacagacgtgagcactgttcttggctatctttacaagttctctagctaatacttaatcctgtcaagttgacacctaaaattaatcatcacaagcttgcagaagagtagagggcaatcagattgagcaggtaggttggcagcagaacatggaggcagttggatattatggagggagttgacagaggggagctctagaggggttttgaacagtgaaatgtaatggtcagagtcttccctttgtaagattagtaagcgggacacgatgtgtaggatggactagtgccagatgtggayctgaagctatgggaacacatggccgtggtaatgattcagttgcagtcacatctaaatattaggtgatagtagtaatgagaaggaagatattttagctaacacagctctctagtgccatgaa

SEQ ID NO: 662804 - DNA, 545 bp, Homo sapiens
aacattgtggggtacatataggccctccataaatatttgtcaagtaaatgaatgaatgaasaaatgaaatcagtggatatctgaagtctttagactttgaatatgaatgccatattcaaaggggtcagaaatggaactgcagctggagtcagcttgagaaatttagaaccaaggacagagttcaggccaagcagatcaaatgcaaatgaggaggaatggagaatcagagaaaggaggcttggttacataggtcaaggaggggctgtgctgatgtgtggcagggtcagctgggctcacacggttagaactaacagtatgagctccagcatttcatccttggtcttcaacacagccttaatttgtcttattcattgtaaaatttccagagaaaactcctcttgagctacccatcttctacatcttatttcagaataaggagccatgtcttacatcggagttttggtaaagctcttagctctgatgaaacataattttggaaagaaaaaccagtatctataaagcagtgacccagacctcaggctagg

SEQ ID NO: 662805 - DNA, 545 bp, Homo sapiens
aacattgtggggtacatataggccctccataaatatttgtcaagtaaatgaatgaatgaacaaatgaaatcagtggatatctgaagtctttagactttgaatatgaatgccatattcaaaggggtcagaaatggaactgcagctggagtcagcttgagaaatttagaaccaaggacagagttcaggccaagcagatcaaatgcaaatgaggaggaatggagaatcagagaaaggaggcttggttacataggtcaaggaggggctgtgctgatgtgtggcagggtcagctgggctcacacggttagaactaacagtatgagctccagcatttcatccttggtcttcaacacagccttaatttgtcttattcattgtaaaatttccagagaaaactcctcttgagctacccatcttctacatcttatttcagaataaggagccatgtcttacatcggagttttggtaaagctcttagctctgatgaaacataattttggaaagaaaaaccagtatctataaagcastgacccagacctcaggctagg

SEQ ID NO: 662806 - DNA, 457 bp, Homo sapiens
tggtgataggctgacattccagctctttgactcctctttttctaactttcatgcaaataacttgcactccattaagtcattctttccttggatgtgtttaggctgccactttcttttacaagcaggtaagtttcaatttgattttcaaaattggcttgtagcaggatgagttgaagacaaaactcctcagacaccggattaaagaaggaagaggtttttattcggctgggagcgttggcagactctcgtcttaagagccgagctctccgaaaaagaaattcctagcccttttaagggcttgcaactctaaggggtccatgtgaaagggtcataatagatcaaagcrtgaggaatgtgactgggggctacatacatcagctaacagaacaaaaagttttacagtgctttctcatacaatgtctggaatttacagataacaccagtagttttggtcggg

SEQ ID NO: 662807 - DNA, 589 bp, Homo sapiens
aatattaaataactgctaaaagtgcttcgagagttaagtatagtctaaagatctggtcattaactcaaaccatcactactactggagggaggggagtggacctgaaagaatgatgttggcagtaaagtaattagcatagggttggtgcttttgaaatggtatctcaaaccacatcatggatagaatttaggtttargcctcttattttagaagcagaatgacgttatggcattgatttacaactaggacaggtaatttggggattcagataaccatctgggaaattttctgttaaaaaaaagctgacatttattaaaaaaagaaaaagctgacatttatactccgtgttgtccccccaaaacgtcaagccacagaacacctgtcctgttaactgaaactgattaaaattccaaagttttactgtactaatttttatttatcaacacttagaaacacgaagttttcatgaacactctcaaaatggaaattttcaaatgtaggcagattaaaacattaaaaaagggggaaaaaagcagaaccagaataaacattagctaactggaaaatcaattcaaaagcacacaaattt

SEQ ID NO: 662808 - DNA, 589 bp, Homo sapiens
aatattaaataactgctaaaagtgcttcgagagttaagtatagtctaaagatctggtcattaactcaaaccatcactactactggagggaggggagtggacctgaaagaatgatgttggcagtaaagtaattagcatagggttggtgcttttgaaatggtatctcaaaccacatcatggatagaatttaggtttaagcctcttattttagaagcagaatgacgttatggcattgatttacaactaggacaggtaatttggggattcagataaccatctgggaaattttctgttaaaaaaaagctgacatttattaaaaaaagaaaaagctgacatttatactccgtgttgtccccccaaaacgtcaagccacagaacacctgtcctgttaactgaaactgattaaaattccaaagttttactgtactaatttttatttatcaacacttagaaacacgaagttttcatgaacactctcaaaatggaaattttcaaatgtaggcagattaaaacattaaaaaagggggaaaaaagcagaaccagaataaamattagctaactggaaaatcaattcaaaagcacacaaattt

SEQ ID NO: 662809 - DNA, 569 bp, Homo sapiens
ttatactgcttcttaacctgttggtggctgggtataatactaggtgcaatacaaaaaagaatataaattcagctctattgtccaagaagtggtcatctaagtcccaggcttactttcccgtcttctccaagtccatatacttgccttttagctcaaatcctagctcaaacctaccctgtgcactgatgcctaatagggaacaagtactcgagggatatcagtggcacccgttgactcaccatagaagasagagacatagtcctcaaatcctttgcatttagagaaaaacacctatgaaaagtcaaaggcctttgcatttagaggaaaacacctatgaaaagtcaaaggtcaaatatcaaacttcctaaaagctccattccctctggactttcaggcttgaggggaaggaatgtgaatcattggacctggaaagagggcatggggagaggaaacaggaggtttcctgtccatctctgccgtgaaagagatgtcagtgcaatgcagcagcgtatcctgatacacaaaataggagagataattgaatattaaatgagatgtgtatataaaac

SEQ ID NO: 662810 - DNA, 569 bp, Homo sapiens
ttatactgcttcttaacctgttggtggctgggtataatactaggtgcaatacaaaaaagaatataaattcagctctattgtccaagaagtggtcatctaagtcccaggcttactttcccgtcttctccaagtccatatacttgccttttagctcaaatcctagctcaaacctaccctgtgcactgatgcctaatagggaacaagtactcgagggatatcagtggcacccgttgactcaccatagaagacagagacatagtcctcaaatcctttgcatttagagaaaaacacctatgaaaagtcaaaggcctttgcatttagaggaaaacacctatgaaaagtcaaaggtcaaatatcaaacttcctaaaagctccattccctctggactttcaggcttgaggggaaggaatgtgaatcattggacctggaaagagggcatggggagaggaaacaggaggtttcctgtccatctctgcygtgaaagagatgtcagtgcaatgcagcagcgtatcctgatacacaaaataggagagataattgaatattaaatgagatgtgtatataaaac

SEQ ID NO: 662811 - DNA, 563 bp, Homo sapiens
ttgtgaaatgtagaggatctaagggagtgatcactgagatgattccccaaacatccttccagttataacagtcagagtttctataggtgtgcacctccccatgcttgctattcatgatcaacttgacttttagaagtgctcattatttaaatgatattccacccaaattattgtttgctccccatttaaataatcagtgcttgwtgctatagtgccaactaaaaaagatagtaattatcctgcttgggcacagctgcagagctgactttgcttgctaatttgttaaagggttaatgtcctattgcatttttttaattgtctgctttattggaggatgctcagttttaactggatttcctcttctttatttccctaagagccaatgagatgaaaatgccattgtttttcctaatgtggtgtcaaggcagaaccatctctggggatgtcaggaagtcatcctgcagtcgtgaaaggatgaggactgaaatccgtgaaggtgaaatttcttgtttgaacagtgtgactgatcagactttaactctgtgcttagtgccatatattaa

SEQ ID NO: 662812 - DNA, 563 bp, Homo sapiens
ttgtgaaatgtagaggatctaagggagtgatcactgagatgattccccaaacatccttccagttataacagtcagagtttctataggtgtgcacctccccatgcttgctattcatgatcaacttgacttttagaagtgctcattatttaaatgatattccacccaaattattgtttgctccccatttaaataatcagtgcttgttgctatagtgccaactaaaaaagatagtaattatcctgcttgggcacagctgcagagctgactttgcttgctaatttgttaaagggttaatgtcctattgcatttttttaattgtctgctttattggaggatgctcagttttaactggatttcctcttctttatttccctaagagccaatgagatgaaaatgccattgtttttcctaatgtggtgtcaaggcagaaccatctctggggatgtcaggaagtcatcctgcagtcgtgaaaggatgaggactgaaatccstgaaggtgaaatttcttgtttgaacagtgtgactgatcagactttaactctgtgcttagtgccatatattaa

SEQ ID NO: 662813 - DNA, 601 bp, Homo sapiens
agtgctattggcaacctcctaagcagactttggctgcaaactactgtacccttccaatcccttttctgcttaaaataagtctgtttctgttgtttgcaaccaagaaagaaaagcattattcatgcaaagtgtgtcttaagatatcacctttcccttgtaggagtcttttgccttcccaattagccccttcttcccattagacattcaatatcctattcaaaaatcttcagtgaattaccaaaatagcaatacttgtaataccagcatcacaattgtggttggctgattatcttcgaacataaaggagtttgttacatttaagcccattatattttgtgtcattcatgtattccgcaaatacttgaatacctactatgtgtaccatgacaacccatattcaaactccctacagtcttgrtgaagtgactgattggtagaattggcagagtcccttcaagattcttcatcccttgcatagcatctctctctgggggccaatcggcctcagtggatgaggccactggaggtccatttgtaggagttgaaagagcacagagactccaaagtccttgacatcttcctgaacttgttctagcacaaa

SEQ ID NO: 662814 - DNA, 588 bp, Homo sapiens
ctcatccgtcctttttgaggcatgtctttctcttttagccatgctgtcttcaaggtgtggccatctttcaattccagctttctggaagcatcttaggttgcctttcccagtgatgctttcacgtcagtaaacggggagagcatctcatggctcatttccctgctttgttgtctgctagatacactgattgtgtgtgttcatctgaaagagttcatccaagtaatgtgyttgcattttaatacatatttcttgagaaaacatgttagtaattatttcagttactgcgtgacaaaacaccccaaaactaagtggcataaagcaacaatctttttattatgagcataggttttatggatcattaatttgaacagggaatggtggggataggttgtctctgttctgtgatgtctggggcgtcacgcgggaagatctggagtctgggatgactcaatgcctgggggttgggattatctgcaatttccttcactggcatgtctggtgccagggctgaggtgactcaaagactgagctcagctgggactgttgctgtggctactccatgtggcttgaccttcccacattatgtca

SEQ ID NO: 662815 - DNA, 509 bp, Homo sapiens
ggactggtgttctgatgtgagataacatgatccttggccctggcagcaactccagcagttgtttgtttaaatcagttttagaatttgtgcagaattggaatgctggttttaagactttctagaaataaagaagggatggcagtwaagtcgacatttagctgaagtccaagcaacaggcaaagcctaagataggctgttaccattgtcaccagggagctagagcacttaagattgaattattgcccaaataatagaaaggtttaaaggaataacagatccttcatatttgccaaaatacctttccctttggactgacaaccagggccatttttctggctataatagcctactcttacaaaggatagggaagaggtgatatccgtgtgtgtgtgtgtgtgtgtgtgtgtgtgtgtgtgtgtgtgtgtacccatgctaagtatttgaaacatgcctagtatactaagcattttctccacatgtttgatcaagtttctacaaaggtttaatca

SEQ ID NO: 662816 - DNA, 596 bp, Homo sapiens
catgatatgattggagcaggcatttttattggtatttttctccaattaacacattgcaaacaatcaaataattataatggcccagaaaatatagggtctgctccaactgatagataagctggttatcttggataggttgttacctttctggtgacgtttttgctgtaaatatcatattgtctcccgtatacatggatgctacataatatattgttgtttgagcaataatttcatatcctcctcctcttcttgctcaatgccaagggccatgtctgctctgtttaccacttaaaacctgggagccagcataatagagcctaagtaggtattgaatgagtgaatgagcaaatgctaagactacagcacccagctcataagaaaaatttgggattcttcccaggtgtttctgcccctgagaaaggacagtgaagggttaatgttctctgcgggagcaggagggatttggatatggatctcagcagagctgctggaatcacattctttctgctactatagcaacaggttgagaattctgccagtatcgtcacctgcctacgttggaaatgcctgcrtgcaggcgacttcattgtctgggg

SEQ ID NO: 662817 - DNA, 586 bp, Homo sapiens
agaactgcaacaaggtaagatacccactctcaccagacttaatacggtactggaagtcttagccagagcaattaggcaagagacagaaataaagggcatccaaattagaaaggagaaattgaaaatgacatgatcttatatggagaagaaactaaagactctaccaaaactcttagaattaatcaattaatgaattcagtaaagttgcagaatacaaaattaatatcaaaaatcagtagtgtttctatacacaatgaactagctgagtaagaaagcaaaaccatttaaaatagctacaaaaaataaaatacctaggaataaatttcagtgaatggataaagaaaatgtggtatatatacacaataaaatactattcagtgattaaaaaaaaaatgaaaccctgtcatgtgcagcaaygtggatggaactggaggacaatatgttaagtgaaataagccaggaagggaaagttaaacaccacatgttctccctcatgtgtggaaactaaaaaaagtggatctcatagaggtaaaaagtagaacagaggatactagaggctgggaagggtaggaggaaggaagaggaa

SEQ ID NO: 662818 - DNA, 586 bp, Homo sapiens
gagcaactccaaagtccaatctggtcttcactctacttctgctgaaaaygggcactgccaaataaaagtcttttcattgagaacctcaaagtatcctctgtggacaatttacatcaaaatcatctgaggagtttgttcacataaaaatgcctaggaattatccaagacttaagactgcataaatcccaagggtggagtccagcactctgcctggttaacaagttccccgggtgcttttcctactcattcatttttacaaccactgacttcaagagtatgcactcttcccaagtgagagttcctaacaaatatttatctcagatggttcccttgtcacacatattttcatctaaagacttaagagcaaggcattcttcctgaagatctgattattatctgttgagagatgcttttactgtgtccacacagtgccaaatgcctgctcaacccaaccaaaaataccaggagaaggtttgcctcaataacctggccagtcagaaattgattgatgatccaagagtctcaagaagacataggctcggggagagacaagggcaatgtggggagtgtccagtggaatgacagt

SEQ ID NO: 662819 - DNA, 586 bp, Homo sapiens
gagcaactccaaagtccaatctggtcttcactctacttctgctgaaaatgggcactgccaaataaaagtcttttcattgagaacctcaaagtatcctctgtggacaatttacatcaaaatcatctgaggagtttgttcacataaaaatgcctaggaattatccaagacttaagactgcataaaycccaagggtggagtccagcactctgcctggttaacaagttccccgggtgcttttcctactcattcatttttacaaccactgacttcaagagtatgcactcttcccaagtgagagttcctaacaaatatttatctcagatggttcccttgtcacacatattttcatctaaagacttaagagcaaggcattcttcctgaagatctgattattatctgttgagagatgcttttactgtgtccacacagtgccaaatgcctgctcaacccaaccaaaaataccaggagaaggtttgcctcaataacctggccagtcagaaattgattgatgatccaagagtctcaagaagacataggctcggggagagacaagggcaatgtggggagtgtccagtggaatgacagt

SEQ ID NO: 662820 - DNA, 497 bp, Homo sapiens
acttacagttgaattacatagctgattttttgggtgaagattcctccccattacactgcaaagtacactgttaatcagctggtggacagtaggtgcccaacataytagtcccactgctcaaagtctttgatggcaccatgtggatatatctttcttcttctttttttttttttgagacagggtctcttgctttgtcacccaggctggagtgcagtgatgcagtctcagctcactgcagcttgacctactaggctcaagtgatcctcccacctcccaagtagctgggaccacagacctgcaccgccacatccagctattttttttttttttttttttttgtaaagatgggatttcaccatgctgcccaggctggtctggaactccttggctcagacaatcctcccacctccacctgcagtgatgagattacaggcttgatctcttttctaccgtgttgtgtacctcttcttttcctttgttttttatgatctaccttt

SEQ ID NO: 662821 - DNA, 532 bp, Homo sapiens
cagacaatcctcccacctccacctgcagtgatgagattacaggcttgatctcttttctaccgtgttgtgtacctcttcttttcctttgttttttatgatctacctttgcctgtttctatcactttttcttctcctgatgcccaagataaacacattctaaggcatgagcaagaayggtttgccacaatcaaaatcgcacaaagatgaagatgctctcttgagcttaccgattccatgcccagaatctaaataattttctcaaaatggccgtctcttcttactggatttctccatgaagcttggggggatgttagttaagcctgaggcagacagtggaggcaaccctctgagacagcacaggagccttctaaatgagctagttctcttttggcaaaatataaaacaggtctgtgaatctggcaccaccacgcctctcaacgggggttgaggtccatcttcagtaagagtcgtcacaaggagataggatgagggccagtgaggggcaccagcatcagtcatcaaagaaattgct

SEQ ID NO: 662822 - DNA, 614 bp, Homo sapiens
taggatgagggccagtgaggggcaccagcatcagtcatcaaagaaattgctgcttggctgtctaaagaaacataatggagaaatgggraagtgagtggggaactgagaccctgtgtgtagggagactgctgcagtgcttaatttaaaagaccgtgaaaggcccaaaatctctctccagaggaccggaaacagcactctaaaatcacatgcataaacttgcctttgtttaaggtggtgcttctcacactgagccccatgtttgtcctgaggactctgtatacactttctccaggacctgagagtttcaagaagattttttcatcatgtattcttacttcagcgataattttaaaaggaggaaaagaaaaagttccagcgactgtaacgccaaaacttctccttagcactgacaatttgcagtggaaagtttcttaactaagaggcagttgtcttctctggagtcgagataatacttttcctttaaaaaggggccatatatttaaaaacaaaacaaaacaaaaaagggtgatccttcccacacccagcccaagccaggcatgacagtttttctgcctcagcaacctgggagcaagcagggtaggaggctactggtc

SEQ ID NO: 662823 - DNA, 555 bp, Homo sapiens
tttaatatgttttttaacatagaaagcagaaacagacaatgactcacaggaaacaaatcaatacatttcagaatgggctaaaaatgtcaccataaaaaaatgcttaatgtttatgagggcaagtgtaggggcatatcttctcagtttcatgttggaatttagtaatttcctcatgttttgcctctctttgwtcttctctttaatgaaaactgtgccaagctatatggtaagcaccttacgctctcagagagacaccaataacgtgtaaatgttccttctaaatacagatcttttttggtgaaatacagcatgggccactgctgggggggacttttcagatggggtcccccagacaaagaggaaggtcaaatgcaaatagggggaagatgtggtctgagagacactgatgtaaaatccagtcagtccagaaccaaacctggagcagaaaaacacccatcagatgatattgattccaaatggcacagaattaatcaccaatttgattttgtaaactaatgttcctatatccagagttatccttaaaatgttttatat

SEQ ID NO: 662824 - DNA, 621 bp, Homo sapiens
tttttctgagagtgatgagagaaaagcatcatgttttcccctgggtctgctagcagtaaggagaatttgagtctagagcttccagggccatcaccaggaacctgggaatgaagccagcgtgcaagagacacagctgagaaatgaagagaaagcaggtcctcatgacatcagctgagcccttggaccatgtcactcctgaaacataccactggagagagacagtttgcacttttctatagaaacttcttctctacttaagccagtctgaattaggtatgtatcactttcaaccaaattaacctgtacttagagtgttcaatagatataatgcatattattaatagtagaagtggaaactggctgtatatatagtcttctacacttgtcmtctgtatcactggcacatccctgtgaagtttctctctagagctgggagtggtttctaaaaaatcaaatgaggaaaatctgcatcaaaaactgagtgtgaacaaacaaattccactaagccttgactccagcaatgcaaaacataatgttggcttcagcatccaacaggtataaattctatgctcataagacaaaatcatgtaagaacaagacttctgtgtgcaatttatgttg

SEQ ID NO: 662825 - DNA, 521 bp, Homo sapiens
gtcgctctctactttgacagtgattttcttattccaactgtggcacaaaagcagcaggccaggaatcacatctcatagaatgggctaaasagtatctcagcatccaaggctcactaatggcctatgacctgggaccctcccaaaccctttgactctattgcagacacccttagtccttctggggatgggggaaaagatggtctcttggactaagcaagactgaagttctagctcaccagggaaatggggtttggattgtttttaaggaaaaaagactacaatatttcttgagcatatgagattgagaactgctacaatttgaaagtgctccagtaagtcacatgcataccccgacccccgcactccaactaaaaaaaaaaaaaaaaaaaaaaaaagttctttctcccttggtttttctctggtttgtttttttgtttttaatacttctgggcgagttttctgagatggccattcctgtttggcccagccctatggctgccatggccttggcctacagaagc

SEQ ID NO: 662826 - DNA, 521 bp, Homo sapiens
gtcgctctctactttgacagtgattttcttattccaactgtggcacaaaagcagcaggccaggaatcacatctcatagaatgggctaaacagtatctcagcatccaaggctcactaatggcctatgacctgggaccctcccaaaccctttgactctattgcagacacccttagtccttytggggatgggggaaaagatggtctcttggactaagcaagactgaagttctagctcaccagggaaatggggtttggattgtttttaaggaaaaaagactacaatatttcttgagcatatgagattgagaactgctacaatttgaaagtgctccagtaagtcacatgcataccccgacccccgcactccaactaaaaaaaaaaaaaaaaaaaaaaaaagttctttctcccttggtttttctctggtttgtttttttgtttttaatacttctgggcgagttttctgagatggccattcctgtttggcccagccctatggctgccatggccttggcctacagaagc

SEQ ID NO: 662827 - DNA, 208 bp, Homo sapiens
catagaatgggctaaacagtatctcagcatccaaggctcactaatggcctatgacctgggaccctcccaaaccctttgactctattgcagacacccttagtccttctggggwtgggggaaaagatggtctcttggactaagcaagactgaagttctagctcaccagggaaatggggtttggattgtttttaaggaaaaaagactacaa

SEQ ID NO: 662828 - DNA, 369 bp, Homo sapiens
aatacatatttgttgactttattaaataatatcaattttaccattatcaatcatttttgttattctgtatctgaaataaaccaccccactttctcatttctcctggaaaatatgactatatgagtcctgttttacagtaatgtttaattcccattttatacttcataattttcaaatgtttacattcaggcaatgctattcatcaacatactcataagaataaaattgttcagaataactagaaatcatggaacaaataaagatgatgtagaagaaataccaaaccrgaagtcagaagaactagagaccagatttgccattaaccagatttgccgttaattagctctgtgtctttggggagaagaaagg

SEQ ID NO: 662829 - DNA, 369 bp, Homo sapiens
aatacatatttgttgactttattaaataatatcaattttaccattatcaatcatttttgttattctgtatctgaaataaaccaccccactttctcatttctcctggaaaatatgactatatgagtcctgttttacagtaatgtttaattcccattttatacttcataattttcaaatgtttacattcaggcaatgctattcatcaacatactcataagaataaaattgttcagaataactagaaatcatggaacaaataaagatgatgtagaagaaataccaaaccagaagtcagaagaactagagaccagatttgccattaaccagatttgccrttaattagctctgtgtctttggggagaagaaagg

SEQ ID NO: 662830 - DNA, 452 bp, Homo sapiens
tttgttaaggaaatgctcccgggagaaattggtaagggagaagaaggaaggggggagaagctgagcaaaggcttgatttctggccttttcccatggagagcagcttcaacccaactccacagagaacccaggagtgaaagttgggtacctcagagtttgtctacatttgaggtaaggaagctgggattttatgcctctgcacaagtcagctgttcaccaagaacagcccctggtggrtaaacccataggcatttccacctatctgagatttgggggtaagccacttcagttgcccaaaagtgtcctttgaagagagtgactggagcaggtcacagaagcaaaagcaatcaggggaaggagagtgaaatggatccaaagggatctaaaaggagcctgacagtgtctgccacacacaggaagcttttctcaaccttctgtgggttcatggaaaa

SEQ ID NO: 662831 - DNA, 442 bp, Homo sapiens
tatgtggaggagcaactgcttattgaaatggaatagaaatagaccagtttgcagacttttgcccaaaaacaggggagatggtcatgccttaaccrtgggtaacagtcatggagatgatgaggcggaaaagatataaagaaacacactgcagagagagggaaaggacgtcacccagtatacaatcccaggagctgcatttgaaggggagggttatgggatccaaaaactactttagggcatgcctgtcctcttcccttaaccggcctatgtgtccatttcaaaaaacaatcaggttcatcaaatcaaagtcaacatccaaatgcatcaacagcataaaggatcttgaactcggctagcccccatgctatcctttccagagcccaagtccaaattcctctagaacagggttcagcaagctgttcctgtaaagggccagacagta

SEQ ID NO: 662832 - DNA, 606 bp, Homo sapiens
tcttactcttaaaagcaaatgtgtgagaagaaagcccatttttctgctcacagcatggctggtgaagaagtgatggctggagccactgcagctttcctgcaatcacggaaagatgtcagtctgaggacaaaggcaaatatgctatgcatagcagggcagaaagatgggaataacccaggtgctgcacttggttgagactccagatgaaccaaccctgcaactaccctatctccaaacttacaatttgacataatgatgtctagactgttgacaccacttctcattgggttttttttcccactcacagctgaacatgtcctgtctgctacactcccctagtctgccttgaggaacatggaataaggaaaaagayctacaaagaaggaagtgaagacagggtcacaacagaacctgggggtacagggtttagaaaatccagagagcattttagtgagttccatacaactgaatactacatttataccttaaagattaggtggagtcttttccatggcaaacacaaaatgaatatgcacattagccagaaaaacaaacatctacctatgccacagacctcaaaaaaaaaaaaatcagactgcagccaat

SEQ ID NO: 662833 - DNA, 606 bp, Homo sapiens
tacaattcccgtctccattttgcagatgaggaaaatgatgtatttgtttaaggttgcattaataatacctcatatatgtatcaggtactgcaggttataaacatatttttacttgcattatctcttttgatccttacaacaacataagagatagatggagtatgtcatatttttccattttatagatgagaaaactgacactaggaggagttcaattagctgatcaacatcccttaggaaatgctgggaccaggactcaaatctgaatctcctgacttccaacctcattgctctttctactacaacacactactcttttgagaaaagcactcataacacattactcattagagaaaagccctttcttttcaagagagtggattgaagcaaaaaataaaatgtgtagcatgtctttgtaccttttagtagtgtctacccgaaggtaatatgaaaagaaaagatataccatgcaaaatactgtctgaatagtcacttgctttggtaagtgaacagaatatttgtaggagartcagccccgttgggtccacctgcaagctcaaatgaattggacttgatgtggacccacaagcattgagcatatagaga

SEQ ID NO: 662834 - DNA, 566 bp, Homo sapiens
gcaaagtgtctcatgcctgtaatcccagcactctgggagcctgaggcaggtggatcacctgaagtcaggagtttgagaccagcctggccaacatgatgaaacctggtctctactraaaatacaaaaattagccaggcatggcagtgggtgcctgtaatcccagctacttgggaggctgagccaggagaattgcttgaacctgggaggcggaggttgcagttagccaagatcgcaccactgctccagcttgagtgacagagtgagactccgtctccaaattaaaaaaaaaaaaaaaaattcagagccccagaggtatgaaattctgaataaagtctgcctcccctcctgcaagaagtccttttcaacatcctcagcccacaatggtcttccttcttataaatgcgtatctctctcaaagtctacatcacacaatctactgccttgatgatatctgagttttattaccttctatttatcacagaaatacatgtctagccagactgattattaactccttgaaagcaaaaaccatgtctctctcttacttttgtattcaccagatgata

SEQ ID NO: 662835 - DNA, 501 bp, Homo sapiens
catcacctctcacccatagtctcctgcttccaccattgtccctgctacaggttattcccaaaggggcagtcaaagtgatacacataaaacataacatagattatgtcacttctctgctcagcacccccagtggctttctagctggctgagtgaaagtctaagtcttcacaatggcctataagactacacatgacttggctctctcrctacctctctaactcaccttctcctactcttcctcatggctgattctgcaccagtcctctgacctccttgtctcactacacacacacacaaacacacacacacacacacacacacacacacacacacacaaaaccaggcatgctcctctagcaagccttttgtacttgatactctttctgctggctcgcttttccccccagatatccacctggctcaggctctcatttcctttagatcttcactcaaaagtaacctcgacagtcagacctccctggtgaccctatttaaaattgg

SEQ ID NO: 662836 - DNA, 501 bp, Homo sapiens
catcacctctcacccatagtctcctgcttccaccattgtccctgctacaggttattcccaaaggggcagtcaaagtgatacacataaaacataacatagattatgtcacttctctgctcagcacccccagtggctttctagctggctgagtgaaagtctaagtcttcacaatggcctataagactacacatgacttggctctctcactacctctctaactcaccttctcctactcttcctcatggctgattctgcaccagtcctctgacctccttgtctcactacacacacacacaaacacacacacacacacamacacacacacacacacacacaaaaccaggcatgctcctctagcaagccttttgtacttgatactctttctgctggctcgcttttccccccagatatccacctggctcaggctctcatttcctttagatcttcactcaaaagtaacctcgacagtcagacctccctggtgaccctatttaaaattgg

SEQ ID NO: 662837 - DNA, 601 bp, Homo sapiens
ctaatagcttttgcttcatatcctgaactccataaaaatgtcctattattggtattcacaacaatttaatggcttagatagattatattccttaggggcagaaggcagctacgatacaaagctcaagttcctgaagtccagatagttttagggcattaaaaatatttcccataggaagaattaatttctcaagcaaaaaacaaggagtgagaatttcttcaattaatcccatgctttggacagaaacagtggaaattcttggtctcataggtgacttttgcagaaaggcttaggccagcattttcccaggaggccatatccaggtctgttagaagtatataagcatgagaatatgtaagaaattcrcatattcattgtgcaaagtttacatagactgacaaggtccatacagttgattctcgggcacttttcaagttttcacatctgattgctgctacctttaagttagtcagtttgaaagttcactcatctacattccttctccctcagctaacattacggtcttgggtcccctgagggaaggcacattacttaattcttagaatcataggtaggattatgagatgtgagagttgaaaag

SEQ ID NO: 662838 - DNA, 587 bp, Homo sapiens
cttttagctttgtagcaggtaatcttgtaaagtgtgagcataagttgccaagaccttcgttaattatctgtgatgaatcttctttcagaccctcttctcccacacaattcttccttttcagaacaactgtccttaaattcttgtcarttttacagtccagtatttgtgttatctgctcagtgaaaccacagttctgcttgtatttcatcttcatgaacattggcacaaaaatgtctccaggtagaaacctcttgatatcatggcactgccctcatgtgtttctcttctttctaggattataagcacgagtggtctgttggtcagtgcctaaaaactgttgcctgatatattttgtccaattttatcatagtttttgatgaaaggataaatctggtttcagttattctattatagctggaagtaaaaatccaactacggccaggtgccgtgtctcatgcctgtaataccagcactttgggaggcctaggtgggcagatcaccagatgtcaggggttcaagaccagcctggccaatatggtgaaactccatctctactaaaaacataaaaattagctgggcatggtggt

SEQ ID NO: 662839 - DNA, 629 bp, Homo sapiens
tttttttttaaaactgtattgtttctcgttttaatttatttttgcttgccattccccacttgaatcgggccgacggcttggggagattgctctacttccccaaatcactgtggattttggaaaccagcagaaagaggaaagaggtagcaagagctccagagagaagtcgaggaagagagagacggggtcagagagagcgcgcgggcgtgcgagcagcgaaagsgacaggggcaaagtgagtgacctgcttttgggggtgaccgccggagcgcggcgtgagccctcccccttgggatcccgcagctgaccagtcgcgctgacggacagacagacagacaccgcccccagccccagctaccacctcctccccggccggcggcggacagtggacgcggcggcgagccgcgggcaggggccggagcccgcgcccggaggcggggtggagggggtcggggctcgcggcgtcgcactgaaacttttcgtccaacttctgggctgttctcgcttcggaggagccgtggtccgcgcgggggaagccgagccgagcggagccgcgagaagtgctagctcgggccgggaggagccgcagccggaggagggggaggaggaagaagagaaggaagaggaga

SEQ ID NO: 662840 - DNA, 638 bp, Homo sapiens
tagaaaaataaagaatatgaaaaggcatacagtgaagactctctctttcattcttgtcccccatctgctcagttctcactcccccagttccctatcttaggcaactattgttcttagattctcaggtatctttccagaatttctttatacaagcatggacaattgtgaatatggacttttgttcctatttttggatgaaaagtatcatattaagcacatgattcttacttgctttgtcacttaatatgatttggagatccttctgcattaatgcttaaataacttcctcattgttttttacagtggcatagtattccattgtrtggatataccataatttatttaaactgttccctactgacttacacttgggctgtttccaattacttaatattgaaaccaatgctgcaacagataaccttaaacatatttctgtttgtaaaatttgattgatagatagatagataacattgctccctacataggttgtaccaatctaaattcccaccagcaattgtgagagtatctccaggcttttacaacagtggctgacatgttgtaagtgctatataagtgtttgcttaaaaaatagattttcttgtttagaaaaataaataaatgaaaagatgtacagtgaa

SEQ ID NO: 662841 - DNA, 572 bp, Homo sapiens
taacttcctcaaaatctcatggcctgagaaaggactaaaactcaggccagtgtgactctggagtccgtgctctaagcagtcatcttgcattgcctgggttcytcatgactcaggaactacctaccacaccagccccgggctgcctagctctgcacttctcttgtgtatgaaagaaataaacctctagcttacttaagtcactgctattttgagttctctattgttggctgccaagcctatgcctacctgatccattctccaattgattttcatgcctccaggcacttgttcaaactcttccttctgcttggaatgccctttccattgtacactcctctgttagcacacatcaaatgcagaataacatcacagctatttctttacccatctgtcttccaagctagatgttcaccatccagaatggagggacactgtcttatagtctgttcccataaaatttaacctggtctggcacataataagtgctctataaatgttccctgaatttaattaaattgggggaaaatcccagtcttatacaaaagcaggataaaatggtttgacatcacata

SEQ ID NO: 662842 - DNA, 620 bp, Homo sapiens
cagctggttactgggtaggcaggcttcttgcatggtgactggcttctaagaagtaggaaacagaaggcttaaagtctaggcttggaacaagtccaacttcaccactgttacatttcactgttgaaagcaaggtatgaggccagtcgaaatacaagggaggagaaaaaaggccctacctttggtcatggggtgcagcatgtacacaaagaaaggtaaggaattgatggccgccgtcttggttgactggctaccacccagtgtgtttctgcaacaataaacctcgccaaccaaggtatcttgagcacatctctattccttgcaattctacagtgtctgtctaagccattagctcccttagctggtcatccttcctcatgaccaacacctattcactggagccctaatacatgcaaacattctggggaggatccaccagccagaaaaagatcatgctctagttagggatatatgaatacaaagatttaaaaaaattctacgagctagcttttgaacracaaagcctaaaagtagggaaggaaggaacaaaaaaaaagatgagaataaattgaaaagatataaagtgaaagtttcccaagagaaagctaggaggatatctcatt

SEQ ID NO: 662843 - DNA, 593 bp, Homo sapiens
ctaaattttgatttgttgacgtaaatctgttaaatttatttgtctaatactcgcgtttgtgtttcttttaagtccaygttagtgtttttgatagtttcctcttctccccaattcttttttttttttttggtagtcacttctcgtttatgagtgacaggatagaactaggtggccaggctatatctcttgtatgcttggctcctccgttccttggttggccaccaggggaagcatactgttttttggttacagttgaccctgtcttcattttgtaggtcaagtctatctttgctttaaaacacagaacataaagcttgttaccaaattttcctaatgtattatttttaaaaatcgacttccacaaatctttgagtaagttggtaggctttttgatacatttttgttaacataaattttgaaaactttatgtagatgtgttggatgtgactaaggaaaagggcatatttgtcaacaacaggaattagatttctgacattcatcgaaatattgacatcagctctgcattgttagtaatgagtttgacttctttggagttatacttttctttgaaacagcaaatataatattttgaa

SEQ ID NO: 662844 - DNA, 557 bp, Homo sapiens
acagcactgggtagtgacagaatttgccagtgtaatcacatcatttatgagaaatgatagcaatagggtttggtgtcatagtaatggaaaatggcactggacactatcctaattttgaagaaatggagtgaagaagaagacatgttccagaatgcacaggacattgatcttcagcaaatttttagagtggattactgaatgattacrtgtgagaaaaatgtgattattaggagtcaatatgagctcattgaaaacaaaacattcctatttctaacatccttaaagtctttcacagttcatcttattggttatggaaatgtcaagggatagatttttatttctgggaggagtttggctaagatttttatgatactcttgttgtcttgttgaggttaagtagattcatagctggttgaacaaatgtccactggcagttttgacctgatggatggactaatgtccatctggagaggggtcctcagggtaagcctcaggaacctgtctagtgatgctgttctatccaattttctcattaaaaatttctgacgaaagcacaa

SEQ ID NO: 662845 - DNA, 557 bp, Homo sapiens
acagcactgggtagtgacagaatttgccagtgtaatcacatcatttatgagaaatgatagcaatagggtttggtgtcatagtaatggaaaatggcactggacactatcctaattttgaagaaatggagtgaagaagaagacatgttccagaatgcacaggacattgatcttcagcaaatttttagagtggattactgaatgattacgtgtgagaaaaatgtgattattaggagtcaatatgagctcattgaaaacaaaacattcctatttctaacatccttaaagtctttcacagttcatcttattggttatggaaatgtcaagggatagatttttatttctgggaggagtttggctaagatttttatgatactcttgttgtcttgttgaggttaagtagattcatagctggttgaacaaatgtccactggcagttttgasctgatggatggactaatgtccatctggagaggggtcctcagggtaagcctcaggaacctgtctagtgatgctgttctatccaattttctcattaaaaatttctgacgaaagcacaa

SEQ ID NO: 662846 - DNA, 587 bp, Homo sapiens
attgtattcatggtatttaccttacctggagggaataggccttttaaatatcattaaaattgggtttttgaggttatgttcttttctccttcacatcctaaacttcagacctcatgctctttggccttccattcaattcaaatgagaagggctgttgtaattgttggcaatgcctccccaggctgccactgtaygtgaaggatcttcatgtttggaaagaaaaaaaaaatgcagtttagtgaagttcatgattctacttttactcttctaacatagccttttttttttaatttatttgtttgtttttacatgtaacactaggtggcagaataactacaccacaaagcaccacatcctttgtttctcactactctggggagtgggtatctgaatagtgaggcataaaaccatctgtggctacatgagattggaccaaccaacaaggccaatattttcttgacagggaactggctgcagtgattctaaaacgtatgcttccaagatactgtctttaagatttccatctttcttttttccccagctcccctggattttaatttctctgccccattgcactctgctagcag

SEQ ID NO: 662847 - DNA, 587 bp, Homo sapiens
attgtattcatggtatttaccttacctggagggaataggccttttaaatatcattaaaattgggtttttgaggttatgttcttttctccttcacatcctaaacttcagacctcatgctctttggccttccattcaattcaaatgagaagggctgttgtaattgttggcaatgcctccccaggctgccactgtatgtgraggatcttcatgtttggaaagaaaaaaaaaatgcagtttagtgaagttcatgattctacttttactcttctaacatagccttttttttttaatttatttgtttgtttttacatgtaacactaggtggcagaataactacaccacaaagcaccacatcctttgtttctcactactctggggagtgggtatctgaatagtgaggcataaaaccatctgtggctacatgagattggaccaaccaacaaggccaatattttcttgacagggaactggctgcagtgattctaaaacgtatgcttccaagatactgtctttaagatttccatctttcttttttccccagctcccctggattttaatttctctgccccattgcactctgctagcag

SEQ ID NO: 662848 - DNA, 587 bp, Homo sapiens
attgtattcatggtatttaccttacctggagggaataggccttttaaatatcattaaaattgggtttttgaggttatgttcttttctccttcacatcctaaacttcagacctcatgctctttggccttccattcaattcaaatgagaagggctgttgtaattgttggcaatgcctccccaggctgccactgtatgtgaaggatcttcrtgtttggaaagaaaaaaaaaatgcagtttagtgaagttcatgattctacttttactcttctaacatagccttttttttttaatttatttgtttgtttttacatgtaacactaggtggcagaataactacaccacaaagcaccacatcctttgtttctcactactctggggagtgggtatctgaatagtgaggcataaaaccatctgtggctacatgagattggaccaaccaacaaggccaatattttcttgacagggaactggctgcagtgattctaaaacgtatgcttccaagatactgtctttaagatttccatctttcttttttccccagctcccctggattttaatttctctgccccattgcactctgctagcag

SEQ ID NO: 662849 - DNA, 550 bp, Homo sapiens
gtctcatgagggtcttcaagagagaaggtcagagagacctttttgcttctgcagttttcttaacttccttcagcttaatactcagtgcgccaagcttccatatttgggggtagcrttttctgcactctatcatgctataagctgattttctcacatttagaggaacattcaacagctaacataaacaattacctgatgtcatatttgaagatatacttagataataaggtcttaaaaaacagtaagtacattaagtacattcacaacaattgttaatcttccattagttctgaaatgcctaatctaacctttgttttatctcagacttgggctagaatgctccttttaattcattctgcatgatttcatagaatcaattttttcttaaggtctcatatccttcaaagactttagggcaattggtcacgaagacccttgcacctcctcaaggctgtgtgctgtggatgttgcagcttaaggaagcattttgaaattgggcatctttcacagcctagtgtagaagttattggcccgcagtttttaccggctt

SEQ ID NO: 662850 - DNA, 544 bp, Homo sapiens
agacagagtaggaggaaagagtagcagtgtggaaagaggagaaggcatgaggatttagcatccaaggtttaagaacaaggtctgccttttgttgttttgtggctggggcagtatcattaaatggctgaggggacctgagatattggcatgagagagggaaggtcactcttgtagcccctgtcacctgctaccttgggaggcattcccttcccctcttctcacccaccctaccactccaaggcagagtttgtttaatcagatgcagaaaatgttctgatttggtagtaaagaaaggtaaacaacacatccccatgccccacttaaggtttttamcaggtgcagttgaaatttatattcatggatgtgggattttcacctgccccctgacccagtttgtttaggaggttaatagaattccaagtcgcatctccctgggttggaattttctctacaactcttggtagtgatggggttcaggacacactaccccacaatatgaagcctggcatttgtgaaaattgcagaagcaggaaggtcattctct

SEQ ID NO: 662851 - DNA, 584 bp, Homo sapiens
caacagcaaatttattttatatataaatttcaccattttggtgcttgtcttctaactgccttacacttttctcttctgggaacggccaaggcccccaaaacacaaaagtgaactatgatcccactttgctagactcttgagatggctctgtaaacataccctctaatctatggtccttccttcctacttcctcagaattcactgaaaacaatagagctctaggaactcctattgcttaaaacaggggtgaggatcgtgtttattcaggactatggctgttaaattagcaggactgttttgactagctggtactcaggggtagggttgtcatgttggtcaacatgcctatcccatttgggactactctaaaggaaataggaatgcctaaaaagtttctagacttctaagaattctatgactggggttagggatgacttataggcaggaacggagccagactcctgacggtatccaaggtttataggcttggtgatagaatttaccagagtagaagagaaagttttckgagtagctagtgttttgaatggcatggggtttgtgacaagatttggggtaagccagtg

SEQ ID NO: 662852 - DNA, 380 bp, Homo sapiens
actgtcctatcagtatctacacccgatattttatttcctcacatcactcatcatatctgaaattgcctgctcatttcctggttttcttgtttactgttggaccctgactagggggtctcactctacaagggcagaaagaggttgtcttagtctggttctctgttgttacccagaagctggaacaacgcctgttccccagyggttgctcagtaaacacatgtggactcaatgagggattgaattggaagttatttacctctctcctggcttttgcttccctctcttcctttgtctctcttttgcggaatctgtaccatgaaaagggctgttgtccagtagtggaacacaggccttggattgaggtcctggttgactcactt

SEQ ID NO: 662853 - DNA, 540 bp, Homo sapiens
catcacaaaatttattaaacttgtgtccttttgaaaagtaaagactttcctgatggtaagagaataaaaaaaattgttcactttatagttataaagacttgctgtctgtaaaagagttaattatttcttgaaatggtgacttattgtccttgagaagactggggcatagtacttcataagtgtgartgacagagtggaacagaggccaaccatagcggagaatgccattcaagtctcgtgttctctgtatactacatatgcttaagttttgtctgcaacaaatacagtatctggaaatttttttgttagttcatttgtaggagactgcaagtaggttttctaagttgataaatgttttagatcagaaccagaagtttgcttatacattttcaatacatttactgattttaaagtattatgaatcttcaccatcctggaaagggtaatgcacacagcaccattttggccacaacctaaatgacttctatctaaaaaaaggatataaactgatcaaatgctgcttctgtggggtgtggtctt

SEQ ID NO: 662854 - DNA, 540 bp, Homo sapiens
catcacaaaatttattaaacttgtgtccttttgaaaagtaaagactttcctgatggtaagagaataaaaaaaattgttcactttatagttataaagacttgctgtctgtaaaagagttaattatttcttgaaatggtgacttattgtccttgagaagactggggcatagtacttcataagtgtgaatgacagagtggaacagaggccaaccatagcggagaatgccattcaagtctcgtgttctctgtatactacatatgcttaagttttgtctgcaacaaatayagtatctggaaatttttttgttagttcatttgtaggagactgcaagtaggttttctaagttgataaatgttttagatcagaaccagaagtttgcttatacattttcaatacatttactgattttaaagtattatgaatcttcaccatcctggaaagggtaatgcacacagcaccattttggccacaacctaaatgacttctatctaaaaaaaggatataaactgatcaaatgctgcttctgtggggtgtggtctt

SEQ ID NO: 662855 - DNA, 369 bp, Homo sapiens
aaatacagtatctggaaatttttttgttagttcatttgtaggagactgcaagtaggttttctaagttgataaatgttttagatcagaaccagaagtttgcttatacattttcaatacatttactgattttaaagtattatgaatcttcaccatcctggaaagggtaatgcacacagcaccattttggccacaacctaaatgacttctatctaaaaaaaggatataaactgatcaaatgctgcttctgtggggtgtggtcttcttactgaccttttatcattctgaatattataaagtttyaccatttaaaaagatttctttgccttctaataactgactctgaaatttgtatgtgctgccaatgggtgt

SEQ ID NO: 662856 - DNA, 558 bp, Homo sapiens
gttgcccaggctggtcttgaacttctggtctcaagcaatccacccaccttgggctcccaaagggctgagattataggcatgaaccactgcgyctggccatcaggcctattttgactttcatttatcactctgcttctctaaaagctggcagcagtgatgttctaggagcaagaactctggatcaggaatttgtatacatccatatcccaaccttcattcactagatcctcagtgactaggccgagctacttaatttccttgaatatttgtttccccatctagaagatgaatagcctatccacatgatttctgaagtaatgtccagctcaaatatcccttgatttgggtagtaaaatcgtccttatttttatatcaacgatatattgagcaaaacatttgaactgttcaaaatttctgtttccttaaattgtcttacatctcatctcagattaactgtatgtatacatattccaacccaaaggcttgactttctcagactggagtgatagctagcaggttaatttactccggttcctccaaatgaaaaaccatgaacca

SEQ ID NO: 662857 - DNA, 532 bp, Homo sapiens
atttagttactgccacgaatccttgagagttaaaatcctgttactactattctgtctctattgcttattgtggtcattgtatctaccatatctgtagtggtaaatggaattttaccactccagggttctattattcccattggaatcagtgaaacaaatttcttkgctcccgttcccccactgtcattcttttccagctctgaggtcagcacccacaaggcttttcaagggtattgtgccccctcacttatgcattctctggtctctccaagggttgggacttgactaagcacattccatattgcagacaaattcctatttcctgaaccttagaactcattcctctacagcaattgttcttattgtgtaatccatgcatgagtgttacctgggaacttgttagaggtgcaagttctagaactccaccctaggtctaccaaataagagaccctgagggtggagcctcaaaatctgtatttttaacaagcctttgggtaattctgatgcatgctgaagtttgagaacccttcac

SEQ ID NO: 662858 - DNA, 327 bp, Homo sapiens
gagcctcaaaatctgtatttttaacaagcctttgggtaattctgatgcatgctgaagtttgagaacccttcacttagagtattcctgggtgttctggctaaggctgtgtgtggtgaggccagcagccaccaacccaaggtcacctccatggaggagrtatgtgggaggctgagggactgtaatggctgtggctccatgagagggtttgggagtcacagctgagtgatttcagggcatgcttgaggtaggtgcattacagcatatgaggcaatgtcacagtatagtcattgaaagaaacttatgcaggagaggactgagagtctcagt

SEQ ID NO: 662859 - DNA, 327 bp, Homo sapiens
gagcctcaaaatctgtatttttaacaagcctttgggtaattctgatgcatgctgaagtttgagaacccttcacttagagtattcctgggtgttctggctaaggctgtgtgtggtgaggccagcagccaccaacccaaggtcacctccatggaggagatatgtgggaggctgagggactgtaatggctgtggctccatgagagggtttgggagtcacagctgagtgatttcagggcatgcttgaggtaggtgcattacagyatatgaggcaatgtcacagtatagtcattgaaagaaacttatgcaggagaggactgagagtctcagt

SEQ ID NO: 662860 - DNA, 554 bp, Homo sapiens
cattgtttctcaatgcctattggcatcgacatttaatttatcttttccaagacaaaattaatgaagctttggatgacttgaattatatacataaatataataaaaataatacaggtgggttgtctgtagagacagttatattacctacattttgacctcagcctttgtcatttattggtactataaggatacataaatcagtagatatatgtcctgaaaatgactttcctcagttaaatttttttactcttgttattgtaaatccggggctcgtacaatcctatagtgtttttaaaataccatggtttgaaaggttattgtccttgatatatattgcagtaagttggttccttactgctcatctcacaacgaaagaatatgaatttaaaatagttagttatagaagtaatttacaaatcactctttgatttgtgtgatttgatcacatctctctgagttagagttattgtgcrcctaggattacttggttgtatgaaatctatatctttgctcttatgtactatcctccaaccaacttgaagcactagacatgg

SEQ ID NO: 662861 - DNA, 464 bp, Homo sapiens
ttgttattgttgcaaattacatctttataaatattaaaaaaattttttttagagacaggatctcactctgtgccccaggctggaatatagtggtgcaatcacagcttactacagtcttgaactcctaggctcaagtgatcctcccacctcagactcccaggtagctaggactataggtgcacaccaccacacctaattttttttttttttttttttgtagagaggcacaaaatttaaattaaaaaaaaaatttgtaacccaggttagtttcaaacrcttcgcctcaagcaatcccccaactttgtgatcctgaagtgctgggattacagacatgagccactgcaccctatcacaaattacatccttatacattgtatgcccagtgacatagacttattagtgttttatgcatttgtcttttatgtcacatagaacaaaaagagtaattagaaaccaaaagtact

SEQ ID NO: 662862 - DNA, 573 bp, Homo sapiens
taaatttgtgtcacaggggtttggtttacaaattatttcatcaccaaggtgataagcacagtaaccaatacgtagttttttgttccttagcctccctctctccactctcaagtagaaccccatgtctattgttcccttatttgtgtccatgtgttctcaatatctagctcctacttataagtgagaacatgcagtatttggttttctgttcctgcattagtttgcttaggataatatcctccagttttattcatgccactgcaaaggacatgatcttgttcatttttatggctgcatagtgttccatgctgtatatgtaccacgttttctttactcaatctgtcattgatgggcakttagattgattccatgtctttactattgtgaaaattgcttcagtgaacatacacatgcatgtgtctttatggtacaatgatttatatttctttgggtatatacccaataatgtgattgctgggttgaatggtaattctgctttgagttctttgagaaatcatcaaactactttcttttttttattttttattattatactttaagttttagggtaca

SEQ ID NO: 662863 - DNA, 529 bp, Homo sapiens
actactatatttcagcatttgactactttttaaaaaattgattaagtgttccatcttttcttagaaacatgtcctttattattagatattttttgttctttgaaagtttggaataacttgcctctaaaattatcccagcttacagccatttgctgagagggcaaaattttttgaaactctttataaattattcccttgttattggtctattctggttrtctacttcttcaattgaagggacattacttgcaggaagggatcaaattagttggaggagaacaaaaaggttaattgaaggtattattaggtggtggtgtctcagggggcctcatatgccatttttaaagaattggccttatcccattaccaatatgggccatggaaagaaagtttttgagaaagtaggtctttattatattacagtcaaatcttatcactccagctctaggaatagagtaaaataagagcccaggtgtgagctgatgaaggtctgaattactgacgaagttgaaacaaatgcaaaagcgag

SEQ ID NO: 662864 - DNA, 529 bp, Homo sapiens
actactatatttcagcatttgactactttttaaaaaattgattaagtgttccatcttttcttagaaacatgtcctttattattagatattttttgttctttgaaagtttggaataacttgcctctaaaattatcccagcttacagccatttgctgagagggcaaaattttttgaaactctttataaattattcccttgttattggtctattctggttatctacttcttcaattgaagggacattacttgcaggaagggatcaaattagttggaggagaacaaaaaggttaattgaaggtattattaggtggtggtgtctcagggggcctcatatgccatttttaaagaattggccttatcccattaccaatatgggccatggaaagaaagtttttgagaaagtaggtctttattatattacagtcaaatcttatcactccagctctaggaatagagtaaaataagagcccaggtgtgagctgatgaaggtcygaattactgacgaagttgaaacaaatgcaaaagcgag

SEQ ID NO: 662865 - DNA, 568 bp, Homo sapiens
tttttaaaaaaactttaattttctggatatttgttcaacataattttaatatatatacatattttagctaattgtaggggctaatgcatttataaacaatgtgttaagctgrtagttaactctaattactcatttataaagcctctactttcaaggtgtgcatttttatgtctttcacttttgaaaataatacctttttttttcttaattacaaaagcattatatacttattgcaggtaatatatgcatgcgataggaataaactaaaaactattatctataattttattctctagggatagctgctattaacaatttgagtctatggtccaatgttgtgtgtgtgtgtgtgtgtgtgtgtgtgtgtgtgtgtgtgtgtacaggtgagtaagtaggttcatacaatgggatccaaccatagaatgggatactgaccattcatacttacttttaattttgtttaagttttataagttgttcacattaaaaataaatgttatatgcccctgccgtgacaaattaaaacagcacaataaataggaaaaatcctctccaattccagccagat

SEQ ID NO: 662866 - DNA, 552 bp, Homo sapiens
aaatgttcctagtggcttttttcataataacccctaactgtcaacaacccagatgtccttcaaggggtaaatggatatataacttaggaagaaaaggaaatgaagtattgatacctgcaacaacttggatgaatctgcagataattatgctgaggcaataaaagccaatctccaaaagttagatactttatgattacatttatataatgttctttcttttcttttttatttttatttttttgagatggattcttgctctgccgmccaggctggaatgcagtggtgtggttttggctcattgcaacctctgcctcctgggttcacgaggttttcctgcctcagcctcccaagtatctgggactacagggacccaccaccatgcccggctaatttttatatttttagtagagaggggatttcaccatgttggctaggctggtcttgaactcctgacctcaggtgatctacccgccttggcctcccaaagtgctgggattacaggcgtgaaccactgcccccggcctatataatattcttcaaatgacaaaatta

SEQ ID NO: 662867 - DNA, 631 bp, Homo sapiens
gattctttataaaagtgtgtgcctgtttttataagaagatacatatgaaaataatatattctctttaaacccccaactccccagactaaccaatacttactgttgtttatccttctacacttctcaatttcttagtacaaatgtgtgtgtacatacatacgtacaaatacgtttttctttgtaaaaataagaacatactatacatattattctgcaactaactttttggtacatatcaaagaacatacattgctatgtataacttattatgtattcttttaaggagctgcatattgcagaattcatagtatttaaatgttttcttggccctttgcttttcaaatttcatcttttcctatcttaggaacatacttttgcwcattgaaggtataaatcaaataacctaccaggatctgggcagagaaaagcaatctgtgttgtttgaatgacaccagtacaattggaagggactcatttgggcaaatcttttctactgaaaactacagacacttttattacacttttctcttaacattcccttcatgcagtttttgtcgtcctcatagatgtaacagcttatgctagcacaaatgatataataattaagaagtttccctctattgccaaatta

SEQ ID NO: 662868 - DNA, 641 bp, Homo sapiens
tccttttttcctttactgacttaaagacctagatgctcaggtatccagaattctttgtcccttgacttctctttcagatctctgctttggtgggaggaccattacactttcctgtgctttgatggtcccatagcctccgctggtagcttctcagcctagcacacctgggcctgaggagggtcagcaagaaccaaggatttgctcatagtgccctgtggtgttggtaggagcggtgggtgtggaatgagacttgggctgagcacctaaggtagcacattttgtcatcagagtgaaaggatacaggtgggacaatccgcaggtggtggtgacatttgcaattggttatatggtcactaaccagttacattcagtcaaaacccactgattttggcaacttaagttgctgttaatatgaataaaagataaaatctttatatgccatctgtaacagactgacctgcttttacttaatcttcttagctttattatttttgaaatctttaaactgttctcaaagtgaatacctgcaagtactttctcatcttagcctgatgggcatgggttatatgagtccctatctctttttttggaagaagagctactttgactcttaacaaygggaatactttgtgagaaatgtg

SEQ ID NO: 662869 - DNA, 531 bp, Homo sapiens
ccccacaacatttatgttttcttcacgtccctgccaacttcctctgggccaggaattcaattcatttctaactgcagacaaaggaaatggcactgaaactcattttgttttctcccgaatcacttgtcatttattctttstattccacctggttcccaggatttttgaagcccgaaagccggaaagaggctcttgtctgtaactttatgctctgcggtagtgccttttacctgaggccatgggccctcagtggtctatgtgggtagaatattgggtatgtgagttggagggaaacattggtggatacttcacaactatctctttagcctcttcatttgacagatggggagatggagtctcagggaagtaactcatttgccaaggcaacgtatagttagtggtgaagcagagaccaaactgtagataccctattactcctgtattctttgatgttatatattgtcagttatttgaaacccttatggagtttaggtcctacaaccccatatatatttcaaatagatttttaat

SEQ ID NO: 662870 - DNA, 487 bp, Homo sapiens
aacaacttaacacatgaaatgattctaagtgtaaatttgattttagatcatccatctatattatactgaaacttgcaaaagcagtgatttctagtgtttcagagagtccttgggtcctgtggaggggtgagggcaggaatgagtgggtgggctgtggtccttccagcaccctccattggccttcatggctgtggtccttccagcaccctccatcagccttcacctgactgcaacattccccatcgatctgctttatacactgggcctccaagtatgagtttgwttgacagataggtcctaccatttaaaaaagttgaaagtggccaggctcagtggcttacactgtaatcccggcactctgggtggctgaagtgcgaggatcacctgagcccagaaatttgagaccagcctgagcaacatagtgaggccctgtctcaaaaaaaaaaaaaaaaagatgaaagccatggatgtaaagtatagtttcaat

SEQ ID NO: 662871 - DNA, 516 bp, Homo sapiens
aacttatctatgtaattctagcctgtgggsttgtgtcaagatcttgtctggggctgctgtcgtttgaagacttgattgagactgagggatctgctcccaggatgccttagtcataagactggcaatttggtgctggttgttggcaggagacctccccatgggactgcttaagtgttgttatcacatggcagatggcttcccctagaatgagtgatccagagagggcaatgcggaacttgccatattttttttgaaatagccacacactgtaatttctgctatatcttattgattacacaggtctgccctattcattgaggaggtgaccattcaggaggtgggaatcattggggatcatcttggacaatagctactagagcctttttgaaataagatctgcaagtggtactacagatgtttttgttgaacatcaggataggtgaacacatattaatttgttgaattttatattagttaatattagttaacattttgaacggttttacaatagaaaac

SEQ ID NO: 662872 - DNA, 516 bp, Homo sapiens
aacttatctatgtaattctagcctgtggggttgtgtcaagatcttgtctggggctgctgtcgtttgaagacttgattgagactgagggatctgctcccaggatgcctyagtcataagactggcaatttggtgctggttgttggcaggagacctccccatgggactgcttaagtgttgttatcacatggcagatggcttcccctagaatgagtgatccagagagggcaatgcggaacttgccatattttttttgaaatagccacacactgtaatttctgctatatcttattgattacacaggtctgccctattcattgaggaggtgaccattcaggaggtgggaatcattggggatcatcttggacaatagctactagagcctttttgaaataagatctgcaagtggtactacagatgtttttgttgaacatcaggataggtgaacacatattaatttgttgaattttatattagttaatattagttaacattttgaacggttttacaatagaaaac

SEQ ID NO: 662873 - DNA, 572 bp, Homo sapiens
tgccttttctttccttctttctaaaccttgaactttacagtaagttatctaaaggcagtgcagcttgactaagtgctgatgaaatcataaaagggtatattttagaaacagtcttttggcctatgctatttgggccagtgtcatttggggagaacctggattgcatgatgaagagtagagggcagctgctctctctactcctccttttaatgatgattgagaaaatactgggcctgcctaacaggccacaggaacactgcggcttctgttgctgtccatctgcttcaagcagtgtaggggaaagaccaygtggtctgtttgttttgaatactaaacagcaccctttaagcctcaaagctttggtttcagtgtctgtgaaatttgggtgtcctttgggttttactgatccttcaaggtccttccagcttggacattttggattctgttacatgccataggtggaaactgctctatgaaacacattaaaaaagtgtatccaggattgcgaagttggattgcttacagatttataaattttcaattgtgtacagagttaaaaaaatttgtttaac

SEQ ID NO: 662874 - DNA, 615 bp, Homo sapiens
caaattatgatggtaccaataggcatccttattttgctttttatttcaatgtgaacaataactattattatgtataagacactttgtttgcatgtattatatcatttaatcctcataataagcatatgaggtatgtgctattattattcccattttacaaacttgagaggttgaataatttgcttgagaatgtcctaaagtgactgagtcaagatttgaagccaaaagcagagcacgtgtgctcaaccrctttatcattccaccttccatgtgattttcacttgagagtaccatgaagatcattgtatgtttttacatttgacttataaattaatggatttcctaatgttgaataaagcgcattatttttactctcacctgttacctctacatcgatttgtgtttctttgctattaaactttagatcgaacactaacaaaattattgttgtcagtaaaatatttttttacattacatgtcttttttttatttctctggctttactagactatagacaaacagaaataaatccttgtgtcactgggcaatgtagtaactatcatgtataaattttactactatgttagttaaaaatgtctaaggagcagggaaatg

SEQ ID NO: 662875 - DNA, 630 bp, Homo sapiens
tttttacatttgacttataaattaatggatttcctaatgttgaataaagcgcattatttttactctcacctgttacctctacatcgatttgtgtttctttgctattaaactttagatcgaacactaacaaaattattgttgtcagtaaaatatttttttacattacatgtcttttttttatttctctggctttactagactatagacaaacagaaataaatccttgtgtcactgggcaatgtagtaactatcatgtataaattttactactatgttagttaaaaatgtctaaggagcagggaaatgacatttgttgtgtacctgctattttcaagtgctcatcacatccaattacttttttttttacactgaggtgaattcatataatgtaaaattaaccatcttacagtacacaattcagtggcatcaacatttgcaatgttgagcagccatcaccttcatttagtttcaaaaccatytcatccttccaaaaggatacactatacatgttaaacagtcattcgccattccctataccccacaggccctggcaacaacaagttggctttgttttctatagatttacctattctggatgtttcatataaatggaatcatacaatttgtgac

SEQ ID NO: 662876 - DNA, 625 bp, Homo sapiens
tttggcttgtttctactttttgtctattgtgaatagtgctgctatagcatcartgtacaaatatctattgaaatacctaccatcagtttttttgggggcatattcctaaaaggggaattgctgtgtcagttggtaatagtatgcaagtttttgaggaaccaccaaacctttccacagtggctgcaccattttacattcccggtagcagcatacgaggattctagtttctctgcatcctagtcaagtcttgttattttctttctttcttttttttttttttatagccatcctagtgagtataaagtggtatctcactgtgattttgatttgtgtttccctgattatttgtgttggtcatcttttcatgtgcttgttggcttttgtatatcttctttggagaaatgtcaaaaatactttgcccattttttgactgtatagaaatgaaaatttgttgtctatctcctgtgattatattctcactttcaccaaataattcacagagttttatgattcacagcagagagttagtgctgtgacttccagaatattcttgttgtatgttagtgtcaaaactctttcaaaggaaagagtactagacaattttctgttgcgtggtgatattaat

SEQ ID NO: 662877 - DNA, 555 bp, Homo sapiens
cctttcgacttggtaccgggtcatggatgcttccatccatccccyctgccctcagacatcagactgcagcttctttgacctttggactcttggacttatactagtggtttgctgggggcttttgggcctttggccacagattgaaggctgcattgtcagattccctacctttgaaaattttggacttggaccgagtcactattggcttctttcttcctcagcttgcagaggacacacacacaaactaagtacaaaaaaagatatatcccttgtaaagatgtgagtcaagccaatggagcagctgaatggctccctgctaaatattcaaatgtcccccacccttttgcagttagatggggtcatgtagctgtttgtggccaatggggtgtgaaggaaagtgatatggtcactgttctgtggtgaccatagaagctgtgttctggtgtgaaggaactacaacctggaagcagcctagatggctgagctaccatgagaagtatacctgccctaaagagccactttgatttgtagtgaacacactgctccagtgtgtcg

SEQ ID NO: 662878 - DNA, 555 bp, Homo sapiens
cctttcgacttggtaccgggtcatggatgcttccatccatcccccctgccctcagacatcagactgcagcttctttgacctttggactcttggacttatactagtggtttgctgggggcttttgggcctttggccacagattgaaggctgcattgtcagattccctacctttgaaaattttggacttggaccgagtcactattggcttctttcttcctcagcttgcagaggacacacacacaaactaagtacaaaaraagatatatcccttgtaaagatgtgagtcaagccaatggagcagctgaatggctccctgctaaatattcaaatgtcccccacccttttgcagttagatggggtcatgtagctgtttgtggccaatggggtgtgaaggaaagtgatatggtcactgttctgtggtgaccatagaagctgtgttctggtgtgaaggaactacaacctggaagcagcctagatggctgagctaccatgagaagtatacctgccctaaagagccactttgatttgtagtgaacacactgctccagtgtgtcg

SEQ ID NO: 662879 - DNA, 658 bp, Homo sapiens
gataacatattcacataaattttattacagtatgttataattgttctattgtattattagttatggttgttaatcttatactgtgcttaacttataaattaaactttatcatcaatatgtrtgtatgggaaagagcataatgtatataaggttcagtactatccaaggtttcaagcatccactggggtttggaacatatgcctcacagataagggaggattgttgtattaattcttttcattaatttgagtcactttttttacttaaataaatttatttaaaaatagatatattattagcattaaaaaaacagacccttttccttgaaccacagcatatcatcttgattatcaccagaaatcctctcccacactgattcagatggatgcctctctgggtaattcctctacttctgggtctcccctccccaccaatgattatgttcccaatacgcttcactgaggtcaactggccattcctcattcttcaatttttgcccgagactcccaactctgaaacctgggatttgtctgtggccttcctcttcacttgctgtttacatataaatcaatctccaaggcttggagtttcccaaatgttattcccaaatgttatttttcttctcttttctagttaccccatcctagtctgggtcctg

SEQ ID NO: 662880 - DNA, 597 bp, Homo sapiens
tttgagtcactttttttacttaaataaatttatttaaaaatagatatattattagcattaaaaaaacagacccttttccttgaaccacagcatatcatcttgattatcaccagaaatcctctcccacactgattcagatggatgcctctctgggtaattcctctacttctgggtctcccctccccaccaatgattatgttcccaatacgcttcactgaggtcaactggccattcctcattcttcaatttttgcccgagactcccaactctgaaacctgggatttgtctgtggccttcctcttcacttgctgtttacatataaatcaatctccaaggcttggartttcccaaatgttattcccaaatgttatttttcttctcttttctagttaccccatcctagtctgggtcctggtgaccttatgtctgaattaatgcagtggttattcttcatttctcaagccctgttttctcaggtttatcctacatgacactagcctattgatcttccatgaataacaggtaataaggaagatccacaagtaatagttgaccagaggaaatccaccactgcttccagggacaagggtcttatcc

SEQ ID NO: 662881 - DNA, 550 bp, Homo sapiens
tctgcaatctatgcattgatcttggacaaaactctagaattattaaatgactcattaaaagaattgtgtttgaacccttctaaaaggaagtggtaatcacttggagtatgggtcccttaaggataagccatggaagactaacctcatttattttcctagaattcctagactgaatatcataaaaatgttagacctggtgttcaacatgagtctcgtgggaagagcacaggctctgcaactagatgtccaaggaccgaatcctctctttaccctttactagtagtrtgaccttaggcaaagtactgaactctactatatgtctgtattgtaaaatgaggataatgacagtgcccacctcatattgtttttgtgaggattatatgtaaatgctacaatataaagcacttagaacaatgcctgacatacagaaaactcaataaacattagttattgctattatcattggaatatcagcaacctgcttatgaaagcctcccaatgttggttttgtagaggagattgtcgtcaggtggactactaaatggatttg

SEQ ID NO: 662882 - DNA, 578 bp, Homo sapiens
tattgtttttgtgaggattatatgtaaatgctacaatataaagcacttagaacaatgcctgacatacagaaaactcaataaacattagttattgctattatcattggaatatcagcaacctgcttatgaaagcctcccaatgttggttttgtagaggagattgtcgtcaggtggactactaaatggatttgtaactacttatgcaaaggatgcacaactagtacatggaagtctcgtggactgctacagggctgtgtccaattcaataaatttcctaatggtttagatgatatattagtctgttttcatgctgctgataaagacatatccaaaactgggaaatttacaaaagaaagaggtttaatgggctcacagttccacatggctggggagrcctcacaatcatggtggaaggtgagacgtgtgtctcacacggtggcagacaagagaagagaatgagagccaagagaaaggagtttccccttatgaaaccatcagatgttgtgagacttattaactaccatgagaacagtatggaggaaactgcccccatgattcacttatctcccactgggtct

SEQ ID NO: 662883 - DNA, 553 bp, Homo sapiens
aaacaatgtgcttctgaatgaccagcaagtcaatgaagaaattaagaaggaaattgaaaaatttttttgaaacaaatgataatggaaacataacataccaaaacctgtggatgcaacaaaagtagtactaagagggaagttcatagctgtaagtgcttacatcaaaaaagaggaaaaacttcaaatgaacaatctaatgatggatcttaaagaactagaaaagaaagagcaaaccaaaccaaaaattagtggaagcaaagaataaaggtcagagcagaaataaactgaactgaaatgaagaaaacaatacaaaaggtcaatgagataagaaagttggttttttgaaaagctaaacaaaattaataaacctttagccagactaagaaaagaagacagaagatccaaayaaataaactcagagatgaaaaagaagacataactacagaaattcagaggatcattagtagctactatgagcaactatatgccaataaattggaaaatttagaagaaatggacagatccctagacacatacaatctaccaagattga

SEQ ID NO: 662884 - DNA, 618 bp, Homo sapiens
catgaacaacaaaaaatgtcaaaaactgggtatagaaggaacatagctcaacataataaaaaccacatacggtttttaccggtgtggtggctcacacctgtaatctcagcactttgggaggctgaggcaggtggatcacctgaggccaggagtttgagacmagcctggccaacacagagaaaccccatctccactaaaaatacaaaaattagccagatatggtggtgcctttctgtaagcccagctacttgggaggctgaggctggagaattgcttgaacctgggaggcagaggttgcagtgagctgagatcacaccactgcactccagcctcagcaacagagcaagactccatctcaaaaataaataaataaataaataaataaataaataaataaataaatcccaaaaccacatatgacagactcacagctagtatcatactgaatggggaaaactgaaagcctttcctctaagatctgaagcacctgaaagatgcccactctcaccactgttattcaacatcatactggaagttctagctacagccatcagacaacaggaagaaataaaaggcatccaaattggaaaggaagaagtcaaattattcttgtttgca

SEQ ID NO: 662885 - DNA, 603 bp, Homo sapiens
taatattgttaagaaaatggaaaattatctaacagaaaaatgcattgaagtacactacatttattatataattttgtattaataacaactctatgtagtagataaaatcattttatttcccaaataaaaaatacagcgtaatgattgactaatccatgtttatgtagctagtaacggctgggattcaagcccaggtctttataattttaaatgtggcttttattatattctactgctttgtgtatttgtgaaaggccmttttattttttctctttatgcttaattctgtatactcgctctcattctgtttttaggaccaatttgacctaatctaggaagaatgtgaagaggcttagttggataatctgtgtgaagcatattttacttgcccttggtggtttgtatttgaccaattgtgaaccaattttggaagcagggcttctgcttattcaggatgaggatttttatcttactattgcttgttccctcctaggaactgaaaatcctgttttgattctaggccaaggatgtggccttggtcattgtgggagacttctctgttgttaattactgaaagctttgcagtctctgaatattgcctgg

SEQ ID NO: 662886 - DNA, 566 bp, Homo sapiens
gcaaaacatgcaaagcaaaatctaagaactgagaggagaaatagacaattccacaattatagttggagagttcagcatttctctctcaaaaattcatagaacacttagaaaatcagcaacaacctcatcaaccagtaggttccagttgaaatttatagaacactgtacccaacaaaagcagaatgcatattgttttcagatgccatgaaacatataccaggatagagcaaatccataatggactaaaactagaaatcagtaagaggaagataacaaaaatctccaaacacttggaatctaaacagtacagctataaataatctataggttaaagaagaagtttcaagggatttaaaaatacattgaactgaatgaaaatgaaaatacaacatatcaaaatttgtgggacatagctaagcagaatttctagcactaaatgttttcaatagaaaagagaaagtctcaaattaattatttaagctcccacctaagaaccccmcaaaaaaagagcaaaatgaacccaaaacaagcagaaggaataaaagcagaaatcaatgaaattgaaa

SEQ ID NO: 662887 - DNA, 566 bp, Homo sapiens
gcaaaacatgcaaagcaaaatctaagaactgagaggagaaatagacaattccacaattatagttggagagttcagcatttctctctcaaaaattcatagaacacttagaaaatcagcaacaacctcatcaaccagtaggttccagttgaaatttatagaacactgtacccaacaaaagcagaatgcatattgttttcagatgccatgaaacatataccaggatagagcaaatccataatggactaaaactagaaatcagtaagaggaagataacaaaaatctccaaacacttggaatctaaacagtacagctataaataatctataggttaaagaagaagtttcaagggatttaaaaatacattgaactgaatgaaaatgaaaatacaacatatcaaaatttgtgggacatagctaagcagaatttctagcactaaatgttttcaatagaaaagagaaagtctcaaattaattatttaagctcccacctaagaacccccmaaaaaaagagcaaaatgaacccaaaacaagcagaaggaataaaagcagaaatcaatgaaattgaaa

SEQ ID NO: 662888 - DNA, 629 bp, Homo sapiens
aaaacttaatatattgagaatatcttatgtcattcttctgtatcatcacttttagttgctgcttaagtcatgtatggatgtaccaatatcttaatgtgtggtttctaattttttcattactgtattatgaataatgcagtagtggtcatctttgtagctaaatctttgtctaaccatggtttttttatttatttataagtgttgaattgttgaccaaaagatatattttatagatatatatataaaatcaaaactatactccaaataggttacatgacccattctttaaaatagagtgtcttgatcctcagccctctagcactggtgtrtaatgtgtgcactgagatgattttgccactgatgaatccattctaattttttacagagtatgtaggccccattttaaaggtttgttttaggaaacaaggtggcagaatagaaagctccaccaattatcccccatagagggacaccaagttaacaaccatctgcacagaaaaacaccctcataagaagcaaaaatcaggtgagcacttatagtacctggttttaatttcatattgctgaaggaggctctgaagagatagaaaaaaacagtcctgaatcattgttgccacccctccaccaca

SEQ ID NO: 662889 - DNA, 629 bp, Homo sapiens
aaaacttaatatattgagaatatcttatgtcattcttctgtatcatcacttttagttgctgcttaagtcatgtatggatgtaccaatatcttaatgtgtggtttctaattttttcattactgtattatgaataatgcagtagtggtcatctttgtagctaaatctttgtctaaccatggtttttttatttatttataagtgttgaattgttgaccaaaagatatattttatagatatatatataaaatcaaaactatactccaaataggttacatgacccattctttaaaatagagtgtcttgatcctcagccctctagcactggtgtataatgtgtgcactragatgattttgccactgatgaatccattctaattttttacagagtatgtaggccccattttaaaggtttgttttaggaaacaaggtggcagaatagaaagctccaccaattatcccccatagagggacaccaagttaacaaccatctgcacagaaaaacaccctcataagaagcaaaaatcaggtgagcacttatagtacctggttttaatttcatattgctgaaggaggctctgaagagatagaaaaaaacagtcctgaatcattgttgccacccctccaccaca

SEQ ID NO: 662890 - DNA, 629 bp, Homo sapiens
aaaacttaatatattgagaatatcttatgtcattcttctgtatcatcacttttagttgctgcttaagtcatgtatggatgtaccaatatcttaatgtgtggtttctaattttttcattactgtattatgaataatgcagtagtggtcatctttgtagctaaatctttgtctaaccatggtttttttatttatttataagtgttgaattgttgaccaaaagatatattttatagatatatatataaaatcaaaactatactccaaataggttacatgacccattctttaaaatagagtgtcttgatcctcagccctctagcactggtgtataatgtgtgcactgagatgattttgccactgatgaatccattctaattttttacagagtatgtasgccccattttaaaggtttgttttaggaaacaaggtggcagaatagaaagctccaccaattatcccccatagagggacaccaagttaacaaccatctgcacagaaaaacaccctcataagaagcaaaaatcaggtgagcacttatagtacctggttttaatttcatattgctgaaggaggctctgaagagatagaaaaaaacagtcctgaatcattgttgccacccctccaccaca

SEQ ID NO: 662891 - DNA, 564 bp, Homo sapiens
acaaaacatcagagaaacaaaaagttgttttttaaagataaataaaatcggcaaacctttagccggactaagaaaaaagagagaagatccaaataaataaaattagaaatgaagaaggagacattacaactkattctgcagaaatttaaagaatcactagtggctactttgagcaactatatgccaatacgttggaaaatatagaagagactgacagattcttagatacgtactacataccaagattgaaccatggagaaatccaaaatctgaacagaccaataacaagtgataagatcaaagccataataaagagtgtcccactaaagaaaaatctgggaccagacatttaaagaagaattaacaccaattctactcaaactattctgaaaaatagagaaggagagaattcttgcaaactgattctacaatgccagtattaacgtgataccaaaaccagatgaagacacatcaaaaacagcaaactacaggccaacatctctgaagaaaattgatgcagaaatcttcaataaaatacaagcaaatcacaaacaatacattaga

SEQ ID NO: 662892 - DNA, 564 bp, Homo sapiens
acaaaacatcagagaaacaaaaagttgttttttaaagataaataaaatcggcaaacctttagccggactaagaaaaaagagagaagatccaaataaataaaattagaaatgaagaaggagacattacaacttattctgcagaaatttaaagaatcactagtggctactttgagcaactatatgccaatacgttggaaaatatagaagaractgacagattcttagatacgtactacataccaagattgaaccatggagaaatccaaaatctgaacagaccaataacaagtgataagatcaaagccataataaagagtgtcccactaaagaaaaatctgggaccagacatttaaagaagaattaacaccaattctactcaaactattctgaaaaatagagaaggagagaattcttgcaaactgattctacaatgccagtattaacgtgataccaaaaccagatgaagacacatcaaaaacagcaaactacaggccaacatctctgaagaaaattgatgcagaaatcttcaataaaatacaagcaaatcacaaacaatacattaga

SEQ ID NO: 662893 - DNA, 347 bp, Homo sapiens
ctaatggatcatcctcatagcatacaaacatgctgaaattctgcacatcttaaatgaaaattctctcttttccccacatttctctccagctatagctctatttctctattgctgtaacagcaaactcctcaaaagagttgtctgtgctacctatttccaatttacttcctcttgttccttttgartccactccaatgacttccttgtagccaaatccactagtaattgttagtcctgatcttatttgacctgtctcaacatttgatcccattaactactttctttcctgaaatgttgctgtggttcttttttccttaacttgcgttccaggaacctttcggttctca

SEQ ID NO: 662894 - DNA, 647 bp, Homo sapiens
tgcttttcttaaatgatatatgaataaattataactccaccaatgcatagggtttagcggtattgtcttccttaaaatctttgtaattgattgagacagtactgtttatcttctaaaggtgtcagactattcctagaaatgagctcttcaaggtatatatacaaaagatttttatagtaggcttttttcctcctgtggtatctttcttgtagaaatgtgattgctgaaaatgtgtgtgccacagtcaatgaagtgcctttttaaatattagcaacttaaagcccacatcaatcatgaaactaaagtttgacgttgacaattacagaaagggatttcattttgattatgaaacagaatctttctgagaattggtcacttctgacaatctggtccactctttctgaagagttttcatgagaaatatgcctcatctttaccacagtgtctgcctgtagaattagctccatttctaaatcactgcttcatagctattcagtctcagatygctaataaaaatggttattcccttttcacaggtggcaaaactgagattttgggatccatgcagctctatggaatatattatgggtgaattttgaacccaggtctatgtgcttccaggtaagttttccattttgccactctct

SEQ ID NO: 662895 - DNA, 473 bp, Homo sapiens
ttgaaagtaggcaaattaataaccccatagtagcctccaagtgttccaagagccacacatttctcacttgaaatcaaaagctataaatgattcaacttagtgaggaaggcatgttgaaagctgagacaggctgaaagcttcttgcaccaaacatccaagttgtgaatgcaaaggaaaggtgcttgaagaaggttaaaaatgctactctggtgcacacatgaataaaaaagckaaacagccttattggtgatgaggagaaaaatttagtggtctagataatagatcaaatcagccacaacattcccttaagtcagagcctaatccagagcaaagccttaatgcttttcaattctttgaaggctatgcgaggtaaggaagctgcagaagaagagttggaaactagcagaggttggttcgtgaggtttaatgaaagatgccatctccgtaacataaaagtgcaaggtgaaacagca

SEQ ID NO: 662896 - DNA, 592 bp, Homo sapiens
gaatgttgttttcatgcctgctaatacaacatcctttctgtggcccatggatcaaggagtaattttgactttaaagtcttattatttaagaaatgcatttgtaaggctatagcctctgatggatctgggcaaagtaaatgtgaaacctggaaaggatttaccatcctagatgctatttaagaacatttgtgattcataggaggaggccaaaatatcaacattaataggtgttttgaagaaattgatttcaaccctcatgtacaactttgagggttcaagatttcctccactgaagccagatgtgatataaatagcaagataactataattagaagttgaggctaaagatgtgactgaatttctacagtctcattataaaatttgaatgratgaggagttgcttcttatgcatgggcaaagaaagtggtttcttgaaatggaatctactcctgaagattctgtgaacattgttgaaatgacaacaaaagacttagaatactacatcaacttatttgaaaagcagcagcagggtttgagaggtttgactccagttttaaaagagttcttgtgtggacaaaatgcaatcaaacag

SEQ ID NO: 662897 - DNA, 390 bp, Homo sapiens
gttagtgggagctaagtgatgagaacacatggatacatagaggggaacaacacacactggagcctattggagggtggtgggtggagagagggagagaagcaggaaaaataactaatggatactaggcttaatacctaggtgatgaaataatctgtacaaccaacccccatgaaacatgtttacctgtgtaacaaacctgcacatcctgcacctgtacctctgcatttaaaatataagttaaaaaaaagaaataagataggttgatggatagaaaacaatttttaatgaaaacatgtgataaagtatttacaataaatcctaattgtagaatatagatggtgagtatattatttrtaaaaattttaaaattatttaaaaatttcgtgataa

SEQ ID NO: 662898 - DNA, 512 bp, Homo sapiens
gaaatgtggaaaatatcacaaagtctaatacagatatacttggtgttttagaaaaatagaagaaaatggtcagaagaataaagaaataattactgaaattttttcaagattaataaacccaaagatgagaaatacaaagtaaactatacctattcacatcatagtcaaattgttgaaaaccaaaataaaaagaaaatcttaagaacagttgggggggtagatatattgtagaagatataaatgggaatatttttaaaaatactttgttaatacaaaagaaggcatgtaaagagaagcaaggtwgcaaaaaataagtgttaccaaaaaaacagataacaagctggtaaattgaacccaaacatattaatgatcatattaaatctaaatgcacaaaaagatgtaattaaaaggaacaaattataagattgatttaaaaaaaccctcaaccccatgctgtttaaagatacatttaaatataaagacatagatatattaaaattaaaaggttggtt

SEQ ID NO: 662899 - DNA, 592 bp, Homo sapiens
aaaaaacagataacaagctggtaaattgaacccaaacatattaatgatcatattaaatctaaatgcacaaaaagatgtaattaaaaggaacaaattataagattgatttaaaaaaaccctcaaccccatgctgtttaaagatacatttaaatataaagacatagatatattaaaattaaaaggttggttttccacttgaggatgtagggggcttgaaagaatgtcacacccaaacttaatgattttaaaaagccagatgggcagcaagttcactacttttttgaacacattaaagtccagaagttcagctggaccaaaatttgaggagagacaagggtggatgtgacatgagcactagcttactgggataaggtatttctgagaaatggtaagattaagttcagccagggcaatcactatgttgatggaggctgagtgcaaccagtaagagaaggctgaaggctctggagggctataaatwtaaggaagcctacatattattgccagacttttttcagcgaacccactgtttgctcacagaaaacattaggaaagtttccttgtgatgctgaagcgaggaagaagaacagca

SEQ ID NO: 662900 - DNA, 592 bp, Homo sapiens
aaaaaacagataacaagctggtaaattgaacccaaacatattaatgatcatattaaatctaaatgcacaaaaagatgtaattaaaaggaacaaattataagattgatttaaaaaaaccctcaaccccatgctgtttaaagatacatttaaatataaagacatagatatattaaaattaaaaggttggttttccacttgaggatgtagggggcttgaaagaatgtcacacccaaacttaatgattttaaaaagccagatgggcagcaagttcactacttttttgaacacattaaagtccagaagttcagctggaccaaaatttgaggagagacaagggtggatgtgacatgagcactagcttactgggataaggtatttctgagaaatggtaagattaagttcagccagggcaatcactatgttgatggaggctgagtgcaaccagtaagagaaggctgaaggctctggagggctataaatataaggaagcctacatattmttgccagacttttttcagcgaacccactgtttgctcacagaaaacattaggaaagtttccttgtgatgctgaagcgaggaagaagaacagca

SEQ ID NO: 662901 - DNA, 559 bp, Homo sapiens
gacagaaaatagagaaaagtaacaaagtcaaaagtttgttctttgaaaatgttaataaaattgattaaaatatagtaagacagagaaaaaagagaatgtacaagtcacagttgtcaggaatgaaagagaggtcatcactactgatcctagaggcattaaaaggatagtaaaggggtagtatgaacaattttatgcaaataacttcaagaacacagatgaacaatacatcagaagcaatactttatacctggaggtattgcagaaattattaacatcatcacaaagttgaaagacaaaggagtggtgaatcctcctatcttcatgacaagttacctagtaataacaagtaattttggagaatatcagtckattattgtaaaattagttaggtagtaatagtaactccaatcagctcctatcctagatgtgggttctatctagtttgctgcaagactgcctatcatgaatgggtattatcttacttatcaagtcataaaattgggttgcctagcagcacttactcaacaaggctaagcaagtgacataagactgagtttaa

SEQ ID NO: 662902 - DNA, 597 bp, Homo sapiens
ttttgttgggggaggaggcgtttccttttgacacagtaacctgatgcagagatggaactccctagggtttcagctttggggatcctctggccactctgtgtattctagtacactctttattcctgaagagagttgctaccccaactcccygtcacatgcagatcccttgaagtcttagctgggaaacatgcttggactcttccagtcattcttttaaagtcctgacttgagtaagcctcaaagagacaactactgaattcctgattccatttgattttacaaaggcaaatgagctccccacataaaaggacctccagctgtttcctctaggaaaggagagagaacagcaaggatgtccaagagtctctcctccacagttgcttcctcctcgagcatctaccagttatgtcatacctgtctgaggagacagaaggggcagaaggagaggtatttgttgcctcctctgcctgcaaagtgaggctccgtgatgcctgtgatacgagcaggaccctccttgaggagttgaggaagttaggcaggaaagggagggagtatgtagagccagcacttttgtctcaacagtgcaagaattgttgg

SEQ ID NO: 662903 - DNA, 597 bp, Homo sapiens
ttttgttgggggaggaggcgtttccttttgacacagtaacctgatgcagagatggaactccctagggtttcagctttggggatcctctggccactctgtgtattctagtacactctttattcctgaagagagttgctaccccaactccccgtcacatgcagatcccttgaagtcttagctgggaaacatgcttggactcttccagtcattcttttaaagtcctgacttgagtaagcctcaaagagacaactactgaattcctgattccatttgattttacaaaggcaaatgagstccccacataaaaggacctccagctgtttcctctaggaaaggagagagaacagcaaggatgtccaagagtctctcctccacagttgcttcctcctcgagcatctaccagttatgtcatacctgtctgaggagacagaaggggcagaaggagaggtatttgttgcctcctctgcctgcaaagtgaggctccgtgatgcctgtgatacgagcaggaccctccttgaggagttgaggaagttaggcaggaaagggagggagtatgtagagccagcacttttgtctcaacagtgcaagaattgttgg

SEQ ID NO: 662904 - DNA, 575 bp, Homo sapiens
aaccagctttttgtttcatttaccttttgtatttttttttgtttcaatttcatttagttctgctgtgatctttgttatttcttttcttcttcttggtttgggtttggtttgttcttatttctctagttccttgagttgtgaccttagattgtctctttgtgctctttcagactttttgatgtgggcatttaatgctatgaactttcctcttagcactgcttttgctgtatcctagaagttttcataggttgtgtcactattatcattcatttcaaagaaaytttttaatttccatcttgatttcactgctgacccagtgttcattcaggagcaggttacttaatttccatgtagttgcatggttttgagggtttttttggagttgaaatccaattttattccattgtggtctaagggaggacttggtataattttgattttcttaaatttattgatactgcttttgtggtctatcatgtggtctatcttggagaatgtttcatgtgctgatgaatagaatgtgtattctgcagttgttgggtagactgttctgtaaatatctgtaaagtccattt

SEQ ID NO: 662905 - DNA, 460 bp, Homo sapiens
ctcttcttccttgggaacaccaattatttttaggtttggttgtttaacataatctcaaactttttggaggctttgttcattttttcaattcatgtttcctttttgttttggtcagattgggttaatttgaaaaccttgtctttgggctcttaaattctttcgtctacttgcttgattctgytgttgaaactttccagtgtattcttcatttctctaagcgtgtctttcatttccaaaagttgtcattgttttttatttatgctatctatttctctggagatgtttttgtccatatcctgtccttttttaaaaaaaatttaagttgattttcaccttttctctggtgcctccttgagtagcttaataatcgaccttctgaattctttttctggcaattcagagatttcttctttatttggatccattgcccgggagctagtgtgatcttctgggggtgtca

SEQ ID NO: 662906 - DNA, 493 bp, Homo sapiens
gccagtactggggagtgtcttcagagtcctgtgatctcatttgccttcaggtctctcagctgtggatgccagcaccagttctggtagaagtagcaggggagtgaaatggactctgtgagggtccttggttgtagttttgtttagtgtgctcgttttcttgaatactggttgatatggtccccacccaaatctgatcttgaattgtaatccccataatccccagatatcaagggaggaaactggtgggaagtgtttgaatcataggggtggtttaccccatgctgttctcatgatagtgagtgagttttcatgaaatctgatggttttataagcatctggcatttcccttgcttgcacttctctctcttgctgctatatgaagaaagtgcttccttccccttcaccttccatcatgattgtaagtttcctgaggcctccccagccatgtggaagtgtgagtcarttaaacctcttacttttataaattacctgg

SEQ ID NO: 662907 - DNA, 559 bp, Homo sapiens
gagggagggacaggcatgtctgagctcagactctccttgggtggggctgctgtggccgctgtggaggatagggatgtggttctcaggctaatggagttaygttcctagggagattatggctacctctgttgtgttatacaggtttccagggaagtcggggaaagccagcagtgacaggcctcacccagctcccatacagccagcaaggccattctcactcccaccatgctccatcaacagcactgagttcatatctaggcagccagtgagcagagctgaaatcttgccccaggacacaagcctccctgctgaaaaagcaagcagagatttcaggccctgcctctccctctctgccatggtagtatctggatttccattcaccctcaacccccatcccagtttctgccgaggaaaattcacacttggtcgaaattattatagggttcagctggaagttttcttctccttgtggtcctttcgcaattccactggcagccctcccaaaggacccctgtcagaaaaaatcagaaatggcttccctggagactgggaaggaagc

SEQ ID NO: 662908 - DNA, 576 bp, Homo sapiens
ttcaaagtgtctgtgaattctttcagttttcatgttatgttcctgtggtagttctttgtgcaaaagttgatgatgtgaatctccacatgctgttctgtccatccaagtgggagctacaggttagttctgcctcctgtttgccattttttccagtttccaagaattttcttattacatttattgacatttagatttgcttttctgtgactcttgtctattctcagtctatactatcttttgctgagcagaatakaggtcttttttttttttttttttttttttttaacatatcagggtttccagtgttggtaaagcctccctaaccctagactgtatggggagtctcctggatattcttgcaaaatttagttttttcccatttacatctttttctatatttggaatttgtttttgtatatggagtaatatagaagtctgatgtattttttgccttccatatatcgagccagttgcactagcactattggcaaaataattcatccatgcccactaaactgaaatgccactgtcatgtatgaaatcatcatatgaatagggatttattcctttatctca

SEQ ID NO: 662909 - DNA, 576 bp, Homo sapiens
ttcaaagtgtctgtgaattctttcagttttcatgttatgttcctgtggtagttctttgtgcaaaagttgatgatgtgaatctccacatgctgttctgtccatccaagtgggagctacaggttagttctgcctcctgtttgccattttttccagtttccaagaattttcttattacatttattgacatttagatttgcttttctgtgactcttgtctattctcagtctatactatcttttgctgagcagaatataggtcttttttttttttttttttttttttttaacatatcagggtttccagtgttggtaaagcctccctaaccctaractgtatggggagtctcctggatattcttgcaaaatttagttttttcccatttacatctttttctatatttggaatttgtttttgtatatggagtaatatagaagtctgatgtattttttgccttccatatatcgagccagttgcactagcactattggcaaaataattcatccatgcccactaaactgaaatgccactgtcatgtatgaaatcatcatatgaatagggatttattcctttatctca

SEQ ID NO: 662910 - DNA, 576 bp, Homo sapiens
ttcaaagtgtctgtgaattctttcagttttcatgttatgttcctgtggtagttctttgtgcaaaagttgatgatgtgaatctccacatgctgttctgtccatccaagtgggagctacaggttagttctgcctcctgtttgccattttttccagtttccaagaattttcttattacatttattgacatttagatttgcttttctgtgactcttgtctattctcagtctatactatcttttgctgagcagaatataggtcttttttttttttttttttttttttttaacatatcagggtttccagtgttggtaaagcctccctaaccctagactgtatggggagtctcctggatattcttgcaaaatttagttttttcccatttacrtctttttctatatttggaatttgtttttgtatatggagtaatatagaagtctgatgtattttttgccttccatatatcgagccagttgcactagcactattggcaaaataattcatccatgcccactaaactgaaatgccactgtcatgtatgaaatcatcatatgaatagggatttattcctttatctca

SEQ ID NO: 662911 - DNA, 467 bp, Homo sapiens
acaaactaataccataatttgagtaaaaacaacaacaacaacaacaacaactcaagcacagcagtattatttgtgacccacatttctaatttactaagtgctttcaagtatatgttctcattggatcttctcacatcaagtctataattaaggtasggaaatgtatgagtattgtaactttttaccagtataaaaccatggctcagtcaagttgaatgacttgtctaaggtcttggagctagtatgaactggagtcaggaccataagccatttcttctgacttctaatctagtgttctttccacactctaaatcccagatcaaaggcaacacccaataaagacctagtttgtgtttaagcaacattttcagtcattaacttagtgaaaaccttttatgggaattaggtgttttcactcataggattaacttgtgctagtccattggctccatgtaatatctcgttgt

SEQ ID NO: 662912 - DNA, 560 bp, Homo sapiens
aacttgttctttttacctatgctattttataacctctggtttacacaactcatttgatctgaactgtttgccctgtgctatttcacttgttcatcttatacctgtccccagatatttcatttttctggtggtacccagaaatgtggccaagaagaacccttttgtaaaaaaataaagaggggcttctctgcctccaagatcatgtttttataaataatggcatttcttgatgatccgcatagtagaataagaataatacacttacttagttctccagacttttttatgtgttagaaaaaactttatcttaaaaatgtgcagcctggccaacatggcgaaaccctgcctctactaaaaatacaaaaattagccgagcatgttgaagygcacctatagtcccagccactgggaggctgaggcaggagaatcgtttgaaccccggggggcataggttgcagtgagctgagattgcgccattgcactccagcctgggcaacaagagtgaaactccgtctcaaaaaaaaaaaagcaaaatgtacttcaaacatctttttattcac

SEQ ID NO: 662913 - DNA, 560 bp, Homo sapiens
aacttgttctttttacctatgctattttataacctctggtttacacaactcatttgatctgaactgtttgccctgtgctatttcacttgttcatcttatacctgtccccagatatttcatttttctggtggtacccagaaatgtggccaagaagaacccttttgtaaaaaaataaagaggggcttctctgcctccaagatcatgtttttataaataatggcatttcttgatgatccgcatagtagaataagaataatacacttacttagttctccagacttttttatgtgttagaaaaaactttatcttaaaaatgtgcagcctggccaacatggcgaaaccctgcctctactaaaaatacaaaaattagccgagcatgttgaagtgcacctatartcccagccactgggaggctgaggcaggagaatcgtttgaaccccggggggcataggttgcagtgagctgagattgcgccattgcactccagcctgggcaacaagagtgaaactccgtctcaaaaaaaaaaaagcaaaatgtacttcaaacatctttttattcac

SEQ ID NO: 662914 - DNA, 553 bp, Homo sapiens
gtgggcagaatgcctgtctggaacctggagcttctcagatctgcacctgtgggcaggaaaggaccaacaatgctggacaatgtattcaagttgccagctaaaagcaggatgccaaggagcatagtgtctayctcaccatgttttgttagcttccacttctatgggtactaagattgagagccatgctgtaatcgaattctcaatgtctgaagggagcaacagattcagataattaggctagcagactaagttgattctcatgagaggaaaacgattttttccatctcaagtcgtgtttatgcctgttcatttgaactaagttaaatcctaacaaagcaatctggattcgcagttgaatgatttatgtgtgacttaggaaaggagataattgcaaaactatttctaatctttagttacaaaatgaactgtattccttttattcccctcactcaaaggtactctggtctatgcaataatggcaactcgcaaagtggcgatagggagtggagatgattaaaaacttttcatttggaattctccacagaccctgctc

SEQ ID NO: 662915 - DNA, 553 bp, Homo sapiens
gtgggcagaatgcctgtctggaacctggagcttctcagatctgcacctgtgggcaggaaaggaccaacaatgctggacaatgtattcaagttgccagctaaaagcaggatgccaaggagcatagtgtctacctcaccatgttttgttagcttccacttctatgggtactaagattgagagccatgctgtaatcgaattctcaatgtctgaagggagcaacagattcagataattaggctagcagactaagttgattytcatgagaggaaaacgattttttccatctcaagtcgtgtttatgcctgttcatttgaactaagttaaatcctaacaaagcaatctggattcgcagttgaatgatttatgtgtgacttaggaaaggagataattgcaaaactatttctaatctttagttacaaaatgaactgtattccttttattcccctcactcaaaggtactctggtctatgcaataatggcaactcgcaaagtggcgatagggagtggagatgattaaaaacttttcatttggaattctccacagaccctgctc

SEQ ID NO: 662916 - DNA, 582 bp, Homo sapiens
gagaattgaatttcaaaaatgatgtcctttaractgcaagagaatgtgaatgataaaatttgtttgtttgttttctgttttgctttgcttttctgtttgaacagccaagggtatttctttatggctcatctctctggtgtcatgaaaacctcagatagaaagctgtaagtaatgtccccattatggagaaacaaactcaagaatatctaagcaagagagttgtaggtggctctcagagttgcctgatggctggctttctgtttctttaaaaggaaactagtctgtggttattttcatggggtcaaaattgaaaaaaaaattatgattacaacctacagaattccaagttctatgaagacaaagagaatgtccatttcatttggaattatacccctaggacttagtgtgatgcctggctctagcatatgttcacttactaaatatttattattaatatttattaaaaatagtgtctgaatcaataagcttcataaaagtataagcaattccagattcaaaacaccacaacagaatttttattgctagttactgatagatacttgatagatttagtcttacata

SEQ ID NO: 662917 - DNA, 582 bp, Homo sapiens
gagaattgaatttcaaaaatgatgtcctttagactgcaagagaatgtgaatgataaaatttgtttgtttgttttctgttttgctttgcttttctgtttgaacagccaagggtatttctttatggctcatctctctggtgtcatgaaaacctcagatagaaagctgtaagtaatgtccccattatggagaaacaaactcaagaatatctaagcaagagagttgtaggtggctctcagagttgcctgatggctggctttctgtttctttaaaaggaaactagtctgtggttattttcatggggtcaaaattgaaaaaaaaattatgattacaacctacagaattccaagttctatgaagacaaagagaatgtccatttcatttggaattatacccctaggacttagtgtgatgcctggctctagcatatgttcayttactaaatatttattattaatatttattaaaaatagtgtctgaatcaataagcttcataaaagtataagcaattccagattcaaaacaccacaacagaatttttattgctagttactgatagatacttgatagatttagtcttacata

SEQ ID NO: 662918 - DNA, 602 bp, Homo sapiens
ctcatcatgtccaatagagaggaggtaaatacaatattatgggaaatccattgcagatgaattagratgaaaaataaattaaaaaccaagttagcttcccagataagagtagaaatatccactggaataaaaagggctaaacaaagaggacaaaatgaaagggcttaacaccttcccccagaaagtcacttgtcttccagagtattgacttcccttactcagatccttcctttgtcaggaaaaacaaaacaaagctaaagaacaaaactattaggcccagcacaagtattaatattattcacccttgaaagaaaagcttgattatgggtgatgctaggcccaattttcactggcttatctaaaggatctagaaaccacagattgctgggccacaccctcaagtttctcattagtaggtgtagggtggagtccaataactggcaattttctcaaattcccaggttatatcatgctgcctgtgcagggaccacactttgagaaccattgttttagcgtaactcattggttttgagatccaaggaaatggaagcacatgtgtttagggtaatcttgtgctagtttgcatttattctcatatatat

SEQ ID NO: 662919 - DNA, 602 bp, Homo sapiens
ctcatcatgtccaatagagaggaggtaaatacaatattatgggaaatccattgcagatgaattaggatgaaaaataaattaaaaaccaagttagcktcccagataagagtagaaatatccactggaataaaaagggctaaacaaagaggacaaaatgaaagggcttaacaccttcccccagaaagtcacttgtcttccagagtattgacttcccttactcagatccttcctttgtcaggaaaaacaaaacaaagctaaagaacaaaactattaggcccagcacaagtattaatattattcacccttgaaagaaaagcttgattatgggtgatgctaggcccaattttcactggcttatctaaaggatctagaaaccacagattgctgggccacaccctcaagtttctcattagtaggtgtagggtggagtccaataactggcaattttctcaaattcccaggttatatcatgctgcctgtgcagggaccacactttgagaaccattgttttagcgtaactcattggttttgagatccaaggaaatggaagcacatgtgtttagggtaatcttgtgctagtttgcatttattctcatatatat

SEQ ID NO: 662920 - DNA, 534 bp, Homo sapiens
tcattcatagttaagggagaggtatgaggatagtcagtgtgctgtcgaatggtggattttggtgtaggatgatctggcttaktcattttatcagagaaccccaaactgtcagaattttgagtcttatcttttgggctggtgtattttcccaaaggaatcttaaatcttttactgaattataaaagcctgtgtcaggtccttggagtcatatggggagaagggtatatgttgaatattttgaggtgggggtacgggggtcagaattttcaccattcagtaatttgactttcacttaatccccattttcaatatggataccttttctcagctctgtctatcatccctgaatctggcctctatggtttttgattttttttttctagtgtggagaaagtttttttgctcagatatggaagagactgcagcctgcaacaaacaatgaggaagaggatttatgaatgtagcttcctatgtcaactttaatgaattttcttgtcttcaagtttgccttccatgcccaattttggagatact

SEQ ID NO: 662921 - DNA, 534 bp, Homo sapiens
tcattcatagttaagggagaggtatgaggatagtcagtgtgctgtcgaatggtggattttggtgtaggatgatctggcttagtcattttatcagagaaccccaaactgtcagaattttgagtcttatcttttgggctggtgtattttcccaaaggaatcttaaatcttttactgaattataaaagcctgtgtcaggtccttggagtcatatggggagaagggtatatgttgaatattttgaggtgggggtacgggggtcagaattttcaccattcagtaatttgactttcacttaatccccattttcaatatggataccttttctcagctctgtctatcatccctgaatctggcctctrtggtttttgattttttttttctagtgtggagaaagtttttttgctcagatatggaagagactgcagcctgcaacaaacaatgaggaagaggatttatgaatgtagcttcctatgtcaactttaatgaattttcttgtcttcaagtttgccttccatgcccaattttggagatact

SEQ ID NO: 662922 - DNA, 443 bp, Homo sapiens
ctataaagaaatacctgagactgagactggggtgatttataaagaaaagaggtttaattgactcatggttccacaggttgcacaggaaggatggctggggagcccttaggaaacttacagtcatggccaaagtcaaaggggaaataggcacatattcacatggccagagcaggaggaagagaggaaagggggagttgctacagtatacttttaaataaccagatattataagaactcactcactatcatgagaagagcaagaaggaaatccacycccatgattcagtcacctcttaccaggccccttctccaactttggggattacaattcgacatgagatttgggcagggatacaaatccaaaccatatcggtggggtgttttgctttttaaatttttaatttttttagaatcatatttttaaaatgtcttaaatggaagcc

SEQ ID NO: 662923 - DNA, 546 bp, Homo sapiens
cacactaaagtttgagatccattactataaagtacattgttggggcaatagttgaaactctggagtaggtggtaataatatatcagtgttaatttcctgctttgcaggtcatttgtaggaagaacatactgaattattcaggagaaatagaaaattatgcctacaacttactcttaaatgactcaagaattggccaggcaagttggctcatgcctgtaatcccaacactttgggaggccaaggtgaagggaccacatgagctcaggagttcaagaccagcttgggcaacatggtgagacctcatctctactaaaaatagaaaaattagccaggtgcgatggtgcatgcttgtagttccagctactcaggaggctgaggtgggaggattgcttgagctcacgaggtcaaggctgcastgagctgtgatcatgccactgcactgcagcctgagtaatagagcaagatcccatctcaaaaaaaaaaaaaaagattcaagaataaaagttctttgtaatatgtatacaactcttctgtatgttttaaaat

SEQ ID NO: 662924 - DNA, 617 bp, Homo sapiens
ccttccaaaaaatattttgcagtgtatttcactaaagacacaatccctgtttttccttgactttgataatatatttwaccaaagaagagcaattcagtttgtgcaaaagaaccattcatgaggttgcctggagatagaatgactcagtgtttctcaaaggtggggcacagcgcacctcaatcagaatcacctggggagctttgaaaacatcagattcctgggccccactccagctctactgagtcaggatctccccggggtgggacctaggcagttgcatatttaatgagctctacaggtgattcttatgcatcttaagatgtagagggtaattattagttctggtcataaaaggtagtattgccttctgctcaggagcttctctgtctttgaagagagggtcagtggcatattgcctttgaaaaaaaattcaatttaaacgaacagcaagtcattttccctcttctcaatactttattctagctgcgttttcctccacaggttcaatcatccagtctccttcacatagaatagcatttggagttgagcagctacgcaaaacattttactgttggtcctttatttctgatgtccctgtgtttctggtcagtgaccat

SEQ ID NO: 662925 - DNA, 514 bp, Homo sapiens
ttttaaaccattgactgcttaataaattagcactagatggcttttagtctaatttatctctgggagccagtttcccagggtatcagagcaataccacaagaaaaattatttccattaaacaccacaaaaatgtctttcctgtgatacttcactgaaagggtgacatgtacgagattctcagtcacaaaacaggaaagaaatgtttgaaagttaaattaaaaagtaaagcacagttaagattttattgagcttaaaccccattcctaccccctaaacatataaatctgttctgtgttctgtgtctcccactcagatgggtgataaattttggatgctgaattcttatgtctctaaaaataacgtttacytaaagtgaagtgcaacatctgggtttattgggggagcatgaagtggcctttcagcttaattatttgtgtggtcaggttagatttcccaaccctgaaaatgatgccagttttgtttctcttggcccctgcccactacaggtaaagag

SEQ ID NO: 662926 - DNA, 551 bp, Homo sapiens
tcctagtagcaataataagcacattgcttaatttactaaatttttcttttgcaagaatgtcttgatttctattctggcacaagatctttaygttcttattgattggcgaacagtagtttgttgcctggtgcttgtagtagtgctgctccaatggcattttaccatttgagcattcatttgttctttcactcattcaacaagcatttattaagcaccttattagttaaggtaatcctagcagtgtaacaaataagtcctgagcttaatgtaataaaaacctatttcacagacatatcagagtctctgtggttgtcctggtctatggccttctgtgttgtctttaggaaaagggtatatatatatagatatataagatctatctatctatctatctatctatctatctatctatctatctatcgagagagagatttattatgggaattgcctcatgtgattacagaggcggagaagtcccacagtatgctgtctgcaagttagagaacaggagagccaggggtaaattagcctaaatctgaaggcagagcacc

SEQ ID NO: 662927 - DNA, 551 bp, Homo sapiens
tcctagtagcaataataagcacattgcttaatttactaaatttttcttttgcaagaatgtcttgatttctattctggcacaagatctttatgttcttattgattggcgaacagtagtttgttgcctggtgcttgtagtagtgctgctccaatggcattttaccatttgagcattcatttgttctttcactcattcaacaagcatttattaagcaccttattagttaaggtaatcctagcagtgtaacaaataagtcctgagcttaatgtaataaaaacctatttcacagacatatcagagtctctgtggttgtcctggtctatggccttctgtgttgtctttaggaaaagggtatatatatatagatatataagatctatctatctatctatctatctatctatctatctatctatctatmgagagagagatttattatgggaattgcctcatgtgattacagaggcggagaagtcccacagtatgctgtctgcaagttagagaacaggagagccaggggtaaattagcctaaatctgaaggcagagcacc

SEQ ID NO: 662928 - DNA, 551 bp, Homo sapiens
tcctagtagcaataataagcacattgcttaatttactaaatttttcttttgcaagaatgtcttgatttctattctggcacaagatctttatgttcttattgattggcgaacagtagtttgttgcctggtgcttgtagtagtgctgctccaatggcattttaccatttgagcattcatttgttctttcactcattcaacaagcatttattaagcaccttattagttaaggtaatcctagcagtgtaacaaataagtcctgagcttaatgtaataaaaacctatttcacagacatatcagagtctctgtggttgtcctggtctatggccttctgtgttgtctttaggaaaagggtatatatatatagatatataagatctatctatctatctatctatctatctatctatctatctatctatcgagagagagatttattatgggaattgcctcatgtgattacagaggcggagaagtcccacartatgctgtctgcaagttagagaacaggagagccaggggtaaattagcctaaatctgaaggcagagcacc

SEQ ID NO: 662929 - DNA, 525 bp, Homo sapiens
ctttttttattttagccatcctagtgggtgtgaaattatatctcattgtggttttgagtcgcatttcctgatgactaacaatgtcacrcatcttttcatatgcttattggccattagtacacattctctggaaaaaatatctattcagatcctttgcaatccttttaaaatagggttacgtctctttttattattgaatttttaaaattctctatatagtctagatacaagtccctgataagatacatgatttgtaaatattttctccttggtagattgtctttttgctttctttatagtgcccttcaaagcctagaagttttaaattttgacaaagtccaattaacctatgtttttcttttggtgtttgtgcttttggtgccatacttagaaagccattgtcaaatgcaaagtaatgcatatttatacctatgttttcttcgaagaattttatagcttttgctcttacatttaggtttttgatccttttgagttaatttttatatgtcctatgaggttagtgtc

SEQ ID NO: 662930 - DNA, 525 bp, Homo sapiens
ctttttttattttagccatcctagtgggtgtgaaattatatctcattgtggttttgagtcgcatttcctgatgactaacaatgtcacacatcttttcatatgyttattggccattagtacacattctctggaaaaaatatctattcagatcctttgcaatccttttaaaatagggttacgtctctttttattattgaatttttaaaattctctatatagtctagatacaagtccctgataagatacatgatttgtaaatattttctccttggtagattgtctttttgctttctttatagtgcccttcaaagcctagaagttttaaattttgacaaagtccaattaacctatgtttttcttttggtgtttgtgcttttggtgccatacttagaaagccattgtcaaatgcaaagtaatgcatatttatacctatgttttcttcgaagaattttatagcttttgctcttacatttaggtttttgatccttttgagttaatttttatatgtcctatgaggttagtgtc

SEQ ID NO: 662931 - DNA, 422 bp, Homo sapiens
ttctggagtccattgttcctgatgagaagtcagctgttcaccttattggggttcccttgtatgagaatgagttaatttttgctttctgctttcaggatttccttgttgtctttggctttcaatatttttactacaatatatcaatttgcagatccttgtttatcctacttggagttctctgggcttcctggaagtatagattaatgtttttcaataaacttgggaacttttcagctattatttctttaaatattttttcttccctttgtatttctcctctctttctgatacttacattatgagtatattgatatccttaatggagtctcacatcttctamggctctatttgtttttcttcattcttttttctctctgttcctcagattgtataatctctgtcaatctatctcaagtttgcta

SEQ ID NO: 662932 - DNA, 615 bp, Homo sapiens
tcccacctcactgttgcactttccaagaatttagtktcagcaacagttgaggctgttgctgagggcaggatgagaattgctgacatcctttgcctcctgggaaatagcctctgactgggtgcttgagagagaggaaggaagccttgtatctttggctataccaagtcaggagtggagtttctgtttcactgctaggaggagggagggtatgattcttcattcaaatcctacacactcttgcagttcttactgggttttagtagattttgttgaataaatgtttcttcatttgcaagcccttagaaccatttcctttaagtgttcctttttttttcttaatcataattttcaccagtttcactggagagtggcttcatggagctccttgtacttttatgcagaagtggaaatcttatatgttaattctttcatttatttacacctttacccagttttattgagtgtatattatgtgtctgatcctatgataggagctggagatacagtggtgagtaaaacagatttggaacttcctgtatagtaggcaagtcagaaaaaaggcaaaacaagattagaagcagcttgacagaggttcccattagattttgaatgaat

SEQ ID NO: 662933 - DNA, 615 bp, Homo sapiens
tcccacctcactgttgcactttccaagaatttagtgtcagcaacagttgaggctgttgctgagggcaggatgagaattgctgacatcctttgcctcctgggaaatagcctctgrctgggtgcttgagagagaggaaggaagccttgtatctttggctataccaagtcaggagtggagtttctgtttcactgctaggaggagggagggtatgattcttcattcaaatcctacacactcttgcagttcttactgggttttagtagattttgttgaataaatgtttcttcatttgcaagcccttagaaccatttcctttaagtgttcctttttttttcttaatcataattttcaccagtttcactggagagtggcttcatggagctccttgtacttttatgcagaagtggaaatcttatatgttaattctttcatttatttacacctttacccagttttattgagtgtatattatgtgtctgatcctatgataggagctggagatacagtggtgagtaaaacagatttggaacttcctgtatagtaggcaagtcagaaaaaaggcaaaacaagattagaagcagcttgacagaggttcccattagattttgaatgaat

SEQ ID NO: 662934 - DNA, 615 bp, Homo sapiens
tcccacctcactgttgcactttccaagaatttagtgtcagcaacagttgaggctgttgctgagggcaggatgagaattgctgacatcctttgcctcctgggaaatagcctctgactgggtgcttgagagagaggaaggaagccttgtatctttggctataccaagtcaggagtggagtttctgtttcactgctaggaggagggagggtatgattcttcattcaaatcctacacrctcttgcagttcttactgggttttagtagattttgttgaataaatgtttcttcatttgcaagcccttagaaccatttcctttaagtgttcctttttttttcttaatcataattttcaccagtttcactggagagtggcttcatggagctccttgtacttttatgcagaagtggaaatcttatatgttaattctttcatttatttacacctttacccagttttattgagtgtatattatgtgtctgatcctatgataggagctggagatacagtggtgagtaaaacagatttggaacttcctgtatagtaggcaagtcagaaaaaaggcaaaacaagattagaagcagcttgacagaggttcccattagattttgaatgaat

SEQ ID NO: 662935 - DNA, 615 bp, Homo sapiens
tcccacctcactgttgcactttccaagaatttagtgtcagcaacagttgaggctgttgctgagggcaggatgagaattgctgacatcctttgcctcctgggaaatagcctctgactgggtgcttgagagagaggaaggaagccttgtatctttggctataccaagtcaggagtggagtttctgtttcactgctaggaggagggagggtatgattcttcattcaaatcctacacactcttgcagttcttactgggttttagtagattttgttgaataaatgtttcttcatttgcaagcccttagaaccatttcctttaagtgttcctttttttttcttaatcataattttcaccagtttcactggagagtggcttcatggagctccttgtacttttatgcagaagtggaaatcttatatgttaattctttcatttatttacacctttacccagttttattgagtgtatattatgtktctgatcctatgataggagctggagatacagtggtgagtaaaacagatttggaacttcctgtatagtaggcaagtcagaaaaaaggcaaaacaagattagaagcagcttgacagaggttcccattagattttgaatgaat

SEQ ID NO: 662936 - DNA, 403 bp, Homo sapiens
tcttcatttattttgaacttttctactatctctcagcaatgttttatagttttcagtgtagaagtattatatatcttttgttgatttatttccagggttttttttttgttttatatattactgaaattggtttcttaaaaaactttattttccaaattgttattggtagtatataagaatkcagttgattagctttgtattctgtgaccttgttagactcatttattactccagtaattgttttatagattccctaagattttctacaaaaaaaaaatcatatctgtgagtaggaacacctttacttctttcttccaaaatttaggcctttgatttttttttatagctttattccaatggataggtctgccagtaaaacgttgaataaaattggtgaaaaaaa

SEQ ID NO: 662937 - DNA, 618 bp, Homo sapiens
acttctttgggcttggttaggacgagttgacttccctaggtcttatcatctcttatcatcatctaggcatcatatcatgtcagatatcctgacagaactggtctggtctacacagctaactcagacctggagcaagatctctcctcgacctgtctgtgtggctcacttgtgtggccccaccttgtattcttcatgggactttctacctgaaaaatttacattgtgtttttatcaaagagcttaccaggaaaacctaaggcttatttgaattctgcctaatattatatagtagaatttttgatgatctcttctatagcagttgtcgagaatgaactcttgtaagttagaatgaaatatgaaaagaagttaaagggatgatgaagcatgagaataattagacatgtgaagggcagaaggtacagctacaacattagctatgaagcagygagcgaaaggtagctaaagaaaataacagctgaaaaagtagagagatggctaagaagaggaggaggataaatgggggtagagaggaattttttttaaatgtgtattcaatgagttgtaatagtgcccaatcttctccagctacaaagtgtgttttatgcgtcctaacaaatt

SEQ ID NO: 662938 - DNA, 551 bp, Homo sapiens
ctgaaagaaactaagtaccagttaccactagcaagggtgatctttatctgtctttgctgacctgagagaaagggaaggaatcttaaaaggctctagcagctgtgggctcctcacagaggacatctcccgcacatttctaacatgtcttggattttttccaaccttaccttgtgttagaagaagttgcttatgggagttaaatgcccttccttacaggtgaccccatgtaggtgttaccaactaccctgtactcagcagaatcagygttttcccagtctgtttttggtaaaggccagtgcttgctttgtgaaaggttttgtggtctcctcctggcttggtttcccttggaaggctctctcccagcacctgtgagccctcaccctgagagatggctaatgtgctaattaccatgaacccaaaaatgtaagctgtaaacaaatgagagctgtgtttataatcaatcagttttatagccttctgatggtgacgatatcagtggcgtttacactggaagaccgcacagcgttctccagcagctggccgcttatgtt

SEQ ID NO: 662939 - DNA, 551 bp, Homo sapiens
ctgaaagaaactaagtaccagttaccactagcaagggtgatctttatctgtctttgctgacctgagagaaagggaaggaatcttaaaaggctctagcagctgtgggctcctcacagaggacatctcccgcacatttctaacatgtcttggattttttccaaccttaccttgtgttagaagaagttgcttatgggagttaaatgcccttccttacaggtgaccccatgtaggtgttaccaactaccctgtactcagcagaatcagcgttttcccagtctgtttytggtaaaggccagtgcttgctttgtgaaaggttttgtggtctcctcctggcttggtttcccttggaaggctctctcccagcacctgtgagccctcaccctgagagatggctaatgtgctaattaccatgaacccaaaaatgtaagctgtaaacaaatgagagctgtgtttataatcaatcagttttatagccttctgatggtgacgatatcagtggcgtttacactggaagaccgcacagcgttctccagcagctggccgcttatgtt

SEQ ID NO: 662940 - DNA, 623 bp, Homo sapiens
aaagcctgcttctttggcatccagatccttcattctgagtcctgccaatatgtggagatgtgggtgcatgaactttggctgcattttgggttcgttaacagagcaaagaatttgccagtgaagccccgatgcgttttgccccaagtaccttgcccttcatttatagactcctgggaaaaccaagcccatctgtttctcattcatttacactttactcatcaaaatgttggttttggttggattcctttgttttcatttcaagaaacctttaagaatgtagagtggaaaaaagatgggtaattagcaaggagtgctgaggaccctaacctctccgtcctgtttttaacattacttatggtccattgtgtggtgacaagcatttttttcctactgtcccacttatcaattyccctaagttattaaaaaaggaaggaagaaaggaaggaagaaaggaaggaaggaggtcctttttgcttctgttccacaaccaaagatttggaaacaagctagaatctgcatgcttccatgaggtaatagtcataggatctcagattttgcctttcctttctcaatctcttgtttttaaagagacaacagcattttcttaggttcatgaaagtgac

SEQ ID NO: 662941 - DNA, 608 bp, Homo sapiens
ctcctactaaattctgcacttacggattgctgtgtccagttctgagcaccatactgaagaggaacacttacaaactgaagtgctcatgtgacatcacaggaacatgacagccctcaggatgcttgccttggaggagacttgaaggaaggcagtaatatctataatccttatgaggctatcatgtgaaaatggaactgagaccgtgttctccctgggacaaaatagaactcataggtggaaatcacaatatatggaaaagctttttatcagtaagagatgagcaccgttggagagtgctgcctttggatgtcgagtactcagtgtcactggaagagactcctagatacaatgggtctcaattacctcttctaaaatcccttctaagtctaagtctttattgatgtatattttaagaagagttttagagagtagcacagtgcctagcatgtagtaagtactacataattatgttgaataattgagtraagtaggtactatggtctgaatgtgtcccccagccccccaaagtgatggtattagaacgtgaggcctttggggaggtaagtcatgagggaaaagtgctcatgaacaaaattggtgccctcata

SEQ ID NO: 662942 - DNA, 582 bp, Homo sapiens
cctataacggaaaacctatcggattaacagcagatttatcagcagaaaccctacaagctagaagggatggggaccctatcttcagcctcctcagacaaaacaattatcagccaaaaattttatatccaatgaaactaagcttcatatatgaaggaaagatacagtcattttcagacaaacaaatgctgagagaattcaccaataccaaccaccactacaagaactgccaaaaggagctccaaatcttgaaacaaatcctggaaacacagcaaaaaagaacttctttaaagcataaatctcacaggacctataaaacaaaaatacaactaaaaaaaaaacaaggtatacaagcaacaaatagcaggatgaatagratggtacctcacatctcaatactaacattgaatgtaaatggcctaaatgctccacttaaaagatacagacttgcagattggataagaattcaccaaccaacaatctgctgccttcaagagactcacctaacacataaggactcgcacaaacttaaggtaaaggggtggaaaaagacatttcaggcaaatggacaccaaaagcaagtag

SEQ ID NO: 662943 - DNA, 645 bp, Homo sapiens
gtgccacagcctcccgagtagctgggattacaggcatgcaccaccatgcctggctaacttttgtatttttagtagagacaaggtttcaccctgttggtcaaactggtctcaaactcctgactccaagtgatccgcctgccttggcttcccaaagtgccaggattacaggtgcgagtcatcacacccagccttaactaccaatttataggaaaaacagggcacagaggggtacatgccagcaacaccatggagatgcagtcagaaaatacagaccatgggaactcttcaggcctgattacttcaacaacaaaaaatttgcaaagggaaaaaaagacatggaggtgggtgggaccatagattaaaataaatgtaagaaatgcaattatgcctaaaagaagcccaatacccattagtggtcattatcatcactccttcattgccaccccagygctaggcaaccactaatccactctctgtattctggatttacctatcctgaacacttcacacaaatagaatcatacaatatgtggttttttgtggcatctggcttccttcccctaacatattttcaaggtccatctatgttgtattatcagtacatcattcctttttaggacagaataatattccattgtatagata

SEQ ID NO: 662944 - DNA, 634 bp, Homo sapiens
gttaaaaaagacaaagagggacattatatgatgataaaaggccttgatatcacaattctaaacacatacacacctaacactggagctcccaaatttataaaacaattactaacagacctaagaaatgagatagacagcaacacagtaatagtgggggacctcagtactccactgacagcactagacagtcatcaagacagaaaatcaacaaagaaacaattgatttaaactataccctggaacaaatggacttaacagatatatacagaacattccatccaacaaccgcagaatatacattctattcaacagtgcatggaactttctccaatatagaccatatgataggtcacaaaacaagcctcaataaatttaataaaattgaaattataccaagcactctctctcagaccacagtggaataaaamtggaaatcaactccaaaaggaaccttcaaaaccatgcaaatacatggaagttaagtaacctgctcctgagtgatcattggatcaaaaatgaaatcaacatgaaaatttaaaaattcttcaaactgaatgacaatagtgacacaacctaccaaacctctgggtcatagcaaaggcagtgttaagaggaaagttcatagccctaaaca

SEQ ID NO: 662945 - DNA, 634 bp, Homo sapiens
gttaaaaaagacaaagagggacattatatgatgataaaaggccttgatatcacaattctaaacacatacacacctaacactggagctcccaaatttataaaacaattactaacagacctaagaaatgagatagacagcaacacagtaatagtgggggacctcagtactccactgacagcactagacagtcatcaagacagaaaatcaacaaagaaacaattgatttaaactataccctggaacaaatggacttaacagatatatacagaacattccatccaacaaccgcagaatatacattctattcaacagtgcatggaactttctccaatatagaccatatgataggtcacaaaacaagcctcaataaatttaataaaattgaaattataccaagcactctctctcagaccacagtggaataaaactggaaatcaactccaaaaggaaccttcaaaaccatgcaaatacatggaagttaagtaacctgctcctgmgtgatcattggatcaaaaatgaaatcaacatgaaaatttaaaaattcttcaaactgaatgacaatagtgacacaacctaccaaacctctgggtcatagcaaaggcagtgttaagaggaaagttcatagccctaaaca

SEQ ID NO: 662946 - DNA, 553 bp, Homo sapiens
aaatcaaacaaaaacataaagtggggaaaggacaccgttttcaacaaatggtgctggggtaattggctagccacgagtaggagaatgaaactggatcctcatctcttcccttacacaaaaaccaactaaagatggattaaggacttcaatctaagacctgaaactataaaaattctagaagataacattagaaaaacccttctagacattggcttaggcaaggatttcatgaccaagaacccaaaagcaaatgcaataaaaacaaagataaatagctgggacttaattaaactaaagagcttttgcatggcaaaagaaacagtcagcagagtaaacgaacaacccaagaatgggaaaaaaatcttcacaatctgtacatctgactgtggactaatatccagaatctacaatgaactctaacaaatcagtaagaaaaaaagaaacaatcctattaaaaagtgggctaaggatacgaagagacaattatcaaaagcagacatacaaatrgccaacaaacatgaaaaagtgctcaacatcactaatgatcagggaa

SEQ ID NO: 662947 - DNA, 266 bp, Homo sapiens
aataatcctgacccccagagaacataagctctccccagaacagatacaagccttccttagwatacttaccccaaccacctgatagtaactttgcacttttctggggatcacaggatattgcagactttgggtactgggatatggtggaattgttaagtctttatatcaggcactaaaagaagggactgatagggatccatttctctggggaagggatcaagagcaagcctttaaacagctaaaaactgccctctcacaagccccag

SEQ ID NO: 662948 - DNA, 472 bp, Homo sapiens
aaataaaaaataacaatcttagtaaaaacagaacttctgttcaaaccaatgccatcaaaagataaaggggaagaattcctctccttttatggctatgggacctgaattctggggcttcaaagcttgaatcagagtaaacatttaagtaaatgcttccaawctgcataatggatgcggcttttctctctaaaaaaaatgtctcttacatctacccttttttttttcagagtgtcatgaggcaagatctcgtttcttattgaaggtgaaggccaagcaagaccagcgacagcatcatgacaggtgaagcaccaaaaaagtagtctagagctttttatcatttcaaatttgctccttgcagatctccctaatgccaagcagatcaaagcatggaatattcataaaaccccattaattccatcagcacccattaccataagttgaatcaatttttgcaactggagctttcattata

SEQ ID NO: 662949 - DNA, 605 bp, Homo sapiens
ctcagcaggcatgagtatggccaccagctacctgggtgtgtcggtagccttgggattttttggagctgtcctcacccccttattttgtttgtccatatctacttgtcttaaaaccgaaggagccttctgtctttgtggccaatctattcaccagtgcctccccactaactgaactgaagtatgcccagacgtcctcagagtccctggcaatctgtctcttccagtagcaatccatrggcatttcatcttgcccaggatgaggagggctatccaattaattctccttctcacgggactcggcattatagctgatacaggaactgaaattgctagaattataaagtcctttttaatctatagccaactctcaaaggaaatacccaacaacattgatgccatggctaagaccttaacaaccatgcaagaacaaataaattatttagcagctatagtcctccaaaaatcatcaagggctagacaggttaatggcagcacagggaggaatttgtttagcctcagatgaaaaatgttgcttttaggtaaaacaatcaagaaacgtacaaggcaacatcacacaactcccaaatccaatttacgggaacaag

SEQ ID NO: 662950 - DNA, 605 bp, Homo sapiens
ctcagcaggcatgagtatggccaccagctacctgggtgtgtcggtagccttgggattttttggagctgtcctcacccccttattttgtttgtccatatctacttgtcttaaaaccgaaggagccttctgtctttgtggccaatctattcaccagtgcctccccactaactgaactgaagtatgcccagacgtcctcagagtccctggcaatctgtctcttccagtagcaatccatgggcatttcatcttgcccaggatgaggagggctatccaattaattctccttctcacgggactcggcattatagctgatacaggaactgaaattgctagaattataaagtcstttttaatctatagccaactctcaaaggaaatacccaacaacattgatgccatggctaagaccttaacaaccatgcaagaacaaataaattatttagcagctatagtcctccaaaaatcatcaagggctagacaggttaatggcagcacagggaggaatttgtttagcctcagatgaaaaatgttgcttttaggtaaaacaatcaagaaacgtacaaggcaacatcacacaactcccaaatccaatttacgggaacaag

SEQ ID NO: 662951 - DNA, 575 bp, Homo sapiens
gtatctttaaatttgtcttattcctaccatagactaggtgctctgagggcatgtttcttccactgaattgtmatttttaaaaataggactttggagatttgttttatgtataaggcctgctaaaaacactaaggaaaaaaaaaactcttttgtaagagggtcttaagtgaaatattcactgaaatctgagaaatcttgagaagtcgaagttctaaagcagatggttgctctctataactgactacaagtggttttaatggtagcgagttgcttttctcacgtgacaggactctagcagcaaataattctggaggtggtacagaggcttggggaaatcaataaggaccagcactttctatccttctgtgtgttgggattgctttcccttatgagaggcagaaattttatagcttttctgtctatatgcctcttgaaggaagaatctgttttaaaatattttactaatgtctgaaccaccgactttgataacataaaacacaacttcaagcccaaatgtaagtagaaaagacctttcaaaatcttcattcatttattcagtcactcaccaaacattt

SEQ ID NO: 662952 - DNA, 595 bp, Homo sapiens
gccattttaattacataccataatgtcactatgaaaaattttgagagttactctttagagcataatgttcttttagtatacacagccagatctgattctcaagactctctttctctccccaaatgcaaataatttaataagtttagaattttcagtataagtattcaccatgtctactgcctctctgcataattttcaatataccaccaccaccaccttaacatatgcaaattcaaataacttactcttcatggcattgaagmgactgtgaaaacaagaaaatatactccaagtacagtttatcttctccataaaaaaatctcagactcattctaaaataataattatgattactcaggggctcttaaacaagtattgtaagttaataaaactcctacagagccctctgaactcacaagattctggtgttctccagaagtagggcacccagctaacaaatagtcaaatgaaacttgaacacaggtgtggctgatgtctgtgtaggaggaaagcagtgatttttacccaaatgggcagcccttttctaggaatctccacactcctgtgactgtactcatagctggcctttctctca

SEQ ID NO: 662953 - DNA, 544 bp, Homo sapiens
catttttaacagcagcagcatctcctctgggatgactccccggacaaagttaactgattgatattcattctttgtctctctgcctctctctctctcaattgcattgtagcacttaccgtgttgagctgtgattaatacttaygtatgtgtttttcccaactgcactagctgctccttgatgactatctcccagtctttgtatacacaatacccagcatatcccaacacattctaggtcctcaatatgtctctgaattaaactgaacaccagactaagaagtatgctattccttacgcaaagttttaagttgctgtctctgggcctttttactttgctcagtggcaatctgtctgtcctctgttccatacgccaggggtttttactatcgctcatctttaaccagggataagtatatcagctgttgtatttaatccaaatgggttacatacatttcaaatctgtcttctataattatggagtaagggtttttcttcctataaagacttttacgtgtgaggagaagttcactgacaattagctaat

SEQ ID NO: 662954 - DNA, 544 bp, Homo sapiens
catttttaacagcagcagcatctcctctgggatgactccccggacaaagttaactgattgatattcattctttgtctctctgcctctctctctctcaattgcattgtagcacttaccgtgttgagctgtgattaatacttacgtatgtgtttttcccaactgcactagctgctccttgatgactatctcccagtctttgtatacacaatacccagcatatcccaacacattctaggtcctcaatatgtctctgaattaaactgaacaccagactaagaagtatgctattccttacgcaaagttttaagttgctgtctctgggcctttttactttgctcagtggcaatctgtctgtcctctgttccatacgccaggggtttttactatcgctcatctttaaccagggataagtatatcagctgttgtatttaatccaaatgrgttacatacatttcaaatctgtcttctataattatggagtaagggtttttcttcctataaagacttttacgtgtgaggagaagttcactgacaattagctaat

SEQ ID NO: 662955 - DNA, 626 bp, Homo sapiens
atttatctgaaacacaggaggttcccctgattgtaatctttgagttgatgtgtccacagagggagtaaatatttgaaggaaaaagcaacattgccagactagtacagcactatcagagatttattttgtggwtagtatgaaaagtaaaaagagacaggtgatgacaggttttcagagcaaaagccaaagccttcaaagaggagacctcagtgttgcattttccccaaaggaaaagttgctggagcttcttagcaaggaggtgagctcttatttacatactcatcatcctgggctagttttggccttccttatattgtacctacccttgccttaaaatatccagccacagaatgtggcaaatagtgctttctttccagtgagttaaccaagaattatttccagtgagttaattctgcattactgagtgcctatagtgtgcttagaagtgtgtgttaaatccaattggggaataaagatattcaagtcatatgctcgctcctcatggaatttacggtttaagaagacaataaaaagtttagccaggaacagtggcaagcacctgtagtcccagctactcaggaggctgaggtgggaaaatcacttgaacctgggaggcagagactgca

SEQ ID NO: 662956 - DNA, 595 bp, Homo sapiens
ggtgtctgctctgctctgatgcagcgttttaccagagctctaaggccaatcagtccaacaatgattgaaatctctaccatatctgcttaatattgaaaatacatcctgtatgatgattgacccttagcagtaggcttctcatgctgatgcaggcatcttttaatctgacttacatctcatcgtttttcctcccttctcactatcycctgaggaaacccacccaccacccgagctccaaagtaagcaagcccatctacaacctgcacgtatcctcagaatgtttcatccacctcccagtgttattggaatcatggctatcctgttatgacagtcctcttgagaggctaaaaatcagaatacacctacagtcaactgctctggctcactgcatacctaacccccccacccaacacaggtcagaaaccaaactgggaaaaaaacaagggaaataaagtgtatccaaattcctttagatctaaaacttcattctttataagaaaataagcaagagttcatttcatttttatgccaagaacaaacagttttttggttttgtgtgttgagcatcaaccacaggatttgcacaagaacagga

SEQ ID NO: 662957 - DNA, 564 bp, Homo sapiens
gtaaagctgacagctagacaaagcaaacatagagacagatcctggtgataatatttgagtactggaycaaagtacactggcagcaataaatttatgtgaaccaataaattcccattttgcttaaagcactttgggtgggtttttctagcacttgtattctaaagaatactaatgaacacacacatgccttgctcgctctgtcctccattatcttccaggctgaaacaggttgggtcacaggagctgtggatctccctaccttatgcctttcagcaagggctgctgggatttctctggcagatcaccagtcaccctgccatgagtgaatgtcctgggtagggctccctatgcctttatgattaaaggccccaggttacaacttgccctccctgcatctgtttcctatggcaggaaggcaaatgccccgtaagagataactggggaaattcctagacttgaagctctgttactgttgcaataacagatttcagctttttctgtccccactctgtcagtatcacaactactcaaaatcaagaaagaagaagattagggacccagtag

SEQ ID NO: 662958 - DNA, 564 bp, Homo sapiens
gtaaagctgacagctagacaaagcaaacatagagacagatcctggtgataatatttgagtactggatcaaagtacactggcagcaataaatttatgtgaaccaataaattcccattttgcttaaagcactttgggtgggtttttctagcacttgtattctaaagaatactaatgaacacacacatgccttgctcgctctgtcctccattatcttccaggctgaaacaggttgggtcacaggagctgtggatctccctaccttatgcctttcagcaagggctgctgggatttctctggcagatcaccagtcaccctgccatgagtgaatgtcctgggtagggctccctatgcctttatgattaaaggccccaggttacaacttgccctccctgcatctgttycctatggcaggaaggcaaatgccccgtaagagataactggggaaattcctagacttgaagctctgttactgttgcaataacagatttcagctttttctgtccccactctgtcagtatcacaactactcaaaatcaagaaagaagaagattagggacccagtag

SEQ ID NO: 662959 - DNA, 595 bp, Homo sapiens
tgttgtttctcagccatttttccactaggtcatatggctgtactgatatgacatgttagtgtttttcttctaaaataaaagacaacaaattatatttccacaaactcaaatattcctaacactgagcccttagtcaaaatgattatatttctaccaccctacaaagttcaaatacccaatatgttttaatgctaatgacttaatctctaaccataaaaaaataggtccctgattgccccttttctccccctccgcygccagcatcactcagtaaaagaaggagccttctggtcctcctggcccagccacagcttccacagtcaaggatactttcaggcctcagcaccctacttcctgccctgctacacatttgaacatgtggctgttacagaaatcctactttcctcacatccagcttccattttctttactaaatggtggagttttcatttggtgatctttccaacgattcctggtagacttctgaacaaacccaccatgggcaaacatttcctcttagtgaaactccttgtcatcctgacactgattattgtttttccttattgtagcccttgatgatggcaaagtaacactc

SEQ ID NO: 662960 - DNA, 615 bp, Homo sapiens
aggtggccacttggtctagaatggacatcgtctgccatgcgtgggaggtgagagtgtgtgcacagcagcataaaaagatcattggtttcttggaacatacaagaactttctatcatgaggtcaaggctgttctttcaaacgattctattaaaaaatcattgccatttgaaagtgcaatccaatagagtgaaatcatcctgaatgttatccaatcccttaaagtatgcagcaaaaaattttagtgttcaaaattgtacttttatgtcaaatagaatgacttagaactatattcttcatatattgtggtgtctggttaaaaaaatgtagaaagtatgaatagtatggcacgtgtgtgtgtgtgtgtgtgtgtgtgtgtgtgtgtgtgtatttttaaggtatatctgtgatcrtgtttgtttatgcaggggttatctctagaaagatccccaagtcgttggcagcagtggttgcctgtgagaaggtgggctgagttgtgagttgactcagcttccagtctaccctcattttaaggtgccatcctggccgtagaggttagaaagatgaagactactttccctgactcctttgcagctagaatcttgaaagtgaatgtag

SEQ ID NO: 662961 - DNA, 579 bp, Homo sapiens
gtggggttatgtggtaaaaaaaaaatgattagaaatgtcctgatgtgtcagacatctcaaccataaagctcacttaagccttctaaaagtttatacttaagtgatcaaaattctaaatttctaccagtcagagccccagccatgaaaatttaaggcaactgggaattcaacttacctgtacatggccctctatgcactatgctattgcactgcctggagtacagcagtgccagcactaaattcaagctgaaagtgttttcttccacagagtgacatggttgtaccagttaggatacctttgagtacaaaggtccgaaacttaactaaatgagcttccataatgggactttgcttccttatacaaccaaggtctggggtaagggagctcccagtgttactccaagagctcagcagcatcactgaagaacaaatgtcttcccatcttccttttctatcatactcagcacagctttaggcttgcccyttaacagtcagaagattgttactactgtttcaagcatcatgacaatcaatatagcattccttctaaggaaagggttattaagcatttatataatt

SEQ ID NO: 662962 - DNA, 622 bp, Homo sapiens
gcgtgtacacttgggaggatgtcctgcctgtgatgttgtctttcaggggaagaagaatggttgagaactgagggtatattaaacatttactcctccagatttttcaagatttctgttaagccagatcagaagaaagccatctatttggattgcatcactctaacctggtaagtcgaattgtctacacagaattataatttcacgatatgtccagattacttaccragagccaatttgagacaccaacaggactagtaaaacatctttgcactgtgggtagcgttgctatcaaagaccttatacattatgccattcaagaacctttatattaagatccttatggaaaatccttcccaaagtttaaccctatgataaagggtttttttctcctggtaacatagtgggcaattgggaactgtttaacccaatgcattgatttcattgattgttttggttgccgagaagtatggatgctcagaataggttttcttgttttcaactgctaattcctttatttaaattgtaataaatgtttccctttacttctttcctttttctttttaagaaatttaatgtatttcataataaattataaattatcaatagatcaattagcatagaa

SEQ ID NO: 662963 - DNA, 626 bp, Homo sapiens
gggtcctgatttcaagactacattattttgtgctgagtgaaacaaatgaaarctaactaaagtaagtataaatgaaataagatttgtaatataggtaaagcaaagtgccctaggagagcaggaatatttctttccattgtcagatataagcatgatatttgtggtgggccttgaaagactagaagaataagagatgtaaacaacaagacttaaaggcataaaatggtatattatatttatggacacttggagttctcactattaagtgggaggtattgataagaacacatggacatgtagatgggaacaacacacaaaccggggccttctggagtgcagaagttgggaggagggagaggatcaggaaaaataattaatgagtattaggcttaacacctgggtgatgaaataatctgtacaacacatccccatgacacaagtgtacctatgtaacaaatctgcacctttatcccttaacttaaaagttatatatatattaaaaaaaaacagtgaagtttgaagtgatgctaaaagagcaatctggcaataggacatgaaaggtcatgatgctatgtctggaaatctgaaacttactctgtggatgatagagccaaaaatattttaag

SEQ ID NO: 662964 - DNA, 626 bp, Homo sapiens
gggtcctgatttcaagactacattattttgtgctgagtgaaacaaatgaaagctaactaaagtaagtataaatgaaataagatttgtaatataggtaaagcaaagtgccctaggagagcaggaatatttctttccattgtcagatataagcatgatatttgtggtgggccttgaaagactagaagaataagagatgtaaacaacaagacttaaaggcataaaatggtatattatatttatggacacttggagttctcactattaagtgggaggtattgataagawcacatggacatgtagatgggaacaacacacaaaccggggccttctggagtgcagaagttgggaggagggagaggatcaggaaaaataattaatgagtattaggcttaacacctgggtgatgaaataatctgtacaacacatccccatgacacaagtgtacctatgtaacaaatctgcacctttatcccttaacttaaaagttatatatatattaaaaaaaaacagtgaagtttgaagtgatgctaaaagagcaatctggcaataggacatgaaaggtcatgatgctatgtctggaaatctgaaacttactctgtggatgatagagccaaaaatattttaag

SEQ ID NO: 662965 - DNA, 626 bp, Homo sapiens
gggtcctgatttcaagactacattattttgtgctgagtgaaacaaatgaaagctaactaaagtaagtataaatgaaataagatttgtaatataggtaaagcaaagtgccctaggagagcaggaatatttctttccattgtcagatataagcatgatatttgtggtgggccttgaaagactagaagaataagagatgtaaacaacaagacttaaaggcataaaatggtatattatatttatggacacttggagttctcactattaagtgggaggtattgataagaacacatggacatgtagatgggaacaacacacaaaccggggccttctggagtgcagaagttgggaggagggagaggatcaggaaaaataattaatgagtattaggcttaacacctgggtgatgaaataatctgtacaacacatccccatgacacaagtgtacctatgtaacaaatctgcacctttatcccttaamttaaaagttatatatatattaaaaaaaaacagtgaagtttgaagtgatgctaaaagagcaatctggcaataggacatgaaaggtcatgatgctatgtctggaaatctgaaacttactctgtggatgatagagccaaaaatattttaag

SEQ ID NO: 662966 - DNA, 556 bp, Homo sapiens
tcccataactgaaattcattgtacctgtacattaatcaaagaacaaaattgactgtcatgtgatttgactcatgctaaaatgtccctcacaatgaaaataatctcttttattggcccctcacagtgtttaaaatttttcaccatttaaaaaaaaattgacttaaaatacttcatcttctgacatttttgttcacaaaaatagtaaaagtaaaggawaaaggtagataatataccaactttgcagggtattgcaggaagttcagagagggaaagaaagaggaactataaatagttatcataaattacagctaaatattttagtttagcataaagagggtatgatgaatgtaaacaacatcacatatagttcaaagtagagttgtggaattacttttccatgacaatgtttaagaattgtacagctttgctgttatctagtgatgtgtccccacccaaatctcaccatgaattcccatgtgttgtcagagggacctggtgggaggtaattaaatcatgggagcaggtctttcccatgctgttctcatgatagtaaatt

SEQ ID NO: 662967 - DNA, 556 bp, Homo sapiens
tcccataactgaaattcattgtacctgtacattaatcaaagaacaaaattgactgtcatgtgatttgactcatgctaaaatgtccctcacaatgaaaataatctcttttattggcccctcacagtgtttaaaatttttcaccatttaaaaaaaaattgacttaaaatacttcatcttctgacatttttgttcacaaaaatagtaaaagtaaaggaaaaaggtagataatataccaactytgcagggtattgcaggaagttcagagagggaaagaaagaggaactataaatagttatcataaattacagctaaatattttagtttagcataaagagggtatgatgaatgtaaacaacatcacatatagttcaaagtagagttgtggaattacttttccatgacaatgtttaagaattgtacagctttgctgttatctagtgatgtgtccccacccaaatctcaccatgaattcccatgtgttgtcagagggacctggtgggaggtaattaaatcatgggagcaggtctttcccatgctgttctcatgatagtaaatt

SEQ ID NO: 662968 - DNA, 635 bp, Homo sapiens
acattaacatcagctattcagactgcttcttatcatgtggacatgtgaggtggtagagacaataatagcttgcactactgaattagataaaacatattttatcaacaaaatggtacatgctcaccattgtttctgaacatttattgacacacttcttttttgagaggagtgggttcaagataaattttctattcttgaaagatagatgatagataatagatcaacatagttgatacatatatctaagatacaatatataatatttattatatatcttgtcttctctatggccatacatcctgaacacacccaatctcatctgayctccaaatgtttaaaaattattacatgccatcattttgagcaacatccaggtgatcttactgtgtcaaaaagggaagaaaaagaaatcataataaggaacggtgcagacctggcttcactaaggtggagatggccaatgcaaggacacagagaaaccatctcatgtatatgccacaagtagcaaggattcccagaaaacgcatgaagaaataaaactatcctccctaatagttctgtcagcctactcatgaaagcatgtcttttggtagtgaagaagaatatttccctgaccctttcacaggactcacaac

SEQ ID NO: 662969 - DNA, 413 bp, Homo sapiens
gtttttaaatgtgttgccttagagaaagcacaatttgctattatattttttgatgcctrtagttatccttttcttaaataacagtggctgaaatagatgcacagcaaaacataactcacctcaagaatttaccagagtcattcgcaaagagacagcaagttgtagttgaaagagaattggtcatttggtcgatcttgcctcttcggagcctaaatattgcttgtgcacagtgcaagaacatatttgaaagacagacatgatttatatttattgtatgccattctctgggcaaacttgggtcaagtatgtaatcaaatatatctcaaagtggatcctctgattactatgcttaaatcatctgggtgtttctttaaaatgctgtttcttaacctaccatagacctaagagatcag

SEQ ID NO: 662970 - DNA, 602 bp, Homo sapiens
agaatacctatttcatttgcagaaacactgaggttccaagcaaagagaaattgcaactctacmcctcatgcaagcctaaacccaaaaggtactccttctgtagcaggggatgcagtcaccctgaagtgttccaaaaaggctacctgtaggtgtaaccatgctgagctcccaagggcaaagcctcggctgtgtctacagtggtgtacaatgagagaaaaaaaagtttccttctccaagatccttcagaagcaccagggctgcctgacttttggggtagaactgcagactttccccactgagcccagcactgtacctgttcctctgctgaaagcaatttcccatccacagaaagttctgggactcaaaaagcctgttatctggattcttttgtcccatgcatggggcagtcccttgacatggtgcattcccccttcccgtaggagtaggagtccctgagagccagactactgtgaatgctgctgctcctctggatgtagccatctagtgggaatgctacactccaggctggagctgccaaatgtctgcaagggatcttgtgatgtgacctgtcttctagtctcccaacaacaggtaccagtgcc

SEQ ID NO: 662971 - DNA, 419 bp, Homo sapiens
gggtagtgttaaggccttcctctgcagcctagatttcaaggttcccaggaggagtgtatatcctggamacagtttatctccctctcacactatagggactttttttttctacctacttcatggtgtaggctacagcctgccacttatttcaaagtgtcttttggtttctttcagttttcctgttaagtttctgtgttgcttcttagaaaaaagttacagtgtgaatctctgtatgctattctgtctttccaaatgggaaagacatgctaacactgccttcaatgtaccatcttggaagtccttataacattctaagtgtgtcaatatgcatgagcacttctaaattaaaaactaaaaaaaaaaatttaaaaatccatacccacacacataccttcaagtataactactgagccaagtgt

SEQ ID NO: 662972 - DNA, 593 bp, Homo sapiens
acatttcactggatttctttatgttttatatacaataaccaattttaaaaggcagtaactttgggggtgggaaaattattactgcccatttcatttttttgaaaatgattcttcacattaaaaaaaaaattatttctctttgtacctgttaaagcctatcraaacatcattacaatctgggtttctttctgtcactgaattttgaaagtatgtatgcttttaaatttcttctcttgaggttgaagattgtcagctccttgagagaggagattttgtcttatttgtctttgtaccatctctgcatctgcttggaaaagattaatttttcaaggaatgactaaactagattatttccactatccattaggttattgaaaaacagtctatattgaagataagaaactgtttcttagagcttctcagacaagaaactttcttagagaagaaaaagctttggaaataaaaattaatttcattaattaatgaaaataatcttcattgttcaagttgcgaaaatggttgtgttgcacttgtccccatcatcatgacaaatcatggccttactcaaaagtcactgttgaaccttatgatac

SEQ ID NO: 662973 - DNA, 617 bp, Homo sapiens
ttcagcccttgccgctttccctctctcttgcatctagtggtccccagtgctcattgttcccatctttgtgtccatgtgtacccrgtgttaaactctcacttataagtgagaatatacaatatttgattttctgtttctctattagttcacttaggataatagcctccggctgcatccatattgctgcaaaggacatgattttgctcttttttatggctacagagtattccatggtgtctatgtaccacattgtctttatccaatccagcacagatgggcacctgggtggattccatgtctttgctattgtgaatagtgttgtgataaacacaggggtgtgtatgtctttttggtagaatgttttattttcctttgggtctatatccagtaaagggattgttgggttgaaaggtagttcaacttttagatttttgaaaaatctccaaactgctttccacagtgactagactaatttacattcccaccaacagtgtataagtgaccaaaagacatgggcagacacttctcaaaagaagacatacaagcagccaacaaacatgaaaaaatgctcatcatcactaatcagagaaatgcaagtcaaaaccacagtgagacac

SEQ ID NO: 662974 - DNA, 617 bp, Homo sapiens
ttcagcccttgccgctttccctctctcttgcatctagtggtccccagtgctcattgttcccatctttgtgtccatgtgtacccggtgttaaactctcacttataagtgagaatatacaatatttgattttctgtttctctattagttcacttaggataatagcctccggctgcatccatattgctgcaaaggacatgattttgctcttttttatggctacrgagtattccatggtgtctatgtaccacattgtctttatccaatccagcacagatgggcacctgggtggattccatgtctttgctattgtgaatagtgttgtgataaacacaggggtgtgtatgtctttttggtagaatgttttattttcctttgggtctatatccagtaaagggattgttgggttgaaaggtagttcaacttttagatttttgaaaaatctccaaactgctttccacagtgactagactaatttacattcccaccaacagtgtataagtgaccaaaagacatgggcagacacttctcaaaagaagacatacaagcagccaacaaacatgaaaaaatgctcatcatcactaatcagagaaatgcaagtcaaaaccacagtgagacac

SEQ ID NO: 662975 - DNA, 554 bp, Homo sapiens
tctcagcaagaaacatacctgtataaaagttcctttcatcctttttttccatcccttcttcctttttagtccttacctctccagctcaacccactgtgtatatacattgagataccaarccttcttttcccaccattcatcctcgcatccattgttagatgagctggcattctatcagaggaggcaatggagaaagagctgccaggacaatttgcccaatgtaatatttggccacaactagggaaaattaattatcaccttgacagaagtctgcttttcctttggaaaaaatatttaagcccgactatgattttcaccttgccaatatttctcaaaaattatgctactgccatgctgaatgttttgtaattccctacacatttcatgcaatttctaattttcctgactctgcctagaagtctccctgcttctccacatccatttgcctgagtctcttccaccagtcctttaagacgcaggtgaggtaacatgttctccagaaagccatttctgacccctcagtctatacgaggctcactgaaaacttttctata

SEQ ID NO: 662976 - DNA, 486 bp, Homo sapiens
aggatgaagcctctgatgatggacagaaaagaaagacagaaaaatagagcctctattaatggacacttctataaccatgaagtaagtgagttacaattccattaatgtaatataaaataaggttccctgtttcactaacaataccacccaattcaattcacaatttaaagtcataataataacagtagcatgtctaacatcttgggggcactctctatgtgctagatattaaagtaaatgtgttttaaatagatttttactgaattatcttattaatcactaaaacaatcctatgaaataggtaccattattttctttacttgacatataagctaattgaggcttatggagattaagcaatttgtcttagattatgctactcttaagtagtaactctcaacctgaacccagytttgtctgactccagaacacaagtttttaaccaccatgatgggtgaactctatcactgtgccaagtattaaaaa

SEQ ID NO: 662977 - DNA, 571 bp, Homo sapiens
cccgcaacatagcaagagaagaaatataggcaggaaaaaatcctcttctaaagggaaacaacgaagttgtttctaaacagcgaataccaggtagamttttcagttggttcctactggtgtgtcacttttaaatcttgcattgattctattatgctgaatacctatgtgttaatatgcactgggagttataaaagagaccagagagataatagcaactataggtacccagagcaattgttaagaagctaaatgacataggaaaagcaggttgcaatgtgaactaactagtgagaaaataagagaagactttcttcctcactctaaatgtcctatagcatattttctaaatacgaaagaaagagggaaccctttgtgacttcagatcatctggaatatgcaaacctgattaatgaaagtatctcagcctatgtcttccttgcagtctttagatgtcttactaataccagtgttttcacatagattgattggctttgaatcaattcaataagccacctcgtctaactcttcccgtcaaggctaacagctataattttctctaaaggctactggg

SEQ ID NO: 662978 - DNA, 590 bp, Homo sapiens
tctaatactatccaaatcggtggagtttggagtttgaagtttgaagtttaggtttaggggaagacaccagttgtgtaaacaggcatttattaaggacttagaaaggctaagatcagccaatcttcaatatgaaaaaaaaaagtaaatatttacttgtagctatttcttttctttgttmaatttattaaaaaaaaaaaagggctcactgtggtggctatgcctgtaatttggaaggccaattcaggtggagcacttgagcccaggagttcaagactagcctgggcaacatgatgaaactctgtctctacaaaaatatacaaatattagccgggcgtggtggtgcatgcctgtagtcccagctactcaggaggctgaggtgggaagatcacttgagccagggaggtcgaggctgcagggagctgttatcatgccactgtactccagcctgggtgacagagagcctgtcgcaagaaaaaaaaaaaaaagtaaaacaaaattatgtgtagacctaatttctttattagatttattctaaaacacttaggcattatttactccaatgtttacaaaaaaaatgtatctttgacatg

SEQ ID NO: 662979 - DNA, 679 bp, Homo sapiens
ttcaatgaagtaaggagctgtaattggaggccatggtgatggtgtgcattaccatcagacgcctattccctgcccccaagaaaagaaggaagtgcttcctgcgctcttctcttgccgacactgtttcctcttgcctgatttcctcatgactctcagacaagttgcaaccgtttaacctgtcgttgtgaaacaagtaatgtggttggagttggaaaaatactaagaaaaaaaagtaagaaagaaggaaataaacccaactgatttgctctgaagcaaaagcatcaaacttagtgaatattgcttgaaaatatatgtagagaggcttaactttcccatcactcatccatttaacagatatttacagaacactttctatatcccaaacacttttctaggtgcttgggaaaggttaatgaatatcacaaatagaaatgcctacccttaggaagtgccttcggtgaataaatgttatgaaaaaataaacataaarcagatgggggaattaggggagtcaggtgtgtgaggagtgagcagactgcagcattggagagtcagaggaagcctccttgagagattgatgccgagctacaaatggaagaaagtaggaattggctctgactatgtgggcgagcattccaggcaaagggacagtgagagttaacagttagttgggagcatg

SEQ ID NO: 662980 - DNA, 616 bp, Homo sapiens
atgtctttatcagcagcatgaaaatgaactaatacaatcacttattgtcatacctaggatttgagaactataggtgtgtttagaagtcatctcgtccaaatcctacattataagattctaatctccatttttaacttgtacaaatgttgtgtatttcaaacctaaaatagaactacaatttgaagagttgtaaatatttgttcatgtttttatgggcaagagatttctacttacaaagtgaacaaagattctaaatgtcaaaaaggacaacatttttagtggcacaagagctaaccyatgtgttaagacccctttagagggctcttatcaaggaaactcatataaaatttggaattttatctatggactaacctaatcatttgatcttctatttccctttgactgaaagatgtagactacagttttcatggtaaaccatttataaaacttgattattaaaatcatcttgttgcgtgcttagcagaccagataaatctcagttaatagactctgtcctgcaatattaaaggctgataattaagcatattaatttattttacataatttatccttgctttaaagcacttcccaagtggtctaaactgagcaggacttc

SEQ ID NO: 662981 - DNA, 541 bp, Homo sapiens
taagctaccctagggcaaggactaggtcttgtctgtggaggacagactacttagcatggcatatgtggaacacatggataacttttctttgatggattacttttgtctaaattatcaagtcactgttatagacacagttgctgcctagaagaattcagacaatttggtttatatatatagtggcattagtaatattttatttaaaaccttcagaatgccagcgttctacgctgtaatccagtcagtagaatgttgtgggttttttttgtttgttgtttttttttttgaaaaaagcttgaaatcaaaggcaaaaaaggtctgaggggttatttyaccagggttaaggcaaggcctttctacagagaagctgccttccagtggccacattgctggagtctcttcagtgctcccctcaactcctttattttctatttcatgaggtaattaattttttacaaaaaatatttacagaaaactctgatttactataactccttagcaaaatatatatatatatattcggttggatataatataaaac

SEQ ID NO: 662982 - DNA, 317 bp, Homo sapiens
ctttatccccaactctttgcctgccaaatgacataggagcaaasgatgagagggagctgtcctggagggaagtagtacctgcaaggtaatcagacctttcatactactcagatcttgtggccatctcatgtgtgattatgttacaaggatgtttgttttccttatgatttcatgctatatgaactcaatctcaggaagaaaaagaaagaattttcaaggctcatcctgctactgatgagttttgttttagaatgttgcctccgagatgcctaacgccatgcaggagagaaagctaggcaggcaaattaaaacatggg

SEQ ID NO: 662983 - DNA, 600 bp, Homo sapiens
acacagttctgattacactatttcctctgtggctacaattgcctcagtttattttgcagagtcttctttctctttcattttattttaattgctgttcctcaggcttctgtctctgtctttttctttattcattcattcaaattcctttacacaagtaaccaattatttactaataactcttagactgcycctgaattaagaaactgtgtttctactgtctcctggacatatttatttacatggcttatgattcacctccctcaagtaaatccaaagccaatgcatcatctccctcttggctccagatctccccttctcttgttgtgaatgaaaccaccagctacttcataattcaagcaggaacactgggctctcttctggacttgtccctgtctcaccacccaaatcctatcaataaccctccaaaccctatttgtgtccactgacattttacctgtctacatactcatcatcccttgcctggattactagaaaatctcattttctgcctcaagtcttggtacactccaggccattctctacactgcaggcagagatgatcttcctaaaacacatatcagatcatgttatttctcatct

SEQ ID NO: 662984 - DNA, 498 bp, Homo sapiens
ttgggacggctttcccattgctcttaggataaaggctaaagttaggttgggtgttataaggccctccattaataggctcctaccaagttctgcctagacttctgctacacttacactctaacattctatcatttctgcagttcttaaaagttatgttcttcaaagtgatacattttctagaattctgtgcttcagtaagcttatcccgtttctgggaacactctcccttcacccacacaggaaggctttccacacatttttacaatatttatatgagttcttggattaaagtagtttaattttttcttcttctttttgctattttattttaartgtttaaatgcaatgaacatgtatcacttttattactaaacagctagtcatcaacatatgcataccctgtgattccactctggatatatacacaatagaaacgaatattttttcaccaaaggactcaattaattgtgggagaggttttccctttcaaattaaagg

SEQ ID NO: 662985 - DNA, 427 bp, Homo sapiens
cagagaaactcagaaacaccacctcacccttgcccctctgccctgggacccagatccattgagatgaagtgtccaggctgttgaaaggtggaaacccctgccctcgctggagagccccaaggtcatctagatgccagaggcaaacacctgcaaggctggctgtcctaggtgctgtgacctcccacaccctgactattgaagtagggcagggagaggtgcagggatgtgcccgtgccacccaccccccttgctggtgtgcacagcgtggtgtgggtttgtcctctggcycctggagctgccatgggcaaggtgtgacactgccgtggtcagacagggctgccaggagggacagtgtgccctctgccctctctatggggccagaggtgggctggggggctctgcctactcaagtctgacaaaagggctg

SEQ ID NO: 662986 - DNA, 427 bp, Homo sapiens
cagagaaactcagaaacaccacctcacccttgcccctctgccctgggacccagatccattgagatgaagtgtccaggctgttgaaaggtggaaacccctgccctcgctggagagccccaaggtcatctagatgccagaggcaaacacctgcaaggctggctgtcctaggtgctgtgacctcccacaccctgactattgaagtagggcagggagaggtgcagggatgtgcccgtgccacccaccccccttgctggtgtgcacagcgtggtgtgggtttgtcctctggcccctggagctgccatgggcaaggtgtgacactgccgtggtcagacagggctgccaggagggacagtgtgccctctgccctctctatggggccagaggtgggstggggggctctgcctactcaagtctgacaaaagggctg

SEQ ID NO: 662987 - DNA, 601 bp, Homo sapiens
cattatataaatatttcactgattataaactgttctagatggttctaaattagtttcatgtgtgcaaatctagtttccctaacaacactttaagatccttggagacaaaaccatcttatattacatttgtactcccttaggacttatcacaatgctaggtacatagcagatggtcaacagtagcacggtggttgaaatgaattgaaagtttaaatgtcaattatctttagtcctattaatattccctaaataactgctttaaatttctaatatcatttacactaataagtaatttcaagatgaaatttgcttgtataacatgcaaataatgcagtagtctttttcttgatttatttccttccatctctcattcctatggarccccccaaaattttataggttcttcattatcatttgcagtactcatttttttcctgcaaattggctactccaactttagttttaattacttagaccccaaacatgttgagtcatggtgttatcacaacaccctgcagagatccctgggagggaatgtgagttcccacctacagctatgtgtgacttcaagcaaatcatttaatatgtataagcctcagga

SEQ ID NO: 662988 - DNA, 528 bp, Homo sapiens
gacaaccatcacaaccagctttgctgacctgcataccctacctctaacatgcactgcccaacccagcctgtatactctaccgccgatgtcaattcccatgctttgccttaaaaaaataaatcctggccgggcacggtggcttacgcctgtaatcccagcactttgggaggccgaggcgggcagatcatgaggtcaggagattgagaccatcctggctaacacggtgaaaccccgtctctactaaaaatacagaagattagccgggcttagtgacgggcgcctgtagtcccagctactcgggaggttgaggcaggagaatggcatgaacccgggaggcggagcttgcagtgagccgagattgcgccactgcactccagcctgggctacagagcgagactccgtctcgatttaaaaaaataaaataaataaataaataaataataaaataaaaaataaatcctaccakctctttttggggaaccagctcggggattcttgtgcctccactgtctgccttgcacttgagaa

SEQ ID NO: 662989 - DNA, 486 bp, Homo sapiens
ttgtctaaggtttttattttaacatatataaattaaatattcctaaaactctcagaaatataggaactaacccaaatgctttcaggtgtacrtgatttcagtaaatctgtaaatgagacaagtataatattgttggtttaataaaaacagctgtgttttcagagttatcagcattgagtaccatgctgagcacacgttttgcttctacctgggcttactactcaaataaactaatatatttaccaatgtttaaaattatagaatatacagatttgattttaattaaacagaatcattattctgacaaagtttatagcaacagtaattgtgttttataatgtttctgcttagatgtagttttcagaatctttttggtaacttgaaaccttaacggtatactaagttaaattaaatggcaggtattcactgaaaatctagatcacttctaagtaggataaaatattaacacattaattgctgatcata

SEQ ID NO: 662990 - DNA, 557 bp, Homo sapiens
tggctgccgtggtttttcatttctcctgttaacttgcaattcaagtaataaatagtgtcaagaaattcactctcattccacaaagatccaaaatatcatcttgttcaattgctgctcaaattggcgatatattactcacactaattccttctttaaagtggtaaacaacagtagtttctcattaggaaaaggaaaatatattaytaagatttcagaatcataactgataccaaagtgctagtggtagagaactttgcttcttaaggcataccttattcaaaaaagttggcattaaatctaacattgagtggttcacttctcttactctggaatcttagttctgtatcaatcatccaacctttctttttcatgtgttttttttttttttcctacacatgacctataatttgtttgcccttgctggaactggttgatacagctgggtttcacgagcctaagcacagagatgcaaagtgttaatttcacagttgatcatcagaatatttcaatatctggatcttttaaatcaaatgaacaaaaaatctagataactaact

SEQ ID NO: 662991 - DNA, 559 bp, Homo sapiens
gatccaccagtaacttcacaccagcaaatacaaaacacaaaatacaatgctttttagaataaataaaatagttcagagtctctacaacatattctttacaatgtccatcatacaataaaaaatttacaagacatgtgaaaggactagaaaatgtgatccataatcaagaggaagagtgaaaagaagcaaatgacctagactcatttcaaattaaaaataagaattttaaaataagtagttcaaatatgttaaagaatatacagaaatagatcattcagatgaaaattcccagagagagatgaaaactgtaaaaaatwgctaaaagaaaattctagacctaaaaacataattagaaaagatagcatatataaaattactaactcattgactggacttttaaaaaatattggacgcagcagaagaaaggatcagtgaacttgaaaaattaatacaaatccaaactaatgcacaggtaaacattttttaaaaatggagtatttgatacctctggaaaaagtaccaaatatttttttaaagtcccagaatgagaggagaaaac

SEQ ID NO: 662992 - DNA, 452 bp, Homo sapiens
aatgttcactaattacaatggaattaccatagatatcaaaacaaaaaggtaactagagcccagatatttgcaagttaaactactctcctaaataacacaggcaataaagatagagcaattaaartgtttaaatatttttaaatgaatgctagtaaagacccaaaatatcaaaatttgtgggatgcagcaaatatagaacttagagggaagttggtaattttaaatggataattagaaaaaaattaatgttggaaataaacaatctaattttttaatcccaagaagctaggaaaaagaagaaaaaattaaattcaagaaagtaaaagaaacaagatagtaaagataaaagcagaaaacaatgatacatacagaacacaacttttatcatttttctgttttttgtttatttgttttagtttatgtaagcatttggtgaaatttaagaactggtc

SEQ ID NO: 662993 - DNA, 549 bp, Homo sapiens
gagcaactgaaactctcataaattgttggatgaaatgtaaaatggcataaacactttagaaaactgtttagatacttcttataaactctatgacccagcaattccagtcctaggtatatacccaagagaaataaatgcrtaagtccacaaaaaaacttgtataagatattcatagcagctttatgtatattggctaaaaactgaaaacaacccaaatatacatcaataggaaggttgataaacaaatgacatatccatgcaatggaatacttagcaataaaaaaaagaactactaatatccactaacatggactaatctcagtaatatgttgactgaatggattcagaaatgaaaaaatgtatcatgtttgatctccatttacctgaatacctgaattagatgaatatatgaattatgtagaaaccagaatagtgatcacttcagaatgagagaaggggatggtgtttggaaaaggcataccattattttctgggttgatggaaacattccattgtcttttttggatgacgactacatgagcattatac

SEQ ID NO: 662994 - DNA, 609 bp, Homo sapiens
tggttgtagtgggcataggctgagctatttcagtgaagacaggtttgactgaacctttctcggggcaatggccacggggatgggtggaagtggctgtcagtttgctgggtttttgagatgctctgaacaggcaaatctcatcaagtggcttctccatctaaagcctgtgcctggcgtccctttgctgttaggataaaatccaaactscttcccaggcctatcagcctctctgctcacctctggctactctcctcctctcactccaatgtctggctacattggactttttccaattcctaaatactatcatgctatcttctgcctgcagtacgttctgccttgcaactcacactttattcactcatgcctcacccgtttctgacatctagtgtgtatatatccttcaggtatcagcttaaatgtcacttacttgagaatctgccttaacaaataccccttcccaaacttgcccacatcccgttgaggttagagaccctttctgtgtgtccccacagctctctgtatttgttctactttagcacttattaccctgtaaggcagttttggggtctttccccaacaattagaatgtaagctccaagatagtaa

SEQ ID NO: 662995 - DNA, 609 bp, Homo sapiens
tggttgtagtgggcataggctgagctatttcagtgaagacaggtttgactgaacctttctcggggcaatggccacggggatgggtggaagtggctgtcagtttgctgggtttttgagatgctctgaacaggcaaatctcatcaagtggcttctccatctaaagcctgtgcctggcgtccctttgctgttaggataaaatccaaactccttcccaggcctatcagcctctctgctcacctctggctactctcctcctctcactccaatgtctggctacattggactttttccaattcctaaatactatcatgctatcttctgcctgcagtacgttctgccttgcaactcacactttattcactcatgcctcacccgtttctgacatctagtgtgtayatatccttcaggtatcagcttaaatgtcacttacttgagaatctgccttaacaaataccccttcccaaacttgcccacatcccgttgaggttagagaccctttctgtgtgtccccacagctctctgtatttgttctactttagcacttattaccctgtaaggcagttttggggtctttccccaacaattagaatgtaagctccaagatagtaa

SEQ ID NO: 662996 - DNA, 614 bp, Homo sapiens
cgaggcaggtttgccctaaacagtcaccagcttgacttttcactttagcttagtgattttggggccccaagatttagtttcctttcacatttccgccttctcttttaaaaaaatcttttggagaaagcattttagaagaaaatgagtctctggtttcaggcttcatctgattcctagacaggtaggtccagagatattaggaaagctcatttttagcaggttgtgaagtttcctgtcctatgaagagaaagtaagaggaggaagggaggaaaacaacaagaaacaaaagaagaatcctggaaaatcaatataagccacattactctgaagttcatacatcagtagcaggtatgaaagtggctgatrtatgtaaataggttgctgttattttcttctgaagtttaagttgtctagcttcagttcacagggctttaagaaagcacagcttaatttttggtgactccaaattaggaaaaatgggggaaaaaagaatgaaaaaaattgaaaacattattttgaagacttctagccaaaaaaaaaaaaaaaaatcagtccaaactgtagaaaataataaaaattgaaaaacattaggcaagactagaatctaacaacag

SEQ ID NO: 662997 - DNA, 613 bp, Homo sapiens
actgttcacagtagcaaagacttggaaccaacccaaatgcccatcaatgatagactgcataaagaaaatggggcacatatacaccatggaatactatgcagccataaaaaaagatgagttcatgtcctttgcagggacatggatgaagctggaaaccatcattctcagcaaactaacacaaaaacagaaaaccaaacaccacatgttctcactcataagtgggagtggaacaatgagaacacatggacacagggaggggaacatcacacaccagggcctgttgggtttatagggggctggggaagggatagcattaggagaaatacttaatatagatgacrtgttgatgggtgcggtaaaccaccatggcacgtttatacctatataacaaacctgcaagttctgcacatgtatctcagaacttaaagtataataatttaaaaaaagaaaaaatgtaaaaaaaagaaattaaaaagagttggagcatagaagaaagaaaagaaatgcaatttgaagggcagtatgtgcagtgtaatctcatttgtggaaacaatttttaaaagaaaaatgcatgtaaatgtataggaaacttctggaaagatacacaaagcca

SEQ ID NO: 662998 - DNA, 613 bp, Homo sapiens
actgttcacagtagcaaagacttggaaccaacccaaatgcccatcaatgatagactgcataaagaaaatggggcacatatacaccatggaatactatgcagccataaaaaaagatgagttcatgtcctttgcagggacatggatgaagctggaaaccatcattctcagcaaactaacacaaaaacagaaaaccaaacaccacatgttctcactcataagtgggagtggaacaatgagaacacatggacacagggaggggaacatcacacaccagggcctgttgggtttatagggggctggggaagggatagcattaggagaaatacttaatatagatgacgtgttgatgggtgcrgtaaaccaccatggcacgtttatacctatataacaaacctgcaagttctgcacatgtatctcagaacttaaagtataataatttaaaaaaagaaaaaatgtaaaaaaaagaaattaaaaagagttggagcatagaagaaagaaaagaaatgcaatttgaagggcagtatgtgcagtgtaatctcatttgtggaaacaatttttaaaagaaaaatgcatgtaaatgtataggaaacttctggaaagatacacaaagcca

SEQ ID NO: 662999 - DNA, 613 bp, Homo sapiens
actgttcacagtagcaaagacttggaaccaacccaaatgcccatcaatgatagactgcataaagaaaatggggcacatatacaccatggaatactatgcagccataaaaaaagatgagttcatgtcctttgcagggacatggatgaagctggaaaccatcattctcagcaaactaacacaaaaacagaaaaccaaacaccacatgttctcactcataagtgggagtggaacaatgagaacacatggacacagggaggggaacatcacacaccagggcctgttgggtttatagggggctggggaagggatagcattaggagaaatacttaatatagatgacgtgttgatgggtgcggtaaaccaccatggcacgtttatacctatataacaaacctgcaagttctgcacatgtatctcagaacttaaagtataataatttaaaaaaakaaaaaatgtaaaaaaaagaaattaaaaagagttggagcatagaagaaagaaaagaaatgcaatttgaagggcagtatgtgcagtgtaatctcatttgtggaaacaatttttaaaagaaaaatgcatgtaaatgtataggaaacttctggaaagatacacaaagcca

SEQ ID NO: 663000 - DNA, 613 bp, Homo sapiens
actgttcacagtagcaaagacttggaaccaacccaaatgcccatcaatgatagactgcataaagaaaatggggcacatatacaccatggaatactatgcagccataaaaaaagatgagttcatgtcctttgcagggacatggatgaagctggaaaccatcattctcagcaaactaacacaaaaacagaaaaccaaacaccacatgttctcactcataagtgggagtggaacaatgagaacacatggacacagggaggggaacatcacacaccagggcctgttgggtttatagggggctggggaagggatagcattaggagaaatacttaatatagatgacgtgttgatgggtgcggtaaaccaccatggcacgtttatacctatataacaaacctgcaagttctgcacatgtatctcagaacttaaagtataataatttaaaaaaagaaaaaatgtaaaaaaaagaaattaaaaagagttggagcatagaagaaagaaaagaaatgcaatttgaagggcagtatgtgcagtgtaatctcatttgtggaaacaatttttamaagaaaaatgcatgtaaatgtataggaaacttctggaaagatacacaaagcca

SEQ ID NO: 663001 - DNA, 593 bp, Homo sapiens
atgccaataatagacagagagccaaatcatgagtgaactcccatttgcaactgctacaaagagaataaaatacctaggaatccaatttgcaagggacatgaaggacctcttcaaggagaactacaaaccactgctcaaggaaataagtgaggacacaaacaaacagaaaaacagtccatgctcatggataggaagaatcaatatcatgaaaatggccatactgcccaaggtaatttacggattcaatgctatccccatcaagctgccaattactttcttcacaaaattggaaaaaaagtactttaaatttcatatggaaccaaaaaaagagcccatatagctgaagggggccagcccctccacacctgtgggtatttcttgtcaggcaggatgagagactgaggaaagaaataagacacaaagtatagagaaagaaaagtgggcccaggggactggcactcagcatacagaggacccacactggcaccagtctctgagttccctcagcytttgttaattactatttttactatctcagcaagaggaatgcggcagaagagcagggtgatagtggggagaaggtcagcaagaaa

SEQ ID NO: 663002 - DNA, 547 bp, Homo sapiens
ttaagttgcttgctattaaacgagtttgctttttaaattgttcgctgttgccattcaaaagaccaccacgatggttaaatagcagaaaggagagctttattggtgatattggtttgtaagttgggaagagaaaccagcaaaccagcacggactgacggtggtctctctttgtagggggagggaacagcttgggttttactcctcatgggtctgtgttacacaatagagccatacatattcagcaggtttggggaaaagctatacatatttatgaggggagctgagcaaatgagcaacgagtaaacacacgttacatacatctcawgtttactttgaaacagggttttagcactgaaatgaggtggaatttggctctttacatcaaaaggttaaccgtacggcacaaagaccgtttgtccacagcctctataagctgactgaaactggcttaatgtttacagtagcttatcagaaaagagtgtttgtaaggccagtcctctgtccaatcagaattacagtagtctgggttataaatcagatttaggag

SEQ ID NO: 663003 - DNA, 547 bp, Homo sapiens
atagaggaaactaaggatgacgtggggatgtggatgtctcagtgtatgccagccttgttatatgatgaggaccactgcagcagacactgctggtgccccaactattttccctttctgcattcgacattcccacagacrgcagctgaaggtaagtacctgtggctatgctcgagggctttggctggccaaaggacattcagcttgggagcaggggaggccagaaatgccaggggattggcctggcatttctcatatctcaactaatcatatgctcaactaatgattggagcaggtagataaataatcccatcgtctttgcccaccactgggacaaatctggggcctgctttgtctctgagtcaaattccatgaaagtttctctggggagactgagccccagtagctagggttgccagatttagcaaacaaaaatacaggacacccactcaaatgtgaagttcagatgaatgatgaataatgtttagtataattatgtccatcgtaatactcaggacatacacatattaaaaaattatttgatgtttgt

SEQ ID NO: 663004 - DNA, 431 bp, Homo sapiens
gcaattagaagagaacttccaagctctcaccacatatctctccacccaaacacatctcttcccattcactctctcttctctccactgactctaggtagattctaggtgytcctggctaaaagtacccccaccctgtattctggtcctatctccttctgcctatcccaggaagctcctcactggtctacccttgcacccctgcattgaccagctcaccctctatcctggatcactgggatcctcctcattggcctattctcccccaactcccacattttttaaaacaacacaactctttgaaagggttgtctacatctactgtctcttatttgtttcctccccattttcaagttcagtcaagttttgtgcccctcccactccactgaaacctatcttgtcaaggtcgccaataaatttcacaccacaaaaac

SEQ ID NO: 663005 - DNA, 607 bp, Homo sapiens
tcactctgcacgccacctcccagtgcctgctgatgacttcctttagccaaacccagctagaagccagaaagcataagtctgttgatgatgttcatttgggccagcctctctccctggcctggagtggacaggtaaaatgtggatctagaaaggaaagagaagacacctagtacaggagccaacagaggaaagggacaaggagctgaactgctttaacatcttcctccatttgtgacaggaaaaggttgacaaaacaacatgtaagtattgagaaacatgcctgggggtgcagtgccttgtgatgcacagggctgcttactctgtgcaccagaattctgacyacagttgtcagcatgggccattccattttgagatccgttttgaaaggttattaacttgggctttacaaacaaacaagtctaatcgtatcctccttagaaagggaaaccctcttctaaatcatgaaacagtgtcgtggctttgtgtgaagtgtggactatggaagcagggtctacagcaggaaggcccgggactcataacactggagacgctttatggggaagacaaaaaatgtccttaaaccttggaggagatagatgcacacatt

SEQ ID NO: 663006 - DNA, 570 bp, Homo sapiens
tttctgaccccagaaggttcacgtccccaccaaggggcagtgggtgggaactgctgagatggaaytgtggtaccatcatggcagcctgttctggtcttgcaatccaacccagcaacccactctgcccaagtcagagacagtgccttgataaatatgcttgattgttccctgttttctcatgttggcatctttctgttcattattattataaaccagtttaaatccctgtgcaaatatcttgtttaattttattaatccattcaaaagagattagttgaggttttttccctgaaatttccaaattctttcactgaagtctaatccacaatagatgctaaataaatattggcttaatgagtgatcgaaggtcattgtttataaaaaattgtttcttaatatttgtattcctacatgattaagaatctgccagttagtcactaaacaagacttgtgtaagtatcagaaagaaagaaggtaaattgcatcaagttctgtgcaatgttttcacttaagcagtgttttccaacttttcctttcctccttctcctacctcttcctttacttcaacca

SEQ ID NO: 663007 - DNA, 582 bp, Homo sapiens
ttaatttacacacccacctgtccccttttcagctgacaaaaagtaattattttttacragttgggaaatattaaatgctgctccttatttaaaatactaattctggtgaaatgaccagttgccactttataacatacatcctttaaaaaaataaaataaaaacctatattattttcttcttaactgcaatgtcaagaaaatctgagatccagatgtctaaattcaagtggtagaatattgggttttatgtgaaagtgtataattacattatattcgtaatatatttcacacacactctttaattacaaagctttaattaaaatatttgtctttgtttattaaggttaatattcccacatgattgggaaatgctaatttttatgatctcccatggttctgcgttttacactgatgttgtattagtctgttttgcattgctataaaggaatatctgagctgggcaatttataaagaaaagaagtttgttttggcttacgatactgcagactgtacaagaagcatggtgccagtatctgcttctgatgaggcctcaggaagcttacaatcatggcagaaggaaaa

SEQ ID NO: 663008 - DNA, 582 bp, Homo sapiens
ttaatttacacacccacctgtccccttttcagctgacaaaaagtaattattttttacgagttgggaaatattaaatgctgctccttatttaaaatactaattctggtgaaatgaccagttgccactttataacatacatcctttaaaaaaataaaataaaaacctatattattttcttcttaactgcaatgtcaagaaaatctgagatccagatgtctaaattcaagtggtagaatattgggttttatgtgaaagtgtataattacattatattcgtaatatatttcacacacactctttaattacaaagctttaattaaaatatttgtctttgtttattaaggttaatattcccacatgattgggaaatgctaatttttatgatctcccatggttctgcrttttacactgatgttgtattagtctgttttgcattgctataaaggaatatctgagctgggcaatttataaagaaaagaagtttgttttggcttacgatactgcagactgtacaagaagcatggtgccagtatctgcttctgatgaggcctcaggaagcttacaatcatggcagaaggaaaa

SEQ ID NO: 663009 - DNA, 579 bp, Homo sapiens
aatgctaagtaactcaagcccaktctctcttgtatgtcctctgacatcagagggagttttctctccatagattatcaccagcatgaaaccactggcaatcaacactggtacttacatcccttacctcctttctggttcatcagaagtttgaaagtgctacaaataccatcagcaccataaaattattctatttagagttggaatgagagaagatcaaactttccttttctatataccacattccagaataagtgattcttgcatcagaacttgccaggcaatttcacagataatgaatgaaatggaataaaagtgtggtttattcttccacagccacaatctctcagtaatgctgaaagaacaaaaactagccaatacataaggcaaatttgatccaagagagttcatctgtgtgcagggaaaggtaattttgtgattgtctttaaaggattccaaccaatgctcactatcaagatagaagtagccagttatagtacaatctatcccatataatcaaattactgtgctggtaaatgactaaatctaggtataagagaggaagttctactcaaaacacaa

SEQ ID NO: 663010 - DNA, 579 bp, Homo sapiens
aatgctaagtaactcaagcccagtctctcttgtatgtcctctgacatcagagggagttttctctccatagattatcaccagcatgaaaccactggcaatcaacactggtacttacatcccttacctcctttctggttcatcagaagtttgaaagtgctacaaataccatcagcaccataaaattattctatttagagttggaatgagagaagatcaaactttccttttctatataccacattccagaataagtgattcttgcatcagaacttgccaggcaatttcacagataatgaatgaaatggaataaaagtgtggtttattcttccacagccacaatctctcagtaatgctgaaagaacaaaaactagccaatacataaggcaaatttgatccaagagagttcatctgtgtgcagggaaaggtaattttgtgattgtctttaaaggattccaaccaatgctcactatcaagatagaagtagccagttatagtacaatctatcccatataatcaaattactgtgctggtaaatkactaaatctaggtataagagaggaagttctactcaaaacacaa

SEQ ID NO: 663011 - DNA, 619 bp, Homo sapiens
agaatccagctgcttaaaaagaaatctttcggatgtttttccaagtttggtataccatacctgtagctctggtatttcactctgtaaagaaaagacaaaaaagcatggctgagtaattcatcacatcctctttgaggatttccaaaatcagtaccagcaagaatgtaccaatgacaatattatctctatttatcargagaaacacctcaaatattaaataataatatttttaaaaataggaaaacactgttcaagcaaatactttattctctaaacactaaagaattttggcaaatgataaaaaaattacagtgtctttgcttcaaaaacattcattactgtacctgtgtaataacttctaaattaaaataactttctggtattaaaaaacaattcttatgccattagtaatcagaaagggtactgcagtttgtcaattcaaacctaacaattcacagaaatagcaagtatctggtacttttaaacaatatttttggcatagtatactgtaaatatcaatgcttgaaagttccctagaccataaaatgcttctaccaccaagaacaactttcttgcaagtgacttttgtaagtgttcctcaaagtcacagagcatttta

SEQ ID NO: 663012 - DNA, 619 bp, Homo sapiens
agaatccagctgcttaaaaagaaatctttcggatgtttttccaagtttggtataccatacctgtagctctggtatttcactctgtaaagaaaagacaaaaaagcatggctgagtaattcatcacatcctctttgaggatttccaaaatcagtaccagcaagaatgtaccaatgacaatattatctctatttatcaagagaaacacctcaaatattaaataataatatttttaaaaataggaaaacaytgttcaagcaaatactttattctctaaacactaaagaattttggcaaatgataaaaaaattacagtgtctttgcttcaaaaacattcattactgtacctgtgtaataacttctaaattaaaataactttctggtattaaaaaacaattcttatgccattagtaatcagaaagggtactgcagtttgtcaattcaaacctaacaattcacagaaatagcaagtatctggtacttttaaacaatatttttggcatagtatactgtaaatatcaatgcttgaaagttccctagaccataaaatgcttctaccaccaagaacaactttcttgcaagtgacttttgtaagtgttcctcaaagtcacagagcatttta

SEQ ID NO: 663013 - DNA, 598 bp, Homo sapiens
catgtaaaatgatagtcattaatgaggaagtatagagtggtacttattctgtaagttcagagtatgccgagtattaatagattatcatactgcctgaaaataaatttatgatgaaatgaaaaaaaaaagtgacagtttaaaaaaaaaaatctcctgtggtcagaagaaaactaaaacactaacttcaaaccacccctgaaaatgagctggaatttaattggatcagtctttggaacaatttaagtccccagggcattgtttaaaacaatacagaaatccaccagcaattagtgtaacttacagtgaggtgtgatcaaggaaccagacagagtcctggaaaaacaaatcccagggtgactgtggatatgcccaaarccacattctccaaggagcaacatttcaggctttacagtgtgtggaggggaagaaggagggaacagagttaactaaaatactccagcaaatcactaagtaaataaataaacaacaacaagcctcaagggggagaggatcaatgcccagagttgatagcatatattatatacgagttgctaccatatattatatataaggtccagtttccaacaacacacacaaa

SEQ ID NO: 663014 - DNA, 657 bp, Homo sapiens
cagccatattacccaaagcaatctacagatttaatgcaatctgtatcaaaatgccaaggacattcttcacataaatagaaaacacaaccataaaatttatataggaacacaaaagaccacaaacagtcaatgcaaccctgagcaaaaagaacaaagctgaaggcatcacactacctgacttcaacatatactaaaaggctatagtaacgattaataaaacagcatggttttgtctaaaagcaggcacacagaccaatggaacagaatagaaagtccagaaataaattcatgccctatgaccaactaattttcaacaaaggtgccaagaacacgctaggaaaaaggacagtctcttccataaacagcactgggaaaaatggatagccccatgcagaagaacgaaactggactcctgtctctcacaatatacacagtcaactcaaaattgattacatacttaaatataaaacctgaaactataaaactagaaaaaaaacaaagggaaagtgctttatgacaatgagctgggcaagaattttttaaataagacctcaaaagcacagacaacgcaaaaatagacaaaggggatgacatcaractgaaaagcttttgcacagcaaaagaaacaaagtaaaacagcctacaaaatgggaggaa

SEQ ID NO: 663015 - DNA, 606 bp, Homo sapiens
cccagtgcccccagctagtagccagtgatatgatggatgagcacggaagtacaaatgtccagcttcttctccatgaagcaggtcaagcccattatagttgacactctattaattstccccatgaaatcaggctaagtgtgagacattacttgaaaccacatttttttcttggtttcttcccctttccagtctggcttcctgtgctcctaaaagcattttctcaataaatctcttaaacttgattccttacttctggatttttctaggaaaacctaacttaagagaaaagagaaataaaaacatctcatggcttcagacatgtggagtttggctgcattttataactcaatgatttactttacccatagaacatatcaagaacattttctgaggtggaccgagtcacctcatgatcactcgcagaggccacacacttctttctaaatattccactacctgttttcctgtcaccccttgtatcaccttgcagctgtgccagactcagccggtcactgtggacaaagatcctgcaaacatcccactttgccctagacacggggcactataacccagcattgacacccagatttaaaagtgaaaaatcaa

SEQ ID NO: 663016 - DNA, 549 bp, Homo sapiens
gtgtgcctttgagaaagttacttcacccctgtgggtataatttcccagatctgtaaaatggggctcataatacctttcatagggtccaggtatgcattaaaggtgatatgcatatgtaataagatggagaaatatttattcaccagcactccagaaaatttgaagaagatagaaactgcctcatcagggcagcctatccctattccaccctcatttctaagaggagcagtkgaaaggctgaacaatacttctcaaagaaatgcctactgtggcagggtcaagagggatgaatgcaggtttggtgggggtgggaggaggtgttagaaacattttttgaggaaaacatatgagattatctttgtgaattggaggtaacaaaaaatttattggagaggtcacagtgaacaataaccataaacaaaaaattgataattagatttcaccaaaattaagaacttctgctcattattgtacaccactagcaaaattaataagactactaatctaacaaagcactgttatcaaggatttaacaaagaatacagtaaa

SEQ ID NO: 663017 - DNA, 549 bp, Homo sapiens
gtgtgcctttgagaaagttacttcacccctgtgggtataatttcccagatctgtaaaatggggctcataatacctttcatagggtccaggtatgcattaaaggtgatatgcatatgtaataagatggagaaatatttattcaccagcactccagaaaatttgaagaagatagaaactgcctcatcagggcagcctatccctattccaccctcatttctaagaggagcagttgaaaggctgaacaatacttctcaaagaaatgcctactgtggcagggtcaagagggatgaatgcaggtttggtgggggtgggaggaggtgttagaaacattttttgaggaaaacatatgagattatctttgtgaattggaggtaacaaaaaatttattggagaggtcacagtgaacaataaccataaacaaaaaattgataattagatttcaccaaaattaagaacttctgctcattattgtayaccactagcaaaattaataagactactaatctaacaaagcactgttatcaaggatttaacaaagaatacagtaaa

SEQ ID NO: 663018 - DNA, 557 bp, Homo sapiens
catccttgtcttgttccagttctcaggggcaatgctttcagcttttctccattcagtatgatgttggctgtgggtttgtcatatattgcttttattactttgaggtaagtcccttctatgactgttttgttgagggtttttatcataaagcaatgctggattttagcaaatgttttawctgcacctattgagatgatcatatggtttttgtttttaattctgtttatgtcatatgtcacatttattgacttgtgtataaagacttaaatcaagacctgaaaccataaaaattctagaagatagcatcagaaaaactcttctagacattggcttaggcaaagaattcatgactaagaccccaaaagcaaatgcaacaacaacaaaaaataaataaatgggacccaattaaactaaaacgctcagcaaaggaaataatcagcagagtaaatagacaacccacagagtggaagaaaatattcacaaactatgcatctgacaaaggactactatgcagaatctacaaggaactcaaatcagcaagagaaaaacaagtaatc

SEQ ID NO: 663019 - DNA, 630 bp, Homo sapiens
gtcatacaaagattacctggttgtctgcaaacacatagctaattcattttctgagtagtctaaatgtaaaactagtgcattattttatccccagaagtaaaacatttactatagcgagcagaaaggaatgtacatcttatagatactttcacaaagtcatttgaatttttatttacttttttcctttaataaacaagatagaacaaaaataaaattatttcagcaaaaggtttttctaccactggacaagttaagaaaaatgcaatgaaagmaagagaagacactttaaaagctgggttaagttttaaatttagcaacatctaagagccagagcaatcctggaaccattttaggatcgccttttccccttcaatcatagcagctctggaatcgtcattgcctgcttctacaggctttttcttcctacttgtctaagggctgggtatataccaggttgcagaacttgagcatcaactcccagttgaaatcacagacatctcctccctttcctgcaaatgcctggacatttttaaagtactgctttcaagtgccctttcccctttactactattttgtgacaaatttcctgtcacttttgacttttaaaattggtctactccagttaaaaaa

SEQ ID NO: 663020 - DNA, 539 bp, Homo sapiens
gttctttatattgcttactcagacagggataataacagaatacaaccacatatgtttatagtttctgttggaaaagacyttcaagatgatctggatgaaatgaacaatgatcgcatctccacggtatgttttctttataatgaagttggtaccatctcttaatctgagcaaccatatttagacatcaaggtgagaacaattctatctagatgtaaccagtggtctactatctaactgcagtcaagctttccctgctattcttcctactggctcatactcatttgttgatcttgtgttccttaagtgacaaatgcttgaaaattcaagcagaattgtgcattattacaaagggctcctcattatttaccattgtaaattaatttctgtcatttacaattctaataggcaattaacctggttaaaacagtgctgtggcagtatgatggttagtactagagaaaataaccatgcttggggaagttgcctaagatgatgtcaaagttactgtgtacctattatttgttaggcaactgcaataa

SEQ ID NO: 663021 - DNA, 591 bp, Homo sapiens
ttgctttcctgcaactagatggtcccatctgggggtaatgggagacactgacagatcagtcactagattctcataaggagtacacaatctagatccctggcatgcacggttcacaatacggttcatgctcctgtgagattctaatgccactactgatctgacaggaggtggagctcaggcaataatgcaagcaatgaggacagctctaaatacagatgaagcttggcttgcttgcccgctgctcacctcctgctgtgcagcccagtacctaacagtattggtacrtaacagtctagagcaggggtccccaaccctgggtaccatggtatcggtttgtggcctggggattggtgacccttgccctagactgtgacctacaaaacatgaagtaatgacatctgatttattaatgtaaatgaggtcatggcacagtgtatggcttgtaagaagtaatcaacaaatgttggataaagaaaaaaagaaagaaagggagagagggtgggaggggaggaaatgaaaaggtgaaacctcatgctcactttctgccaaccagcttttgggtaacatagcaaaccaacggcagaaagatga

SEQ ID NO: 663022 - DNA, 502 bp, Homo sapiens
taaaaaaataagagagggacaaaatctgaaagaaagtttctaccattctagtctggcatctacttttcattggtgtaaaacagataccaacagcagagaagaaagctcccagccagtggcacattccccttgggaagaacctttttttaaaaaaaaaaaaattaaggtgggttctctggttcttasgaatttaagaactctagctaaacataataaggtctgagagacaggagaacacctattttcaaggctgcaagagctggattatcactttctaacatttttgcaatcaaaaaattatcttttaaagaagtttactaattttcatgggatgatcacagattagctgcaagcaatttgctcatgaaagggctttttataacacatcatagattaccaataaatgggctgaaatgacttcatactaaatgtaaaacagattacctttccatctgtaattcagtgttcaaaagaaacaaaatattagcaagttattcataat

SEQ ID NO: 663023 - DNA, 589 bp, Homo sapiens
caactggtaagtggatgtgaagtcctaggacattactgtacactactgtagattttataaacactgtacatttaagctackctacatttatattttaaaaattctttcattaataataactttagtttgtaacattttttactttataaatttaaattaaaaaatttttgactcttttataatgcttagcttaaaacacacattgtatacctgtacaaaaacattttcaggccaggcatggtggttcatacctgcaatcccagcactttgggaggctgaggcgggtggattgcttgagtccaggggttcgagaccaggccatgggcaacatggcaaaactccatctctacaagaaatacaaaaatctgaccaggcatagtggtgtacacctgtagtcctagctactcaggaggctgagatgagaggattacctgagcctagggaggcaggtgctgcagtgagccaagatcacatcatcgcacttcagcctgggtgacagagtgagaccctgtgtcaaacaaacaaaaaagccccccaaaaacaacaaaaaattcttttttatatccttattccatactttttttctagc

SEQ ID NO: 663024 - DNA, 508 bp, Homo sapiens
agagacaaagctgtatccataagtttgattagagggtggtctgtttggaaaacaggatgcttcaaaggctaccacaaagttacaggaaaacawacttctgcaaaggcatttgaccagccactgcctgtcccaccctggactggcatcacccttgttactcatccttgtagccaaagataattatctcaacactgtgaagtaatcctcttgtattttccccttaaaaacctttgtcctcctttacccccctgaatacgcacagtttactatggcacacatattcccattgtaatgcactatgcccaaataaatatcattttctttaaaaaaaaaaaaaaaaaaaggaaaacagggtgcttaactgaaaactgataccaaacctgtgcctgttctattcattgtacttccctctattttaaataatattctgttacagttgtgacttgatatgtccttgcatatgacaggtcatcatgtaaaaaatccatttaactctggcatctttaat

SEQ ID NO: 663025 - DNA, 495 bp, Homo sapiens
tggaattcaatccagcagtaggttttgaatcaaacctactgcaaatggaatcaaaaagatcttattttactcaataattgaacaaaagggccagaaggtagaatatatggtaagtccttaattcatttatttagaacaatacaaatagcaattctagtgcatayacagttattattacaaaatctagcactaattgtatacttcctgtgctggttctctgtctgactccaccttactccacttattctctgcccttctctgctctactccgcatcccagaaagctgccctccattgactcttatgatatgggctttctaactctctgacttttgactaggtctagacaaatggaggcaccagcatgagatgaaagcaggtatgttcctccatggccaaagctcctgttgagtagccccacttccatgaccccagcttgctcagggtttgggtatcactattctttccctctgcttcttgagaccaatggatgatg

SEQ ID NO: 663026 - DNA, 464 bp, Homo sapiens
aacatgaaagcggactaggagcgtgaccactgaagcacagcatcacagggagatggttaggcctccagataactgcgggcaggcccaactgatggcaggccctccacaagaggtggaggagtagagtcttctctagactcccccagggaaagggagactccctttccyggtctgctaagtagcaggtgtttttccttgacactgatgctaccgctagaccatggtccacttggcaatgggtgtcttcccagatgctggcattaccgctagaccaaggagccctctggtggcactgtccaggcataacagaaggctcgcactcttgtcttctggtcacttctcactatgtcccctcagctcctatctctgtatgacctggtttttcctaggttatgattatagagcgaggattattataatattggaataaagagtaattgctataaactaatgattaatgatat

SEQ ID NO: 663027 - DNA, 544 bp, Homo sapiens
aactttgaacttgaaagagatgattagatttctaaggtatctaagggtaagatctcttagataccctaaggtatctggtagaagaaatttctaagcagyaaagcattcagaggtgacttgagtgctcttaaaagcattcagttttatgcattcacaaagatatggtttggaatgggaacttatgttttaaagggaagcagaacataaatgtttggagaatttacagcctgattatgcaatagaaacgaaaaacccatgttctgaggagaaattcaacctggctgcagaaatgtgcataagtaacaaggagccaaatgataatcaccaagacaatggggaaaatgtctccagggcatgtcagagacctttagagcaggccctcccatcacaggcccagaggcctaggagggaaaaatggtttcctgggctgggactcctgctctgtgcagtctcaagacatggtgtcctgtgtcccagctgcttcagctccagctatggctaaaaggggccaaggtactgctcaggccattgcttcagagggtgc

SEQ ID NO: 663028 - DNA, 544 bp, Homo sapiens
aactttgaacttgaaagagatgattagatttctaaggtatctaagggtaagatctcttagataccctaaggtatctggtagaagaaatttctaagcagtaaagcattcagaggtgacttgagtgctcttaaaagcattcagttttatgcattcacaaagatatggtttggaatgggaacttatgtttwaaagggaagcagaacataaatgtttggagaatttacagcctgattatgcaatagaaacgaaaaacccatgttctgaggagaaattcaacctggctgcagaaatgtgcataagtaacaaggagccaaatgataatcaccaagacaatggggaaaatgtctccagggcatgtcagagacctttagagcaggccctcccatcacaggcccagaggcctaggagggaaaaatggtttcctgggctgggactcctgctctgtgcagtctcaagacatggtgtcctgtgtcccagctgcttcagctccagctatggctaaaaggggccaaggtactgctcaggccattgcttcagagggtgc

SEQ ID NO: 663029 - DNA, 565 bp, Homo sapiens
cttggactggctctccttgctgctcagcttgcagatggcctattgtgggaccttgtgatcgtgtgagttaatacttaataagctcatatatatatgtatatatgtacatatatatatatatgtattctattagttatgtccctctagagaaccctaatacatagactttccaatttattggtatatagtagccactaatgatcttttgaatttctgtgrtataagttgtaatgtctcctttttcatctctgattttatttggatattctctattttttgttagactggctaaagttttgtcaattttatcttttcaaaaaaccagtttatgttttgttgatcttttatgttttcttcatttcaaattcacttatttttgctctgatttttatttcttctactaattttgggttcagtttactcttgtttttctagttaagatgcatcattaggttatttttagctttttttttttcttttttaacataggcacttatagctatacactttcctcctagtactgctttcactgtgtcccataggttttggtatgtggtgtttccat

SEQ ID NO: 663030 - DNA, 565 bp, Homo sapiens
cttggactggctctccttgctgctcagcttgcagatggcctattgtgggaccttgtgatcgtgtgagttaatacttaataagctcatatatatatgtatatatgtacatatatatatatatgtattctattagttatgtccctctagagaaccctaatacatagactttccaatttattggtatatagtagccactaatgatcttttgaatttctgtgatataagttgtaatgtctcctttttcatctctgattttatttggatattctctattttttgttagwctggctaaagttttgtcaattttatcttttcaaaaaaccagtttatgttttgttgatcttttatgttttcttcatttcaaattcacttatttttgctctgatttttatttcttctactaattttgggttcagtttactcttgtttttctagttaagatgcatcattaggttatttttagctttttttttttcttttttaacataggcacttatagctatacactttcctcctagtactgctttcactgtgtcccataggttttggtatgtggtgtttccat

SEQ ID NO: 663031 - DNA, 528 bp, Homo sapiens
tgaggggccattttaataaaaatgttcaagctagcaatacatacaggcaataatggaagtgatacaatgactgtacctatacgactatggactgaagacagacttaccactgggagaattttaatttttttcccactcgattgttcatgaacattcaagtatttatggggtaactgtcatgctccaggcattgtattttcatgagtagtatatgtttataatgaaatctatttacaggactctagtactagtttcttttccagttttaactgaaattmgtgtgcctcaaagtattgcaaatcaaagtaaattctagccaatgtttgcctcacatgaataaccccaaaaaaggaccacgtggagaggaggagtgacaaagaattaagcacagggagtatagccttaaagattaagtttcatagtaaatgtgactttcaactggatgagaatgttgggagttgcaggtcaccggttccaggaaggttaaagacatgtgttgcacacacagaaacttgtattgaaatttgt

SEQ ID NO: 663032 - DNA, 528 bp, Homo sapiens
tgaggggccattttaataaaaatgttcaagctagcaatacatacaggcaataatggaagtgatacaatgactgtacctatacgactatggactgaagacagacttaccactgggagaattttaatttttttcccactcgattgttcatgaacattcaagtatttatggggtaactgtcatgctccaggcattgtattttcatgagtagtatatgtttataatgaaatctatttacaggactctagtactagtttcttttccagttttaactgaaattcgtgtgcctcaaagtattgcaaatcaaagtaaattctagccaatgtttgcctcacatgaataaccccaaaaaaggaccacgtggagaggaggagtgacaaagaattargcacagggagtatagccttaaagattaagtttcatagtaaatgtgactttcaactggatgagaatgttgggagttgcaggtcaccggttccaggaaggttaaagacatgtgttgcacacacagaaacttgtattgaaatttgt

SEQ ID NO: 663033 - DNA, 562 bp, Homo sapiens
attgcaatttattaaagccaattaaaactttctgaaaatgtaagatgtcattatttttctaagttttagccttggggttcacayagtgtctaagacatcattttattttctcataaaaaatacattctcaaatgagtaggaccctagacgaagctttcacatctcctctcttcctctgtttacccttcccccacccctaattgaatcctctgaattgtcatttttttaaggcagttttcccaaatttctggaggtttttattgttgttgttggttttactaccaacttattttggtggtgtattttgttgtttttgctgctgctgttactatttttgaggatgaaagagattttagtatgttgccagccaagctgaaggaacaaatggagagaaacaaatgggccagaagagatgtaggtagggctatcatggacacaggtagggggctaaaattggaaaggtagaaagacaatcataccacaagtcatcccacagtgatggtaactggtaaacaaaagcacagagacattctgaggtagaggaatgcatttgtaagcgtac

SEQ ID NO: 663034 - DNA, 537 bp, Homo sapiens
atttcagcctggatggtaaaaaaaaaaaaaatgcttcatagaggacaatggattcaaacagatcaaaaagcaaagcaaggtttggataggaggagagcctagggcagcttccaacacaggaaagtgtggattttgcccttttaattgtggggagcaaacaaggtgtttaaggtgttttgtagagagatggtggcttgaaagcagaatttcgggaaggcaaaattggcaagagagggtaggatactcactacagagagaacctagggggaagataactatttggaagttgttaatccaaaatgtagtcttgaaggsgagctggaatgtctccttttgaaatttgtattgcagtagaatctttcttttctctggctaggatctcagcattcacatgatgatggtagaaagaacattaataatagtattaataatggtgttaagaacataaacaatgcacaataatcataccttgtatgtaagccagttataatcattcttccctgtaatgaccttgtgcaatgcaactagtgacacttt

SEQ ID NO: 663035 - DNA, 400 bp, Homo sapiens
atatttctccaaaaacccatacaaataacttaatggcattttaaaactcatattttagatgcagtgggagtgcttatgcttgaaataatatcttactcaaataagcaactgattttaatttgttttctatttctggattttcatatgttgagcttgcttccctgaaacaccctgtttgcttttattaagctttcacagtgacttttcttcatttgaacctttgtttcttttgctccaaattcttggtttccttgtaacttgaactagcttatttacctacatacaagtgtatacaaagagtactaaaatccttatggaccttgtgacatcaccactgtcctcttgcaatgtcaaccactctrccaagtttggcaaatactcctttatggactgtagaaac

SEQ ID NO: 663036 - DNA, 618 bp, Homo sapiens
tgattgggaatagcagagtggtgtctagttacataaggttgtgcagggatgcttctctgaggagattatgggcaaactgggacttaaaggctgaggcataaacagaggaaagggagattcaggaagcaggaactgcacatgcaaagaccctgtggtggggagagtttggtgtgttataggaactaaatgcaggttggtgtagtgtagatagagtgcagtagataaaggagagaaggaaataaagtttaaaaggagacagaagccagatctgttttgaggggggatatcaaggtacaaatccctgctaggcagctrgataaatctaacaagggtatgggtgaagaagacaggattggtcatatgaagttgggtgtattcccatgtaagagacaatggaaggcagggtaagaaataaactctctaaagctgtgagtatagagaagatgcccagcaggtccaggatgaacaccccggggaacagtcctgggaaatgctgttatcaagggatggaagaagttgaggccagcaaacgatatggtacagttgtcaaaggcaaaagcagagtcatagagctgagagaatctaagagaagagttaaaaaaaaaaaaacaaaaaaaa

SEQ ID NO: 663037 - DNA, 587 bp, Homo sapiens
tacctgatatgtaaataagtcaaatcaaagcaactttaaaaaaaattttctcttttagggactgaaaaatttccctaaagtgattttcatttcaaaactgccaattgtatacgtagaaatcataattaggcaacaggtcatttcagctgtatctcatggatttcccctgagaatgaacagtgatgataacagcacaagaagcataaaaacagtcacatggagaagggcaagtgcccaggaaaacagcatttaccatcggatacaggtgatttttgttcagagacatggtcggagctaagggcaccactcttgcagaacatttcttcatyttttgaaattatttgtcttgttctcagtgcttcctctgactttgttttgagtctcctgttctgtagcacacactctgctatggctagtgtctagctgctgttctgaaaatgttactgaaagctacaaggactggtttactgtctccctgggaaaccatttgccccacattcaaacaatgtttgacctccactaaaaattttttttaaaaaatcaattgttaggcacagtgggaaactatgagaaatgaaaggagaaat

SEQ ID NO: 663038 - DNA, 623 bp, Homo sapiens
tttcctttgaatatcacaacttatatcctataataaatgacctggtccctaatctagaaaggcaggcacaagagggaagagagggttaaagtttctctccaatggtctctgctggtttccttatcttctgtaatgtgctgtaaatgttccaggaggatctgtgtgttccaacatcttgactttatggtatttccaacatactggcaaccaaaattctgtaaatccccactgaatagaggaaagataaagaatccatttctatctatctaattcctaatcacaaaaagtactgacaaaaaagagataaagaattcctttagactttagaaaggaaaaagaaaatgtataaaaacttcaagccaagagaacacatgaggcttgaaccaattgcagacttacagctgttttctacctcttcaattgtgactcaagagtaactcccctgttttattttggtacaagtctcctacactgmacaaattccagcaacacctttttacatgtgccaaatagtacttcaagagcattgaaaaggatattgtatttgttccttattcaatgaggcattatctccattttatgaatgaaaacattgagactcagggaagttaagtaaaataact

SEQ ID NO: 663039 - DNA, 623 bp, Homo sapiens
tttcctttgaatatcacaacttatatcctataataaatgacctggtccctaatctagaaaggcaggcacaagagggaagagagggttaaagtttctctccaatggtctctgctggtttccttatcttctgtaatgtgctgtaaatgttccaggaggatctgtgtgttccaacatcttgactttatggtatttccaacatactggcaaccaaaattctgtaaatccccactgaatagaggaaagataaagaatccatttctatctatctaattcctaatcacaaaaagtactgacaaaaaagagataaagaattcctttagactttagaaaggaaaaagaaaatgtataaaaacttcaagccaagagaacacatgaggcttgaaccaattgcagacttacagctgttttctacctcttcaattgtgactcaagagtaactcccctgttttattttggtacaagtctcctacactgaacaaattccagcaacacctttttacatgtgccaaatagtacttcaagagcattgaaaaggatattgtatttgttccttattcaatgaggcattatctccattttaygaatgaaaacattgagactcagggaagttaagtaaaataact

SEQ ID NO: 663040 - DNA, 358 bp, Homo sapiens
gaaaaaaaaaatcactcctctttcagggctgattttatattaacaacaaattaacttgtgcttaggtgatcattttgcttttccacaacattatagttattggaatataaacgattatcctagtaatggcaaataccatattttataagatacagattttttctttttttttccaatttacttttatttttgtgatgttaaatcagaagtttaactttcatccccttctgagtttatattcamatgaaacaaaacttcttatctaaaaacacaaaacatctggacaaaagaactgtttactttttttgatgttttcaatgttgatatttttttccaagaagtagagaaatatctctgg

SEQ ID NO: 663041 - DNA, 622 bp, Homo sapiens
atcaagcttgtagctactgtgagtgaagaaatatgaaggctacagatccagagacgaatgtgctcttcatgatggggtcataagggtcccaaattctagagctatgattctcaaacttcagcaagcatcagaatccccagagggtttgttagaacaatttgcttggccccacttccaaagtttttgattcaggatatctgaagtgggctctaataatatgcacttctaacaagttcccacgtaataatgaccacacactgagaaccactcctctgaggtttagatttaaggtcacaagctcaagggtgtccaacagccagaccataacataaagaactgagtgtarcattagggaatggtgagacctgtggtgatctgcaaaatgtgtccatgatttaaaacccattcaaaacaaaaacactattttaaacatagtgaagtaaggcagatgtcagagactgtgtttccggattttgctgccaccattcactctaacaactccaaatgcattctttgaaaacatgtagaaatctcgtgatcagagttctataacttggattcaacctcttttccctctcattccttttttagagaagttatacattactaattattatggaat

SEQ ID NO: 663042 - DNA, 610 bp, Homo sapiens
aatgggtccatgaacaaagtggccatggtggcagggatggaggttacacatgggctcagcaacacgactttcactcaccaaggctgccatggccacagccactgctaagtgcccaatttgacagcagcagagaccaacactgagccctcgatatggcaccattcctcagggttgtgatcatccagctacctgttggcaggttgattatattggaccttttccatcatggawagggcagaggtttgtcctcactggaatatacacttattctggatatgggtttgcctatcctgtaagcactgttcccgccaagactaccatccgcagaatcatggaatgctttatccaccatcatgttattccacacagcattgactctgaccaaggcactcactttatggctaaagaagtgtggcagtgggctcatactcatagagttcactggtcttaccatgttccccatcattctgaagcagctgggttgagagaatagtggaatggccttttgaagtcacaattacaatgcccactaggtgacaacattttgcagggctgggacaaagttcaccagaacgctgtgtatgctctgaatcacagtccaatatatggt

SEQ ID NO: 663043 - DNA, 518 bp, Homo sapiens
tttttcaagactccgcatttatactgaattcatgaccattttatgcttctatcttcaataggtagactaaaaaatgggtttggtcatgaaggacaaaagtaataagggcyccactcacttccaaattctgtggcctttttctggggaatttgtactttccatctgcatgatctgggcaatatgagtttagagttcctggttcccagagacaaagtttccctgagggcagtagcagaagccccactaaacttcaagctatgctatcatatggccacttagggcttcttatgtgaaaagacaggcaaacaaggaaaggaatcatcagtctggaaggaataattgaccctggtcatcaggagaaagtattattattagatataggggctagaaagattgtgtttggtacccacatctttatttgcatatattttggtatcaatttggctgcttttgaaagtaaatggacaagtgcaatagctatggcttgagaagggtgggttaaccagacttacaaggga

SEQ ID NO: 663044 - DNA, 600 bp, Homo sapiens
acattgcatgatgagtctacagtaacaatagagacacacacaggagaaaacgcaaagcaaaagaagtaagcatattaacaaatgttcccaccaatttccccaatctctaaactaatgtgacgataactgttcctataatgggtgggatcatttatctttgatgccatgtgatacaacaagaggaagctagagattgaaaggtaaaactccagcaggcgcttgtaaaggtagatcgtctcctccaacaatgattacgatggaggatttgtcccaagtggtcaaaacagcagctgcctgggaaggcttcccaggagaagcaaatcatacttgcctgctgggagaggtaggagtgtctcctacatgattactcttcctggactgttayatgccagatcaggagcctgattacttctcccttatgcaaaatgcaagtggccttgcattagtgtctccttacctcaggctcagaatctagcagtgtgacaggagtccaggtcagtaaggtgaagtcctccttccactgtgagacaaagtatcccatccagcctgacagggtattcctgtgctagtcagtctccactacaacaggctgtctcctgg

SEQ ID NO: 663045 - DNA, 658 bp, Homo sapiens
aacatgctcctttacttcaagggagcttatactctaatgggaagataattaataaattaacatataagatagtcattgctataaagtgcaacttaacggtagcagattcatttggtgcatggcagaagggaaacagaagtgtaccttgaggagtgagagatgactttactgatgagtcgtgactgagacttaacaaatgtttatcaaattattagtcagacaagagttggggagttcttcagtcatggagaaaggtatgtgcagaagccaaatggcatgagaaagctggaacgtttagagcagagtggtattttggtaaggtgagagtatcgagttcctagtaaaggtagtcttccagagtgtcatgaatttataatttatcacattaggataaggggctacttaagcaatcaaagcacagaaatggcataatttcatgtgggaatcagaaacctagctccgtagagatattaaattggttagtgggcaagaaacaggacaaccagttgagaaacaattgtaataatccyggtgagaaatggataacagataaactaaggatctagactgggacagaggccatgacaaaagaagacattttgaaagaaaaatgatgctgagttttagacgtactgacatgaagttgtttgtggaacaa

SEQ ID NO: 663046 - DNA, 565 bp, Homo sapiens
tcaatgtgtagtagtagtaacatcagagtaaatggcgtattcatcacctcaagcatttatcatttatttgtgttataaacattccgattattcttttagttattttaaaatgtacagtatcattgactgcagtcattctgttgtgctatcaaacactaaaccttattcattctctttaactatatttttgtacccatttatcatccctttgtccccctctgccaccccatcactaccctttccagactttggtaaccatcattytactgtctctttgagttctatttatttatttatttatttatttatttatttatttatttagacagggtctctgctgcactgccttgggttgggggaggggtgacgcaagtacttccttggctaccccagctggtgtgccactaagttgtttgcaccccaagttcacttgctccaagcctgggacagcaccaggacttgcctaggagtggcagtctttgtggcttagactgcctttaaaatttgtttagaaccctagagcactttagccatggtactggggctagctggaacttagtttctg

SEQ ID NO: 663047 - DNA, 468 bp, Homo sapiens
actgtgaccgggcagtactgagcttcaaagttaattttcacaattactgcctccccctcccrgaagctcacagattctgttgctgtgtcaggcagctactgctaaaacatgggggatgtgtaggtgattcaaggctgtctttactatccttttcagtgcctctctccttgatataatgctgaaactaagtaccatgattgctcagctaagttttggttcttatgaaagtgctttcttgcatgaatggttgtttaatctggtgtttctgtggaagggatgatctctggagggtactgtttggccatccgctctctctctccttcctctgtctctcttttttttgtttgtttgtttctttatggcttctttctttcattcttttgctttaatcaagtattttaaagttcctctttatcttgtattatcttcttgtttcacatttagtattattttatcattttagtaatt

SEQ ID NO: 663048 - DNA, 458 bp, Homo sapiens
agatcatcccgtaaggatagcaaagtgtaacacagggttactctgtttaatttgcctcaaatgaaacagaatgaaagttcaaaatgtccagactgaaagttgctctctttctctaaagaattactccgtcgtctgcagaatagttgctagactggggcccccagagccacattgcctgaatttgattcctgaccctgtcaatagctaactgagtgatgtaggcaaattacttagcttcagtttcctcatcagttaatctgaaatmatgatacaagccaccacgtacggttgttataaggatttaatgtgttaatatattcaaactggtgttgttactcagtgaataacggcagcattattcatcttgtctttcaagataggaattttattatttgccttgactttcaagacagcaatctagggtcattcgatctccctcccttttctcatcatgctca

SEQ ID NO: 663049 - DNA, 582 bp, Homo sapiens
tgtattccaaactgaaattagtgtgcctagagaacttagtaggtaatacggattttttgatttttttatttttatttttatttttattatttttttgcgtaacaaaggattaaattatctcatccaaactttttactttayaggtgaaaaatctgacacctggagaggtaaaataatttgccaaaattcacaaggtaattactggtagagtcatgacggactagaacctagatctttagattcttgttttgttaaaaaacacaacagaacaaaacaagaatatgtattttattgactggtgcggcacttcttgaacctgtctgattattggtattgatgtctaggcactactccaggtctattaaattcagagtatctgggggtaagttgcaccataaatatttttcaaactcttctcaagtgatgtcatgtagatccaggactgagaaacatttgggcattaagatatttcattagaaaatgttgcaattcctttagcctaggactagagtgctattttacccaaggtcatcttgaggagaaaatcattttaggatcaacgaaatgattagcacagaaagt

SEQ ID NO: 663050 - DNA, 619 bp, Homo sapiens
caagatctgtagcgataccctgtttcagatgggtagatagtcatttaaattcattaattaaaaatattggcttcattgattttctgtgttgttattttgtgttgtgtttcactgatttctcttgctttcatatatatatatatacacacatatatataaaatactttatttttttatatatacatatataatactttataaaatactatatattttatgtatatatatatatatacataaaatactttaagttcaagggtacatgtgcacaaygtacaggtttgttacatagatatacatgtgccatgatggtttgctgcacccatcaactcatcatttacattaggtatttctcctaatgctatccctcccccagccctccacccctcaacaggccccggtgtgtgattttcccctccctgtgtccgtgtgttctcattgttcaactcccacttgtgagtgagagcatgcagtgtttggttttctgtccttgtgatattttgcgagaatgatggtttccagcttcatccaggtttttatttttatgatttattaatttggaagtattatcattggcttgaggttcttcttattttttaatattagcatttaatgattt

SEQ ID NO: 663051 - DNA, 485 bp, Homo sapiens
gctgagtaacagttagagcaggaataactctacatctgaattgcccttgtttttttgtgtgtctattttgattgtgagctttgtaagtctctttcgctcagctctgaaatattgacacagccccaacctttagagcttttcaatctcccaccctacagggcttcataatttgggcaatatttcgaggtgagactggttgtgtgtttgaggttattgaaattgttcattttatcacttcggyctccggtgaatgccagaattcctgctgctctctctgtccccagcactggcctctaagagggccagccttggttcttagcctccccttgcccccccagagttggaccaaactgacatttgtgaagacgcggtgcaaactcagggacaatccagcatcccatcccgggctttcatctcttgactattttgtttcaggtcctcttcctttagcaattgtttccccaataccccacgtttagaatgtc

SEQ ID NO: 663052 - DNA, 485 bp, Homo sapiens
gctgagtaacagttagagcaggaataactctacatctgaattgcccttgtttttttgtgtgtctattttgattgtgagctttgtaagtctctttcgctcagctctgaaatattgacacagccccaacctttagagcttttcaatctcccaccctacagggcttcataatttgggcaatatttcgaggtgagactggttgtgtgtttgaggttattgaaattgttcattttatcacttcggcctccrgtgaatgccagaattcctgctgctctctctgtccccagcactggcctctaagagggccagccttggttcttagcctccccttgcccccccagagttggaccaaactgacatttgtgaagacgcggtgcaaactcagggacaatccagcatcccatcccgggctttcatctcttgactattttgtttcaggtcctcttcctttagcaattgtttccccaataccccacgtttagaatgtc

SEQ ID NO: 663053 - DNA, 516 bp, Homo sapiens
agtccacacagacagcaacaacagttgtaaatcctcagtactctctctttaaacactgtaaagcaacccattttccccattttcattcaatattttttatacattagcatgtagatcaaacttctggaacaaatatttagattacataatgtttccttttaaaatggtttaataactgatttaaaatatggaactctgtggtcctctttggaactcaatggtcctcttctactgaatgtcttttattttgaattctattcagattcaccatctcttcatttccaccctgcttttgtctgcagcagaggctcaagtatcatggactacattcacatccttcagtttcttgtacattgtttattctccctgccctatccttgcagccttggtctggttgtgtcccactgctgaaagtttacagctcttgacaatgtggttttctttatgggatgctctccttccaatttccagtaacatcytctccttactctttcagatgcaaaggttgaactagcc

SEQ ID NO: 663054 - DNA, 606 bp, Homo sapiens
acaggcagaaattgacagaataaatttgaaaaaataaagtaccaattcctatctacaagagacatgctttataatcaaacataaaaagagaytgaaagaaaaagcatgaaaacctatacacaatgcaaacattaaccaaaagagagctgaatggttatattaatatcaggtttaatatgatttggctgcgtccccacccaaatctcaccttgaattgtaactaccacaattcccacgtcatgggaggatccctgtgggaagtcattgaatcatgggggtgagtcttttctgcgctgttctcctgttagtaaatgagtctcatgagatctgatggtttgaaaaataggagtttccctacacaagctctctctttgcctgtcgccatccacttaaaatgtgacttgctcctccttgcctttcaccttccaccatgattgtgagacctcccacgccacatggaatggtaagcccaataaacctctttcttttgtaaattgccccatcgtgggtatgtgtttatcagcaacgtgaaaaggggctaatatagtaaattggtaccagtagagtggggcattgctgaaaagatgccaaaaaacgaagaagcga

SEQ ID NO: 663055 - DNA, 534 bp, Homo sapiens
tcattaccactagaccagtcttacaagagatctttaagggagttctaaacatgaaaatgaaacaatgataccttataccacaaaaacatacttaagtacatagtccaaagacaccataaagcaatcacaaacagaaactggaaagaaccagctgtcaacttcatgttagtatcataacctcacatatcaatattaatcttgaatgtaaattgtctaaatgccccacttaaaagacacagagtggcaagttggataaaaaaaataagactcatccatctgctgtcttcaagacactcatctcacacgtaataacaccyataggctcaaagtagagggctggagaaagctctaccatgaaaatggaaaaaaaaagagcaggggttggtattcttatatcagataaaacaggctttaaatcaacaatagtaaaaaggacaaaaaaaggccattatataatgacaaaggtttcaattcaacaagaagactgaactatcctaaatatatatgcaccaaacactggtgaacccagattta

SEQ ID NO: 663056 - DNA, 576 bp, Homo sapiens
gaaaaacaaagtgattatcttactgattataatgatgatcatgatcatatttctgattgttggatataattgaataatcttgttgctaggactgtagtaaatgatctttattaaaaatgcttaaaagttgttttttatacataattcgtcactcaaattatctgcttactaactctcaaaaatattccctatatttacaattgtttcaattcagatcagattaacagtttcacgtgtgtgacacagtggaacttccagtattttactgcctcactggaggcttacaatgattttcatgtacaggtatcacagcagataattttatgaccttttaactaatatcttaaatttacttcatctgtgattaatagttacaatgatatatcaattttaacattggagcagtaccccttaaagcattttggtgagttaaaactggatactatttcagttggaatrtttagcagtgttttgagaaggcttagatagaatcaaatcgtttcattttattgaaacggttggattgtgtttctatttaggtagaaagtatcatcatgtgacccaacactgactgtc

SEQ ID NO: 663057 - DNA, 638 bp, Homo sapiens
gaacattggactccacattcttcaggttggggactcagactgggtctccttgctcctcagcttgcctattgtggaaccttgtgatcatataagttaatacttaataaactcatatatatatatgagtttattatatatatcctcttagttctatccctctagagaaccctgactaattttggtaccagaagtggggtggctctagaggaactgaatattaaggatggagttcttatgttagttttggggtttctggggttggctgcttaatamgattaaaccccaaaatgttaaggactcaacttccaatagtatggagaacactgatagtccttggtgtgaactgtttagagagttatgcaaaataagcacacttgacactgctgattcaccacttgtgagaggcaagaagtttagtgactctatacataatagcttagactatatgtctgaatagtctgactcatgtggagctctggcattggctaattaatcatggtgttcctagaagtgaaattgataggaagtctactgcattcctacttaatttatgtcagcagaaaacttataggtcaaatggacaaaagactaatttgaattataaaaacagaaaatcatggtccgtcaatcaatttcca

SEQ ID NO: 663058 - DNA, 577 bp, Homo sapiens
atcaattcacaagagattttaagcaaatagtactcatcattgctatatttaacaaatgaaatggaattctgtgatggaaatttatgaatatgttcagaagtatagcaatataaatatacattagaatttgttactaattcaattattctttttcacctcatctgttaggtaaaagcttaactaaacaaattaatattgagtggttcccaggaggccaagaaccatagactttgyggtaatgcagaggaaatgagtttcagatatgtgtgtcctttggggaaaatggctgaagttcaactcaggagatcatgggcagtagtgccctattgatctctcttctgcaagtgtagctatcatgaaagtgagtaagtaatctccaaagtaactagggactcaactattatataggcgaaaatcaatattcttgaattccacagttaaaaaaaaggtcaggtgcaattctaatatccagatgcagtcagctcattaagtagaacagaaatcatatcaaagtttcagctgggggaagggagatgacaggctgcttttttccacaattatgattcacaggatgttt

SEQ ID NO: 663059 - DNA, 577 bp, Homo sapiens
atcaattcacaagagattttaagcaaatagtactcatcattgctatatttaacaaatgaaatggaattctgtgatggaaatttatgaatatgttcagaagtatagcaatataaatatacattagaatttgttactaattcaattattctttttcacctcatctgttaggtaaaagcttaactaaacaaattaatattgagtggttcccaggaggccaagaaccatagactttgcggtaatgcagaggaaatgagtttcagatatgtgtgtcctttggggaaaatggctgaagttcaactcaggagatcatgggcagtagtgccctattgatctctcttctgcaagkgtagctatcatgaaagtgagtaagtaatctccaaagtaactagggactcaactattatataggcgaaaatcaatattcttgaattccacagttaaaaaaaaggtcaggtgcaattctaatatccagatgcagtcagctcattaagtagaacagaaatcatatcaaagtttcagctgggggaagggagatgacaggctgcttttttccacaattatgattcacaggatgttt

SEQ ID NO: 663060 - DNA, 558 bp, Homo sapiens
tagttgaaaacataatattcaatatttgttacctctttttttgtatatttatttgttatactgaactgaattattcacttattatttgaagttatgttcttataggaagctaggcaccaaccagcagttgctaataatatactataatttagtaagtaattcaattgaataaaatttatgacaaatttaacaaacatgttaattaaaatgcatactcacgctgcagcgtcacattaatctttgtgccrccagtgcctatgccatgcttagtatgcatcaaatatttgagcagtacacaagtgagtactctgagagctccccccaccaaaaatatgatgattaaatacagttatgatcagatccccagagtgtggctctaaactgtatgggggccaagtttgaatactgttgtgtcttacactgttattacctatccagtatctatttccccatattccttataaataaaacctagattttgattgggacagtaaggtgtcccactgaaaactcatttctctaaccaatgtgatgccagtgcttgcccaaaaagagggc

SEQ ID NO: 663061 - DNA, 566 bp, Homo sapiens
tgtcctcttctcttattctacacaacaataacgaaccatttctcagttggattctgaygtgcaaggaaaagtagatgttatatgataaatggcaatgaccagctcagtggttgggccgagaagacactccaaggcacttcccaaagccaaacttgcaccaataaaggtcatggtcactgtttgatggtctgctgccggtctgattcactacagctttctgaatcccagtaaaaccattacttctgagaagtacgctcagcgcatcaatgagatgcaccaaaaactgcaacacctgcagttggcattagtcaacagaaagggcccaattctctacaacagccaactgcacgtcacaccaccaatacttcaaaagttgaacaaattgaggtgggaagtttttgctttatccaccatattcacctgaccccttgccaaccaactaccacttcttcaagcatctcaacaactttttgcagggaaaatgcttccacaaccagcaggatgcagaaaatgctttccaagggttcgtcggatcccaaagcatggatttttatgctacaggaata

SEQ ID NO: 663062 - DNA, 382 bp, Homo sapiens
gtacacacttttaaacaagcagatctcttgagaactccatcatgagaacagcactagggggatggtgctaaaccattcctgagggaccacccccaggacccaatcacctcccaccaggccccatttccaatattggggattacaattcaacatgagatttggacaggcacagagatccaaaccatgtcagcctagttctactaatcctgcccttcttttattggaattctccaggtctctgctgctctctgcagcgaggaaagacctgttctayaataatccagcactgcaggctggactaatcatctttccaacacgtggttcacttagcaagcctatttggcctcacacatcctacacttagctcttactagtaactgaa

SEQ ID NO: 663063 - DNA, 579 bp, Homo sapiens
ttgttatccccagcataaaggaactaagagaaggtgagagagatatacacaaagtggaagtaaaatcttataacctaatattggaagtgatacccaatcatttcttctatattctatttcttagaggcaagttactaaattcagccactcaaccagtaggaaakttaagctcttactgctcaaaaagagtatcaacaaatatgccaacgtatctttaaaaccctcacaaatcccaaccacttggaagagctaagaatttgtgatgagaaccaagacaaaactattaggaatctacataaacatgaaggcgttagtgatgtcctggaagtcagttgatttgaatgagccactgtgtgttaagatagtggaaagaactattattttctgagtgcccactatatacctggcactgtactaggtgtgttatgcgaatcatctctttttcttgccattaataacaaccatgtacttccagtgccttcaccacctggaatcccaaggttcctgaatcagataggataaattttggttttgaaggacagagtctcaagatagtaggaattaaaacacaatggaact

SEQ ID NO: 663064 - DNA, 471 bp, Homo sapiens
tggacctcgtcatagtgccgctcacaaaatttaagtttgttatccccagcataaaggaactaagagaaggtgagagagatatacacaaagtggaagtaaaatcttataacctaatattggaagtgatacccaatcatttcttctatattctatttcttagaggcaagttactaaattcagccactcaaccagtaggaaatttaagctcttactgctcaaaaagagtatcaacaaatatgccaacgtatctttaaaaccctcacaaatmccaaccacttggaagagctaagaatttgtgatgagaaccaagacaaaactattaggaatctacataaacatgaaggcgttagtgatgtcctggaagtcagttgatttgaatgagccactgtgtgttaagatagtggaaagaactattattttctgagtgcccactatatacctggcactgtactaggtgtgttatgcgaatca

SEQ ID NO: 663065 - DNA, 593 bp, Homo sapiens
tacctcaataaagctggaaaatagatcccaaccaagggccaggtatagaagcatgtgcttataacaataamgtttctaaaagaaatagccccgcttaggtaaatgttaccaatttctctaataccccaaaaattcagatttttgtgttaaaaatcctgatttttaatattggtaaaacttttaataacatagataagcaattatatgtctttatggatatagggtcccatgggctatagcttacaatatgtggtctcaatctcagatattctatagtcttcagagtctctcatgtttagacctgaatcatgtctccagtttctctaaaattgagttagtttaagatgtgatcccaaagctcaccctaggttgccaggtaccaggttccaataggtgaatgtagagttctacggatgagggagctgtttgatttatgcatactcatgtcagtattttgattatgccaaatctgaattcagtagtttggtatacattcgcaagaaaaaatgaaactcatatgaaagatttgtcaattataaagcctcaaaagtggggcataattaatccatgttagggcttttggatttgtttca

SEQ ID NO: 663066 - DNA, 593 bp, Homo sapiens
tacctcaataaagctggaaaatagatcccaaccaagggccaggtatagaagcatgtgcttataacaataaartttctaaaagaaatagccccgcttaggtaaatgttaccaatttctctaataccccaaaaattcagatttttgtgttaaaaatcctgatttttaatattggtaaaacttttaataacatagataagcaattatatgtctttatggatatagggtcccatgggctatagcttacaatatgtggtctcaatctcagatattctatagtcttcagagtctctcatgtttagacctgaatcatgtctccagtttctctaaaattgagttagtttaagatgtgatcccaaagctcaccctaggttgccaggtaccaggttccaataggtgaatgtagagttctacggatgagggagctgtttgatttatgcatactcatgtcagtattttgattatgccaaatctgaattcagtagtttggtatacattcgcaagaaaaaatgaaactcatatgaaagatttgtcaattataaagcctcaaaagtggggcataattaatccatgttagggcttttggatttgtttca

SEQ ID NO: 663067 - DNA, 593 bp, Homo sapiens
tacctcaataaagctggaaaatagatcccaaccaagggccaggtatagaagcatgtgcttataacaataaagtttctaaaagaaatagccccgcttaggtaaatgttaccaatttctctaataccccaaaaattcagatttttgtgttaaaaatcctgatttttaatattggtaaaacttttaataacatagataagcaattatatgtctttatggatatagggtcccatgggctatagcttacaatatgtggtctcaatctcagatattctayagtcttcagagtctctcatgtttagacctgaatcatgtctccagtttctctaaaattgagttagtttaagatgtgatcccaaagctcaccctaggttgccaggtaccaggttccaataggtgaatgtagagttctacggatgagggagctgtttgatttatgcatactcatgtcagtattttgattatgccaaatctgaattcagtagtttggtatacattcgcaagaaaaaatgaaactcatatgaaagatttgtcaattataaagcctcaaaagtggggcataattaatccatgttagggcttttggatttgtttca

SEQ ID NO: 663068 - DNA, 593 bp, Homo sapiens
tacctcaataaagctggaaaatagatcccaaccaagggccaggtatagaagcatgtgcttataacaataaagtttctaaaagaaatagccccgcttaggtaaatgttaccaatttctctaataccccaaaaattcagatttttgtgttaaaaatcctgatttttaatattggtaaaacttttaataacatagataagcaattatatgtctttatggatatagggtcccatgggctatagcttacaatatgtggtctcaatctcagatattctatagtcttcagagtctctcatgtttagacctgaatcatgtctccagtttctctaaaattgagttagtttaagaygtgatcccaaagctcaccctaggttgccaggtaccaggttccaataggtgaatgtagagttctacggatgagggagctgtttgatttatgcatactcatgtcagtattttgattatgccaaatctgaattcagtagtttggtatacattcgcaagaaaaaatgaaactcatatgaaagatttgtcaattataaagcctcaaaagtggggcataattaatccatgttagggcttttggatttgtttca

SEQ ID NO: 663069 - DNA, 541 bp, Homo sapiens
aatacaaaaagaagtaagtctgatcttcacttttgttttttttttatttatttatttctgagacagggtctccctcctctgttgtccaggctggagtgctgtagtgcattctcaactcactgcaaactccacctccccattcaaataattctcctgcctcagcctctggactagctgggactacaggcacgccactatgtccagctaatgtttgtatttttagtagagacagggttttaccatgttgcccagcctggtctcgaactcttggcttcaagtgatccagtcagtcaccttggcttcccaaagtgctgggattaccagcgtgagccactgcacccggcctgatctttattttcgaaatcctagataaaaccaygtttgcaggtaaacttggccagtattttttaaatctgtgggccaataaactcctctctttaacattagactggatatcctattatttggcaatcagagtcttgatagaatgaatatattgtgttggtcttagtcagtttgggtttctacaacaaattattgt

SEQ ID NO: 663070 - DNA, 541 bp, Homo sapiens
aatacaaaaagaagtaagtctgatcttcacttttgttttttttttatttatttatttctgagacagggtctccctcctctgttgtccaggctggagtgctgtagtgcattctcaactcactgcaaactccacctccccattcaaataattctcctgcctcagcctctggactagctgggactacaggcacgccactatgtccagctaatgtttgtatttttagtagagacagggttttaccatgttgcccagcctggtctcgaactcttggcttcaagtgatccagtcagtcaccttggcttcccaaagtgctgggattaccagcgtgagccactgcacccggcctgatctttattttcgaaatcctagataaaaccatgtttgcaggtaaacttggccagtattttttaaatctgtgggccartaaactcctctctttaacattagactggatatcctattatttggcaatcagagtcttgatagaatgaatatattgtgttggtcttagtcagtttgggtttctacaacaaattattgt

SEQ ID NO: 663071 - DNA, 585 bp, Homo sapiens
atctctttcactgtcataatttcctgagttataatttttgcaaaggtgggccaggctaccttctgcctctcatttcttggatattccatgaaaattttccattcacaaaagcatttgctaaaatattaacagtacttatttgcattggaaccaccacaatgcacacagctaggctgatccaggaaaatgttagatgtgtttccccgattatcatttttcacaaaaggtgattgatattatacctatctctttccctgtgatttcaggaagtctcaaaatctcaaccagccaagttagctgatcactcctacccctgccttataattctaaaaaggtkgattaaggtaaagaatatttaatttccttaacatttaattttatccacatccttttaccacttgaggaaagtatggtggcttgactgatttaatgtgttgcattaaacaactattctaatgataataagtcttttattatgaatctaacatttctggcacagaatcagacacaaaggacttttgaggaaccttactattcaaatggtctgagagatattaaaaaaataattacagtacaatggattgc

SEQ ID NO: 663072 - DNA, 556 bp, Homo sapiens
gttgttgaacctaaaaactagagcgtgaaagcgtatgatctcttgagagtttatttatgcatacaggggttatgagctttatgtcaaactgcctttgttaaagaaagcattaggataaggactcaaacattttcagttattcttggtcagactttaacattgtgtcagcatgctttgtttactatgagcatttaccaattttatatgaattaatcacatttccatttgccatggatactcctgttcctttacccacaagtttaattactgcttcttttttaagacaatattttctgaaaacaataccggtctcattatttaawgtggaaacatttcttagttttagcacttctacatgttgatttgtcattttcatgacttataaatgcttagactattactctataaccatgggaagctatttcaagtgaggccagaaaatgggaatacatattctcaaaagaaaataattcaacaagatgttccattcattcttgctttggacaaaacattgttataccatatgacaaattaagaaacactaaattacagtctt

SEQ ID NO: 663073 - DNA, 569 bp, Homo sapiens
tggaagattgaaaagggataagtggatgaaagcaagaggcactacagcatcttttgctgtcactgaaaatttcttttcttgatggcttttmaggagccctctccttagtattatagagagaaatctttgcttcagttagagttcaagttaaactacagaccaaaaagctccttgaaactctccttcaattactttccagattgaccactttccactggctatttatctatctgtctgtcttcctactcagcttggcgtgtaaatattggtacttcccagagctttgaccttactccttttttgtttcttactcagcaaacctttccctacaatctcatccacacccttggcttcagcttccatgtatatgctgactcctcaaactgtagcacagattaatcatttgcgttttagactcttaaatgcaactgatctattgaacatttccccttcagataatgtgggggaatttcccacagaaaattcaaatttaatgtttccaaataaaattcaccatccttctccccttccatgtcattcctcttctcctctgtgtcatcgtagcctca

SEQ ID NO: 663074 - DNA, 569 bp, Homo sapiens
tggaagattgaaaagggataagtggatgaaagcaagaggcactacagcatcttttgctgtcactgaaaatttcttttcttgatggcttttcaggagccctctccttagtattatagagagaaatctttgcttcagttagagttcaagttaaactacagaccaaaaagctccttgaaactctccttcaattactttccagattgaccactttccactggctatttatctatctgtctgtcttcctactcagcttggcgtgtaaatattggtacttcccagagctttgaccttactccttttttgtttcttactcagcaaacctttccctacaayctcatccacacccttggcttcagcttccatgtatatgctgactcctcaaactgtagcacagattaatcatttgcgttttagactcttaaatgcaactgatctattgaacatttccccttcagataatgtgggggaatttcccacagaaaattcaaatttaatgtttccaaataaaattcaccatccttctccccttccatgtcattcctcttctcctctgtgtcatcgtagcctca

SEQ ID NO: 663075 - DNA, 579 bp, Homo sapiens
atgtcccttaaaaggctgcctacaaaatarcatccaaactccttggtctgggaagcaagatcatctgaagtttgttatctccccctctatctagtcccagctcttgccatccctataaaccacacttagaatgccagctgcaccaaacagttctgtttgtggaacatggctggtcatgtgcttccctagacaaagacaaatcattctcactgaggcttgtccaaatatctgttctgtacaatcaaatatatgttgttttacattacagtgggtattagtcaggattctctagagaaacagatctctagagaaaataagatacatacatacatatgagacaaagagaaagagaaagtgagagagagagagacttattgtgaagtaagatactggttcacacaattatggaatctgagaaatcccacaatctgccatctgcaagctggaaactcaggaaacccagtgagagccaatggggtatattccagcctgggtctgatggcctgagaactaagagtgctgaggtcaggaaaagatcagtaatccagctaaagcactcaggcagtgagcaaattcaac

SEQ ID NO: 663076 - DNA, 579 bp, Homo sapiens
atgtcccttaaaaggctgcctacaaaataacatccaaactccttggtctgggaagcaagatcatctgaagtttgttatctccccctctatctagtcccagctcttgccatccctataaaccacacttagaatgccagctgcaccaaacagttctgtttgtggaacatggctggtcatgtgcttccctagacaaagacaaatcattctcactgaggcttgtccaaatatctgttctgtacaatcaaatatatgttgttttacattacagtgggtattagtcaggattctctagagaaacagatctctagagaaaataagatacatacatacatatgagacaaagagaaagagaaagtgagagagagagagacttattgtgaagtaagatactggttcacacaattatggaatctgagaaatcccacaatctgccatctgcaagctggaaactcaggaaacccagtgagagccaatggggtatattccagcctgggtctgatggcctgagaactaagagtgctgaggtcaggaaaagatcartaatccagctaaagcactcaggcagtgagcaaattcaac

SEQ ID NO: 663077 - DNA, 588 bp, Homo sapiens
acaatgagcaaagccatctgctttactcagttcgctaattcaaatgctagtgtctttcccacacaccttcatagacacactgagaaataatgtttaaccagatatctgagtatcccatggcccagtcaagttgacatacaaaattaagcatcacactgagtttgagkatatatattacacaacagtatataactggagcaggtgtttttataatttacgattttcccatggtgaaaatctccagcattacctggagaatagatttttacctttttacagaatgttacattttctcctttctggattattatgtggagtggtagaaaatatatgaaatttgagaacagatctaagttcaaaaatattcatttcccttattatcttttatgaactttgataatttcctcttagtaaaatatggatgatatctactttgtacgtagctgtcgcgcttaattcagctaatagggataatgctcctaacatctcagatggagtcagaagttataaaccagggactatctttctccatgatgattagcaatggaatgtctaaaaagaaataagagaataaaatatgagacataa

SEQ ID NO: 663078 - DNA, 659 bp, Homo sapiens
agcctgggtctgatggcctgagaactaagagtgctgaggtcaggaaaagatcagtaatccagctaaagcactcaggcagtgagcaaattcaacattctccatctttttgttctatacacatcctcactggatgatgccctctcacaatgagcaaagccatctgctttactcagttcgctaattcaaatgctagtgtctttcccacacaccttcatagacacactgagaaataatgtttaaccagatatctgagtatcccatggcccagtcaagttgacatacaaaattaagcatcacactgagtttgaggatatatattacacaacagtatataactggagcaggtgtttttataatttacgattttcccatggtgaaaatctccagcattacctggagaatagatttttacctttttacagaatgttacattttctcctttctggattattatgtggagtggtagaaaatatatgaaatttgagaacagatctaagttcaaaaatattcatttcccttattatcttttatgaactttgataatttcctcttagtaaaatatggatgatatctactttgtacrtagctgtcgcgcttaattcagctaatagggataatgctcctaacatctcagatggagtcagaagttataaaccagg

SEQ ID NO: 663079 - DNA, 588 bp, Homo sapiens
acaatgagcaaagccatctgctttactcagttcgctaattcaaatgctagtgtctttcccacacaccttcatagacacactgagaaataatgtttaaccagatatctgagtatcccatggcccagtcaagttgacatacaaaattaagcatcacactgagtttgaggatatatattacacaacagtatataactggagcaggtgtttttataatttacgattttcccatggtgaaaatctccagcattacctggagaatagatttttacctttttacagaatgttacattttctcctttctggattattatgtggagtggtagaaaatatatgaaatttgagaacagatctaagttcaaaaatattcatttcccttattatcttttatgaactttgataatttcctcttagtaaaatatggatgatatctactttgtacgtagctgtcgcrcttaattcagctaatagggataatgctcctaacatctcagatggagtcagaagttataaaccagggactatctttctccatgatgattagcaatggaatgtctaaaaagaaataagagaataaaatatgagacataa

SEQ ID NO: 663080 - DNA, 586 bp, Homo sapiens
tatgaactttgataatttcctcttagtaaaatatggatgatatctactttgtacgtagctgtcgcgcttaattcagctaatagggataatgctcctaacatctcagatggagtcagaagttataaaccagggactatctttctccatgatgattagcaatggaatgtctaaaaagaaataagagaataaaatatgagacataaatatttaaagagtgtacattgaatagttggaaacctgagagaatcaagcaaaaatttattcaaaacagtaagaatgtttaagtggtagctagctacaaaattaaaatataagtcaacaactgtcttgtatttgaagaataattaatttgaaaatattactaaaaaagacctcyatgagaactaagtataaaatatccaagaacatgtttaaaaagaaatgtgtataattatttaagaaaacaatgaaagtctgtcatataaaattttaatatgtggtgcccagcagtgagtaattgttttgatgaatatcagttcccttcctgcaggctttaggcattacagggtacactgaaggcaacactacagcccttctgcacagctac

SEQ ID NO: 663081 - DNA, 586 bp, Homo sapiens
tatgaactttgataatttcctcttagtaaaatatggatgatatctactttgtacgtagctgtcgcgcttaattcagctaatagggataatgctcctaacatctcagatggagtcagaagttataaaccagggactatctttctccatgatgattagcaatggaatgtctaaaaagaaataagagaataaaatatgagacataaatatttaaagagtgtacattgaatagttggaaacctgagagaatcaagcaaaaatttattcaaaacagtaagaatgtttaagtggtagctagctacaaaattaaaatataagtcaacaactgtcttgtatttgaagaataattaatttgaaaatattactaaaaaagacctctatgagaactaagtataaaatatccaagaacatgtttaaaaagaaatgtgtataattatttaagaaaacaatgaaagtctgtcatataaaattttaatatgtggtgcccagcagtgagtaattgttttgatgaatatcagttcccttcctgcargctttaggcattacagggtacactgaaggcaacactacagcccttctgcacagctac

SEQ ID NO: 663082 - DNA, 600 bp, Homo sapiens
ctacagcccttctgcacagctaccttaagtcttttctcataaagcagatgaggcagatgtcatcaactgagagactggaaaatgccaacaatcttatttgtagggaaatgtcaataaataaaaatttaatgtggaaaccagttaaaaggcccatgaaagtcatttcttaccaggcaagatcaaatcctgagatcaactgcctcaaattgcctagagtcggtgattagaagagaaatatataaagcttagctttcaacaaattaactcttcacatatttaaagacagttgaggcttacttttctgaaaatgtggggtttaagaaaaaaaacaacccaagcaaatagaaaatggtagttctttagacttacagaagaaaagcatgcacctgtttagaaagtgttgggttcctttttaattttttcaaaggtttaggtttggtttratgacatgatcttgatattattatggtaataagctgcatttgctaactatgttgtatgagataattattggttgttttgaatctaaagtctttgagaaaaatatttaatcataagctaaattcatcataattatgcactttttaggaggagttgtca

SEQ ID NO: 663083 - DNA, 600 bp, Homo sapiens
ctacagcccttctgcacagctaccttaagtcttttctcataaagcagatgaggcagatgtcatcaactgagagactggaaaatgccaacaatcttatttgtagggaaatgtcaataaataaaaatttaatgtggaaaccagttaaaaggcccatgaaagtcatttcttaccaggcaagatcaaatcctgagatcaactgcctcaaattgcctagagtcggtgattagaagagaaatatataaagcttagctttcaacaaattaactcttcacatatttaaagacagttgaggcttacttttctgaaaatgtggggtttaagaaaaaaaacaacccaagcaaatagaaaatggtagttctttagacttacagaagaaaagcatgcacctgtttagaaagtgttgggttcctttttaattttttcaaaggtttaggtttggtttgatgacatgatcttgatattattatggtaataarctgcatttgctaactatgttgtatgagataattattggttgttttgaatctaaagtctttgagaaaaatatttaatcataagctaaattcatcataattatgcactttttaggaggagttgtca

SEQ ID NO: 663084 - DNA, 644 bp, Homo sapiens
acagagtctgttatttctcttgcaacgtatgttatctcttttttccctaaaccctaattcttagctggcctcactcccaatggaaaaaagatgttttccagcaaccgttgaattcaatgtggacatattattaaggtcaatctgatgccctacaaataaatgtcttttgtttaactttctagaagagggtttatagcccttttgtcccttctttcctttctgctagctgaaaaaaaattctttcacacatgacagagaaataaactgttattttatttaagccattgttattttgagttactgtatctcaagataacttagttatctaagttgtcttagtttactgtcactcaagataacagttccaattacaacaayatttataaaataaattaaaaaaaacaagaaggctaccttcacgttaggtaaaaaaaaaattacccaggagctaatgattttttaaatcttgctgagtgttttctggatcctatgatttcctgtttggtttattatctaaattgtttgcatttatcagttactgctgctatgactcaatcattataataacatgatcgaaagcctcctatttaatatctactgcaatgcacatttgctgcactgataatattcaagtctgccaaaca

SEQ ID NO: 663085 - DNA, 486 bp, Homo sapiens
taagcatgttattcagccttctagttgctcctcatttgctacaactaagactcaatagcttagttgaactgactttttatgttactcttctgagagaacacagtaaaaagctcaaacacagacaaaagtaggcatcctggaatcattctatgcattgccagttagatgtctgggatgacctttgggaattactccttttggagagcctccttcatgtcttccaatacacacccctgttccttggtggtttatactttggctatgcccagtgatatactggacactgtgtgtcagttccacctacttgctcaaagatcttacttgtgaattctgtcacacaaacactccaattttcaacagctacatctgtgctctccctyaccatggctccctactacaaacttcaaacttccagaagataagtgtctggggaactgactggtccttgagcttaaggaagcattgtagaattaatagcttgcttat

SEQ ID NO: 663086 - DNA, 566 bp, Homo sapiens
gctttgacttggaacctcttccctcagtctaaaacagatagctttgagacctgcctgttttccactgcaagaatgctgctgctccatgtgtagagggagaggggctctgcctttcacgcattcccaayccagtggacactcaacagtggaggaggtgcagctgctcttattagccctggaatggccatccacaggtgtgtccatgcctcttccctgtgggatcagccacgtctgtgtttgcagcaatgagcagggtgaggagaagttcccttctccacatccacgtccaagcaatggagctgcctagattctaggacagaacacactcctcccccacaggactgaacacagtgtctgtgtatccactaggaaaggggaagtcaccttcagcccacaagtgtggcactctggaggcacagcagagcacatgttcttgtctcctttgttccaagggggctttgttggtgtgctacactctctcttcccctaggagcagcatggcccaagggccagatcactgggaattctgcagcttccctgggttcagtcagccctgtctggctacc

SEQ ID NO: 663087 - DNA, 604 bp, Homo sapiens
ttggggaactgttgagaaggcatgattggttttgaaatgtgagaacatgatatttgagagggaccaggctggaatgatatggtttgtctgtgtctccactcaaatctcatcttgaattcccatgttttgtgggagggacttggagggaggtaatttaatcatgggggcagatctttcccatgctgttcttgtgatagaaagtaagtctcataggatccgatggttactgtaagggggagttttcctgcacaagctctctttttgcctgctgctatccacrtaagacatgactggctgctccttgccttctgccatgattgtgaagcctcctctgccatgtggaactgtaagtccaataaacttctttcttttgtaaatttcccagtcttgggtatgtctttatcagcagcatgaaaactgactaatacacactgttaataagagtttaattaaaaacccccagaaacagtctaaatgtccattaaccaaataatgtataagtacatgttgaataaatatactatggtccagtcactggaatagtatacagaaacaaaaattagttgactaccaatgtacaaagcagattgatgaatcttgaaat

SEQ ID NO: 663088 - DNA, 617 bp, Homo sapiens
gagacatttgcatgtggcccctgagaaagaagagatttgtctgcctcaccccctgctggtgcaaacttgcacctctctcagcctcagttttcttatrtgtatcaagtttcaatgatcgcaatagtacttatctcatgtgactactgtgggattgaaacgagatagttcatgtgaagtaccgagcacagagcctggcacacagtaggtactctattagtgttaatatcactggaaaacccagctgggggctcagcagtagaagctgccagagccttagtgttacagccacatccattaccccaccattcacatacatttcatgccccagggtgagaatccacatatcccaagcagagaggcacagctttggtaaactgagtcttagctaactcatgtcagaaaccaagtgttatcctggggtttgactcctggctcttgccacattcatagcaggatgctgagtggattgtactcagcctcacttgttgcatctgtgaaatgggggtgattttttgacttctcaaggtatagcatctattaaggcacatagactacaatctgacacaaattagcagctccatacattgcagaatcttttctttttcacttaaggagat

SEQ ID NO: 663089 - DNA, 565 bp, Homo sapiens
agacaaaccttaccatcttggaatcattttttctaaatggggatcatcattcttgttctatctggccttagggggttcctataaaagtcattgacttccaaattcactcaagtttttggcagaattcatttccttgcagccatraaacaagactgttggcaggaggccaccctcagtgcccagaggagttccttgccctgtgtccctctccacaggccatgttgcacagcacagaagcttgcttccccaaaatcagcaaaggagaaaaaggacaagtctaattgttacaggaaaggggtctggatccagacctcaagagagcgttcttgaatctcgcgcaagaaagaattcagggagagtccacagtacaaagcaaaagcaagtttattaagaaagtaaagtaataaaagaatggctattcaatagacagggcagccctgagggctgctggttgcccatttttatggttatttctggatgatatgctaaacaaggggtggactcttcatacctcccctttttaggccatatagggtaacttcctgacattgccatgacatttgta

SEQ ID NO: 663090 - DNA, 258 bp, Homo sapiens
gcactaattcctgctactaaagttactctcccattgacttcygctcagttcagccttcccagactctcactatctgtacacaggtgcgagaagacagatgcatatagctataattcttaaacagtttactagccctatcttttaagcatgtgtctttttaattgaaaggaatatccttctacttagttctttattctttcttatcaaagattttctcaggtaggaacaacttgttggatgtgcctatcctaaactaag

SEQ ID NO: 663091 - DNA, 615 bp, Homo sapiens
tccaatccccatctcacatacccttcaaaaaaaatggacaacactctggagtcagagagctgtggcttcaacagaattgtccttggtctctgccaatgatccactgtggcataggaaatgctcttttacttatcctgatttctaggaatttctgaccatatcacagtcatgcatccagaattcaatctttattaattactacagtctaggaatattcttttatgcattcattcttccaaacacaattttccagcacctactctgcaccaggcaggtgctaatctccattaatgttttaagtctgaatatctgccgacttcatacagactttcccaccacaacatatggttccagacaaatgttcaggttttgccaagtgatttttaacctcaggaagaaaatctccaccttagagtaaaactgtaatgtcattcgcaaaaggaaaaacttccttycatacacattcaaaataattttccaaactcaacgaatagggcacacaattgtggcctatcgatcaaaacataaggaagagagctgatccctccaggatacagggcaatattaacaaaactgttgtcatcaaatcagccgacacacacaggctgcccacag

SEQ ID NO: 663092 - DNA, 561 bp, Homo sapiens
tgttatgggctgaattacatcttccccaaaattcacatgttgaaatcctaaccctcagaatctcagaaagtaactgcgtttggaaatagggcctttaaagaggtaattaaggtaaaatgagctcccatggtgggcctaatccaatatgactagtgttcttataagaagaggagattaggatgcacacaacacacagaccaagggatgacaccatgtgaggacacagcacagaggcaaccatctggaagccaaggagaatcctcagaagaaaccaaacatgctgaccctttgatcttggactctagcatccgtaactctgagaaaataaatttctgttgtttaagccttctctcatcgcagctctagcaaatgaatatgcccatcttaagaattagtaaaagagggcagtcacagtggctcatgccygtaataccagcactttgggaggccgaggcaggtggatcacttgaggtcaggagtttgagaccagcctggccaacatggtgaaatctcgtctctactaaaaataaaataaataaataaataaataaaattagctgg

SEQ ID NO: 663093 - DNA, 615 bp, Homo sapiens
acatgaagaaacctttgagggtgattaaaatgttgtgaaatacgagaatttcaggaataaagagaagcttctaaaaactcatagaaaaaaagcagaagggctataaaggatcaagaattgggagaacatcagaacactcaatcataatgactcaaatcaaaatgatgtcaaacctagaatgttataacaaattaccttaattatcaattatgaggagttacaagaagcggtttttggtttttgtttgtttgttttttgaggcaaagtctcactctgtagcccaggctggagtgcagtgtgcgatctcaggtcactgtaacctctgcctcccgagttcaagagattctcatgcttcagcctccaagtagctggaattacaggcacccgccaccacacccagctaatttttgccctcccaacgtgctgggatttcaggcatgagccactgaacctggccaagaagcatatttttatttcatcaytcatgcctacttcctcagaaagctactggaaaatgtactccttcgaaatgagtttaagccaaatgagagtaagacatgagatccaggtaagaggagctaaaaacaggttaaaaagcaacagaattcccaggaa

SEQ ID NO: 663094 - DNA, 595 bp, Homo sapiens
ttaaaacttacacagctgcaacatttatgtgtattactagtataggtactgtctgaaagatcattgttacagaaaagatagtaaagaaactaatgcaataaaagcgtatcaggctggcacggtggcttacacctgtaatcccagcactttgggaggccaaagtgggtgrgtcatttgaggtcaggagtttgaaaccagcctggccaacatggtgaaacccagtctctactaaaaatacaaaaattagccaggcgtgatgatgggcacctgtcatcccagctactcaggaggctgaggcaggagaatcgcttgagcccaggaggccgaggttgcggtgagcagagatcgcaccactgcactccagcctgggcgacagagcgaaattccaaaaaaaaaaaaaaaaaaaaagaaagaaagaaagagcatatcagttggagtagattattcaaacaaacaatggaggttgggaaaatgagaatatgcgggggatggacagtggtggtggaatccaatcagatctttatgttaaatgatggacaaaaaattcaacataggcgaaggaattgaaagtaaaatatgaaaacaaaaccccaaa

SEQ ID NO: 663095 - DNA, 595 bp, Homo sapiens
ttaaaacttacacagctgcaacatttatgtgtattactagtataggtactgtctgaaagatcattgttacagaaaagatagtaaagaaactaatgcaataaaagcgtatcaggctggcacggtggcttacacctgtaatcccagcactttgggaggccaaagtgggtgggtcatttgaggtyaggagtttgaaaccagcctggccaacatggtgaaacccagtctctactaaaaatacaaaaattagccaggcgtgatgatgggcacctgtcatcccagctactcaggaggctgaggcaggagaatcgcttgagcccaggaggccgaggttgcggtgagcagagatcgcaccactgcactccagcctgggcgacagagcgaaattccaaaaaaaaaaaaaaaaaaaaagaaagaaagaaagagcatatcagttggagtagattattcaaacaaacaatggaggttgggaaaatgagaatatgcgggggatggacagtggtggtggaatccaatcagatctttatgttaaatgatggacaaaaaattcaacataggcgaaggaattgaaagtaaaatatgaaaacaaaaccccaaa

SEQ ID NO: 663096 - DNA, 552 bp, Homo sapiens
attatctgtagaaattgtgacaaacacggccatttatcaaaaaactgtcccttaccatgaaaagttcgttgctgcttcctgtgctcctggagaggacacctcctgtattcctgtccagcccccctttgcaaatactgtcctgtgcctaagatgttggaccactcatgtcttttcagacattcttgggataaacagtgtgaccaatgtcatatgctaggccactatacagatgcttgcacagaaatctggaggcaatatcacctcacgaccaaacccagaccacccaaaaagccraagacccttcaaaaccatcagccttagcatattgctgtcactgcatgcaaaaggccattatggacacaagtgtccagaaagagaagtgtatgacctgtctccagtatctccattcatctgctactatgatgacaaatatgaagttaaggagagaaaaaagagagtaaaataaaaaataaaagtactcaagaagagtggggatatcccagagccatccaagctaccttacataaaagcagcaaatgagaacccccatca

SEQ ID NO: 663097 - DNA, 538 bp, Homo sapiens
agctccaagccctttcatcattcatcgcattgccatatatcgagagaagacaagtctcccaaggagggtaagaagggcaagagaagaaaaaggagagatgcttggaagatgatgacaatgataacttatttcttattaaggagaggaaaaaaaagtctwaaactgtcaggcagcctctaatgtggctttccgttgttcatttggcctttgtgtccataaccttctggcaatgtgtttattatctgtgattaaataaagtcagtttgggttttgcatttttaatttcagccattcctagagttgctggacatccatggagatctcaattatctatgtccaacaggttattaggtaagaaagtagaaagataaacctggacttctcctgttccaatatgtcatctttactcagaatcctagggctaggaagaagaactcatcttttcaagaaagctttttaaaaatcctttggaaaaaaaaccgcatcaaaggtaattcatcctcagcatgagtatgaaattaaatccttgtaggaagag

SEQ ID NO: 663098 - DNA, 538 bp, Homo sapiens
agctccaagccctttcatcattcatcgcattgccatatatcgagagaagacaagtctcccaaggagggtaagaagggcaagagaagaaaaaggagagatgcttggaagatgatgacaatgataacttatttcttattaaggagaggaaaaaaaagtcttaaactgtcaggcagcctctaatgtggctttccgttgttcatttggcctttgtgtccataaccttctggcaatgtgtttattatctgtgattaaataaagtcagtttgggttttgcatttttaatttcagccattcctagagttgctggacatccatggagatctcaattatctatgtccaacaggttattaggtaagaaagtagaaagataaacctggacttctcctgttccaatatgtcatctttactcagaatcctagggctaggaagaagaactcatcttttcaagaaagctttttmaaaatcctttggaaaaaaaaccgcatcaaaggtaattcatcctcagcatgagtatgaaattaaatccttgtaggaagag

SEQ ID NO: 663099 - DNA, 596 bp, Homo sapiens
tcaatgaatactatttgactaattgatgtagtacctttttgttacaaaatgatttcccaatcccctctaccctattcttaatataaagatttgtgtttttttactgagaaatggcaaataaaggctttggaccccctgaagattaaatactaaaatccccataacaatttttttggtggtgttcttatgggactgcatgaattcgaaggacgtttataatgcctcataatgctctaggaagtgagccaagaactccaccatcactaggagtttcaaaaccttgagaacttttctcccggtgtgtttaagagtatgcaggctcattctgcgcaagaaatgtactggcttaygttgacatttttgtctttccctacctccccactaagtaccacggcagtttcttttcagggtcatacacgattccagcagcctttttggtgagtggaagatagccctacatgcttcccccagctcacacggctctaataagagacaatccccgcaacacagtacagtttcccagcaggataaaaactagtttctaaaaggtaatatttctctcttgagaaagcatagtttgtaactctggcactatc

SEQ ID NO: 663100 - DNA, 648 bp, Homo sapiens
tgtcacttgtaggctgagcttttcataattgctggaagaaaaactgcagactgcacttctcctctgcatgtaaacaacaaaatctgaggggtggctgctccatcgcctggatccckgaatgacttcgatgggcagacaaccactggcaccccacaaatctgcagtggacatcagcatcaacaagagcttctcagttgttttaagcccttgagaatgtggggctgtgtgtcaatgctgtataagcagccttgcctggcagatacacatttacagacccaaacgctttttgtgcaaatcccatttctttctccaaataaacctaggaggtaggtactattgccatgcccattttacagatgaaaaagccccagctgagagaagttaattaagttgtctaggatcactgcagatggctgagacagttttccattccatatctctgtagctccaactcctgctcttaatcaacacactccctctgttctctctgcctaggtgctttctaagccaggaagcaaataacatttgttacacattttcccaaaacatgtttttgcttcatcatgtcacttaccctcactcaactttcttactgtattcaaaagccacattaaagaaagaaaatttggtttttaacaaactattata

SEQ ID NO: 663101 - DNA, 547 bp, Homo sapiens
agtccctgataatgtgatgttgcaggtctctggcccacacttgagtagcaaagaaatagaatataccatctaattgcccccttccttttcccaaaacagagacgtggtataatttgtgcttaagagtgaggatcctagagctggacttcctatgttcaaatcttggtaccagcaagtgtcatcataagcaataattacttaatgtcattaagcttcagtttttttcttctggaaaatgggctgatacaagtattaaccaagatgataccttggaaatccagatgaaaattgatgagggcctaaaataaggctctggtaacaggggttgagagaagagtatatgctccagagacacaaaggagttytgattgacaggactgaccgagtgtgggaagcgagtacgggaaggagtcaagggtgattcccagatttctggagtggatgcctaggcattcattctagccactgaatacacaaaaaggtgcatgtggtgagtggggagagggtggcattggggagaaatgatgaatacagtgttggacacagt

SEQ ID NO: 663102 - DNA, 555 bp, Homo sapiens
tgtactcacttgattttttattcttatgaaggcccttttttgtgtagatagttgttaaattggtgtccttgcagtgggggactgttggtagagccttcgatttggctatcttgctctaccccctcctccacttcatttatttttattgccacataatattccattgtatggatataccacattttatttattcattcatcagttcatggacrtttgggttgtttccactgcagaagccaaaagaaatctcccttttgctcactgaaagtttgctgaaaatgacggaggaaagaaaaaaaaaagcagatcagggtgtagctgcaccattttatatttccatcaggggtatgtgatggttttaatttctccatagacctgccagcacttactatttgactttctgattctagccatcctggtggttgtgaagtatttcattatggctttgatttgcatttcccttatggctagtaatgttgagcatgtttttatgtgtttattggccaagtcccagctacttgggaggctgaggtgagaagattgcttgccaggaat

SEQ ID NO: 663103 - DNA, 555 bp, Homo sapiens
tgtactcacttgattttttattcttatgaaggcccttttttgtgtagatagttgttaaattggtgtccttgcagtgggggactgttggtagagccttcgatttggctatcttgctctaccccctcctccacttcatttatttttattgccacataatattccattgtatggatataccacattttatttattcattcatcagttcatggacatttgggttgtttccactgcagaagccaaaagaaatctcccttttgctcactgaaagtttgctgaaaatgacggaggaaagaaaaaaaaaagcagatcagggtgtagctgcaccattttatatttccatcaggggtatrtgatggttttaatttctccatagacctgccagcacttactatttgactttctgattctagccatcctggtggttgtgaagtatttcattatggctttgatttgcatttcccttatggctagtaatgttgagcatgtttttatgtgtttattggccaagtcccagctacttgggaggctgaggtgagaagattgcttgccaggaat

SEQ ID NO: 663104 - DNA, 555 bp, Homo sapiens
tgtactcacttgattttttattcttatgaaggcccttttttgtgtagatagttgttaaattggtgtccttgcagtgggggactgttggtagagccttcgatttggctatcttgctctaccccctcctccacttcatttatttttattgccacataatattccattgtatggatataccacattttatttattcattcatcagttcatggacatttgggttgtttccactgcagaagccaaaagaaatctcccttttgctcactgaaagtttgctgaaaatgacggaggaaagaaaaaaaaaagcagatcagggtgtagctgcaccattttatatttccatcaggggtatgtgatggttttaatttctccatagacctgccagcacttactatttgactttytgattctagccatcctggtggttgtgaagtatttcattatggctttgatttgcatttcccttatggctagtaatgttgagcatgtttttatgtgtttattggccaagtcccagctacttgggaggctgaggtgagaagattgcttgccaggaat

SEQ ID NO: 663105 - DNA, 545 bp, Homo sapiens
tggtcgtgtgcacctgtagtcccagctactcaagaggatgaggcaggagaattgcttgaacctggaaagtggaggttgcagtgagcctagatcacgccactacactctagcctgggtgacagagcaagactgcatctcaacaaataaataaacttaattatgtaaaaaactgcatgaatgtataagtgatttattatataagtattttattgcttcatgacctgcagtcagtgaatatttcatttgctcaaaagcaatattaaaaaattaaaccccaaacctcaacctagtctaaaaaaatctgttgaatttcacagaaattaagtgtcacctgcataataaaagttcattgtacaaatgactaagtttataggtgacatgctattagtaaataccgtttagtgacctgcrgttactaaatagttcatttgcttaaaaaataaaatagaaaacctcacctcaatatgaaaagtaaaatctgttaaatttcatggagtgtatgtacagtatgttacatcactgtatctgtcattaaattcctcatt

SEQ ID NO: 663106 - DNA, 555 bp, Homo sapiens
gaactttgtacacaagaagcttaataagacgggctcaaaattatttttctaaatatatttcctatacaaaataatttcaagatataattgttacttttgtgtctaatactgtatgttaaataataaaatggtaagcatgtaaaaactacaataccacaaagattgagctattttgccagtagtatactccaactttagttctagaacagtygtagaaatgggtaaacaaactgttttaactgtactcttaactgaaatatagtaccttatgcagtagcagaacatatcagcagaagaacttcacttgacctgtacttaaaaacaaaacagatgcaatttataaaatttagagaaatatagtgaccttatttgcatgtggaaaatgtacttctttctgatctacatatcttctgttgtgcaatgtaagcagtaaaacaaatagtacaggattcatctctgtgggacctagaccccctggtctaacaaataattcttggtcagtactgtaattctgtggtataaaactgataaaattagccttcctgtgactagaca

SEQ ID NO: 663107 - DNA, 631 bp, Homo sapiens
aattctcacattctgtcttttttcactctgtcagcaggacctgactcctgtttttaaatttcatattgtgtttttactgttaatttggaaaacaaatgcatactttttagaattctgtataaaggaggagtaaatatgctgtgarcaaggacctaagtgggttgtcaatgagtttaatatatgagttctaatgtgcagagttgaggtttatattgactgctcagtgcttccctggggctagactataaatggatggatattaggaagtcttgttctgatttggtaatgatgttaatgcattattctaaatcagatagtcttaatatagtttaaatgtatgtttcgaaccaaatgttcttttttaaagcacacaaacattttgaaatcattactaatgtggttaatgaattattgatgttccattgggaaactaaaatgcagatttttctcttttagaaatcagggactattgcaaagcatcacattttagtgatacactgagagccagtggtgtgtttatacaaatagtcctattttccaaataaattctagaaaaatgctttagaatttataaattatacaaaatatgacttatttttagagagtttaaaatttaggtttttttaatggt

SEQ ID NO: 663108 - DNA, 631 bp, Homo sapiens
aattctcacattctgtcttttttcactctgtcagcaggacctgactcctgtttttaaatttcatattgtgtttttactgttaatttggaaaacaaatgcatactttttagaattctgtataaaggaggagtaaatatgctgtgaacaaggacctaagtgggttgtcaatgagtttaatatatgagttctaatgtgcagagttgaggtttatattgactgctcagtgcttccctggggctagactataaatggatggatattaggaagtcttgttctgatttggtaatgatgttaatgcattattctaaatcagatagtcttaatatagtttaaatgtatgtttcgaaccaaatgttcttttttaaagcacacaaacattttgaaatcattactaatgtggttaatgaattattgatgttccattgggaaactaaaatgcagatttttctcttttagaaatcagggactattgcaaagcatcacattttagtgatacactgagagccagtggtgtgtttatacaaatagtcctattttccawataaattctagaaaaatgctttagaatttataaattatacaaaatatgacttatttttagagagtttaaaatttaggtttttttaatggt

SEQ ID NO: 663109 - DNA, 571 bp, Homo sapiens
agcaaaaatgagaaagggagtgacattcccctctagttatagcagaaaattagcaaaatgatcatgacaggaggtaacagtaaagacagccagctcatatatcaaccaagacagttttgagtttgaccagcagactgttattttctggtttagagctctttccaggaacttcttgcatctataacccctgagaaccaagctatggaaaaaattttgctcaattttaagaaaatctaacatatcaagctcctcaactccaaaatattccacaaatagctgctatttactatactgagtaataatcatttaaaattattcaacactttatttgagcatctactatgttcatggcactaaagtagaaatgaagatgaacagttcctgcctcaaaataaatgagtagtatactgctttagatcatgggtttcctagtccattaaaaacactttttggtcatattttctggacaccccgacccttttggtayagaatataacctatgtaattctctaaagttaaattaacctcacttttcttgctctaatatgtgtaaaactgaccttctaggaaa

SEQ ID NO: 663110 - DNA, 565 bp, Homo sapiens
ttacatcctgtgttcagtgaagcacatcagaatcatttgcctagtacagcctcaagtaattgttttatttcttattcttctattattttatgcattttttctacttttaataatgaaataaacccataataaaacaaaaataattcaacaaaactgatgggatttttttttttcattgcaaatgtctgtttaactaatttgttcactaatggaggctcccaagcttcagaaaagatattctcctttaagggaacacagatgtttgacttaaaattccatatttgtgacatttcaatattggtatcctcattttttttttactaatgaaattgtaagaaaacaaaatctgcttgtcctacagcaatttggctgtgattcaaaaactttttattaaaatgaartaatatgttctgcaaatctaattgcagaggaattagacacactaaaccaaatagtcatctgtgatacaaaatgaaataaactagagaaaaaccatttcaggaaatagacagtagaaagaggttctaaggaatggctgtctgcttctattgtgatcatttctgtg

SEQ ID NO: 663111 - DNA, 523 bp, Homo sapiens
cggtgggtttattaaatggaataccatacaactattaacagtgcaaccatttattgacatggaaggttgttcatgacttttctttctttttttttttttttgagacggagtctcgctctgtcaccaggctggagtgcagtggcgcgatctcagatcactgcaacatccaccttctgggttcaagtgattctcctgcctcagcatcccgagtagctgggactataggtgcgcaccaccatgctcagctaatttttatatttttagtagaaacggggtttcaccaggttagccaagaaggtctcaatctcttgacctcgtgatccacccaccttgcctcccaaagtgctgggattacaggcatgagccactgtgcccggcctcatgacatattttttgcatgaaaaaagtgaattacagagcaatatgtttaatatgaagatacttttaagtatacatatttgcatgggaatggttttagaaggatttattccraattgtcaaaggagatcgcctctacatagtg

SEQ ID NO: 663112 - DNA, 624 bp, Homo sapiens
catgaagggctgtgctaaaggttaggagcttaacctgaaattcctgaaagatgaaacaaggaattgaaatgatcacatttgcacctacaaacaacactctggcagctgctggtgagtgaattagagatgagcaggcctggctgcaggaagagcagttgagaaaagaaatgatcagggcttgaacttggacagagggaagaggtgttaaagaaatggaattgacaggacttagtgacagactgataagggaaagggaaaaataaagggtgactctagaatgatgacttcaatttcaccatgttgagtttgagaggcctctagcgctgggccagagtccaggtagaaatatccatttgaactagataggtatgaacccagwaatgttctaaactagatacctggggtaggagtgacaatgagagtgataaggtaaagtgacaaaggggcaagtatatggatgtacactacacaagtcttccaactgttctctaacttgaattttttataataaaatgttgagagggaaaagttgagaagaggctgatgatgaaatactgagtagcaaaagcctaggcagaaaatgaagaagaagcgattcaagaggcatatagaaaactagccaag

SEQ ID NO: 663113 - DNA, 613 bp, Homo sapiens
acaattgaaagccactacagatatttatatttacaacccaaagctaggttttaacaagaaactcataaggcaaaggtgagaagtaaaataatttagcgccaagtggagatatatgtgcaatgctactttgttgggctcaaaacatatttttcttttagaagactgacaggcttgaagtttatgcctccaaagacaaaagtgattaygttttgtttagtagcttgcaaagttgccaaaggccattttttctactctttccctgaaattggtttatatgcttattaaagtcatttatacctatttgcaaatgcttaacatagtttcagattttaagatttccctgcaactttatttcccttgaagtttacagcaacaggagttcatttttatttttaattgcatttattcagtaagtaaactccgccacagaaaaacttagtagacaaggtgagttcccctgtgctccgtggcaaagagtgcggtgggtgacattgacccatggttaggtaatctggtaaggaaagaccccgttgtaacacatctgagcaacgagaccaaaggaagggcttgctgccacgaggcgaagtctgcttttttgaacagagagcccagc

SEQ ID NO: 663114 - DNA, 602 bp, Homo sapiens
aggcaggaataggagagcaaaggaccagaatctgagggtgaagagtgcgcagaaagacccaaattcaacaaacattttaaacatctgctgcattccaggcactttgcaacaactttctcatgttcctcctaaataacaatataacactcctgtaagtaggtattacaagcctattttactgatgagcaaactgaagttttgatgatgtacacaacctgacctgagggtatcttgtgtaaaggccatcctgagatttgaactgaagtctcttaacatttaagacatgatagggactttggaataaacagcccaaaagcatggataagtctgaatkaatcctatttgagatggttctatcctgtccctcttctggtctccagtgaaaaacttatacaaaccatggaagattcaaataaaacagaattttctatttggaaaggatacctatatatatgagaaacttagatacaaagagattaaattatttacccaaggccacattgtcactagtagcaaacccaagtcctgaactctcatcctggggtctttcaacatcctttctaataaccaatatttgaatgagatggtaattttctaatcaa

SEQ ID NO: 663115 - DNA, 500 bp, Homo sapiens
tcgggaggctgaggcaggagaatcgcttgaacccaagaggcggaggttgcagtgagctgagatcacgccactgcattccagcctgggcgacagagtgagactccacctcaaaaaaaaaaaaaaagcttttgatgatggagatattgaaaatcagttgattttgttaaaaatcattcttttccttgatatgtctcttccctgtctcctcctaaaatcatcataatgccccacttgtaaataacttggtggtgtwcctcttgagagattaacaattcccttttcagctttaataaaagatgtcaaggtcaagtttatttaatatataatcattacagacaagttcacattcactggctggatttacctctttaattcaatatatatttaaaagtgattcaacatgagcacctgaaatgcagtttccatgttaatttaacaattttctgtatcacttagggtatgtaatcccttcactataccgttgaattattgtttttagg

SEQ ID NO: 663116 - DNA, 500 bp, Homo sapiens
tcgggaggctgaggcaggagaatcgcttgaacccaagaggcggaggttgcagtgagctgagatcacgccactgcattccagcctgggcgacagagtgagactccacctcaaaaaaaaaaaaaaagcttttgatgatggagatattgaaaatcagttgattttgttaaaaatcattcttttccttgatatgtctcttccctgtctcctcctaaaatcatcataatgccccacttgtaaataacttggtggtgttcctcttgagagattaacaattcccttttcagctttaataaaagatgtcaaggtcaagtttatttaatatataatcattacagacaagttcacattcactggctggatttacctctttaattcaatatayatttaaaagtgattcaacatgagcacctgaaatgcagtttccatgttaatttaacaattttctgtatcacttagggtatgtaatcccttcactataccgttgaattattgtttttagg

SEQ ID NO: 663117 - DNA, 500 bp, Homo sapiens
tcgggaggctgaggcaggagaatcgcttgaacccaagaggcggaggttgcagtgagctgagatcacgccactgcattccagcctgggcgacagagtgagactccacctcaaaaaaaaaaaaaaagcttttgatgatggagatattgaaaatcagttgattttgttaaaaatcattcttttccttgatatgtctcttccctgtctcctcctaaaatcatcataatgccccacttgtaaataacttggtggtgttcctcttgagagattaacaattcccttttcagctttaataaaagatgtcaaggtcaagtttatttaatatataatcattacagacaagttcacattcactggctggatttacctctttaattcaatatatatttaaaagtgattcaacatgagcacctgaaatgcagtttccatgttaatttaacaattttctgtatcacttagggtatgtaatcccttcactataccrttgaattattgtttttagg

SEQ ID NO: 663118 - DNA, 641 bp, Homo sapiens
tgccaggaatcttgttgccaatatttttctacataatatttcaaactcttttccttccaaaatctaattttatcttgagccacaatacagctctgtaaagttgaggtcagtggaagaaaggaatcttcttccccataaaatgagctctttgagtctgggctggaaataccttataggtcacaagcagggggagagttttgcagaaatgagtttaaattttcctgtgaccagtttaatttttgcctcgaggtaggaattggatgatggtacataaagtcttttgaggatacagtgcttggtgttatacaatgtagtgagcattataagtactttggtatgkgcaatattaaaaagagatttgtattgaaatatttaaatttataagttggattattctatttttagcctaaccgcattgaatccaattagaactttgttttgtttttatgagaggtactttgtagagcatcatttttccatatttctaatgagttttaaaaagatagagttctttgtgtatgcttggaagtcagatataccatatcagtaagaagttgcatcactctttcctgatatgaggctttattttgtcatacataggtaccaactggggaaaatctatggcctagtaatggttctat

SEQ ID NO: 663119 - DNA, 592 bp, Homo sapiens
acagtcaccgtcagaaagcatttaccccacgcctcttagcaaggttttatacagaatgagtcatacagctaagtgtttgtcctcaagactgacagcccttacgtgtacacatgcagataacttactaatgatgaatagaaatyccaacaattgtattcgttcaacaaatgtttattgaatgatggggtatacaaggcattgtggaggacagcaagataaatcacatatgtatcttcccaaaggggcatatagttcagtatagtcatagagcaggtcatttgcatgtcagtgatttaatttgagatagaccatgaaagtctatgtcatatgctgatttcgcatttttgccgaggcataattttgagtcagctgctttgggaggctggtatggggtaactaatgtcggagtgtgtgtttagccatttccctgtgtccacatttcagtgaggaattgtttctacctattgctgaatatgttaaatgcctttgaagtaaaatatgcttttttttttttggtgaaaaattgctctgagaagaaagccagcttctagagttggtgatggaagtgctgaatctaagatgtgattgatgt

SEQ ID NO: 663120 - DNA, 615 bp, Homo sapiens
tgtaattttggtaaacctgcccctctttagatcccagcagaacacctccataggcctttgcttcagtgttatcagttcattgtgatggcagcaaccctgggtgtcatcaccggaataataaagtgatttatttagttcacagagaatcaagtacagagcatttcttcccctaacaggtcaccataaaagaatttcttttcaaggacatcatacacaggtaaaaatgttgttcataaaatctgttataattagcacagtgccacaatcacaaaaatgtgtggtgaagactttatcataaaagatttatttctccaaggaaatgtggcttttcttcaaaaactaaaagttcaatggacaaataaaaaacatatgaaaatactctccccatttctaagaaagtgcagacatggaaagtgcaggctattatccccacgtgattgtcctgggtctgctctgcagaayggtgggatgagccatctgagcaatatgttaccacttaaagtagatttcacctccaaaagtggattcgttgcaagctaacagaagcatagcaagtcttgacaaaatttaatgaaataaaatatttctgtagctatggcctggggaatatttgtc

SEQ ID NO: 663121 - DNA, 572 bp, Homo sapiens
atcctttggaaatgtatgagtgaaatactcaaatgctatcaagcaagctcataaatcttgattcatcgtttgatcaagatcataaatctccatcaaagaattatgcacaagccatttttctgatgtgcatcttaaatgcaaaagttaaaaaaaggaagtcttcatgacaacggatagcttagggaaaaaatagacagctgtaacagggagccagcagagttgtgtcaggcctgtgaggggctgcggccctggcattcaggatagttgcatatgttcttttaaatgaggaaaaaggggaaatggatattttatttaggaagggggaggataatgcaaccagcctgtctttgaaaatttgttattgtcacaagtttatagatttttcgtcctttgactaattaagggcagtataataaattattacagtagccagtattttgaaattcatttttaaaaaaagtaaaataaaaagccaagcatttgactaycctgttaagatgcaaatatcatatctcaatcttgtgattgagagtatataaaatggtgtcaggcatattaataagaaagtagta

SEQ ID NO: 663122 - DNA, 556 bp, Homo sapiens
gcaggcaaataacccaacttagggggtagcaaaggtttatgggagaaagaaatacctaattgagactggaaagattattaggtgaaggtgaaggagaggaaggacaggggtgtggagtgagactggagaggtagacaagggacaggtcatggcagactgggaagccacatggagtcaggactttattccaaggatggtgttgtgggttaatcaggcttatttcaaaagataacactcctgctaataggagaatgacattaaggaaggcaccagttaagagatcagctgggaaaagcttatagtcattctcgggcacagtctggatgtggctgtgatcatgggatggatagcagtcagcaatttccwgagacatttatgagagaaaattaagaagcctactcactaggactggggattgattagatatgggaggtgacatagaaggaaaatgcccaggtttctggtttggccaagcaagtgggcagttttgcccactctttcccaaggtgaggatgctggaggaggagcagagtgggaaaggcatgtccagttttaa

SEQ ID NO: 663123 - DNA, 601 bp, Homo sapiens
caagggctcacctcccctttcttcttgggggatcctgtatttccttagatttcacattagttggttgccctgtgacctcagttctttaacaggtgcaagatttacaggttgtccagcatatttgttgttgtaaagatggaagcgatttttttttccatttgcctatctcctaagtggagaatggaagtctatgagtattttttaaaactgtattatggcagattgcagtataatgaaccccatcacccagctacaacaataatcaatcaaagacctcattagtttcatccactctaatggattattttgcaaaaacaaattctgctcatcatgaaattttraacatagtatgtaattataagatatattttaagacaataagtatatcacaacagtgaaataatgattctatgtgaactcatttttgtttaaataaatatctacatgtttgcaagtgcatggacaaacatctggaaagagatacaccaaactgagagaaacatttgtatatgtgggcatgtggtgggattaggtgagggtcagggtgacatgtgtttatctgcaatgtctttattaatgatgagaatgtatttttgtatta

SEQ ID NO: 663124 - DNA, 596 bp, Homo sapiens
tcagcaatcccattactgggtatatacccaaaggaatataaatcattctattataaagatacatacacacatatgctcattgcagcaccatgaaatcaactcaaatgcccatcaatgatacactagataaagaaaatgtgstacatatacaccacggaatactatgcagccataaaaaggaattagatcatgtcctttacaggggcatggatagagctggaagccattatcttcagcaaactaacacaggaacagaaaaccaaacagtgcatgttctcacttataagtgggagctaaatgatgagaacacatgaacgcatagaggggaacaacacacacttgggactattggaggaaggaggtaggaggagagagaggatcaggagaaataactaatgggtattaggcttaatagctgggtgattaaataatctgttaaaaaaaaaaaccatggcaaaagtttacctatgtaacaaacctgcatgtgtagccctgaacttaaaataaaagttaaataaagaataattttaaaagagtatatggcttttttagaggcttgcccatgtacacgtttggggatacaaaagattcagtaa

SEQ ID NO: 663125 - DNA, 596 bp, Homo sapiens
tcagcaatcccattactgggtatatacccaaaggaatataaatcattctattataaagatacatacacacatatgctcattgcagcaccatgaaatcaactcaaatgcccatcaatgatacactagataaagaaaatgtgctacatatacaccacggaatacyatgcagccataaaaaggaattagatcatgtcctttacaggggcatggatagagctggaagccattatcttcagcaaactaacacaggaacagaaaaccaaacagtgcatgttctcacttataagtgggagctaaatgatgagaacacatgaacgcatagaggggaacaacacacacttgggactattggaggaaggaggtaggaggagagagaggatcaggagaaataactaatgggtattaggcttaatagctgggtgattaaataatctgttaaaaaaaaaaaccatggcaaaagtttacctatgtaacaaacctgcatgtgtagccctgaacttaaaataaaagttaaataaagaataattttaaaagagtatatggcttttttagaggcttgcccatgtacacgtttggggatacaaaagattcagtaa

SEQ ID NO: 663126 - DNA, 596 bp, Homo sapiens
tcagcaatcccattactgggtatatacccaaaggaatataaatcattctattataaagatacatacacacatatgctcattgcagcaccatgaaatcaactcaaatgcccatcaatgatacactagataaagaaaatgtgctacatatacaccacggaatactatgcagccataaaaaggaattagatcatgtcctttacaggggcatggatrgagctggaagccattatcttcagcaaactaacacaggaacagaaaaccaaacagtgcatgttctcacttataagtgggagctaaatgatgagaacacatgaacgcatagaggggaacaacacacacttgggactattggaggaaggaggtaggaggagagagaggatcaggagaaataactaatgggtattaggcttaatagctgggtgattaaataatctgttaaaaaaaaaaaccatggcaaaagtttacctatgtaacaaacctgcatgtgtagccctgaacttaaaataaaagttaaataaagaataattttaaaagagtatatggcttttttagaggcttgcccatgtacacgtttggggatacaaaagattcagtaa

SEQ ID NO: 663127 - DNA, 516 bp, Homo sapiens
ccttattctcacagaaatcctgaatcctgattttaggagatgatggttttgtcagaggcgtttgaaccagagcaactccatcttgagtaagggttgggtaaaatgaggctgagacctactgggctgcattcccagacagttaaggcattctaagtcacaggatgggatacgaggtcagcaccagatacaggtcatgaagacgttgctgataaaacaggttgcagtaaagaagccaagcsaaacctaccaaaaccaaggtggcaacgagagtgacctctggtcgtcctcacagctacactttcaccagcaacatgacagtttacaaatgccatgggaacgtcaggaagttaccttatatggtctaaaaagggaaggcctgaataatccaccccttgtttagcatgtcatcaagaaataaccataaaaatgggcaaacagctgccctcggggctgctctgtctatggagttgccattctattatttctttactttcttaataaggttgctttcacttt

SEQ ID NO: 663128 - DNA, 601 bp, Homo sapiens
gcatccattctctagccccctgcaccccaatctttgagaaatcctaccttccaaattttaggggaggccaatctgagtaataataaaactctgttgtcctggttagttgactctatgtgtgttaaactctttctctrttgcaattcccctgtttcgataaattggctctatctgggcagtgggcatggtgaactcattgggtggtcatagcctcatttgaactatcctaataggaagtttaagacaagataacgaatgcccagttggctgcctatgattagttgagcttaagttttgttttcttttaattcctgagttaggtttcagttggcttatacaggaacccagggtgtcagagccacctcaaactagtgacctcccatttcattattttaacaattatgactggactttcccttaccatctagaatgtggagaattcccatggataatttatactactgtgattttgctcatgctatttccttctgctgaatgttgtattggagctcagaaactgatactccaaaatatggcattttgacatgctgaacagaagaaggctcaggtctccctgacctcccccttcttccaccatttc

SEQ ID NO: 663129 - DNA, 561 bp, Homo sapiens
acaagttgatcatgaaaacatcagtaagacacaaaaacatttccgatgctctcggcatgaagaattggtatctggagagtagcaagttataatagtaaggtttctgcaaaagattaaatagtataaagaatattagtatgccttcaactggcagaaataggactgggcacrtggaaaaaggtcagaaataagagaagatgcagatttgctcaaaggctgctacccagcactcccatgcccaccccattcctaagctcttccccaagcatactcttcatatgcattggtgaggggccaggtccctggaggtcccagagacacaaagttaagggtagggaaaagttcagccccacactcccatccactttgtagggctttctccctccagtctgggggtccccacaaatgcccaagatggtggaaacagtcacatggatttctaagagaccacatgacatgctgggagttgcagatcactgtcctcagctcgcattatttgaacgcagggcagtgaccatgatcactgctgctgctcagaagagctttaatttactcaatgac

SEQ ID NO: 663130 - DNA, 582 bp, Homo sapiens
gccatccgggcaggcgcgaggctgccgccacggtcaaaagaccagcatccagaatcccccggggaccgcaccacctaygcagcctctccgaggaccaatgtccacgtcattctctgctcttttctatcttgataataaatgcatgacttctacagtgactcagaacacatcatacacttttatttcagaatttatggcgtccattttgtgtactttttggctcttccattctgcttctggcagtaactgttttctcgctccagggagtctttgatcgtcttcagtcatgaagatttgcattgttttgtcctttgtcactttccctcttcctcaaaaagaaacccagtaaatgctcaaggtctgagctcagaaggacgcgctgggaatgagaaggtgctgtgataattctggttatccagatttttcagagaggtcccttttcctgcttggaagctgtgggctctgtcctctgggttctcagtactcagttcaaccaccttctcctccatccctctccgtgagtgaccatggtcaggggcctgtggagtgggccagggtgggtggggctggggcaggtgaaca

SEQ ID NO: 663131 - DNA, 541 bp, Homo sapiens
acacagcaagtgctccctaaacactcaagcatttcattggagactggccatccacctgcagatgtcccagttctcttagctttgtgagattccattgtttcaagtcatatgtctgaaatcttaaaacactagaaatttggtctacaaaaatcactggaatgtttacttcttgaactgctcattacacctctgcataaaatgtggccttataccctctcctgaagcaggtctaattagaaggataaaatatttaaatctttgcaatggaaacctgaagtacaaccagacaagccctaagataacagacaatttgtattttaatgataattcttgcttgaagaaaaagaagcactcattggctgaagaaaatattctctaagaagcagactgccaractccctagaattctatttttctgggcagcgatatgttcctctggggaccgacaacttctgctagtttcttgcatatctgtcagaatgaggcccttccccatagctaagacagtttcaagagataacaaaatcacctctccaatagg

SEQ ID NO: 663132 - DNA, 627 bp, Homo sapiens
gataaggtgctggaacatcaattaggaacttattaaagaataaaaaggatacagggtaggggttcagtcatagggaacctgggtctcaaggcaggacgttgattgctgacaaaatgaagttttctatcagggtggcaccagaagtaatggttgaggctagaccgatattccttgtgtacgacaaagattggtcttagagtctgggagggacttactggcttcatttatacaaattggggctattgatgggctggatgtgaaggggtttataccattcttgcacccatgggtggtgacwttgctttggttttgttagaaagaaatgaatgttttgtgtattaagtgactagaaattcaacagaagatagaaaaatgtaggtctggttgagttatgtcaggagagaggtgggtggtgtgagtagaggggtgataattcaaaaaacatgcaggaaagagtttcctcgagtgtggtgattataaggggctgattaaagagatagagacctcacccagtgggcagcaggcaatgccaattctattcttgtctattctccaaaagacctattctttctgttatgggtcagattgtgtctccctataaattctgacccaagcctcccaaaaaga

SEQ ID NO: 663133 - DNA, 549 bp, Homo sapiens
ttcatccaggactctttctttttttacttcccttcaaggttttacacaaaggattgtgtatctcaggatgaaatactggctcatgctccttttcccgccttcctatttagttgtttctgtgaagtgaagttgcagtcacctggtatatgcagaaagtgatgtggcactacttgagcagtgtggggagtgatgtctcagaatgaattaccattatgggagagggacatgctcagtttcccattagtgcaaactcagaacttctgacctgagggcaaatagtaagtataatggacatcattttggccatcccatatgtattctcactttttctggtaataaattcatttttttttcttcagagaactaccccttctgtattctccagggctatatggggtgggaacagggaagcaacaattttattagagcacattttcccaaagtgatgccttcttagaaaatcagacctataagaaggtggccaaggygtagttttttacatcttactctccctgatggtagaaatctggcagtgagtgatgctgttcc

SEQ ID NO: 663134 - DNA, 586 bp, Homo sapiens
tattccttatgttgtgtgtggttttcctaaatcaaattatgcttacttaatactttaaacaatatatggttggtaggttgtatttgatctcccatgccatgcgctacaggctttttggacaatcagtagtacccacgcactcagtatctcctaacttctcctttttcccattacttactgggaggctggcatttactgacatttatagctagctactttgaaaataagagaggcagcagarttctttagagcactgagtccagaaaattggacatggtctaccagctcagtaaaagagttttgcagaatcactttttcttgtcagcttgtgacattgttggctactaagctggtggtgttttcagatgaataaagtaaaatttcattaatttagactccattagtataattttgaacaaagtttggtttggagtttacaggtataccattcatgaagaacaaaggtgtcaaatgaatagtcaaacgagaagaaggaagcaagtgcacaaaaactttcaggtgctttagcagactgcttgccaatggttttgtttgccagtgttgctaactagctaaccattaatgc

SEQ ID NO: 663135 - DNA, 586 bp, Homo sapiens
tattccttatgttgtgtgtggttttcctaaatcaaattatgcttacttaatactttaaacaatatatggttggtaggttgtatttgatctcccatgccatgcgctacaggctttttggacaatcagtagtacccacgcactcagtatctcctaacttctcctttttcccattacttactgggaggctggcatttactgacatttatagctagctactttgaaaataagagaggcagcagaattctttagagcactgagtccagaaaattggacatggtctaccagctcagtaaaagagttttgcagaatcactttttcttgtcagcttgtgacattgttggctactaagctggtggtgttttcagatgaataaagtaaaatttcattaatttagactccattagtataattttgaacaaagkttggtttggagtttacaggtataccattcatgaagaacaaaggtgtcaaatgaatagtcaaacgagaagaaggaagcaagtgcacaaaaactttcaggtgctttagcagactgcttgccaatggttttgtttgccagtgttgctaactagctaaccattaatgc

SEQ ID NO: 663136 - DNA, 366 bp, Homo sapiens
tatatgggtctagactatcctgtctaatgaggtagttactagctacatgtggctatttagatttaaattaattagaattaaatacaattgaatattcatttcctcagcttcacaactcatatctcaaatgcttcatagccacagctggttagtggttaccatattggtcagagtgatatggtttggctctgtgtccccacccaaacctcaccttgagttataataatccccacgtatcaagggtggggccgggtggagataattgaatcatatgagtggtttccgctatactgttcttgtgatagtaaataagtctcacgaratctgagggtttcatgaatgtgagttcccctgcacaagctttct

SEQ ID NO: 663137 - DNA, 594 bp, Homo sapiens
tttgactcctcacctgtgaattagggacaatgattccttaggattttctacacacatgatcatgttttctgtaattaaaagacagttttaaattttcctttctaatctgtatttattttaaaacttatttcacttgttaggtcctctagtgcaatgttgartagaagtggtgagagcagatattcattacttacttaaaatcttagaggaagagataaaaacattcagaatttcaccattaattatgattttgcctacatgcttaacatatatgttctttttcaggttaaagttctcttctctattagtttgctgagagtttttatcacaaattaatattgaattttgtaaatttgttttagcacctaatgagttgatcatatggttttccctttttattctgttaatacaagttaagcatccttaatccgaaaatcccaaatcccaaatgctccaaaatctgcaacttttttgagtgccaacaatgatgccctgccccaagtggaaaattccacacataagtacttaacacaaactttatttcttgcccaaactattaaaaatattgtataaatttaccttcagcctatgtgt

SEQ ID NO: 663138 - DNA, 695 bp, Homo sapiens
tggtcctactgattgaacatccagaacatgtctggagggaaataggttctcacagcctttttcctatccatagtgcctgactttcttgtgctcttggctgccatttcctaccactcctgggtcccagattctatcttcctagagatttctcctggtttttgcttttctgwgttttgttggtttcttcctggcatgtgggcatctctaaggctcagttcaaagatgagaaaaccaacactttgtgtcttcctttcccccagctccctttagaaatgttcttttctttgcatctccgcttctgctcaggtgttactcaggctgtattagagaatttaatttttcaaatgggtcctttgaatctgaagagtctacttagtattgcagaatcttggttacattgtttagcaatggagggtgactttaattgtagataaggagaaattccactaggtgcatattctttctactagagagatgttttatcagttgttaaatgaataattagaaaaaaacctttcaggttgttttacagtgtgatttgagaaaagaacaaagtgtcaagtgtgcactaaattctataggatggtcattatcaaaataatagagctagagatattacatctttttattttaagatttcaatgaaatagtctagattcaagataaggctccggagaaaaagagcgaataagagc

SEQ ID NO: 663139 - DNA, 695 bp, Homo sapiens
tggtcctactgattgaacatccagaacatgtctggagggaaataggttctcacagcctttttcctatccatagtgcctgactttcttgtgctcttggctgccatttcctaccactcctgggtcccagattctatcttcctagagatttctcctggtttttgcttttctgtgttttgttggtttcttcctggcatgtgggcatctctaaggctcagttcaaagatgagaaaaccaacactttgtgtcttcctttcccccagctccctttagaaatgttcttttctttgcatctccgcttctgctcaggtgttactcaggctgtattagagaatttaatttttcaaatgggtcctttgaatctgaagagtctacttagtattgcagaatcttggttacattgtttagcaatggagggtgactttaattgyagataaggagaaattccactaggtgcatattctttctactagagagatgttttatcagttgttaaatgaataattagaaaaaaacctttcaggttgttttacagtgtgatttgagaaaagaacaaagtgtcaagtgtgcactaaattctataggatggtcattatcaaaataatagagctagagatattacatctttttattttaagatttcaatgaaatagtctagattcaagataaggctccggagaaaaagagcgaataagagc

SEQ ID NO: 663140 - DNA, 695 bp, Homo sapiens
tggtcctactgattgaacatccagaacatgtctggagggaaataggttctcacagcctttttcctatccatagtgcctgactttcttgtgctcttggctgccatttcctaccactcctgggtcccagattctatcttcctagagatttctcctggtttttgcttttctgtgttttgttggtttcttcctggcatgtgggcatctctaaggctcagttcaaagatgagaaaaccaacactttgtgtcttcctttcccccagctccctttagaaatgttcttttctttgcatctccgcttctgctcaggtgttactcaggctgtattagagaatttaatttttcaaatgggtcctttgaatctgaagagtctacttagtattgcagaatcttggttacattgtttagcaatggagggtgactttaattgtagataaggagaaattccactaggtgcatattctttctactagagagatgttttatcagttgttaaatgaataattagaaaaaaamctttcaggttgttttacagtgtgatttgagaaaagaacaaagtgtcaagtgtgcactaaattctataggatggtcattatcaaaataatagagctagagatattacatctttttattttaagatttcaatgaaatagtctagattcaagataaggctccggagaaaaagagcgaataagagc

SEQ ID NO: 663141 - DNA, 506 bp, Homo sapiens
tttattgctcacattgtatctctattgtatattgttatcatctttattcagggatctaggccgatagagcagtcatattgagaatattgatgatcatcatggtagaggaagaaatgaatatgacgaagaggtactacccccgtgccaaattgaatatttatggagaaaaaattttgagacatcctattgactcttaaggcttcctcctggaagtgacacttgtgctyatatttgttggtcaaagcaaatgacatgctgggttcaacaggggggtcagaagtataatcctaccatgtatcagaaaggagaggaccaaatattggtgaacagcctgtgtggcaaccacagatcatttagctgaggttttatttgcaatatggaagttgaattgtttatgtttagtgccattctgaagcatttgaagacacctatgacttcatgtgatttatataattttattctcatttagcctaccttgaacacctagaatatgtgataacaaaatt

SEQ ID NO: 663142 - DNA, 506 bp, Homo sapiens
tttattgctcacattgtatctctattgtatattgttatcatctttattcagggatctaggccgatagagcagtcatattgagaatattgatgatcatcatggtagaggaagaaatgaatatgacgaagaggtactacccccgtgccaaattgaatatttatggagaaaaaattttgagacatcctattgactcttaaggcttcctcctggaagtgacacttgtgcttatatttgttggtcaaagcaaatgacatgctgggttcaacaggggggtcagaagtataatcctaccatgtatcagaaaggagaggaccaaatattggtgaacagcctgtgtggcaaccacagatcatttagctgaggttttatttgcaatatggaagttgaattgtttatgtttagtgccattctgaagcatttgaagacacctaygacttcatgtgatttatataattttattctcatttagcctaccttgaacacctagaatatgtgataacaaaatt

SEQ ID NO: 663143 - DNA, 506 bp, Homo sapiens
tttattgctcacattgtatctctattgtatattgttatcatctttattcagggatctaggccgatagagcagtcatattgagaatattgatgatcatcatggtagaggaagaaatgaatatgacgaagaggtactacccccgtgccaaattgaatatttatggagaaaaaattttgagacatcctattgactcttaaggcttcctcctggaagtgacacttgtgcttatatttgttggtcaaagcaaatgacatgctgggttcaacaggggggtcagaagtataatcctaccatgtatcagaaaggagaggaccaaatattggtgaacagcctgtgtggcaaccacagatcatttagctgaggttttatttgcaatatggaagttgaattgtttatgtttagtgccattctgaagcatttgaagacacctatgacttcatgtgatttrtataattttattctcatttagcctaccttgaacacctagaatatgtgataacaaaatt

SEQ ID NO: 663144 - DNA, 620 bp, Homo sapiens
caattcattccttttttggtttaaattcatttaggttagatattcattacgtgcacttgaaagagtcctgactgatatatgaaagaaaaatggagaagtcctgggaactgtgtttggtcatgtgctatttgacacaatgcatatagagatgatttgcttaacaactcgatgtttgcttatcaaaactatgaaaggctggaggaatgttctgggcacatgtgattataatttgaattgattttctcttcaaatctactattttatatttacatgattaagacctagatccaagtcacttaaggcctcacttgtgtagacttttgagagatctgtatcaaataatgactttttgtcttttaaattaaaaatataataatcccacatctcataaaacatagttatgaatacataatagatttaaggaacaaaatgggaccccaactagcttaagctaaaagagattgatgtagtacatttgggctgctataacraaatgccttagatggagcgatttacaaacaatagaaatttattgctcacctggatgctgggaaatccaagaacatgatgccagcagattcagagtgaggtgaactgggagacactgggaggaaagatct

SEQ ID NO: 663145 - DNA, 557 bp, Homo sapiens
atctggcaaagaaaaaatcaatttgcctcatttaatcttaggaaattagaagttgtgaaaaaccaaattaaaacaaggacttcatctcatttggtcaagcattgagattggatacttcaaaaatatacattgctaacatgaacaactaatcttagcccaatagtgggttgaatactttgagtactgctcttagaatacttttctattaaagtcaraatgagagaaactttttaaagccttgactatattgtggtatatactgaattataagaaattttcttgtacattggtagactatcttattgtattcaattataaaaagacatgtttcctgtatgggagtattgacagactctaataactttataatgctcctattatttccacttcatgaagagaacatcaaccaatttcaaattgacctcaagcattattttaaagtaaagcatagggagtatattaggataaaaggaaaggtactgtaacaaagaaacagaaaaatactgtggcttaaagagtagagaagcttctggtagtctggggagcctacactgttg

SEQ ID NO: 663146 - DNA, 580 bp, Homo sapiens
actcttaatgcacttaccaaagaaagtttagaagcctttaaaaaagaagtagaaggcaaaaagactaaataagaaaaaacaatttttcttgattagtagattcttgattttaacaaccawgaaatgaaaaaaaaaagtgcattaaatcctctgaagtcaccattatcagatactttgtttaaaggttgctggtccccattttcaaagaagtcgaaaaatgctaacttttttttactgaacaaatggatccttctgtgggctgacccttttcaccctcaaaatgctctgtgtggtgctcttttctgggctctgagttaattgcagggtttatgggaataactagatactggctgtaaaattggagctaagtgtctgccaataaaatataattctcttcctcatttcacagggaacaagcttctaaattgctcaagagatggtgaaagataggaaagctgaggcagttaggatatcacaaaggaaaactatggtaagtttactagctccttgtgacattgaagcgatatatctatttatctatatcccaaccctcttctactcttcctctcctaccataagt

SEQ ID NO: 663147 - DNA, 580 bp, Homo sapiens
actcttaatgcacttaccaaagaaagtttagaagcctttaaaaaagaagtagaaggcaaaaagactaaataagaaaaaacaatttttcttgattagtagattcttgattttaacaaccatgaaatgaaaaaaaaaagtgcattaaatcctctgaagtcaccattatcagatactttgtttaaaggttgctggtccccattttcaaagaagtcgaaaaatgctaacttttttttactgaacaaatggatccttctgtgggctgacccttttcaccctcaaaatgctctgtgtggtgctcttttctgggctctgagttaattgcagggtttatgggaataactagatactggctgtaaaattggagctaagtgtctgccaataaaatataattctcttcctcatttcacagggaacargcttctaaattgctcaagagatggtgaaagataggaaagctgaggcagttaggatatcacaaaggaaaactatggtaagtttactagctccttgtgacattgaagcgatatatctatttatctatatcccaaccctcttctactcttcctctcctaccataagt

SEQ ID NO: 663148 - DNA, 580 bp, Homo sapiens
actcttaatgcacttaccaaagaaagtttagaagcctttaaaaaagaagtagaaggcaaaaagactaaataagaaaaaacaatttttcttgattagtagattcttgattttaacaaccatgaaatgaaaaaaaaaagtgcattaaatcctctgaagtcaccattatcagatactttgtttaaaggttgctggtccccattttcaaagaagtcgaaaaatgctaacttttttttactgaacaaatggatccttctgtgggctgacccttttcaccctcaaaatgctctgtgtggtgctcttttctgggctctgagttaattgcagggtttatgggaataactagatactggctgtaaaattggagctaagtgtctgccaataaaatataattctcttcctcatttcacagggaacaagcttctaawttgctcaagagatggtgaaagataggaaagctgaggcagttaggatatcacaaaggaaaactatggtaagtttactagctccttgtgacattgaagcgatatatctatttatctatatcccaaccctcttctactcttcctctcctaccataagt

SEQ ID NO: 663149 - DNA, 569 bp, Homo sapiens
tgaccacgcatccccctctcccagctaacatgaacaactgttgctttgttaccaatgatagcttcagctgttcttggtcttcctgatttgtagataaatatcactaagatacctggttatagaattgttgccactttctgacatcacctgrttaacagcaaaaccacaggtccttgaaccctataacagaccccaatcctataacaagccctgcctaacttactgagacattctgtagttccctatgaagtatgatctctcttcttacaaaagtatcaataaactctaaatatgggcatcaaacatttatagctgttttgttttcattgtgaatcgtacccttagcaatatagtgccattttttggtctcttgatggttggcctgaattctaccttgtttaatattatgatcacaactcctattattttactttgtgtttttctttttttaaaaatgtatttaagcttttaaaattacgtagtttagacatgtgttttgtataaagtatagcattgaattctgttttgtgacttatcagaagatcttttccttttaatagattacttaa

SEQ ID NO: 663150 - DNA, 569 bp, Homo sapiens
tgaccacgcatccccctctcccagctaacatgaacaactgttgctttgttaccaatgatagcttcagctgttcttggtcttcctgatttgtagataaatatcactaagatacctggttatagaattgttgccactttctgacatcacctgattaacagcaaaaccacaggtccttgaaccctataacagaccccaatcctataacaagccctgcctaacttactgagacattctgtagttccctatgaagtatgatctctcttcttacaaaagtatcaataaactctaaatatgggcatcaaacatttatagctgttttgttttcattgtgaatcgtacccttagcaatatagtgccattttttggtctcttgatggttggcctgaattctaccttgtttaatattatgatcacaactcctattattttactttgtgtttttctttttttaaaaatgtatttaagcttttaaaattacgtagtttagacatgtsttttgtataaagtatagcattgaattctgttttgtgacttatcagaagatcttttccttttaatagattacttaa

SEQ ID NO: 663151 - DNA, 626 bp, Homo sapiens
cattctctccccccatggatattgagaacattatcacaggrgcggtttacacttcctgcgccatttagagtaatatcatccttttcccccatggatattaggaacgatatcgcatgggaagtgtacacgcccgccatattgggagtaatattttctcccttgctggacattaggaacaatatcacgggaatgcacacaccctgcgatattgccagtaatattgtagtctcctcccaggatattaggaacaatatcacaaggggggtgtacatgccctgtgatattggaagtaatatcatcgactccccccacggatattagtaacaacatcagaaggggtgtacaccccttgtgatatttatagtactatcatcctataccccctggatattaggaacaatacaacggaggggtgtatacccactgtgatattgggagtaatttcatcctctaccccttggatgttaggagcagtatcacaaggggggtgtccaccctctgtgatattaaaaataataccattctctccttctctggatactaggaataatatcacagtgctggtgtgcaccctttacactatttggagcaatatcaccctctccccaacttgatattagagacaa

SEQ ID NO: 663152 - DNA, 626 bp, Homo sapiens
cattctctccccccatggatattgagaacattatcacaggggcggtttacacttcctgcgccatttagagtaatatcatccttttcccccatggatattaggaacgatatcgcatgggaagtgtacacgcccgccatattgggagtaatattttctcccttgctggacattaggaacaatatcacgggaatgcacacaccctgcgatattgccagtaatattgtagtctcctcccaggatattaggaacaatatcacaaggggggtgtacatgccctgtgatattggaagtaatatcatcgactccccccacggatattagtaacaacatcagaaggggtgtacaccccttgtgatatttatagtactatcatcctataccccctggatattaggaacaatacaacggaggggtgtatacccactgtgatattgggagtaatttcatcctctaccccttggatgttaggagcagtatcacaaggggggtgtccaccctctgtgatattaaaaataataccattctctccttctctggatactaggaataatatcacagtgctggtgtrcaccctttacactatttggagcaatatcaccctctccccaacttgatattagagacaa

SEQ ID NO: 663153 - DNA, 407 bp, Homo sapiens
cagtgaaaatgtaaaactaaccatggagttaaagcaaagagaagggatagaggtagggggtggacagagaggattccctattctatggaaaactggtactttgaaggtaagtgataacaaaagagctgaacaatgacctattatctcttgggaccaaaccacatgtgcaggttgtctggctaaaagcagatagagaaaggcagggaaaatgacctgtttcaaaagggaaatcttctgctgagattgctggagaccaggtccagatattattcatgagtttgaaaaagctcaagaggccagcaattgaaagaatgtctaacagtacccagactagtgtgggaatcctaagcctttcccacaggataaacatgttgatgcccaatyccagccccaccaacccctcgtaa

SEQ ID NO: 663154 - DNA, 564 bp, Homo sapiens
gaggcatagaacttccaaaccaaagcatcttatatattcaccatgctctcttttcccttcttcttgttaagccaccaagattttgggagagtcatttgttactgcaacataatgcatccccaaagtacactgttatactgaaagttgaccggtcctttataacttggggtgrtatgtgaggttgcttaggccagtaacctaagcaagaatatacatggtttggggtgggggagtggcaattctgggaaacccatggctctcttaaagaaagaagagagatgtggcagacatggctttttaaggcttcttcctcaagcttcttcctttttcctgctttgaactgagacatgactataaaatgacaagcaccggacaaaataagacctattatgaatgaagaaaataaataagtaataaaaatgacaataaataattaaaagatagggaagccctgatagcatcatcaaaatatgtctaataattgcctaccactgaacttcttgtgatgtagaaaaatacttactttgagtcacttcagttgagtactttttattgcattctcat

SEQ ID NO: 663155 - DNA, 602 bp, Homo sapiens
caggtaactcagaaaatgttttccgggggaggtaaagaatagacaggattggctaagtattaaagatgacaaaggaaacattgagggaaaggatgacaagaggaaagacattccatgaaaagtaaagaacatgtgccaaggaaaggaggcatagaacttccaaaccaaagcatcttatatattcaccatgctctcttttcccttcttcttgttaagccaccaagattttgggagagtcatttgttactgcaacataatgcatccccaaagtacactgttatactgaaagttgaccggtcctttataacttggggtgatatgtgaggttgcttaggccagtaacctaagcaagaatatacatggtttggggtgggggagtggcaattctgggaaacccatggctctcttaaagaaagaagagagatgtggcagacatggctttttaaggcttcttcctcaagcttcttcctttttcctgctttgaactgagacatgactataaaatgacaagcaccggacaaaataagacctattatgaatgaagaaaataaataagtaataaaaatgacawtaaataattaaaagatagggaagccctgata

SEQ ID NO: 663156 - DNA, 525 bp, Homo sapiens
acaaaataagacctattatgaatgaagaaaataaataagtaataaaaatgacaataaataattaaaagatagggaagccctgatagcatcatcaaaatatstctaataattgcctaccactgaacttcttgtgatgtagaaaaatacttactttgagtcacttcagttgagtactttttattgcattctcatctatactaatcctatgttcaacccaaccatgtctatgcagctggaaccctcattgtcccccaaccacaacttgctcctccatgtaactttgttccaggcacttccctaacatgagatggctaacccttctttttgacttacctagatgtatactatgtaaacacagcccatgctcaacctcctcatgggagacaagaagttgttagttgcccaggtttcagatataaacattgtaggtccaaatccagactctgtattgctagctgtataactatgagcaattcacttaaattatatggctcttaatatactgatgtgtaaatggggataatc

SEQ ID NO: 663157 - DNA, 490 bp, Homo sapiens
acttcttgtgatgtagaaaaatacttactttgagtcacttcagttgagtactttttattgcattctcatctatactaatcctatgttcaacccaaccatgtctatgcagctggaaccctcattgtcccccaaccacaacttgctcctccatgtaactttgttccaggcacttccctaacatgagatggctaacccttctttttgacttacctagatgtatactatgtaaacacagcccatgctcaacctcctcatgggagacaagaagttgttagttgcccaggtttcagatataaacattgtaggtccaaatccagactctgtattgctagctgtataactatgagcaattcacttaaattatatggctcttartatactgatgtgtaaatggggataatcagctaaatctcatagatttcctatgtgcactgatatggtttggctctgtccccacccaaatctcaacttgaattgtatctcccagaat

SEQ ID NO: 663158 - DNA, 579 bp, Homo sapiens
tttaccatattgttctcatgatagggaataagtctcataagatctgatgagtttatcaagctttccacttttgcttcttcctcatttttctcttgctgctgccatgtaagaagtggyttttacctcccaccatgattctgaggccttccagccatgtggaactataagtccaattaaacctctttttgttcccagtttcaggtatgtctttatcaggggcatgaaaacaaactaatacatgcactgaatgagatattttgatgatagcatcattataaggccatgatttcacatgtagaaaatgctcttataaatgtaaagttgataattaatttattgcaaaagaggctattcatctttctcacccctaaaatcctgttagtttccttattggttaatgcaatgccaccaaatgcttagttctttcctttatatcattttgtatttcaaatggattatcttgtcttcatcaaaatacttcaaattccccatggtccagaaacattttttcctgcttgtagtaaagtacaagtaggaaatggaatttgctctcctgaatccatagcacctgttcatcag

SEQ ID NO: 663159 - DNA, 564 bp, Homo sapiens
taaatgaatctggatgcacaggaatgctttccttttcaattgcccaaggtgatcttcagcagaaacaaaaacaaaaatgtttttctcctcctaaaggagatcatttctccttgaaataacatatatgtttaataacttaaacattcaagtgttcattgcattgcacagtgttactcttcatagcgagacagtggtatttatctgcaatgagaaatgcctgtatgaataaaatttttagagattaaaagcacctaatcctggaagttctctgagcaaaatattcctgttccacccctttcatatgcctaaatgctttttcccatcactggatacttagaarcaattgtcctaaaatcccagaacatacccaggttgtttatgtagaaggcagtcccaagaaaatgcaattttcccacaatacaattgatcacttactccattcaccagataaagcataaatgcacaaaccaaaaattcagttgagtagtcaagaattttcagttttaaaatttgtatgcaaactccggtgcttaatacaatatttttataagagagtttacaaaa

SEQ ID NO: 663160 - DNA, 508 bp, Homo sapiens
agccctcaccacaatcaggctgcagccttgaatcccccagcaaacggacattgtaagctgtaactatgagcaggaataattacaaatgtgtaccttcctcagatcaactctcaactaagttgaaaccacatcacttttataataaaccagtggaaccacttccacaacactctgtcatcctctgtaatttaagcatgtgaaattaattctccaaactccatatatcaaaattaactattaaacaaagaatgtattccagagttataggcaaagtagttaacaactaatcacattcctccaaaatacatgactgtagaaccactgtaattagccctagtacattccagccaaggagacagcttttaattaactgattgtttttgcttttaattaaatgtccaggcaacctgaaaattattatatttattttytcagcacaatcttatttctgaactttagatctatatccccagattctgttgggttatctcatctagatgactgctgg

SEQ ID NO: 663161 - DNA, 614 bp, Homo sapiens
tttacatgtcagtacacttttcataataccacactctctgaacactgatagtatcataaatatatcatatttagagttatgtgtagtgtatatatacatacaaatatacaaacaattttattgcgaacatcctagacctactgtgaaccccaaatgatratagtttcagatttcttagacactataagttatgacacacaccagataaatagggccacactgcaaaagaattcatatacttatcttttgcagagacagctggaaatccatgagaataatagatagggaagattttggaggtcaggaatcttgttaatcttgtcaactctgctgctgttacaattccctatctctctagtttcagagtggtaaaggaaaatacttacacttcctttggaataccatcttttcttataatctttactgtcccatttctaagctatggtctgaccttcatcttgtctaggctttcttgttatgtacagttctctttcagcagtgaatgccagcaccactcgctggacacttaaacaacaattcagtgcagcatgtactatatcacttaacagattttcatgtcttcttaaccagctgaagagatgcttgatgcacaa

SEQ ID NO: 663162 - DNA, 614 bp, Homo sapiens
tttacatgtcagtacacttttcataataccacactctctgaacactgatagtatcataaatatatcatatttagagttatgtgtagtgtatatatacatacaaatatacaaacaattttattgcgaacatcctagacctactgtgaaccccaaatgatgatagtttcagatttcttagacactataagttatgacacacaccagataaatagggccacactgcaaaagaattcatatacttatcttttgcagagacagctggaaatccatgagaatwatagatagggaagattttggaggtcaggaatcttgttaatcttgtcaactctgctgctgttacaattccctatctctctagtttcagagtggtaaaggaaaatacttacacttcctttggaataccatcttttcttataatctttactgtcccatttctaagctatggtctgaccttcatcttgtctaggctttcttgttatgtacagttctctttcagcagtgaatgccagcaccactcgctggacacttaaacaacaattcagtgcagcatgtactatatcacttaacagattttcatgtcttcttaaccagctgaagagatgcttgatgcacaa

SEQ ID NO: 663163 - DNA, 502 bp, Homo sapiens
attaaaaaacaaaacaggaaaacgtaacttttaggaaatagaaaagttaaaataatttgaattccagcgagcctagatgtggacttcaggagataataatttcaaagtggttatttaagatatgatgaaaaaattaaaggaaaacatagtgccaacgaattaacaaatagggaatcccaacaggcaaatgccaaatwtcaaaaatggaaattagctagttaaaagtgaaatggctgaaattaaaaatgtattagattagcacaaacacagattagaaatgacagaaaaaaagacttagaaaattttaatataaacaaagagaaataacccaattcaaagcatagaaaagtctttctactcttttaaaaaactttgtttaaaaacgtttttataaaaagtttaaaaaaacatttttaaaaaaagatgagaagacttcaagattcataggacaatatcaggcaacctgatctgtggaaaataaatgccctaacaaacatgtaat

SEQ ID NO: 663164 - DNA, 583 bp, Homo sapiens
gaactactactttctccacaaattcatgctctgtgctaagcaccgaggttacaaagattaatagaatatagactttgytttcaaggttcttcctggctggcagataaaacaatctagacttagcaacaactcagattattctggcttttcttttctcatatgaaatgaagaagcattaccaacaacatattttacctgatttgacacatactatgggctgtgccagtattggaagagagtgctgccttattttctcatcacctgcaaactagacagatctttgtaactgccttcgtcaaaagactgtggcaaaaatcaccctgagggatttctgagacaaggtcataagaggccacagccatacaacctggctctctctttctcaggatatacctatgttttatactttattttacttttttttaagcaaacttccatggaactaatttctaataatgttaatatcttccttttaactagtcaatatcgaacttgagtttttgacgtgccagtatgctactaccatattgtcactaattttcttaacaaattttaagtgacaactcaaagagggccaaaatct

SEQ ID NO: 663165 - DNA, 634 bp, Homo sapiens
taattgatactcagatatgggtgttattagtattagcaacaagaaaccaatagtgattttaaggaaacraagacaaacacaaaggtctttagactttcaaaactttgatttcagagtcatgactttacttgatccttagagaaaatcttttgatggcagaacacgtgtgattgtcctcacttagtagagaagaaaactgaggttcagagtgtggaagtgacacccaaggcaaatttctgtcaagtggcagagtataatctcctactgcagcattttcctaccagcagttcccaatgtatgacttctgaattttccagaaccacttagggtgcccacaatgtcaaaaacaattgtaaaataatagtgtctgttattttcctttttcattgtgttgacagttgcaccagtggtacaaaaataatggtggataaaactgctgaggccttgacacaaacgaaggcaatgacacctaactgcattgctagtcattgcatcattcacctctataccaacagggtaaaactgaaagcaagtttcacaaaatatctttcacaaactagtaaaaattgttaatattatccgttttggacccgtaagccatgtctttttgtattttgtgtgaagaaacgagaag

SEQ ID NO: 663166 - DNA, 634 bp, Homo sapiens
taattgatactcagatatgggtgttattagtattagcaacaagaaaccaatagtgattttaaggaaacaaagacaaacacaaaggtctttagactttcaaaactttgatttcagagtcatgactttacttgatccttagagaaaatcttttgatggcagaacacgtgtgaytgtcctcacttagtagagaagaaaactgaggttcagagtgtggaagtgacacccaaggcaaatttctgtcaagtggcagagtataatctcctactgcagcattttcctaccagcagttcccaatgtatgacttctgaattttccagaaccacttagggtgcccacaatgtcaaaaacaattgtaaaataatagtgtctgttattttcctttttcattgtgttgacagttgcaccagtggtacaaaaataatggtggataaaactgctgaggccttgacacaaacgaaggcaatgacacctaactgcattgctagtcattgcatcattcacctctataccaacagggtaaaactgaaagcaagtttcacaaaatatctttcacaaactagtaaaaattgttaatattatccgttttggacccgtaagccatgtctttttgtattttgtgtgaagaaacgagaag

SEQ ID NO: 663167 - DNA, 634 bp, Homo sapiens
taattgatactcagatatgggtgttattagtattagcaacaagaaaccaatagtgattttaaggaaacaaagacaaacacaaaggtctttagactttcaaaactttgatttcagagtcatgactttacttgatccttagagaaaatcttttgatggcagaacacgtgtgattgtcctcacttagtagagaagaaaactgaggttcagagtgtggaagtgacacccaaggcaaatttctgtcaagtggcagagtataatctcctactgcagcattttcctaccagcagttcccaatgtatgacttctgaattttccagaaccrcttagggtgcccacaatgtcaaaaacaattgtaaaataatagtgtctgttattttcctttttcattgtgttgacagttgcaccagtggtacaaaaataatggtggataaaactgctgaggccttgacacaaacgaaggcaatgacacctaactgcattgctagtcattgcatcattcacctctataccaacagggtaaaactgaaagcaagtttcacaaaatatctttcacaaactagtaaaaattgttaatattatccgttttggacccgtaagccatgtctttttgtattttgtgtgaagaaacgagaag

SEQ ID NO: 663168 - DNA, 598 bp, Homo sapiens
caccataagaatgtttactttcactgatacaataatggttttgctaaaaaatagcaattttgcttaatatatttggtctgtgtgaaccaagcaaggtaactgacaataaagtaaatatttgctttatggacaaatgtaagtaaaatattatagttattgcgctatttgcttttgcatagagtacaaaatatagtcatgaatgtattcgttggtaaataatgcctagtgttaacttacatttttctgaagactaaaattgaatgaggagtgaagttggcagcacatgttattggcattcttgatctattcaamtgaaattattaatttttttttttcatttgggtaaagtggccttggtattaggtgacagttaagatttttcttaaaattaagaacaagaaactaatgtttgagtcactgcagtgataatagaggagactttaatctacttgagaaaagcaagtaaactatttttcaaagagcctacatgggaatttgtcattcattaacttggtacatttatcgtaggccagaatctagcctttaaacttatagcctctaaattttattttctctgaacagcaagaatgcattcatt

SEQ ID NO: 663169 - DNA, 598 bp, Homo sapiens
caccataagaatgtttactttcactgatacaataatggttttgctaaaaaatagcaattttgcttaatatatttggtctgtgtgaaccaagcaaggtaactgacaataaagtaaatatttgctttatggacaaatgtaagtaaaatattatagttattgcgctatttgcttttgcatagagtacaaaatatagtcatgaatgtattcgttggtaaataatgcctagtgttaacttacatttttctgaagactaaaattgaatgaggagtgaagttggcagcacatgttattggcattcttgatctattcaactgaaattattaatttttttttttcatttgggtaaagtggccttggtattargtgacagttaagatttttcttaaaattaagaacaagaaactaatgtttgagtcactgcagtgataatagaggagactttaatctacttgagaaaagcaagtaaactatttttcaaagagcctacatgggaatttgtcattcattaacttggtacatttatcgtaggccagaatctagcctttaaacttatagcctctaaattttattttctctgaacagcaagaatgcattcatt

SEQ ID NO: 663170 - DNA, 582 bp, Homo sapiens
gtttattttgctaaagccaatccagaatgttccactctaatgtgtttctaatcaacctacgagatgtgtccacattgatcatcttaggatgtatggacatagaaaatgttatatatattcaatttttagtgcaatgtttctctaaatcatttcttatctttcaatatttgaataaaaaattaagttttttattataattttttaaaagaagtgtcaaagtctataaatagtcagacctaagttttcctgaaaatcaatgccagactttgagaatgattccctagtttaaatttatttcttcatcttacggatatcactgtggttaattcatcttttttcttttttctaaaaaaaaaatacctagtatagtatgaatttatgtcattaaaaattgagtagggtttatttttttatygatctttaggtcaaagagattatctatactgtctaggtcaataaaaataaaataaatataaaaaatcaattttgatattttatacccccaaattatcatttatatgtagtgcaggaaacaaactgtttaaagatttatgttcctcttctatagagcaattcaaagag

SEQ ID NO: 663171 - DNA, 619 bp, Homo sapiens
gggtcttccatcttgtaaaggtcacatataaaacagtcactcagaaatgcaagaggactcagtaattaggagtaaaagacaatacatggcgtgagagtctttcagtcttctcactaggtatcgtgtgtgggctgagggacatctttaaaattccaaatcctagacattcatgatagatatccccccaacctgctcatctgcaggcttccccarctcagtaaatgacagcactgtactttttacctactcaggcctaaaacttggagacatcactatcttgttctcataagctccatatctaactcattagcttatctgtgcctcaccttcagcatgtatgcaaactctccccacaacctctgccacaaccactcctcactgagcctcacaatttctcacctgaactattgcacaacccactttattcaagtctctgcttcctcccctgcccccaggagtctattctaaacaaagcagccgaagtgctctctttaaaagctgaattagatcttgtcatttctctgctcaaaatcctggtatagctacccagttctcagattaaaatctgaaagtcatgtaatcaaatgcaagacactcaggtacttcatctcctgctacc

SEQ ID NO: 663172 - DNA, 615 bp, Homo sapiens
ccaatgcaaggaaatccaaaaaaatgatgcaagaagtcaatggagaaatatttaaggaaataggtagtgtaaagaaaaaaacaataaaaaattcrggaaactttggacacacttttagaaatgtgaaattctctggaaagtctcagcaatagaattgaacaagtagaagaaagaaatggagagtttgaagacaaggtctttgaataaactcaatcaaacaaagacaaagaaaaaagaataagaaaataggaacaaagcctccaagaagtctgggattatgttaaacgaccaaacctaacactaatcggtgttcctgaggaagaagagaattctaaaagcttggaaaacatatttggggaataatcaaggacaatttctccagccttgctagagacctagacatcaaaatacaagaagcacaaaaaacacctaggaaattcattgcaaaaagatcatcacctaggcacattgtcatcaggttatccaaagttaagatgaaggaaagaaacttaagagctgtgagacagaagcaccaggtaacttataaaagaaaacctatcaaatgaacagcagatttcttagcagaaaccctataagctagaaaggattggggcc

SEQ ID NO: 663173 - DNA, 615 bp, Homo sapiens
ccaatgcaaggaaatccaaaaaaatgatgcaagaagtcaatggagaaatatttaaggaaataggtagtgtaaagaaaaaaacaataaaaaattcgggaaactttggacacacttttagaaatgtgaaattctctggaaagtctcagcaatagaattgaacaagtagaagaaagaaatggagagtttgaagacaaggtctttgaataaactcaatcaaacaaagacaaagaaaaaagaataagaaaataggaacaaagcctccaagaagtctgggattatgttaaacgaccaaacctaacactaatcggtgttcctgaggaagaagagaattctaaaagcttggaaaacatatttggggaataatcaaggacaatttctccagccttgctagagacctagacaycaaaatacaagaagcacaaaaaacacctaggaaattcattgcaaaaagatcatcacctaggcacattgtcatcaggttatccaaagttaagatgaaggaaagaaacttaagagctgtgagacagaagcaccaggtaacttataaaagaaaacctatcaaatgaacagcagatttcttagcagaaaccctataagctagaaaggattggggcc

SEQ ID NO: 663174 - DNA, 541 bp, Homo sapiens
aatgtaaatcaaaaccacaatgcaataccgccttactcctgcaacaaatggccataatcaaaaaatcaaaaaacagtagatgtgggcatggatgcagcaatcagggaacatttctacactgctgatgggaatgtaaactagtacagccacgatggaaaacactgtggagattccttaaagaactaaaagtagaaccaccatttgatccagcaatcccattactggatatctacccagaggaaaagaagtattattcgaaaaagatacttgcatgtacatttttatagcagcccaattcacaattgctaaatcatggaaccaacccaaatgcccatcaatcaacgagtggataaataaactgtgctatatatacaatrtggaatactactcagccataaaaaggaatgaatttacagcatttgctgtgacctggatgagattggattctgttattctaagtgaagtaatgcaggaatggaaaaccaaacatcatacggtctcactgatatgtgggagctaagctatggggatgcaaaggcat

SEQ ID NO: 663175 - DNA, 630 bp, Homo sapiens
ttactgggtttgtgaaggaaaattaaggttttgactgttgaagtagttttgaaaggttggcccaaacaagtttaaagccaagtagatgtgaagaaaggtattattaaaaattctggctgggcatggtggctcatgcctgtagatcccagcactttgggaggccaaggcaggcagatcacttgaggccaggggttcaaaaccagcctggccaacatgttgaaaccccgtctctactaaaaatacaaaaattagcagggcgtggtggcgtgcgcctataatcccagctactcrggaggttgaggcaggagaatcacttgaacctgggaggcggaggttgcagtgagctgagattatgtcactgcactccagtctgggcaaataattataaaaataaaaataaaataagataaaataaaatttcaaggactttatattagaataaacctcacatacagactggtggtagtgggatagagatagaggagatcagaactataaagagctttccatttggacttggtcatgaaagcaatggcaggtagcttttcagaaatacaaagcaaggagacataatcatattgaccacagaaattagggatttgacatgtagcatttctatgcatgatgtta

SEQ ID NO: 663176 - DNA, 451 bp, Homo sapiens
aagaatgaaatacatatgtacatatgagctatgaaatatacattgtacaattacatttattattctatttgcatttaaaactgacattgcacaacataaagatgaatggcaatattatgacaataaatggcaaatttaaaaaacacaaaaggagagaggcattctgattttagtagctttaatatatttttctgctttttggacaaaggcctctctcttccattttcttctaggtttctcggatgagtatagaaataaatattctaacatttgttaattttaactgataatatgggaacagttgtattaatatgttggagccagcccacgctagctggtggagctgatygtgtgaatctcttcacaatttctagttcagtaccctcaagttggtggcttgaagtctgtcgttatggccctaatttaagtatagataggcaaatgctacata

SEQ ID NO: 663177 - DNA, 451 bp, Homo sapiens
aagaatgaaatacatatgtacatatgagctatgaaatatacattgtacaattacatttattattctatttgcatttaaaactgacattgcacaacataaagatgaatggcaatattatgacaataaatggcaaatttaaaaaacacaaaaggagagaggcattctgattttagtagctttaatatatttttctgctttttggacaaaggcctctctcttccattttcttctaggtttctcggatgagtatagaaataaatattctaacatttgttaattttaactgataatatgggaacagttgtattaatatgttggagccagcccacgctagctggtggagctgatcgtgtgaatctcttcacaatttctagttcagtaccctcaagttggtggcttgaagtctgtcgttatggccstaatttaagtatagataggcaaatgctacata

SEQ ID NO: 663178 - DNA, 534 bp, Homo sapiens
tttgctttctcaatttggctcattgtttggcacaagagacctactctttggcatttcttggctttccacatgccttcttcattaagcttaatcattttttagcttttgatttaaagcaagatacgtgagattcttcccttcactcaaatatatagaagccattgtagggttattaattagcctaatattattatatctcaggaaataggaagtcccatggagaggaagagagacaaaggaagggccacacagtggagaagtcagaaaacacacaacatttatagattcrttgtattgtcttatctaggaatagtttgtggtggcccaaaacaattacaataggaatatcaaaagtcactgatgacagatcacctaaacagatttaataagaacaacttggaaatattgtgagacttgtcaccatattgtcaccaaaatgtgacacagagacttgatgtgagcatatactgttggaaaaatagcaccaatagactggcttgattcaggattgccacaaatcttcaatttttttta

SEQ ID NO: 663179 - DNA, 534 bp, Homo sapiens
tttgctttctcaatttggctcattgtttggcacaagagacctactctttggcatttcttggctttccacatgccttcttcattaagcttaatcattttttagcttttgatttaaagcaagatacgtgagattcttcccttcactcaaatatatagaagccattgtagggttattaattagcctaatattattatatctcaggaaataggaagtcccatggagaggaagagagacaaaggaagggccacacagtggagaagtcagaaaacacacaacatttatagattcattgtattgtcttatctaggaatagtttgtggtggcccaaaacaattacaataggaatatcaaaagtcactgatgacagatcacctaaacagatttaataagaacaacttggaaatattgtgagacttgtcaccatattgtcaccaaaatgtgacacaragacttgatgtgagcatatactgttggaaaaatagcaccaatagactggcttgattcaggattgccacaaatcttcaatttttttta

SEQ ID NO: 663180 - DNA, 575 bp, Homo sapiens
tagtcttcagtcatcttgtagtgaaagccaattctactaaagcctgaagaagtaattgtaatgttatcagtagtatatttatttgcttatttttaaatttatggcttattttctgctatattccaaaatactttattaggtagatagaaacaaaataggtagacagatggatagatacatagatggatagatagatgatagatagatgcacgaaaaatcacacatacaataagaattagattatcatataacaaatttagggtagtgattaccagaaaatagtcttttatttcattyagaaactaaagtgaagggaaaacagggagcaagagaaatcatggagctgcaatagaattgggggtaaaaatgggctcagttaaaaggaatgtcatttatgaaaatgcactaggtgttccaaactgtgttagatattagtatatcacacttcattcaattcacacagcaacttcattaagtaggtgctactatgcctgttttagagatgtataattggtggtaacagctacacagagactaaaggacagacatgattcacactccaaactgcctaaact

SEQ ID NO: 663181 - DNA, 626 bp, Homo sapiens
agaaatccaataataccgtgtgaactaatcatgaaatgtattaaaggctggagattattttgaccaagtgttgacagtctaaactcttggatttaaaattagtttaatagcactgccaaatgcatcttaggctttaattaacgtgaagtgttgaaaaaatgtctgagtgcaaaatctatcttaatttctcagccttagtttagtatttactgaaactggaaatgccgtagaggcttctggtttttatttattcataagtaaataatgtaacagaaaaaaatattcaggcacatcaaccttaaaaaaaaatgcatcctcataaaaaagtgtggggtgggcagcaggtgtcaaagaaaaatttcatcagacccgagcatgacctacatgcttcctctgatcctttytacggccacaaaatatattggaaaaattaatcttgtataagattgcaggacccaacaatgaccttagccaagtttcataactgctcaaaacacaaactgtgccatcatcatgtaaagaatttgatgggtcaaagtttcatttcattctctgaatgacagagaaggaattttctgttttaagtacattccctgtataaacacattttataccaaagtgtggtt

SEQ ID NO: 663182 - DNA, 543 bp, Homo sapiens
aggttggaactataaccatccctgtttcagatgaacaaaatgaagctactaaaaattaaatttccgcttaaatcatataattagtaaatgaagaactagaatttaaacatkattttatttatccctttaaaaagttcttaaccactatattctgctggtttaaattaatcatgggtcaggtgatgtgctagataggaactagaagcaaaactccttacaggccaataaaagtatttgagagtctatcatgtgccaggtgagatacacaactgagtaactgaattggataaacttggaaaggcacaatcagtattttcattttcctcaccagtgccttctagtgcagtctgaagtattcccattctcggatatggggttacagtgggtcagattgtagtacatttcagctctaaggatagtctaactttcaggtattaaaaagtctgcataaaagatttccagtttcagccatgttggagtaattataaagagcttcccctcccaccataaacgacaataaaactaagcaaaatgtaaaagtaa

SEQ ID NO: 663183 - DNA, 453 bp, Homo sapiens
tttacgctgctgtgatacttaaacttttccccctgaactcacacccaaaaacttgtctataggccaatttgcattttggccacattttgaggagttggcagcaataaccacrctgcaaactcacaccacatgtggtactaattggcgcagttggcggtttaagaagagaggctagggattgagtgggcatggaaacctaacaataccttcacacaatggttctcaacaggagatagaaattagaactgtgagggaaaggataggcctctgtggcaggtcaataagatgaattgctcagtgctttgcaaaagcaaccaaaacccagaaaaacaaaacagagaaaagacttgaagtagacactgtaatttttttttctttttttttttttttttttttaccaaacttccagaatagaccaagaacttgttcacttaacatgtacagtcaaggagc

SEQ ID NO: 663184 - DNA, 453 bp, Homo sapiens
tttacgctgctgtgatacttaaacttttccccctgaactcacacccaaaaacttgtctataggccaatttgcattttggccacattttgaggagttggcagcaataaccacgctgcaaactcacaccacatgtggtactaattggcgcagttggcggtttaagaagagaggctagggattgagtgggcatggaaacctaacaataccttcacacaatggttctcaacaggagatagaaattagaactgtgagggaaaggataggcctctgtggcaggtcaataagatgaaytgctcagtgctttgcaaaagcaaccaaaacccagaaaaacaaaacagagaaaagacttgaagtagacactgtaatttttttttctttttttttttttttttttttaccaaacttccagaatagaccaagaacttgttcacttaacatgtacagtcaaggagc

SEQ ID NO: 663185 - DNA, 526 bp, Homo sapiens
agtgctttgcaaaagcaaccaaaacccagaaaaacaaaacagagaaaagacttgaagtagacactgtaatttttttttcttttttyttttttttttttttaccaaacttccagaatagaccaagaacttgttcacttaacatgtacagtcaaggagcataaatgcacagatgaaggaacgatctggggtcaaacaggcaccttgggccgtttggatattcactcattgattccggccagtgaacttcccccaggtcagtttctccatctgcaaagcaagcaggagtctttcatcgcatttgcctcctaccagctgaagggaacagggagcagatttgtagtttgttaaagtgctttgattttacaaactttaaacccaaacacaggaatctctcataacatcttagctgtgggtctctgtaggcatgaggaaagcggcagtggtgttggggataattattcccctagacagctgtgttagaaacagaatttgcaagaaacagaatggagcctcagggaattggggt

SEQ ID NO: 663186 - DNA, 580 bp, Homo sapiens
actcatatgtaggagctaagctatgaggacacaaaggcataagaacaatacattggacttggactttggggactcaggggaaagggtagtgggtggtgagggttaaaaaaactacagattgggtacaccgtacactgcttaggtgacgggtgcaccaaaatttcagaagtcaccactgaagaacttgttcatgtaaccaaccaccacctgttccctaaaaactattgaaattaaawaaatatatattaaaatttattttgaaaaataaatttgcctccagaaagttctctcctgtctcttcttactaaaggcactaatcccatcacaagagctccacctttatgacctaatttcctcccaaaagccccatttcaaagtactatcccattgagggttaggatttcaacttaggagctttgtggagacagaaacattcagtccacagcataggctaaacctattctaaagagcagaaatgggaagtggtcaagtggtgatggtactcagtacattcagaagtagcttgggggtgaatgtaacatcagggggagctgtaaaggcatgaaatgaaatatatgct

SEQ ID NO: 663187 - DNA, 583 bp, Homo sapiens
gagaacacatttttggtgctcccataatttcagggcctaactctactgaaaagaattgggtccacacaggcacacttaaatgtgcgggactctttctttcacgaacctctcctttgtgtcccgacaagacagatcaatgtcagaggaccacctctgacttctccccaagcaagctcattcaatcctttgttgctcaaaatagggaataactggagccatggtcctaatggtggcagcacattagactttcttgtggagctttaaaaatatacccttgcccaggccccaccccaggccaattaaatctgtggccccggctttggtacttttttattttaaaaaattccccaggtgcttctattgtgcggttggaattagaagcgcagctggaattgagaggcacgggtccagtcattctgtgttgctcatcagaggactgaagcaggcccacctggaggtagctgacacttccttcatcatcgccgtttttggagagtggtcatacccgactttaccccagtttctccctgcscattcactccccaagccctgctgtatggcttccccgctgcccacgtctctg

SEQ ID NO: 663188 - DNA, 576 bp, Homo sapiens
acgtgtgtatgcatatgtattcatgcagacatgtttcaggcttggtaatgagatggggtcaatgctattgtcacatttacctgttatatcataaacgcttaccttccgcatggtcagcatgtatggtgttgattgtttataaataccagatccatgatatacagtcatttgtaattttgctgagccatgaatttgagtcacaggcttgtgggcgggagtgaatttcttagctagtgagtgatcctagctgactgtcarataaacagagttttgttctcgatgtgtagttctttatgcagtacattttatgatgtgattttttttaaaagagatgtggtcttgctatgtcatccaggctgtatttgaactcctggctcaagtgatcctcccacctcagcctcccaagtagctgggactacaggtgcatgccattgcacctggcttaatgtgatttttttttcttgaggctgtgttcctttgtcaaaaaatcagttctgctagtcctagtgttcgaaataaagagaaaataaagaggcctgagaaagacattcctagcccaataatgaaatttcaagg

SEQ ID NO: 663189 - DNA, 556 bp, Homo sapiens
tttgcctgtttagaggtctatccacataactctttcctagacttctttgccatcaatttcttaatcattttccttccaagcccctgaccatccaaccaaaccattgaccaccatctactctcagtaccaaaatctgtattaatcagggttctccagagaaacaaaaccaataagttgtgtgtgtgtgtctgtgtgtgtgtgtgtaggaagaaatttattttaagtaattggctcacatcacggtggaggtttggcatgtctagaatctccacagtctgatgggggaagctgctagggtggaggcccacgaaagagacacagttcaagtccaaaggctgtccgctggtgaaccaggaagagcaggtgcggcagaggaagttcaaaggctgtctgcaggcagagtttctcctgctcagggaaggtcatctttgtgttctattcaggccttccactgaccgcrtgagcatcccccacattatggagagtaattttccttacttaaagcataccaatttaaatgtaaatctcatctaaaaacaccctcacagaaacatcc

SEQ ID NO: 663190 - DNA, 287 bp, Homo sapiens
tgtctgattactctagctaggacttccagtactatgttgaataacagcgatgaaagtgggcatccttgtcttgttccagatcttagagaaaaggctttcatttttccgcattcactatgatattagtatgatcaacwtatatatatatatatatatatatatatatatatatatatatatatacatatatattatatatgaaagttgaaggatgcaaaaactgggtatagaaggaacatatctcaacatgaaagccatgctttttattgtgttgaggcatgtgcctt

SEQ ID NO: 663191 - DNA, 287 bp, Homo sapiens
tgtctgattactctagctaggacttccagtactatgttgaataacagcgatgaaagtgggcatccttgtcttgttccagatcttagagaaaaggctttcatttttccgcattcactatgatattagtatgatcaacttatatatatatatatatatatatatatatatatatatatatatayacatatatattatatatgaaagttgaaggatgcaaaaactgggtatagaaggaacatatctcaacatgaaagccatgctttttattgtgttgaggcatgtgcctt

SEQ ID NO: 663192 - DNA, 550 bp, Homo sapiens
ccacaaccttggccagactgtaaacaaatgatttcgagggagccaccaaaaaaaaaaaaaaaaaaaaaaaaaagtgtgtgtatatgtctgtgtgaactttagcatttcccagtgagggatcccaaattcattttatacccacctgtgcaacttcgacttgctagttctaattaatatctgcatcttaggtaggattctggcaacccagtgttttttttttgttttttttttttaacaaatggttaagcaaatattacacaattctaatccattagtttggactcttattcaacttcccttaccaataggatgagttattaacttatgatcccaaacactttttttcttgaratctattttttccctgaaaaaattaagcttaaaaacttacgtagaaaatgaaagccgctttataaattcgatagctagaaagtgacacaaattgaaatatttatatcacctggccgtgggagtaagaaagcaaaaaaatgaaatggagcatgtttatttttgtattgcaaatatgctgacatattaaataccttttaag

SEQ ID NO: 663193 - DNA, 587 bp, Homo sapiens
caattagttattttgcttgctcctgaaggctccagtttctggcagcactgcatttccctctgagtacttcccctctgctcaaagtgggaagggtgcacctcagctctccatacttcccccccaggcctccacttgtcaggcccctgtgggtttgcctcagccatatctaactcctccaggagcactgtaccacctcagttgcccagagaatccaccgcttttgccagggtccagggagagtcaacccctaatgcaaaatgaccttccttacctgctacatgcctggatcattttcactgctgtaggtgtcccaagccagggctcagctccttctccctgggccttttctcccagctggagctcatgtcagccccaaagacctccaccccaagtctgtctgagggcctgcttccaacacagggtcagccctccttcaytcttctctaggaagccccctttcccctcctccagccagatcttcccaactccaatagcatttcctgccctcacttgagctgtgtgttcttctggaaagaagaagtttgctacttaaaaatgccattgaagacatacagccacccttgcat

SEQ ID NO: 663194 - DNA, 597 bp, Homo sapiens
ccccaaagacctccaccccaagtctgtctgagggcctgcttccaacacagggtcagccctccttcattcttctctaggaagccccctttcccctcctccagccagatcttcccaactccaatagcatttcctgccctcacttgagctgtgtgttcttctggaaagaagaagtttgctacttaaaaatgccattgaagacatacagccacccttgcatatgtttccaaaaaatataggtcacttggcagggatatgtgacaattatggtcagatgttggtttttaattctgtgaaaaaatcaggaaggagggtgttctagagggaaatggaggaagaaactaccaatacagacaccatcacagcagtgttcctctttctcttaaatcactgctgacatccctggggaccccagcaggagaacaaagtatacaaggtaygtctctacgctggggcgtctcaccctcagcacgagtgacatttggggctggacaaggctttgttgtgagactgtcctgtgtgcggtaggatgtttggcagcatcttcagcctccacccactagatgacagtagcaccctccccattgcaagctgcagcag

SEQ ID NO: 663195 - DNA, 284 bp, Homo sapiens
ccccattcacatctgacagtgctggctgctggttggggtgcctcagttctcaatatggtgtcttgtcctccactaggctagacagctagaccagacttctttgtatgttggcagaaatcccccaagagggcaaagtcaaatgtgcaagcacttacagtctccacctgcatcatatttgctgttgtttcattggccaaagaaagtcatacagcctagaccagagtcaaggcrggaggggactacacacaggcatagagacctgggggtggactcatctggagcca

SEQ ID NO: 663196 - DNA, 578 bp, Homo sapiens
taagtgggctccatgttagacatgagagatatagctgcagtagtctctaggtaaggactgaagtgtgtcaggcaggaatgcagggctggggagggctgttggagaagctatttcgaggccagaataccctactctgctgcacttccaccccaacccacccaacctaccctgatcctgtgtagactctcagagctactgctggggcactgactgtcaccatgattttcttccttcctgtatgcttttcttgagagcaagagtgcttattttgtgtttgttctctgagctcctagcacagtgcctggacagtgaacccttgataaaggtttgataaatgatgggatggatagatggatggatggacggacggcaatccagggattctcartggctcctctctcaccattctcaaggagtcagcatttgcaaatttagtaaatctgcttactagaaggtttgttcttgcagatgtcctccaggtcttctgtacctctaaatctgagcccttaaatgtaaatgctagcaagacttttcagtatagcaaagtgaagagcaatgataaactcagcaatgtcaaa

SEQ ID NO: 663197 - DNA, 634 bp, Homo sapiens
ggctgaaattctcagccctctaatcatgccttggttttttctgtgaccagtccccatcctaaagacacctggagcttccagccacctgtaattagcatacaaagacacattactccagagattccaagagttttaggagttgtgtgtcaggaagtgggaagaccagttaatatttcacaataccatcaaaaaggagagagagaattataatgaaataatggcaaatatttcccaaatttgatgaaaaacatgatatattctagaagcttaatgaaccacaagtaggataaacacagaggtccaccctagatttatcataatgcaattgtacaaagagaaaatcttgaaaacagtaagagaaaaataacttatcacatacaagggggaccaccaatatgattaatgattgccttttcatcacaaacaaggaaaacccaagtacagtgcaataacatattcaaagtgctaaagaaaaaaaaaaactgtcaactaagaattctatatcactaaaagtatccctctaagaataaaattgaaatggagacattctcaaacaaaaarcaaccagataatttgttgctagcagacctgccttataagaaacactaaaggaaaccctttaggctgcaaggaa

SEQ ID NO: 663198 - DNA, 608 bp, Homo sapiens
ggatgatatatttaaactgctgaaagaaaaaaagactgtcagacaagaatactatacccatataaagttgtcattcataaatgaaggagaaataaagtctgtcccagaaaagcaaaaactgagggaattcgtaattgctacactagtcctataagaaatgcctaagggagtcctatggttaggactggttgagcaaacacatgaatgaggragagaaaggactcaaatattaccactacaaaaaacaaaataaacaaaaacagagaaagaaaggagcaaagcatatacaaaacaaccaggaaacagttaacaaagtaacaggaataagtcctcaaacatcaatcataaccttgaatgtaaatggattaaattttccacttaaaagatctaaacaggctgaatagaggaagaaaatggacccaactatgtgttgcctacaagaaacctgcttcccctataaatacatatatagactgaaaataaagggatagaaaaagatattccatgcaaatggaaaccaaaagtgagcaggagtagctatggttatatgagaaaaaatagactttaagtcaaagacagtaaaagaagacaaaggtcattatataatg

SEQ ID NO: 663199 - DNA, 608 bp, Homo sapiens
ggatgatatatttaaactgctgaaagaaaaaaagactgtcagacaagaatactatacccatataaagttgtcattcataaatgaaggagaaataaagtctgtcccagaaaagcaaaaactgagggaattcgtaattgctacactagtcctataagaaatgcctaagggagtcctatggttaggactggttgagcaaacacatgaatgaggaagagaaaggactcaaatattaccactacaaaaaacaaaataaacaaaaacagagaaagaaaggagcaaagcatatacaaaacaaccaggaaacagttaacaaagtaacaggaataagtcctcaaacatcaatcataaccttgaatgtaaatggattaaattttccacttwaaagatctaaacaggctgaatagaggaagaaaatggacccaactatgtgttgcctacaagaaacctgcttcccctataaatacatatatagactgaaaataaagggatagaaaaagatattccatgcaaatggaaaccaaaagtgagcaggagtagctatggttatatgagaaaaaatagactttaagtcaaagacagtaaaagaagacaaaggtcattatataatg

SEQ ID NO: 663200 - DNA, 535 bp, Homo sapiens
ccctcaaactattccaaaaagttgaagaagagggaattctctccaactcattctataaggccagcattaccctgataccaagaccagacaaggacacacacacacacacacggacacacacacacacacacgaaacagaaaattacagaccaatacctttgatgaacatagacacaaaattatccaacaaaatactagcaatagaatccaatagtacatcaatacaccatgatcaagtgggatttgtcccagggatgcaaggataggttcacatatgcaaattaatcaataaacatgatactgatatcaacagaatgaagaacaaaaaacatatgattatctcaatagatgcagaaaaagcatttggtaaaattcaacatcatttcatgataaaaactctcaacaaacttggcagagaaggaacataacgcaacataataaaggycttatatgacaaacccgcagctaacatcatactacatggaaaaatgctaaaaagccttttctctaagaactggaaaaagacaaatatgcc

SEQ ID NO: 663201 - DNA, 478 bp, Homo sapiens
aaataagggaaacatatgggatattggtctagacaagatttcatggctaaggcctcaaaagcacaggcaacaaaaacaaaaatagacaaatggaactctactaaactaaaaagcttctgggcagcaaagaaaacaatcaacagagtgaaaaaaaacaatctatcaaatgggagaaaatatttgcaaaatattcattggacaaaggactaatatccagaatatgcaaggaactcaaacaactcaataacaagaaaaatcaaataactccattgaaaagtggacaaagaattgcatgtggaggctcttgcctgtaatcccagtgctttgggatgccaaggcmggaggattgcttgaggtcaggagtttgagaccagcttgggcaacctagcaagacccagtctctacgaaaaaaaaaaaaattagccaggcatgatgttcacacatctggtcctagaaacttgggaagctaaggtgagaa

SEQ ID NO: 663202 - DNA, 551 bp, Homo sapiens
gagtgactgtaaattcagatgaagcttcacttgcttgcctgccactccttcctccttctgtctccttccaccacaggggctggggacccctggcttatatgaattaaatgtaggcttagcagttatagcaaaaacacaaaataagtggctcaaagaaaagagaaacgtccactcacctgtctaggagctggcatggcagcttcatggcactaagaacccaggctccttctgccttctggatttgccaccctaacttgctacctgacccacctctcagtcccctttcaaagcagcaaattgaggaaataaggggaacacttccacatttaaaggcktgtgccagaagtggcacacaaacattacttgtcttcacaacggaaaatctgaaacttttcacagcctgggttttgaaacttggccacctctagccacagagaagccaggaaagtgtctccttctaggcatttcactcagctacaagtcaagggttctcttatcttagaaaaaggagagaaccaaggttgtggacaattaggagtctctgccgcagt

SEQ ID NO: 663203 - DNA, 575 bp, Homo sapiens
tgacaagagacggattctgaaaatctttgcaaatcttgcttaggttaaagttttggtgagtagaatgttctctagaaatctccgtraaaaaaaaatatgcaaagaatccccatgctgttcttacattaatctgtgctgccggcttgggcttagatgcagctttgcaaaatatattttttaaagtttcattatgccactgtacatcaaaataggccaatataaattataatacggtcatgccaataggacttgcaaacacaatattttaagtttatattgcattccaagacccataaaaattattccgaatggctgtttgctttttgaagccaaatgaaaaggtatttgcaatttgattattaacaaatcaaatcactgatgtgatattggattcggtacatctcaaactgactgagagtgaaaaatcctcagtggtcaattatgtagcatggctggtttatagtttcctgtgtgtcattaagaataagcaccacggccaactcagattttattttgatttattttaaccatttctctaccctgagaatttctctcctagcctctagcaggcatag

SEQ ID NO: 663204 - DNA, 575 bp, Homo sapiens
tgacaagagacggattctgaaaatctttgcaaatcttgcttaggttaaagttttggtgagtagaatgttctctagaaatctccgtawaaaaaaaatatgcaaagaatccccatgctgttcttacattaatctgtgctgccggcttgggcttagatgcagctttgcaaaatatattttttaaagtttcattatgccactgtacatcaaaataggccaatataaattataatacggtcatgccaataggacttgcaaacacaatattttaagtttatattgcattccaagacccataaaaattattccgaatggctgtttgctttttgaagccaaatgaaaaggtatttgcaatttgattattaacaaatcaaatcactgatgtgatattggattcggtacatctcaaactgactgagagtgaaaaatcctcagtggtcaattatgtagcatggctggtttatagtttcctgtgtgtcattaagaataagcaccacggccaactcagattttattttgatttattttaaccatttctctaccctgagaatttctctcctagcctctagcaggcatag

SEQ ID NO: 663205 - DNA, 566 bp, Homo sapiens
tgagttttggggtggtttgttatgcatcattttgtagcaatagctaaccaatacatctctttccgtggggcgctccttaggttgccgtctgctaacttagacgcctgaaatagaccccatctctcctggaaaggaatctagcatgtttttccctcactgccatactgtctcacctccttgatgtacaagttttgctccaaatgtctgtctcctgcagacactggtggagtacctctctcttccagcagcatgttaacagaaatgttttcacaggcaaagataaagcaacagagkcaaaggcctgcttctcagcctctaaaagaatcctttgttggtgataatgcctttgttgacagtgctcacattcctagatcaaccactcagcataagttagggacagaggtgttcgtttcaccaaagctgcccacttcagttttctctttgtcaaaagaagaaacattaaaagtgcttcatatgtacatttaagtacatcattactttccgagtgctttatcatcgctaccgagtgttctccttccatcacagggagaccttgactcgcagtc

SEQ ID NO: 663206 - DNA, 459 bp, Homo sapiens
atcacttgcaatgacttcaagaaatccttcaccattggccagatgcataacttccctttgtaaatggtttgccaccgctctcatcctattcattcccagactgagagacagcgtcaatgtggtgggcagaagagaggtcatagttttgcaaaaggaaggagcctccgggaggtgggggccagaaaacctccatcytgaggccaggagcttctacagcttcagtagggccctgaaactgcccagccatctctgccgtggccctgctcctctccttacacattcccagagtcagctgcacttggaaccctctctacactctttggaggcgtggcctcctctgctcaccctctgggaatgactcacccactactctgcagggaaaacagaggcctgagattgaacatctgccacctcttgcccccacacctacaggctcaggggtgtcagccacagacctcg

SEQ ID NO: 663207 - DNA, 523 bp, Homo sapiens
cctcaggagggaaggggaaataaggaacatgtattgggcaccagttgtgtgccaggaactttayttacattggctcagacaatcctcacagcaaccctgtgaaggtggtattactagcccccattttacagttgaggaaactgagattctcactgctaagccacttgcccaaggacatagagctggtaagtggcatggtgggaattagaacaccttgatccagctggctgtgaacacttgatgcttgctacagtgcaccaagctggcctgatagcaaagttattgcaagaactgactcaggcccacagcctcataggctaagttctccctagtgaacttccagagagtcaggctgccctgtgatggggtgggtgggaataaagggagctagcacaacaccccatctgtagaggtgtgcaagcctggtgccatgtggtggctggtctggctagtcaccaaagcttctctcaacccttaggtccctcgccttggttccaagagataaaggattctctcccaggtt

SEQ ID NO: 663208 - DNA, 529 bp, Homo sapiens
aaattatatttacaggttcagaaagtgcttccccagtccactcacctctgggctccaggtcacagactccttccccttctacattgaatatagatcacatggaacagaaggatctgcagctcgacgagaagctccaccactctgttcttcagacaccagatgatctaggcaatatttcaaaattagatatttaccttttttcttttagggcgtcagtgtcaggagatcataaataaggcatcttacatttgattatatatgattattgtaaatattttggacttttctaagtcctttggaaatttgttaatrtaacttttttcttgttcttaaagatatttgttgtctgagttttattcattttattatagttgattagagtcctcaaattagttattgcattattttcaagtattgtattatcatttattgatattggtagtgtttcctaaaacaggaaatacataatttggcatccttattcttagttttatacctaaagaacctagtaactcacaggagaacgtag

SEQ ID NO: 663209 - DNA, 388 bp, Homo sapiens
gattctgctatactgtatggcccacctcctgtaagtggcttgtcagaacctacatctttcatgctttcattgtctcaccaagagaagccagaagagcctccgacatctaatgaatgcttagaagatataaccgtaaaagatggactttctctccagtttaaaagatttagagaaactgtaccaacttgggatacaataagagatgaagaagatgttcttgatgarctcttgcagtatttgggtgttactagtcctgaatgcttacagagaactggaatctcacttaatattcctgctccacaacctgtgtgcatttctgaaaaacaagaaaatgatgttattaatgctatccttaagcaacatacagaagaaaaagaatttgttgaga

SEQ ID NO: 663210 - DNA, 394 bp, Homo sapiens
cctgaccttgtgatctgcccgcctcggcctcccaaagtgctgggattacaggcgtgagccaccgcgcctggcttgtttatgccttttttatgcatttcagaatcatcttttgaatcacagaaaactaactggacctgtaaaatagcctttggtttttcccatgtttaagcaaaccttagtcacatctctcattaattaaatccagtgattctgacagattgggaagcaagtttgaaaaaagctacccataggaatgcatagtgagtaagatgattcagaccattcccacatcaaacaattctatatcttcctctcttctttaaaatttctgtattgagccatcgtttyttgctcaccttcagtttgagaaaagcctttttttttttctatttgt

SEQ ID NO: 663211 - DNA, 478 bp, Homo sapiens
gaattttattcccttatatcatttaatattttatatttttctcatcactacaataatattttatattttatatttttctcrtcactacaaataaaaattatttatgtatcaatgttctaatttattctaattatttattctatctattttctacttattttagaagataatctctcattttttatgattaaggtttcctggattgtttagtatgaatataatccctttctttgagatttagatgtactacacaagtgtatgttttctcaatcttaaaatgttttcaattttctagtgtatttatccaaatgcctcttatgttactatcatgcattaatttggaaaacttggtcactgatatgatataccttagcttagtgaaagagcttcattattattcaacaagtagaaaattttagtgtatttacattcttatgtttagttactgctatttctgtgtttagatgggactgttatt

SEQ ID NO: 663212 - DNA, 632 bp, Homo sapiens
attaaacttctcctgctcatctggtgtgaagatttctccttcctcaaaacacagaagacatagaattcagaatgacatctttcctcagatttctgcctccctttgacctaaccaacctcttttataggctgaagttagttaaggttccccaaggtaggtttcagttacctccttgcagatcctgctttgaggggccattacctccctttggaatttgaagygctcggcatctgttgtcttgaagccttagcagaaaatgagcaggattctcattttgacttcctgttatatgcattatctagggttagtcaggtatgtgtgtgtgggagggacttgggggtagaaaagaaaattctagaatgtattaaactttgagatgagttttgaacaaaacttgtaaatgcttagacatctggctctctccatttcttctaattttcaactcctcctctatttctctaccccttacaatattggaatggttgcaggagatactaaaagttgctgtaacattagagaaaaatgtcaacattccttactgttttgaaagaaacatcccccatcccccacaatagcagtcaaagggccaacaccaaacaggccttatatatctttcagatctcagaagaaaa

SEQ ID NO: 663213 - DNA, 578 bp, Homo sapiens
caatccctatcaaaataccaatgacattcttcacatatatagaaaaaaatcctaaaatttatatggaacctcaaaagacccagaatagccaaaatgatcctaagcaaaaagagcaaaactggaagaatcacattatctgacttcaaattatgctacagagctgcactaaccaaaacaccatgatactggcataagagcagatgcatacaccagtggaacagaatagagaacccagaaacaatccacacacttattgtgaactcattttggacaaaggtgccaagagcatacactgaggaaaagatagtctcttcaataaatggtggtgggaaaactggaaatccatatgcagaagaatgaaactagatccctatctcttgccttttacaaaaatctaatcaaaatagattaaagacttaaatctaaaacctcaaactatgaaactactacaagaaaacatcagggaaacatttcaggacattggyctgggcaaaaatttattcagtaataccccacaggcactggcaaccaaagcaaaaatggataaatgggattgcatcaagttaaaaagcttctgt

SEQ ID NO: 663214 - DNA, 540 bp, Homo sapiens
gatgaggatttttagtccttgtaaattcaccaatgagaacaatttgttcagatttcacaaaacaaggatgcacgggtaccccttgtgacatcaggtataaatgctgccatttttagaaaacctgaaaacaggttgaattgttcaaggaagggaacatgycaggcccagcagcctgagggtgatgaaaagttgccgaggatggtacctgggcttgtgaccctctctctgggagcgtcaaagagctaaggcaatcatgtaaaggaacatggctatagaggcagacatagaacggaggaggggacagacaggtggcacagggagcagagagaaagtccgggggatgtggaaaatgaagagagaaaaagtgatagaggaggtgcagcaacatcattacattctaaaatgcaaattctctatggaatctcgggacaattatggcaggacctcttccctgtgttattcctaatcaaaataagaaatgtatttctgtgacgttaccactgatgattagtgaactcattagccgccttgtggcactgg

SEQ ID NO: 663215 - DNA, 622 bp, Homo sapiens
aagtactcttgacttcacccccaaaatagtggggagggacagtatgaaacttttagaggcaatgaacaagtttataccattgatagtgatgatggcttgatcatttcacaggtacatacttatctgcaaacacatcaagctgtctacactaaacacccacagcttttgtatgttaatcacacctcaataaatcagttargtactatataccatcctgctatggtaaagactgaaaaactgaagtactaatacatgctacattatgggtgaaccttgaaaacattattaaaagggtctgaattttatgatatatgaattttatctcaaaaaaagttttaaattcaaaatatatatattttttaaaatcataatttccttagattttgtttgagagttatttccttcatatttaaagattctgcaattttattattcaacatttagaattaaaaataaagtttaaatattataggtcatgagaattgtagtcagcacagtgctacaattaatgtgtaacaccgaacagagcaagccaacagctctatcagtgtaagccaaggtggcatctgagtctaaacaaaattagagactttgacagggaagctttaaaggcatgttgcat

SEQ ID NO: 663216 - DNA, 574 bp, Homo sapiens
ggattaagcaagctggccccttccttgctcaattaaagccatagggaaaagtgccttatgtttccatagttttaaagtacttctgtgacctaagcacaccatgtaactgccttatatacaaattgacctagtgaactatgtgattatgcaaaggctacactctatttcagcggtcttgcccactctttcagttttaaaaaaaggcaattgagcaacatttaaaaccatatttaagccatcaaaagttttcaatcaccctgataacaaattttgaaactcctttgctatgatattacccttttagaaacatgcgtagagaaaaataagaaaaccaatttgattacccaaactcagcttcycacaacacattctccagagacatcaatgctccagcaatgcagtagaaacaaacatctaagatatttcagacatgccttcactgtaaattcacggatcaaaggcaaaagaaaaaagttttatcaattttggttttgcccaactactgcttaaacaagtattcttccctgaaacatttaaaatccagaaagaggcagcggggtgttgctaggcacga

SEQ ID NO: 663217 - DNA, 574 bp, Homo sapiens
ggattaagcaagctggccccttccttgctcaattaaagccatagggaaaagtgccttatgtttccatagttttaaagtacttctgtgacctaagcacaccatgtaactgccttatatacaaattgacctagtgaactatgtgattatgcaaaggctacactctatttcagcggtcttgcccactctttcagttttaaaaaaaggcaattgagcaacatttaaaaccatatttaagccatcaaaagttttcaatcaccctgataacaaattttgaaactcctttgctatgatattacccttttagaaacatgcgtagagaaaaataagaaaaccaatttgattacccaaactcagcttcccacaacacattctccagagacatcaatgctccagcaatgcagtagaaacaaacatctaagatatttcagacatgccttcactgtaaattcacggatcaaaggcaaaagaaaaaagttttatcaattttggttttgcccaactactgcttaaacaagtattcttccstgaaacatttaaaatccagaaagaggcagcggggtgttgctaggcacga

SEQ ID NO: 663218 - DNA, 609 bp, Homo sapiens
accctctcccgactggccctggcatggcgttagccaagcgaaagtrgcagtgcaccattgctgacactgagcctgagacttcagtgggtctggcagtgtcttagttccagatgctacaacaaaatgctatgaactgggtggcttttaaacaatagaaatgtatcactcatagttatgggggttcagtatccaagatcaaggcaccagcagatttggtgtctggtgggagctttccagttcctagatgacaccttcttgctgtgtcctcacatgctggaaactacagagaagctccctctggcctcttttacaaagacactaatcacatgcatgagggtcccgcacttagccctaatcatctgccaaggaccatgtctcctagtactgtcacattggggattaggtttcaaaataagtttgggtcacaaacattcagaccctacaggcagttctcctttctactttttgggaaccctgaatgccaggtagaaagtccagctatcctgctggagaggcctagcaggaaggagaggactcaacactctatagagaaggaggggctcccagcgtttcagtgctgagcccccagatgaccccacacccagctgc

SEQ ID NO: 663219 - DNA, 481 bp, Homo sapiens
gtggctttgcagcgtggctctttkggctcagaatgccctttcttacctggaggagtcatcctgatctttcaagacctagttcagatgtcactgtcttggaacatttcccttaactcccctatacctcctatggccagtcacggagacatgggggttaggggcagaaggatcatttgaccggggccacaccttcttaaatctgaacttttgaggtcatcagaatggtgtgtgtctacacatacacacacaaggataatacactgactgcactgaaaagcaagaagtttcatcatttgcctttgaatgtgtctcattactcgattacactgaccacactgcatcatacacttgtagttattttaaagtgataaactgactccatgatgactgacacaatcacattggactgtatttttaactaaaaatcattaatttgctaaatgcatatatttgaaatatcccccaatttttgtatcttttt

SEQ ID NO: 663220 - DNA, 595 bp, Homo sapiens
aaacctgaggaaggcaagggaatgagccataaagatccaccgggaagagagttccagacagaaggaaaagctcgtgcgaaggcctagagagaagagcttggttgctagggggacagcaagtaggcaaattgattaaaactagttgctgatttagttcagctggtaaacagactagcaataagcagaaggaaatcattccaattgaagagattttttggctgggcacggtggctcatgcctgtaatcccaacattttgggaggctgagacaggaggatcccttgaggcctggagttcaagaccagcctgggcaacatagtaagaacccgtctctacaaaaaaatttaaaacatagccaagcatggtggcatgcacctgtagtcccaactacttgggaggctgaagcaagaggatcgcttgagcrcacgagtttgaggctgcagtgagccatgatcatgctactgtactccagcctgggtaacagagtgacaccttgtctctaaaaaaatacaaattaaaattaagatggagttttttcctagtgatattagatatcagtgacactcattagagggtgactcatcacccaaaggaag

SEQ ID NO: 663221 - DNA, 559 bp, Homo sapiens
tgttttatttgtgtgtatgtctctatgggtctctgaatatcccttattttctagtgaactcagcaatgcctttaaaacaagttactgtacttgatctaggatcttttatattatagtcagaagagaaccttccaaatgtctttctaccacttggctggaggtggaagtctttggtcatctcttctcttccatgtctacttgcagttgattttcaaaagaagctttgaacttgctccagtcccctgcttctacaatcccattaatcccatctacttttcacatttggcaaaagatcagagtcctcaastaaatccctggggaggacaactaccctacatgatatcctttagaattagagccattagttccagagagactcctagtgcaccaggtaagaggcagagatgacacatgctcattatactgtagtggaacccctaattaattggttaaacaaatgaacaaacaaacaaaaaatggcagatggccatgtcgtaaacctacaccttgacttgttagctgaaagcctgctcattctgggtttgaactaatgtgattt

SEQ ID NO: 663222 - DNA, 608 bp, Homo sapiens
caccctcactgtgtcatgcagagaaggagtgtgctaggggtctgtgtgcatgtggagaccacaattcacagtccgccactcagagttaaatgtcagcttcatttgcttcactggcttatcttaaattacaattacaaatctttgaaatcccttttaaacttcctaccagctccaaacaggcacgttagcagccattgatccagcacatcggggattcttcgcttcaaggagtggatcccttttcgtcagtgaatgaaaacaagactcttttgcctcaaatattctgacagcctctttgcaaaggctgtgggtcatttactcccagcctccacaagaaaaccctagaagcacatccctttgtatggtttgagtttgtgtcgaaggcactctaagcatcccaagtgggtttttattagttatttcttactagcagcctatcaggtgtggagcrttttatagatgctccttttatagacgggagtatcaaggacatgggatgctcgctgtctcacagcctctcccactcagcaaatcagagcttgctcctggactgggctgctctgcccgctgtgtaagtagccctcttagccctgcagggctggacaggg

SEQ ID NO: 663223 - DNA, 608 bp, Homo sapiens
caccctcactgtgtcatgcagagaaggagtgtgctaggggtctgtgtgcatgtggagaccacaattcacagtccgccactcagagttaaatgtcagcttcatttgcttcactggcttatcttaaattacaattacaaatctttgaaatcccttttaaacttcctaccagctccaaacaggcacgttagcagccattgatccagcacatcggggattcttcgcttcaaggagtggatcccttttcgtcagtgaatgaaaacaagactcttttgcctcaaatattctgacagcctctttgcaaaggctgtgggtcatttactcccagcctccacaagaaaaccctagaagcacatccctttgtatggtttgagtttgtgtcgaaggcactctaagcatcccaagtgggtttttattagttatttcttactagcagcctatcaggtgtggagcattttatagatgctccttttatagacgggagtatcaaggacatgggatgctcgctgtctcacagcctctcccactcagcaaatcagrgcttgctcctggactgggctgctctgcccgctgtgtaagtagccctcttagccctgcagggctggacaggg

SEQ ID NO: 663224 - DNA, 488 bp, Homo sapiens
tagctgcttcaccagtgtcccgtactgggagcaaccacattcactgggagtttccagattaactcccatgcagaatgcgatttatattaaaggatgtcataaagatgcactaatgttaaggttacatctgtcttattaaagttcagcaataaccacagaaactgtttagagcttaaaccaaaagaacatgtttttgaggagtgtttatcaccagcgatgtttactaytgctcacatatggtgctaataaaaagcagacaaactaaattcagtaggttttgttcttgtttttaagttcttcacagagaatgcactctctgattgctggcatgcaggcagatgtataccactgccagtagatactctttttattttgccatcaaaagtcacacattatttttaatggtaattctagcctgaattgctaagaatttaaggttgctggtagaaatacaatctttgggtaggacaatgtggcagaatgttgaa

SEQ ID NO: 663225 - DNA, 586 bp, Homo sapiens
tataccactgccagtagatactctttttattttgccatcaaaagtcacacattatttttaatggtaattctagcctgaattgctaagaatttaaggttgctggtagaaatacaatctttgggtaggacaatgtggcagaatgttgaaagtgcatgtcttggccaggcatggtggctcacgcctgtaatcccagcactttgggaggctgaggcaggcggatcacgaggtcaggagattgagaccatcctggytaacatggtgaaaccccgtctctactaaaaatacaaaaaattagccgggcgcggtggcgggcgcctgtagtcccagctactggggaggctgaggcaggagaatgacgtgaacccgggaagcggagcttgcagtgagccgagattgcgccactgcagtccgcagtccggcctgggcgacagagtgagactctgtctcaaaagaaaaaaaaaaaaaaaaaaaagaaagaaagaaagtgcatgtcttttgactaggaattttgcttcaaggattttagtctaaatagatgtaggtatattcaaagatttagcaagatattcatcatagtatcacttat

SEQ ID NO: 663226 - DNA, 586 bp, Homo sapiens
tataccactgccagtagatactctttttattttgccatcaaaagtcacacattatttttaatggtaattctagcctgaattgctaagaatttaaggttgctggtagaaatacaatctttgggtaggacaatgtggcagaatgttgaaagtgcatgtcttggccaggcatggtggctcacgcctgtaatcccagcactttgggaggctgaggcaggcggatcacgaggtcaggagattgagaccatcctggctaacatggtgaaaccccgtctctactaaaaatacaaaaaattagccgggcgyggtggcgggcgcctgtagtcccagctactggggaggctgaggcaggagaatgacgtgaacccgggaagcggagcttgcagtgagccgagattgcgccactgcagtccgcagtccggcctgggcgacagagtgagactctgtctcaaaagaaaaaaaaaaaaaaaaaaaagaaagaaagaaagtgcatgtcttttgactaggaattttgcttcaaggattttagtctaaatagatgtaggtatattcaaagatttagcaagatattcatcatagtatcacttat

SEQ ID NO: 663227 - DNA, 586 bp, Homo sapiens
tataccactgccagtagatactctttttattttgccatcaaaagtcacacattatttttaatggtaattctagcctgaattgctaagaatttaaggttgctggtagaaatacaatctttgggtaggacaatgtggcagaatgttgaaagtgcatgtcttggccaggcatggtggctcacgcctgtaatcccagcactttgggaggctgaggcaggcggatcacgaggtcaggagattgagaccatcctggctaacatggtgaaaccccgtctctactaaaaatacaaaaaattagccgggcgcggtggcgggygcctgtagtcccagctactggggaggctgaggcaggagaatgacgtgaacccgggaagcggagcttgcagtgagccgagattgcgccactgcagtccgcagtccggcctgggcgacagagtgagactctgtctcaaaagaaaaaaaaaaaaaaaaaaaagaaagaaagaaagtgcatgtcttttgactaggaattttgcttcaaggattttagtctaaatagatgtaggtatattcaaagatttagcaagatattcatcatagtatcacttat

SEQ ID NO: 663228 - DNA, 586 bp, Homo sapiens
tataccactgccagtagatactctttttattttgccatcaaaagtcacacattatttttaatggtaattctagcctgaattgctaagaatttaaggttgctggtagaaatacaatctttgggtaggacaatgtggcagaatgttgaaagtgcatgtcttggccaggcatggtggctcacgcctgtaatcccagcactttgggaggctgaggcaggcggatcacgaggtcaggagattgagaccatcctggctaacatggtgaaaccccgtctctactaaaaatacaaaaaattagccgggcgcggtggcgggcgcctgtagtcccagctactggggaggctgaggcaggagaatgacktgaacccgggaagcggagcttgcagtgagccgagattgcgccactgcagtccgcagtccggcctgggcgacagagtgagactctgtctcaaaagaaaaaaaaaaaaaaaaaaaagaaagaaagaaagtgcatgtcttttgactaggaattttgcttcaaggattttagtctaaatagatgtaggtatattcaaagatttagcaagatattcatcatagtatcacttat

SEQ ID NO: 663229 - DNA, 555 bp, Homo sapiens
aatgcagaaggcagacagttgggagggggaaactaggtaggttgatggtggtcacaggatcctttcactgtgcaatgagtggtgttgagttagatgccctcatcccaaggagcatagagcattgacccagggacatgagctatcaaaaggctgcccgggctccaatcccagcatctccacttaccatccatgtgatcttgggcaaattaataagtctctttgcctcgttttctcatctgttaagtgggaataatacgattactgagcctcctagggtttgtatgagcattaaatgagctaatgcatactcaatacttattccttgaatgttgaatgaataggtctatgtctccctccagacaaagtgtgtataccatgattcatctttgtgactctagcagccaaacatacattgtgccagaactttcagctacaagcattttcctccaccttcctcttttgggagaaagacgtgagtaataaaatgtgcagatatgtgggatttggaaaygagaggaaacttcctatggactgccagtcagtagaagttcacct

SEQ ID NO: 663230 - DNA, 555 bp, Homo sapiens
aatgcagaaggcagacagttgggagggggaaactaggtaggttgatggtggtcacaggatcctttcactgtgcaatgagtggtgttgagttagatgccctcatcccaaggagcatagagcattgacccagggacatgagctatcaaaaggctgcccgggctccaatcccagcatctccacttaccatccatgtgatcttgggcaaattaataagtctctttgcctcgttttctcatctgttaagtgggaataatacgattactgagcctcctagggtttgtatgagcattaaatgagctaatgcatactcaatacttattccttgaatgttgaatgaataggtctatgtctccctccagacaaagtgtgtataccatgattcatctttgtgactctagcagccaaacatacattgtgccagaactttcagctacaagcattttcctccaccttcctcttttgggagaaagacgtgagtaataaaatgtgcagatatgtgggatttggaaacgagagraaacttcctatggactgccagtcagtagaagttcacct

SEQ ID NO: 663231 - DNA, 585 bp, Homo sapiens
aacattttcaatagcagggcttgtagggggcaggaagaagaggagacaagaagtcaagactcctaatctcagctccgcatgaatggaaaaacctctttatgcttctgttattttcttccataaaagtagattggggaaagagtatagttgttcttcaaaaagtaaatataaaactaccatataacctagcaattccactcctaggtatatacacaaaagaattgaaaactgatacttaaacaaacatatatacatgcatgttcatagcagcactattcccaatagccaaaaggtggaaacaacccaaacatccctcagtggacaaatggataagcaaattgtggtacttccttgyaattgaatattattcaggtattgaaagcaatgaagtactgatgcatgctacaacctggatggacctcaaaaacattatgctaaatgaaagaagcataggtcacatggtacatgattccaattatatgaaatgtccagaatagataagttcatagagacagaaagtgtgtcggtggttgccacaggttgggggagaaagaaatggggagtaactgcttactgggatagttt

SEQ ID NO: 663232 - DNA, 603 bp, Homo sapiens
taggttacagatcgtctgggtcacagtaatgtgttctggtcatggcgctccttagaaaagacacaggacaaatcacatgatgtgcctggctttcctgtcctcctctgaaaaatgggggaggacatgggggagcagtagaaatagatgacacctgaggcttcatttagttcagatattctgggaaatgttaagtttgaaaagtaggtcactaactggctgctgggagggagaagaaaggagaccgctattgagggaatagtgttcaagagggtttggagaaggaacagaggaggtcaggtggcacttagggacacaagggtgcctctggacagaagtgagcctggacacttggccagctctgtccccagttttccccatcacctagaggctgccactcagattgttaggcagaaaatggtggcaggagcagcttcctcttccyggcttcccagggacattgctgttgccatggtgatggctaggcagtgtgatgtgtggctttgtgctgtgaccacctccttctttgttctcattcgaactataggcactacctctggagctataagaaagggcccaagtagggaatttctgtgcttatttgac

SEQ ID NO: 663233 - DNA, 506 bp, Homo sapiens
cccaaacatgttttaattctataatagtgttgcacaaacaatcacaactgaatttttttgaacatttattcctacatatctatgcattatatgtaatatatgtatatgtattcctcacaatagccctgcataataaacactgttattatccccatttctcagatgaggaaattgaggcagagagagattaaagtaacaaacccaaggtaacacagctagtaagcagtagaaccagtttttgatcccagggagtctgaatccagagctggagggcttaaacaccatgttgcaatgtacatacattttatattttatgccaccaacaacctgtcttatgtttttctttttctgcctacccaaatattttttctctccaagttagcaggttagcatccttttttcctctttcaatatttctactacttggtgagaagaatractacacattttctaatgcttcattttgcttttagtctcagtattttacaggtgattacagaaagccc

SEQ ID NO: 663234 - DNA, 452 bp, Homo sapiens
aactccacccttctctgaacctcattccacatctcatgaggggcctagctcctgcttccacttcagtgctaggacatgccaacttcttcatgctacatcaaggcccagcttcatattgatgtgctgaaatttcccttgagacttcctctctgacccatggattattgaggagcatgctgtttaatttccaaatatttggtgattttccagttatctttctattatatgtttccatttaattccattatggtctaaaaacatattctatgtgtgatgtgctttggctgtgtcttcacccaaatctcatcttaaattgtaactcccacagttcccatgtgtcatgggaggaagcyggcagggggtgattgaatactgggggtgggtctttcctatgctgttctcgtaataatgaatgagtctcacaagatctgatggttctaaaaataggagtt

SEQ ID NO: 663235 - DNA, 588 bp, Homo sapiens
gattttaagttgtttattgtaaaataatttacacttatcttgctgtcttcagtaattaaaacaatggaggaacactttcttctgacaaagacaacagtaagctaaaaacaaaatcagctggctgaattttccttctttaccccttgtctgaggatggaacttgattttcattaatccagagctacagcaccaaagataatttcagtcaactcttttgtgatgacagcttggcgggtacagttgaatgtcaatgtcaatttgtcaatcatctcagaggcattcttgctggtgttgtccatggctgtcatcctggcactctgctcactagtggtggactccttcagagagtagtagatgctgttggccagactgtattcctggtaattttgcagcacctcagcatcaatattatagtagatactcatgctctyggcacttgcaatggtattaaggaaaaagatgggcttttcttcagtcttatacgagatgacagacttgaactgattaaagatgatggagccttcatcaaattcatatccagaatttagtaattcaagggcaatgactgacacatttccaaaagcaggg

SEQ ID NO: 663236 - DNA, 529 bp, Homo sapiens
agctacagcaccaaagataatttcagtcaactcttttgtgatgacagcttggcgggtacagttgaatgtcaatgtcaatttgtcaatcatctcagaggcattcttgctggtgttgtccatggctgtcatcctggcactctgctcactagtggtggactccttcagagagtagtagatgctgttggccagactgtattcctggtaattttgcagcacctcagcatcaatattatagtagatactcatgctctcggcacttgcaatggtattaaggaaaaagatgggcttttcttcagtcttatacgagatgacagacttgaactgattaaagaygatggagccttcatcaaattcatatccagaatttagtaattcaagggcaatgactgacacatttccaaaagcagggggatttcttctcacttcttttaatgccaccagaaactggtcagaatgcatcctgtaaagtacgcccctgattttgtcaccaattccaacaagcataacttctttcccagctgctgttagt

SEQ ID NO: 663237 - DNA, 629 bp, Homo sapiens
tgcacttaacggcttggagagaattaaattttaaaatttttcgccataataaattgatattcatttttaaatacattgtttctctgtacacaaattattttcgctgtacagagattatttccttagwttgtctaggtagatgatcatttcatatgaaataatgtcagttttgtcattgatatgtcatttatgccttttgtcagttttgtcatttatactttttacacctgcttcttgtttgtacactggccaaaacctgagtggtaatggtggctgtccatgttttattcctgattatggtaatatttcaccattaagtatgaggtatgctatcagttcttgaatataagttttgcctcatcaaagatatttttctatttctagtttaaacaacttttaaaatcataaacaaatattgattttgaaatacacttttttcagcctctgttgaaaagaccaaaatctttttcactttaatctgctaacagagaattacattaatacattttctcatactgaaactttagtaaagtaaatcctaacaggtcataatatattaacataccattgaattttacttggaaattaaaattttttttacatttatgttcataaatgaaatcagtcta

SEQ ID NO: 663238 - DNA, 584 bp, Homo sapiens
cccagggccccaagtcagggtattacttgattyatgatcccacttgcttccacagttgtcggcctggggggtgcaggagttcccagaggaagccgtggtaacaggctgcctctcgtgaggacaagggtgtcacaacacttttccaagcttcaggccaacacccctcccaagccaccagatgttgcaactggactcatgcctgcgagagtccagcatggcttaaactgggttctcaggctccccattcatcttgtcagggtagaggaggctagaacatgggatcctgttgggggtagggtgggagggaaagcaagctgatgaatgctaaccttggcatgtgggtttcaagtggttcatagtgaaaaaacaacagcgcaaacaacagcactctgtattttcccttcagcatgattgctttaaggcaaatctgctgctgcatcttctcccagttctttgtttctcttgaatagggtgtatctgaaccccatcactgagggtgacctaagggtctttgtgacccaggaagaacttagagttctgcagaatatttcttcatactcttcaaagcttaggtttataatcag

SEQ ID NO: 663239 - DNA, 561 bp, Homo sapiens
ggtcttactctgttgccaggctggagtgtagtggcaccgttacggctcactgcagcctcaacccccatggagataagcgatcctctcacctctcagtctcctgagtagctgggactataggcatgcaccaccacccccagcaaatttttgtattttttgtagagactgagtttcatcatgatgcttaagctgctcttaaattcctggactgaagcaacctacccaccttggcctctgagagtactgggattataggcatgagccaccatgccttcattgatcatctttaataaactgtgtgagccatcacttggtccctttccaggtctttggaagagsatcatgcaaatgaggggtcctaacacatcagcttcattagcttcaaaatgtctatgcttctctgcccagaagggatgctttatttgtctaatttgcacacactccacataggctaacagtgatcctagctaatctaaaaacatatgaaatttactacttatatgagtatttaaaagttggagtttattatccttgcagttcaataatgttaaatcttggtgt

SEQ ID NO: 663240 - DNA, 533 bp, Homo sapiens
ttgttgaagctgggaatggatacataaagaagcattacatttttgtcttttttgcttatacctaaccaagtttctttaaaaaatcccagttcttttttaaaaatacctttttgaaagatgtatatcaaactacgcattgtaataagctcaaaaaagcagatttagggttcagaggatgaaaataatcttggttctccactttacaatttgaggaaagaataaatcattaatgatttgatctgtgcattgcccttattcacaatgtatatattatctrtcagtaatatccaatattattattatgaatgttgtgctattttgttattcttatgtccgccaagttatattaactcacaatgtgcttaataacaaatatctgatgaagaatatatttaaagtttagatttttagtaagtgtgaaatgaactaggaaaaaatatagagatacctggacatctgtagtgaagtctgaagaaaataaaacatgtgagagaagtagccctctacaagatcttcttctccatcctaataca

SEQ ID NO: 663241 - DNA, 542 bp, Homo sapiens
cattatcaaattttttctcctatggattttgatgtcatatctaagaactatttacctaacccaatatcacaaaaacctttccttcacctgcctcttatccttttccattgttctacatctgtcctccaccattgtccccctccccaccaaattactctaactaaaatgacctaagtgataggatagaagtagcttcattgtcttatttttatgtaccaaatcttcttgttctaattatgaacactccttcaggacaggatttgagatgccaattagagtacctcaaccccttagttaaaagggagacactamctgtgattccttgcaacaatgttttggtcgtatcaagtgacatacattttatccttatttatatttctgtttaatcccactgtcacagttttccaaatagcgatacatgattgagaaagtacactaaggtgctaacagcaaaaagaaacctgaggtttttttttttttaattgcaatcaatttttgtatctttgtaagttaaaaagaggttgcttttatgttctggtctt

SEQ ID NO: 663242 - DNA, 488 bp, Homo sapiens
atgattctccagctgaaagtcagagcgcgggggtaaaaaattattttccatcaaataataatcattctcctaaaatcttagtctcgcattccttgaaattaaattttttcctaaattttgtttaaaagctttcccatcaattccagttcccagaacaaaaaaaaaaaaaaagaaaacgcgtgttctaataatcagaagtcttaatgaagttgaagacaatatagaaatttcttgcacttgctttttttycccccaaaatgttgggattaaatagatctagctaccctcctgcaagtttctatacccattataacaaacaagcagaaatattaaggaagttcttagccccagagttggattaagttgcatgcctgatttttatttctctctaatcagccaaaaacaaaattatttgatctaacactcacgtaaaatctgtttactaagctcatccgcaattaaataaatacaaataaaaacaacagaga

SEQ ID NO: 663243 - DNA, 621 bp, Homo sapiens
taaaattctcagtataaaggtattgcaatgttttgtacaactaaccagagaaaactcactcatggtcacagagtattaattcacagaatttatattgcaacccagagatgactgtctctaagatcatttgcttcccaggccctgctaccttctactgtgtatcactagcactgctgcattttgtgacaagttcacagaaaggctctgtttttaaaaattcactatttgaaaagctaaatctgcacaatagattaattgagaagtaactgtctatatcacaataatttagttcactttcaaatggattcaaacgaggatcttttaaaaggcaaaatttcytggtgctttaaaaatatgactgcatttacataaactttagaggaatatatctgttatgtaaatcgaggaatgcaagcaatctcagacctctgacattcccttttcaaagagcattgtgaacaacctgtctaacctgtcattctcaatttgcaggtacaaaggaattacaccatcatctctgctccctagaagcttacaattcatcctggtgtactaggtagggcaagcgcactctcaacatttagaattaaatgcttaaatctcatactgggagccacacag

SEQ ID NO: 663244 - DNA, 604 bp, Homo sapiens
tctaattctgatctcacatgttcacttgtagctttcctttccaagaaagtgtcagctataaattaaataggcaatgttttctagttgtactcaccgtaaaacatattaaaatacttggccatggggaatggaacaccaggctactcttaacccaaaggtggcaacctcaattccaagatctgtgtactctgggatatgcagtccccatgcattgatcactaggcatgacgagtggtctcaaaagtcttctaaagtcacccaaaatacaacaaatttcagacgtaagggtgtgcacaagcacacacacatgcacacacaaggaatagtgttattcaggccagaaataaaacatgtttttaaagactatgaaaatactaactacgtacccttgtgacactattaaatgctttgtatttsaagtataaatatagaccaataatatattatcttcttaggaaaattttataatgtagcatacataaagtgaacattaaaagttctaaatttgtttcaaatatcatgtatgtccaacaatctccccaggttaacttataatgaccatgagacaataggatgccaaggactctgtagagaaacctatggc

SEQ ID NO: 663245 - DNA, 597 bp, Homo sapiens
ggtggcttcagcagaaacccttccatctgaaaactttcccttaatatttatctcctttcacttaatctcaccaaccccaatttctctgagccaaaacctacatagccaggagatgctatttgtagaaattttttcaaaccttaatctctatccaagatgaaattgtaatggtataaatgttctttcaccattatatatatacacacacacacacatatatatatagatatgtatctagatacatacatacatacatatctatctatatatcttccctaactcttctgtccayatttttgtgctctggaaggcttcctatctcaggacacatagcttacatacctagggccagatacagaagctcagccattgtgcaggagaaactgtgtaaggccatgtcgtcttatttgttttccctggccagcttccccagagtacctgtctagagggaaaatgcataaatctcatatacaaaatgcaataacaacccctagaattttactttctttttcaattattttctaatcttgaagagcaaattcaagataaatatgacaatggtgtcccttctcaaaatcagttcacaagcacaaataa

SEQ ID NO: 663246 - DNA, 597 bp, Homo sapiens
ggtggcttcagcagaaacccttccatctgaaaactttcccttaatatttatctcctttcacttaatctcaccaaccccaatttctctgagccaaaacctacatagccaggagatgctatttgtagaaattttttcaaaccttaatctctatccaagatgaaattgtaatggtataaatgttctttcaccattatatatatacacacacacacacatatatatatagatatgtatctagatacatacatacatacatatctatctatatatcttccctaactcttctgtccacatttttgtgctctggaaggcttcctatctcaggacacatagcttacatacctagggccagatacagaagctcagccattgtgcaggagaaactgtgtaaggccatgtcgtcttatttgttttccctggccagcttccccagagtacctgtctagagggaaaatgcatamatctcatatacaaaatgcaataacaacccctagaattttactttctttttcaattattttctaatcttgaagagcaaattcaagataaatatgacaatggtgtcccttctcaaaatcagttcacaagcacaaataa

SEQ ID NO: 663247 - DNA, 547 bp, Homo sapiens
ctcagccattgtgcaggagaaactgtgtaaggccatgtcgtcttatttgttttccctggccagcttccccagagtacctgtctagagggaaaatgcataaatctcatatacaaaatgcaataacaacccctagaattttactttctttttcaattattttctaatcttgaagagcaaattcaagataaatatgacaatggtgtcccttctcaaaatcagttcacaagcacaaataagcttttttctgaggtcttagagaaaactccagtgcttctccacaaagaaaaggaaacaaattccatgcagccacgtgattataaaaggaagttttactcatgtccttctctatgtagatttaygagggtttctgctgacacgaagtatgttctctactgaattcctcaagtgaagcaaaaccacacgtatctggttctaaagcaacatattgagtcactagtttacatagcaaatgtgaaatagtcatttggaagcctgaggcatacctgtgaagtggattgaaccataagaattgcctgggaaaagaaaa

SEQ ID NO: 663248 - DNA, 565 bp, Homo sapiens
ttgtgcaggcagaataagacacctaaagccaggaagctactttggggagccccagctcacagctttcagcacattaatgagttctccattcctcacraacagtggaaatatcccctgctacttagttaaaggcttcagtgatctcccttcttctcagctggagaaactgctgggctctctcttcctttgggagcttgcagaggtaaaggccaggactctctgagaagtttttaaaccagggaatcaggctatattggggacaaatagtcctctaccatagttcagagagctctggagataggaagatccttaggatcctctccccaagagggggcactcagcacctgattggggtcacctggccactagggggctttagcaacacactggaagacaaaaggattgagatcaaaagcactttgttttcttgagaacactgtagccctctcatttgataacacattcttatttctccacctaatcaaatcctcccaatacttagaggtgtcaaaatgctcattaaaaatataatgacagtcaaaacccagtgtcagaataagcacag

SEQ ID NO: 663249 - DNA, 565 bp, Homo sapiens
ttgtgcaggcagaataagacacctaaagccaggaagctactttggggagccccagctcacagctttcagcacattaatgagttctccattcctcacaaacagtggaaatatcccctgctacttagttaaaggcttcagtgatctcccttcttctcagctggagaaactgctgggctctctcttcctttgggagcttgcagagrtaaaggccaggactctctgagaagtttttaaaccagggaatcaggctatattggggacaaatagtcctctaccatagttcagagagctctggagataggaagatccttaggatcctctccccaagagggggcactcagcacctgattggggtcacctggccactagggggctttagcaacacactggaagacaaaaggattgagatcaaaagcactttgttttcttgagaacactgtagccctctcatttgataacacattcttatttctccacctaatcaaatcctcccaatacttagaggtgtcaaaatgctcattaaaaatataatgacagtcaaaacccagtgtcagaataagcacag

SEQ ID NO: 663250 - DNA, 584 bp, Homo sapiens
aaaaacttcgctatttaaaattctgttaggggagataaattctgtcaaaattctatatttaattatagatatacaacctaaatacattttcactgtaaactattctagggaaaacagaagacccctcctgattctcccctaccccatcacataccgaacacagagccctgcttctcctagagaagcctagaaactttgtcaatgggctgaataaygcagaatagaccacagaccattttgttttgcttgctgttcccatccgccaacattttcctaaatttacttttcttcgggtcactatgacttgttatataacattagtgatcttagggagatatagctagaattatattctcccacaaatgctcaaaatgtaaggttatcttccagcagctaaacttttgtatttttacaattgccccttcttatcaatagggcttattaaacgtccagtttcttccctcagatccctgtgactaatctcccaatttggaaagaatagacacttaaaagtaactaccagttgattccatgctaattaggaccccggattgttcaatcttctagaatgctgaaaagtcccc

SEQ ID NO: 663251 - DNA, 512 bp, Homo sapiens
aaatccactctggggccacagaagaaagaacagttgtaccaaccaaggcctggcctctggggaccagtacagcccatagcagaaggcaagatgtctgacacaatcctggcaygttccttaaactcatgggagggctggtaaccactggaccagaacagaagctcctggaggcatctgagacttgtgctcagctctttccttccttggcttctcttgctaagaagctcagactggcactgcaaaccatcaatctctggggcgaaatggcaaggtcatcagatatgcatttcttaggatagaaatgcaggaaggtaaaacttcatccaaaacagataacagtttaagagaaagatatgggctccacccccaaattctgggagccctgggcttaggagatgggctggggaaaggattgtgatagagaaaatgggactcccaagtgactgtcttggtccctcaccacagctgaatcccagccttgatgcagagagatggagctaagtgcatgtggc

SEQ ID NO: 663252 - DNA, 591 bp, Homo sapiens
aaaacgatgagttgcacgcagtagaaaaatcagaattataaacagcagtatcaccaactgtaaataaccttgcttacttgaaggtagaaaaaataagtagcatatatactatagagacaaaccacgaggagatagattctgggaattatattattccatctatttatttcctaaatattttatcgcataaataacaaaatgaatggyatctgtctcttttctgtttccagggaaacagtattattaaataagttaaaattgtgagatctgggccaaattatttgggctccatcaaagcatggctctaccactgaaagctaagggaccttgaatatgtcacaaaatgattttttcttgagttttatctataaaacaataatatgaagattaacttccacttaaattaattgtgaaaataaaacaacacttataaggttcttagataaggactttatacatagcaagtgttattattggccattaataattaggaaagaaagaattgcaaaatactgaattttgttgtgaaaataaaacaacacttaaaaggttcttagataaggactttatgcatagtaagtgttattattg

SEQ ID NO: 663253 - DNA, 639 bp, Homo sapiens
ttggtaatgatcctttaatattgggaagggatttttaaaatactctgattaaactggggttcttcctttgattttcatattttaaataaagccacagtcatttatataaaagaaaagcatctgcccctgggcaaatcttttgaggacagaagtgaaagtaaactgaataaggttttcacatcatttctgcatgtgtttgatatgtagatcaatatctrtataaatttgatcttttattttcttggtaacttgtggtcattgagaaagtgtttgaaacttcctcatgacgtgtttatataatggcgtgaaaaattcctttggagaattttatgttcctttcattgttatctaattgcaaatgtacagtatgtatgtgaaaagcattaaaattataacttttgtgcaagataaaaataattcataaatttaccctttataaaatgttaaaatgaacaaaatatatattcctccaccaattactaactctggaaatttggaaacatttcttcactttgattttctcatcggaaagaagggtaataattctgaaaaaaaacacatatcaaacgattaaaatatagtgagagcataatcaaaagtattatttgtaataaagcaggagaaaggaagatactaacc

SEQ ID NO: 663254 - DNA, 523 bp, Homo sapiens
tatagaaggcggatgtggctagacctctctgattgaatccagagaaygaagaaatttgtgccctctctgaatgctcatcacatagccacctcagcagaggatcctaacaatcaggtggataagctgacttttcctgcggatcgctaatcattttctttctgtggctacttctgttcttatcaatgggctcgtaaaaacattgtcataatggttgtaatccagttgtgattgagcttatcaggataaatttctacttatcaaggcttatctgtctagagaaattactgaatgggtaaactgccaactgcagagattaatactgaacccctaatatggcatgattccctgatagggaggagccagctacctggtcacaggttgaatatataggaccattggaccacatctaaaacagaaaaggccgcatgttgttctccagatatatatatttattatggatgcagatttgacttcccttcccacaatgtttctgttaaaactaacatcttacataaaagaaaag

SEQ ID NO: 663255 - DNA, 569 bp, Homo sapiens
tcaaatcttgatctgtgaatattatttttttgagaaaacacacgttattaggttaattaatatcctataataacagcaataacttaagaagaagttgtatttagataataaatgaaagaaactattttgagtttgaaaggttttcttcawatctaaaatctaaaacgtacagtctgttctactgacataaagtttatgactagaaaaagctgaaaaaagctgacctatttccctttaacttacttcagtttcatgatataacaatacatacttatttttactgtgaacagatatagtccccttgtgacatgaaccaaatgctcaacattaaggacaaccttgaagcaagtgcaaatttgaagggtaatagttgaaacttttgagaataaaagcacataatcaaggcaactggcaaggaagatcatgtatgttacatttctttttactgctaaaataaagtaggagaacagaaagatgtaaatgagaactagttcccaaatttagaaacatataagcaatgaaatgtgttggtatttcaggcaattataaacaaataaaaaattgttaaa

SEQ ID NO: 663256 - DNA, 501 bp, Homo sapiens
tcaaataagcacaatcaaagttgaaaaacaagacattacaacttatacaacagaaacaaaaaagatcatcagagactgctatgagcatttctacatgcacaaacaagaaaacctagaggaatttgataaattcctggaaacatccaacctcccaggactgaaccagaaagaaatagaaamcttgagtagacaaataatgagtagtaagatggaaacagtaattaaaaaacaaatctccccccaccccaattaaaaaaaaaaatccctcccccaccccacgcccaggaacagatggattcacagccaatttctatagatgtacaaccaactggtacaaatcctactgaaactgtttcaaaaaaatcaaaaaagaggaaatcctccataccccattctacaaagctcatatcatcttgatattaaagccaggcaatgacacaacaaaaataaaatactacaggctggtatccctgatgaacacaggcacaaaaattctgaaca

SEQ ID NO: 663257 - DNA, 563 bp, Homo sapiens
tgggggcatgatgttacctaacttcaaattatactatagactacagtaaccaaaacagtatggtactggtataaaaatagacacatggatcaatagaacagaataaggaactcagaaatraagccaatatctacaactaactggttatcaataaagtcaatacaaatacaccatggaaatgggaatctatttgataaatggtgctagaataataggatagccacatgcagaagaataaaactggatccatatctctcaccatatttaaaatttaattcaagatagattaaatatttaaatataagacctgaaactataaaaattctagaagaaaacctagaaaaaaaactctgggatttggcctacgaaaataatttatgactaagacctcaaaagcaaatgcaacaaaaacaaaaatagacaaatgggtcttagttaaactaaaaatcttctgcatagcaaaacacacaatcaacagtatcagacaacctacagaatgggagaacatatttggaaactatgcattcaacaaaggactaatttccagcatctaaaagaatgcc

SEQ ID NO: 663258 - DNA, 574 bp, Homo sapiens
tggagctaaataatgtgtgctcatggacatacagagtggaataatagatactgtacacttaaaaatataggaggtttaggaggggcatgagggatgagaaattatctactgagtacaatgtacactattcaggtgatagatacactaaaagaccagacttcaccactttgcaatatatccatgtaacaaaactgcagtgtgcccacaaatctattttttaaattatggtaaagagatgaaacaaagaatcaacacaaaaagacaaaaatatttggagagataacagtagctattccaacacattagttacaattgaaacaagagaaktagccacaacaaacttgaaagatcacaagaatatagccaattagcccacatactacttaagaaatattggaaatgtgatggcatatatcacttgaagggaaggaatgtaaatgggatgtgtatgtgtgtgtgtgtgtttgtgtgtgtgtatatcatatgtatatgatatatatatgtaaatgatatatttagttattaaacataaataaagtttggttaatggtctctatataaaacagtgagatat

SEQ ID NO: 663259 - DNA, 511 bp, Homo sapiens
ggaaggataccattaggagaaatacctaatgtagatggtgggttgatgggtgtagcatatcatcatggcacatgtatacctatgtgacaagcctgtaccctctgcacatgcatcccagaacttaaactgtaataaaaagaaaaatcaaagggatgaaattgttaatgtaattgttctctgtagttagttgaaaacagatttgagtggactattaacaaatgtagtttagtattcacagtcatcttcaaattatctctgcataatcagtattaggaatacagccayttcaaagggtgggaaacaactttcttatctatttctcatcactttcaacctatattttctatgcagttagcatcttttacttattttcctcagttgaaagctacctgtgtgtgtcttttctctagtctggaacgtgatgacttcttcaaatcaccaccccattcctggatctagcacaatctaagtttcttcatgaaactttccatcattacttacactgccttgt

SEQ ID NO: 663260 - DNA, 511 bp, Homo sapiens
ggaaggataccattaggagaaatacctaatgtagatggtgggttgatgggtgtagcatatcatcatggcacatgtatacctatgtgacaagcctgtaccctctgcacatgcatcccagaacttaaactgtaataaaaagaaaaatcaaagggatgaaattgttaatgtaattgttctctgtagttagttgaaaacagatttgagtggactattaacaaatgtagtttagtattcacagtcatcttcaaattatctctgcataatcagtattaggaatacagccatttcaaagggtgggaaacaactttcytatctatttctcatcactttcaacctatattttctatgcagttagcatcttttacttattttcctcagttgaaagctacctgtgtgtgtcttttctctagtctggaacgtgatgacttcttcaaatcaccaccccattcctggatctagcacaatctaagtttcttcatgaaactttccatcattacttacactgccttgt

SEQ ID NO: 663261 - DNA, 577 bp, Homo sapiens
gaatgtctgttaatctgtgtattggtctacaattatgtcataaatctcaatcaactcagtgaattcacagctttaaaaacactaattataatgttaatttttattattaaagagaaatttcatattatttgaaagctgagtttcacattagtatagatttgaagtgacttattctgctatccacactttctggtcatagttttggtaaacttggcttcccttagatgctaaataaacagattgtcagtaattgtctgacatacttacctttcattcctcttgtattcattacctcttatctggaaaggactcaaatcaggagtgtacmgtatttttagatagtatttttacactaaataaatcataaatgtgtgtatgtatatctcctataaatctatatgctatcactttgttgatttatatttaaatatctttctttgtttgccataatttaaaaaagaataaatattaaatataaaaatatgtaaatatgatacaaaaatacataaacatatatttaaaatattagacaaaggtaaatataaaacataatgctaccatccagaggtaatattgt

SEQ ID NO: 663262 - DNA, 539 bp, Homo sapiens
ccaatgttttcttctggtagtttcatagattcagatcttacatttaagtcttcaatgcattttgagttgatttttgtatacagtgagagattattgctaaattataaaaatcagtgagttaattccatcttgttccatcatttgaaacaatttgcataatattgatgattcatttcctgaaaatttgatagaattttcctaaaaactgacgtgtggttcatgtgtgaaaataattacaggtctattttctttttgttatacttcttgtgtcagtatagataattgtattttgtgaaagttgycttgaattaaaatttctactttaagaacatataatttatttatagtattaattcgtgacattttaaatttcatatacatataaaatttgtaacgttcctcatacttattgatcagtcataccagaggagtattttttggttgaattacatttacaaagaaaacgttttcttgtcactaatatctttgactttttacctttattaaattcaaaatttacatataatagtcaccttaca

SEQ ID NO: 663263 - DNA, 539 bp, Homo sapiens
ccaatgttttcttctggtagtttcatagattcagatcttacatttaagtcttcaatgcattttgagttgatttttgtatacagtgagagattattgctaaattataaaaatcagtgagttaattccatcttgttccatcatttgaaacaatttgcataatattgatgattcatttcctgaaaatttgatagaattttcctaaaaactgacgtgtggttcatgtgtgaaaataattacaggtctattttctttttgttatacttcttgtgtcagtatagataattgtattttgtgaaagttgtcttgaattaaaatttctactttaagaacatataatttatttatagtattaattcgtgacattttaaatttcatatacatataaaatttgtaacgttcctcatacttattgatcagtcataccagaggagtattttttggttsaattacatttacaaagaaaacgttttcttgtcactaatatctttgactttttacctttattaaattcaaaatttacatataatagtcaccttaca

SEQ ID NO: 663264 - DNA, 623 bp, Homo sapiens
aaaaactgagacttagacacaggtaagctggtccagagtctacttttttttaacaactagcattctgccctagcattgaatttaattgatttgaattggaacaatttttgggtcagcagctagtgctttactgagaaaaaggcaaagataaataacacacagcttctgccctgaagcagctttcaatctcatagccattcataaatattgaacacttagaaatgcattcacagatctttggtatgcaaaaatatcttttttgtatgatttgctatttaacacctctacatgtttttatctctcttctttgaatyacttagcactaagttggctgggttgcttattttggcacccagtcacctattttcttatcccattaattgcattcagagtcactcactcaggcaactttattgaatgcctgtattgcttaagaaactgtggtgacactatttttgccttttctcaacgaaaagtcttcaacctggggccctggggtacataaagactttctatcaggttggcatgcaccagtagtttcaatggaattgattcctagattctcgttctcatatatgccttttttaaaaaaatgatctgaaaacaaatctaaattcacataa

SEQ ID NO: 663265 - DNA, 623 bp, Homo sapiens
aaaaactgagacttagacacaggtaagctggtccagagtctacttttttttaacaactagcattctgccctagcattgaatttaattgatttgaattggaacaatttttgggtcagcagctagtgctttactgagaaaaaggcaaagataaataacacacagcttctgccctgaagcagctttcaatctcatagccattcataaatattgaacacttagaaatgcattcacagatctttggtatgcaaaaatatcttttttgtatgatttgctatttaacacctctacatgtttttatctctcttctttgaattacttagcactaagttggctgggttgcttattttggcacccagtcacctattttcttatcccattaattgcattcagagtcactcactcaggcaactttattgaatgcctgtattgcttaagaaactgtggtgacactatttttgccttttctcaacgaaaagtcttcaacctggggccctggggtacataaagactttctatcaggttggcatgcaccagtagtttcaatggaattgattcctasattctcgttctcatatatgccttttttaaaaaaatgatctgaaaacaaatctaaattcacataa

SEQ ID NO: 663266 - DNA, 549 bp, Homo sapiens
gaatggttcaaaacttctattccaaaattttaagtaaaatatatctacaaagcaggtaaaaacccactgttttaaagcatgaaacarcttacagagacccccactgactcctttaatggttaggaaaaaaaaaaaaggggaaataaattggccacagtttgagtgttactgtgtctaatttatttattcatttatttactttttttttcttctcttttgagacagagtctctctctgtcacccaggctggagtgcagtggtgggatgtcagttcactgccacctccacctcccaggctcaagcgattttcccacctcagcctcctgagtagctgggactacagattcctaccatgcccccagctaatttttttgtgtttttactagtgacagggtttcaccacgttggcctgactggtctctaactcctgacctcaagtgatctgcccatcttgggcccccagagtgctgggattacagtgtgagcccccgtgcccagccactgtgtctactttaaattgctgtatttaatctttttatgtatttatat

SEQ ID NO: 663267 - DNA, 584 bp, Homo sapiens
ctttggaatacaaagaaacttaaagaatctaacttccagaggtggcagtccttgataaaaggggggaaatggcggggggtggtgactcaagcctgtaatcccagcactttgggaagccagggtcggggggacagatyacgtggtcaggagttcgagaccatcctggccaatacggtgaaaccccgtctctactaaaaatacaaaaattagccggctgtggtggcgtgcaactgtagtcccagttactggggaggctgaggcaggagaatggcgtaaacccgggaggtggagattgcagtaagcagagatcgcgccattacactccagcctgggtgacagaacgagaatccatctcaaaaaaaaaaaaaaaaaaaagaggaaatacatagctgttgctctacttcccccaccaacaaaaaagaaactaggacatcgtatctatctgacataacttgggataaaacgaatcctgcctatattttaccaaacttctaagaatgcatttgtggttcaacataacaaaatagaatccacaagagccccaatagcagcagtgagaaaatattaacacctatgtcattctc

SEQ ID NO: 663268 - DNA, 400 bp, Homo sapiens
tcctacaagttcacaaactgatccttgacatatttattatattaacacataaccacttttaaaaawtcaatgtaaatggaaagtcagaatggctttcatgcttttctggaattaataatttaaaaattcataaatataaaacatactatctatgtttttaatctagttaagtaaagccatttcaagcacgatctgtctatttctccaaatagttaaatgtaagcaacacagacaggtttttgttaaatatttgagtggaactgtaactcggcaaatagtgatgcatttagataatatttacgtatctctttattatatgttatttgaagcaaattctgttcaaagaagagtctattacacacaaactgaaaaatgattttccattactacatccatcttt

SEQ ID NO: 663269 - DNA, 466 bp, Homo sapiens
agccatttcaagcacgatctgtctatttctccaaatagttaaatgtaagcaacacagacaggtttttgttaaatatttgagtggaactgtaactcggcaaatagtgatgcatttagataatatttacgtatctctttattatatgttatttgaagcaaattctgttcaaagaagagtctattacacacaaastgaaaaatgattttccattactacatccatctttctgtcacggctattacataacatatgctcaagagtatcagtacttatttgggaaccaggatggaatataaaagcaaatttagatttttacaaccaactgagactaaagcctattctctgcagaaaccaatatggtagcaatttatatgttgagttaaaggaaagctattgggctcctccatagctactttgccatcattcagtagaatgctattaattcaattactgcccctttgtctca

SEQ ID NO: 663270 - DNA, 466 bp, Homo sapiens
agccatttcaagcacgatctgtctatttctccaaatagttaaatgtaagcaacacagacaggtttttgttaaatatttgagtggaactgtaactcggcaaatagtgatgcatttagataatatttacgtatctctttattatatgttatttgaagcaaattctgttcaaagaagagtctattacacacaaactgaaaaatgattttccatyactacatccatctttctgtcacggctattacataacatatgctcaagagtatcagtacttatttgggaaccaggatggaatataaaagcaaatttagatttttacaaccaactgagactaaagcctattctctgcagaaaccaatatggtagcaatttatatgttgagttaaaggaaagctattgggctcctccatagctactttgccatcattcagtagaatgctattaattcaattactgcccctttgtctca

SEQ ID NO: 663271 - DNA, 515 bp, Homo sapiens
tgatggtaaatcatctttcatttcctccaaacaatacattccgttctagccttaatgtccagcttyaaattccattaatgttagaccattctgtgaacaaattttcagggtcttcctcatgaaaatcactggagatatttgggattgaaaagggggggtgaagaaataactaatgggcttccttaagttgcttatgaaatatttaaagatacataaagacatagaatacaaatagctagaaaattagtgtctatgataactaagagagaaatagataatgtaatctgggactttaggggatggggcaataatactatagcatatgaatgccactggaaaataaggaatataactcaatcagataaataacaaatgtttttaagcatcctcaatagccccagaagtttgctagcaactgtgatagaaaactaaacaaaacaaaaatatagtgcctgcactccataagtttttttagtgacctagtaaaaaaatcgattcattttgtaaaatttaaa

SEQ ID NO: 663272 - DNA, 481 bp, Homo sapiens
catccccacttcaagttgttctgcctttccagttcgaaccactgtacatcttatgtatactggttgatgtctcatgtctccctaaaatgtataaaaccaagttgtgccccgaccaccttgggcacatgtcatcagggcctcctgaagctgtgtcatgggcatgcccttaaccttggcaaaataaacttcctaaattgattaaggcttgtctcagatactctttggtttacaaacctataacaaaagacagattaaaaagagaaaggcatataaatttatttaatatgagttttatgtggcactcaaacttttgaaaatgaagacctaaagaaacagggaaacgtatgtattttaatgctaagtttgatgaagtggagagttgtggagaagtatgattagacaaagggtgtatgatgtagaggtaataaactgggggtaacttascgagaactgtttgttcagattcttctgtgttcctgtg

SEQ ID NO: 663273 - DNA, 579 bp, Homo sapiens
ttaaaagattatgattcactgactctgaggtagagcccaggagtctacatattaagacactttcgggccgggtgtggtggttcatgcctgtaatcctggcactttgggaggccgaggcaggcggatcacctgaggtcaggagttcgagaccagcctggccaacgtggtgaaacccctgtctctactaaaaatacaaaaattagctgggcttggtggcacacacctgtaatctcagctactcgggagacaggagaatcgcttgaacctgggaggtrgaggttgcagtgagcccagattgtgccactgtactccagcctgggtgacagagtcacactccgtctcaaaaaaaaaagacactttccttgtgatagtgattggctctgaggccatactttgagaaatagtaccttagagagactagtaataccggtacacagtaccctgactggctgatttttaatacgttttcagaagaccagtttgaaggtgacactatttatggtcatccatttttcttgatattttacagtgattttagaatttgaataactcattagaattatataggaattatacaac

SEQ ID NO: 663274 - DNA, 568 bp, Homo sapiens
tcacaaatcatttgaggttstgaccagctgccagtaacattattagagctgacttgtttggttaactttgctgaacaactcaatctgtgctcacacatatggaagtataggctgtagtaactgctcttgcagtaaaatagtgttgggtgtattttagaatttagcatttattgtctttacttattctaaataaattacttgctatgtcattagctaggatatggcacatgaggtgttttagcaattgttagctatggtttacccaactattagagataaaattaactatttcattgtttaccaggtctgagtttgattttttaagaatattagattttagcagtactcataaaaaatgggcaacttttaaaaagaaatgtggacattttatttacattttttttaccatacatgtattacttttgtgattaaagatttacatttgtttttatgttagagcaattgtgtagataatgctgcaaataatcacatagtatgtacttcccctaaaggggtaactatttcttggtccaaataatttttatcacttaccttagattagactcag

SEQ ID NO: 663275 - DNA, 632 bp, Homo sapiens
ggttatcattaggaaaaagtaaaagaagaaggcatcaacagggcttcttaaacgaaaataattatagttacatagttgaatttaatagaataatttccttaacatgatataccagaataaataaagcattgctatttgaaaaaaagagccacagaattagaccgaagyttgcaagatgcaatactctattaatttagctgtagtttttcagttgtagacttctatgatgcttgcaccacagttctttgtgaatgggggatgtggactggattcaggtgaaagaaacaagctgtggcaaaccctgtgtacaactgcagcacacacaaatcaaaaagcaatctttatatgtgatggttatttagagtttgcaatgttctcatcagtaattcctatcttcatgcagaaacgactgacattgatgttatcatagacaaagaaaaaggaaatttatttccttcttagttctcactttttccctccactctttcatcttaagcccatcaccataacatcactggaagactgagggaaggccagagaattatttttgttaaattaatataatcacgctttgcttttgagtaatatgtgtacattttttacttgtccgtctacatgcaaacttcatatat

SEQ ID NO: 663276 - DNA, 575 bp, Homo sapiens
ggagatgaccagccttgcaccaagaaggaccagactgcagctgtatcttgaggggagaggcaacccagtcacctaaagacacccctttgaaccaagagagtttcctgattgaatggagctacagaatgatgctttcctgctgggctgtctggtgcttccttcagttcacttccactgatctccgaaggtacaggacaagctgtggggaagcacccaggtgcatgattctggctttcaaaaaagttggaacaaatctaattgcctctcagcacaatttaaattctaagcctgcagggtaggctcctatccatcttttttgtttggcacattgggagtattccactaggaatgcaataggaagcactttattccacacacaggtgtcttggtagatgtaggggaaacattaacatttctgtaggactagttaaaacttgctttccgaaatgaaattccacagcagcttagtctccyttatgaacaaaccaaccacatgactgccagaaatcaatgcacattgattctatccaaatgttttcagtgagtcagcgctagaattcttgccagtaggtttg

SEQ ID NO: 663277 - DNA, 597 bp, Homo sapiens
acctttgtgtatttatatatgtaaatgtgtttatgtgtacatgtgcatgcatgtgtgcacgtgtgcaaatgaaatcttagagaatgcctattgcctgtgagttttgttgaattatttatttatataaatttctgtaatactaagtaggaacctagatctaaaaacacaataaattctcaacgtcaagtacagcatggtaactgtattagggcactttgggttgtaagtaacagaaatccatccagaaaactagcataagcaaaaaaaggaatttattggctcacagaaaccttcatacattattgacttcagaaactcagttcaggtctcatcaggcttgtctctgttttttgttgttgttgttgttgttgttgttgttttacctctgcctcttgttttcctttactgtcttaatatttttggctttattcttcttmttctccctcttgctgccatggcagtttcttgatacatctttttctggttctgtatcccttcccctggtccctgtcctgtcctgtcttgtccctagcttcaaataaagagttgcagtcaggagctttgagaagtccggtttgggtcacatgcccattagac

SEQ ID NO: 663278 - DNA, 597 bp, Homo sapiens
acctttgtgtatttatatatgtaaatgtgtttatgtgtacatgtgcatgcatgtgtgcacgtgtgcaaatgaaatcttagagaatgcctattgcctgtgagttttgttgaattatttatttatataaatttctgtaatactaagtaggaacctagatctaaaaacacaataaattctcaacgtcaagtacagcatggtaactgtattagggcactttgggttgtaagtaacagaaatccatccagaaaactagcataagcaaaaaaaggaatttattggctcacagaaaccttcatacattattgacttcagaaactcagttcaggtctcatcaggcttgtctctgttttttgttgttgttgttgttgttgttgttgttttacctctgcctcttgttttcctttactgtcttaatatttttggctttattcttcttcttctccctcttgctgccatggcagttycttgatacatctttttctggttctgtatcccttcccctggtccctgtcctgtcctgtcttgtccctagcttcaaataaagagttgcagtcaggagctttgagaagtccggtttgggtcacatgcccattagac

SEQ ID NO: 663279 - DNA, 347 bp, Homo sapiens
tacatgcatgatatcataattttatctcttttttacagctgaggaaactggaaactgaagcttggaagtgtttattaactttcacatggtcatagagctagtaaaatggctgaggcacaaagtcaagaaaacagaaccgactaatataaagtaaaggtcaaaggagtgcaaataaaattcctaattgcaggttgcctttatgattagacacgccctttcaaagctaatttaaccctaaaggaatgtcttacacaaaaatgtaaaacaaatggctcaaayagtttatcaaaaataagaaaaaggttcttaatgcaacttttatttttcttttgacatttctttgcatg

SEQ ID NO: 663280 - DNA, 591 bp, Homo sapiens
tattggctgacattttggctcacagataagaaggttatttaatggtgtgaatcgaagagtagattcycattcaaaaggataacattattaataattttattgcatgccatacatctcaatcattgcaggggacaaaaagacacagatatttcattagatgttaggaaggaatttattaaattaattgccatgtacattttacatttagtaaaatgtcgaatagcaagtaaatcttttcaaaagagtaaaatataactctcaaggacaaaacctaacatcagtactcactatctccaatttgtctcttcccattcttttttgaacctactccaataaatatttcacctcactattctgcaagagctggtgctgtcaagggtccattgatttattcccaatcctcatcttatttgactcataagtgacgtttgacagagttgatccctccttcctatagaaacacccccctttttccatcttctagaacaacactctcttctggctttcttcctaccctcaggagctgtccctctttgctctacagtggtggctccccttcctctacctgcaccctgtagtgtccctggattg

SEQ ID NO: 663281 - DNA, 591 bp, Homo sapiens
tattggctgacattttggctcacagataagaaggttatttaatggtgtgaatcgaagagtagattcccattcaaaaggataacattattaataattttattgcatgccatacatctcaatcattgcaggggacaaaaagacacagatrtttcattagatgttaggaaggaatttattaaattaattgccatgtacattttacatttagtaaaatgtcgaatagcaagtaaatcttttcaaaagagtaaaatataactctcaaggacaaaacctaacatcagtactcactatctccaatttgtctcttcccattcttttttgaacctactccaataaatatttcacctcactattctgcaagagctggtgctgtcaagggtccattgatttattcccaatcctcatcttatttgactcataagtgacgtttgacagagttgatccctccttcctatagaaacacccccctttttccatcttctagaacaacactctcttctggctttcttcctaccctcaggagctgtccctctttgctctacagtggtggctccccttcctctacctgcaccctgtagtgtccctggattg

SEQ ID NO: 663282 - DNA, 555 bp, Homo sapiens
tgatttattttagattttttctcttctaatataggcaytcaatcctataaatttccctctaagcactgctttttgcgtatcccacaaattttggtaagttgtattttcatttagttcaaaatagtttttaatttctcttgagctttcttctttagatcatgtgttatttagaagtatgttattcaatctccaagcatttgcggattttctcttttgttataatgtctagctctattgtattgtgatctgacagcagacaatgtacaatttttattttttaaaatttgttaagatggttttatggcccagaatgtggtctgtcttggtgaatgctccatgtgagtttgagaagaatgtgtaatctggtgtttttggataaacaagtctgtagatgtcaactatatccagttgattgatagtgccatttaattcatctaggtcattactaattttatgcctgctggatctgctcatttctgatagagggctgctaaaatcttcaactgtaatagtagactcatctatttctctttgcaattctgtcaggttttgcct

SEQ ID NO: 663283 - DNA, 546 bp, Homo sapiens
gtttacaaggactgaaactctctaaacctcaatttcctcatatgagaaatggagataatattagctacttcaatagattgttgtgttaaataaaataatatatacaaagcccctggcatgtaacaagtgcttagtaaatgaaaactcttgttacatctctaaagcacaggatgagtatataataaacatgtaatgaatacrgtagtattttaaaatctacaagaaaaagatgtttgaaaaaaatagatttgtggggtcctggcatccaggcctaggctcttggacagcatttctacacttgccgtgggtcagaggggaacccactgtcctgaaaggtaagtcccaggcctggcagcattcaccacaagctgatggaagagcccttgggctttaagtgaacatagacggtggcctggtagaacccttgtgaaccagtagtgctaattgccacaaagagaggctcctctgcctgtggaaaggggaggaaagaataggaaggactttgtatcacagtttgagtgccaatttagctgcaggaaaataaaa

SEQ ID NO: 663284 - DNA, 555 bp, Homo sapiens
ctatcccctacttgtacttacaggtttatctaatacatcatttcttctaaaaatcrcccttaatttttccaaattctctgtggcttggagctattgcagtaagtctaaattaattctacttgtaagtatctgtgctaatgggtaatttatccaaattggagagctgttagcacattcatgatgccatcatcatggatttaagggcctagataccttcacaggaagaaaaatacaaagaatcacaaccacagtggccttgaatttaaatggaagccttctgaatttgactttgatcatgtgatgaatcaggtacaagaatatatactaattgtcatggccatgctctatttctggatatgtatatataagggaaattgctgtcaggtggtacaaataaacaaatagcgtaacctggctgtaaattatgataaaaatgatagtattagttgatttccgccaactgaatggcacatattttgagctctttcttttcctctcattgagcacaatgttttctattttgctgcccttgaaactttgtaagacagaatgtat

SEQ ID NO: 663285 - DNA, 570 bp, Homo sapiens
ctttgggagactgaagtgggaagactgcttgagcccaggggttcaagaccagcctgagcaacacagtaagacctcgtctcttaaaaaaaaaaattatgcgatttctatagcccaggatattaactatttggaaaatgtcctatgtgttcctcaaaaatgcatattatatagttgttggaagtgatgttctacatatgacaacacttataaaatgtcacatgttttatatacagatgtaattgtttattcattttcaaatctttgatagytatactaatattttgtgtacttttcctgtcaaaatattagatggggatttatatcttcaactatgaggatatatttattctctgtttatttctgtcaacttcagttttatatacatatctgaaactataagtagcacctaaatttaggattatatgtccctctattgaattgatctttttgtcattatgaaatgtcctccattttgtctactaacatttattgtcttaaaatctatctatatatcaatacatcttatctctttctttgttttcgaattttgtctttatatttaaagtatgt

SEQ ID NO: 663286 - DNA, 565 bp, Homo sapiens
cttctaggtctgaattgtccaagtgaagaacgctaatttactccacatcccacagataactatctctcaagtgatcccagtatgaaagtctggagtatgagtataatatactcactgtaatatctgagtacaggaagttcacttcagagtcttcattctctcaaataagacagacacttttgataaagattattttatttaattgatcttacagtctttctagctgttttccttttccattctaccaaaacattctacaacattcattttagtgggagtgcacttgcacartatttatgaacgtctataattaacttcttgtaaagcaaaaaaagtaccaccaactagatatgccattgactgacatcattccatatctccttccaatccttcttgatgtccattcagatcaatagtatgtgtgatcagagtgttgaggagctttttgatgtgaggctgtgacatcttgtccacatctttttcactagggagtcagaaaatctaataaagtttacaaagcatttttctcttcctcagtaaaggtatctacaaagttgcagggaaa

SEQ ID NO: 663287 - DNA, 565 bp, Homo sapiens
cttctaggtctgaattgtccaagtgaagaacgctaatttactccacatcccacagataactatctctcaagtgatcccagtatgaaagtctggagtatgagtataatatactcactgtaatatctgagtacaggaagttcacttcagagtcttcattctctcaaataagacagacacttttgataaagattattttatttaattgatcttacagtctttctagctgttttccttttccattctaccaaaacattctacaacattcattttagtgggagtgcacttgcacagtatttatgaacgtctataattaacttcttgtaaagcaaaaaaagtaccaycaactagatatgccattgactgacatcattccatatctccttccaatccttcttgatgtccattcagatcaatagtatgtgtgatcagagtgttgaggagctttttgatgtgaggctgtgacatcttgtccacatctttttcactagggagtcagaaaatctaataaagtttacaaagcatttttctcttcctcagtaaaggtatctacaaagttgcagggaaa

SEQ ID NO: 663288 - DNA, 552 bp, Homo sapiens
ttccttcctcctctgccacccctgagacagcaagaccaaccccycttcctcctcagcctactcaacatgaagacgaggctgaagacccttatgatgatccacttccacttaatgaacagtaaatgtattttctcttccttatgattttcttttctttagcttactttgttgtaagaccacagtatataatacatgtaacatacaaaatatctgttaatcaactgtttatgttactggtaagcctcccatcaacagtagtctattagtagttaagttttggagagtcaaagttatacaagatttactatttttttttttttttgagacagagtctcactgtcgcccaggctggagtgcagtggcgtgatcttggctcactgcaagctctgcctcctgggttcacgccattctcctccctcagcctcccgtatacacagattttcaactacattgggggtcagcagtcctatccacaatgttattcaagggtcaattgtaactgttaacctagaatcgtgcactcgtacaaaaaatatcttaataaagatattt

SEQ ID NO: 663289 - DNA, 552 bp, Homo sapiens
ttccttcctcctctgccacccctgagacagcaagaccaaccccccttcctcctcagcctactcaacatgaagacgaggctgaagacccttatgatgatccacttccacttaatgaacagtaaatgtattttctcttccttatgattttcttttctttagcttactttgttgtaagaccacagtatataatacatgtaacatacaaaatatctgttaatcaactgtttatgttactggtaagcctcccatcaacagtagtctattagtagttaagttttggagagtcaaagttatacaagatttactatttttttttttttttgagacagagtctcactgtcgcccaggctggagtgcagtggygtgatcttggctcactgcaagctctgcctcctgggttcacgccattctcctccctcagcctcccgtatacacagattttcaactacattgggggtcagcagtcctatccacaatgttattcaagggtcaattgtaactgttaacctagaatcgtgcactcgtacaaaaaatatcttaataaagatattt

SEQ ID NO: 663290 - DNA, 552 bp, Homo sapiens
ttccttcctcctctgccacccctgagacagcaagaccaaccccccttcctcctcagcctactcaacatgaagacgaggctgaagacccttatgatgatccacttccacttaatgaacagtaaatgtattttctcttccttatgattttcttttctttagcttactttgttgtaagaccacagtatataatacatgtaacatacaaaatatctgttaatcaactgtttatgttactggtaagcctcccatcaacagtagtctattagtagttaagttttggagagtcaaagttatacaagatttactatttttttttttttttgagacagagtctcactgtcgcccaggctggagtgcagtggcgygatcttggctcactgcaagctctgcctcctgggttcacgccattctcctccctcagcctcccgtatacacagattttcaactacattgggggtcagcagtcctatccacaatgttattcaagggtcaattgtaactgttaacctagaatcgtgcactcgtacaaaaaatatcttaataaagatattt

SEQ ID NO: 663291 - DNA, 552 bp, Homo sapiens
ttccttcctcctctgccacccctgagacagcaagaccaaccccccttcctcctcagcctactcaacatgaagacgaggctgaagacccttatgatgatccacttccacttaatgaacagtaaatgtattttctcttccttatgattttcttttctttagcttactttgttgtaagaccacagtatataatacatgtaacatacaaaatatctgttaatcaactgtttatgttactggtaagcctcccatcaacagtagtctattagtagttaagttttggagagtcaaagttatacaagatttactatttttttttttttttgagacagagtctcactgtcgcccaggctggagtgcagtggcgtgatcttggctcactgcaagctctgcctcctgggttcacgccattctcctccctcagcctcccgtatacacagattttcaactacattgggggtcagcagtcctatccrcaatgttattcaagggtcaattgtaactgttaacctagaatcgtgcactcgtacaaaaaatatcttaataaagatattt

SEQ ID NO: 663292 - DNA, 579 bp, Homo sapiens
tgggcttaatacctaagtgatgggatgatctgtgcagcaaaccagcatggcacatgtttacctatgtaacaaacctgcacatcctgcacatgtaccccagaacttaaaagtttgaaactaaaaataataaaatgttggtgatcagttaaaaaatgtaaaaccaaaaaacaaaacaaaagaaagcaccaacaataaaccaactctcccttcccccttcactctctccaggaatagatggcttccatggtcagttctaccaatcaatataggaagaaatatttcaatctttcacaaatacttccagaccattaaaagagagaaagaatatataagaaacactacactctgcctcagactatgaagccaaactttgatagcaaaatcycataagaacagtaaaagaacaatgataggccaatttctcccataaatataaatgaaaaaaaactacataaattattaataagccaaatccaaaaacataaggctacttcattatgaccaagttggatcaaggatatcccagaaatgctagtctttctgctttaattataaaatacaacaatacgaagagatgaa

SEQ ID NO: 663293 - DNA, 477 bp, Homo sapiens
tgcaaacaaattcttcgagagggtagcaaataaagtttatgtttgggatgccatgtgcctagcattttcccatgttttcttaaaatgttaaataatcttttctgctaataatggcactaggttaagtccccataaacgagtcaacctcactcccaggaaattaaacaaatgaacatcagacgaaactgctaagtgtggtttggatttttccaaagggaacttctcaactttctctggcaattaaaaaaaaatttgttaatgagtcatagctagagcaaaattgtccaaaatgtaaggtagtgcatagtcgttacgttaaaaatcggtgcctctcattctctgttttggatgaactatgttgccttagaatactcaaagaagaaaattattcaggtagaatgctattttctaaataagatcctgccattatctctctctttctttaaacggtagtaayctaagccagcaaactagcac

SEQ ID NO: 663294 - DNA, 575 bp, Homo sapiens
aaaccagatatgaaggggaaaaaagaggtgcctggggaccagggcttttctcaaagtgaaaagcaggtttttacaatccccagccctagtacccacgtcccttggcaatacactgccatttctcctaggcgcctaacccaacaagacacgaagggtagtcagctggaaaatggaatttgtccatacatggggagacaagcctgggaagtggattgccatggggtcagctgtgaagccgatggtggaggagcagaagccatcgccagaggaccctggtgggagccactccctgggatgccgcactccgcttgaggctgaggaccacaggaagccgaatgtgatgtgraatcattagagccccttaagtactttaatcaggaagggcaggtgaccttagggtgacacagcgagagcctccgtctggggacacaggaccacacttcgcatctcgctcccacctcccatggttgctgcctgggaaaatctcttgacaaaatcaaattgcagagtctttcatgattgggaatcatgatgatgacctcactcatggggtaaatgagcaggtgtgtggatgt

SEQ ID NO: 663295 - DNA, 636 bp, Homo sapiens
agcctgagaccgtggctgaaccactgaggaaagggccctctctttctcctggcattgctaaactggaaaagcaccaacctggacttgttaatggtcatctctgccaccatttagaggcagccatcctgagaattaagccaacacagctggagagcagagcatgagttgagaaacacataatcccagctataccagttaagctcttggattcagccacgcctgacattagcagcacctatggacttttccatgccatgagccaataaatgagttggttggggttggrtttcttctacactgaagtcatgactaagagaggagttgttagagctatctcttgtgtacaagaggctctcaggacagaaaggaagctggaaagggaaatcagtagagactggaaccggcagcattgtctgaccctctatgcttgaagggccacctatggaagagaggagcagttaactttgccattgctcagactgaccaagggggcgtcacctccatctctgctttccagaagcaaaccaaacactctagtcaggggaacagtggcttgtttgctactgatcattggcaagaagcagcccctcattgctgagcttgagcagaaaatggttactccctcaccagtcagtg

SEQ ID NO: 663296 - DNA, 608 bp, Homo sapiens
ccatattggaaataaattgtatagtggtgatggttacacagtcttataaatgtaccaaagcctgcgggttcatccactcactcaatggtgagtgtttggtatatgaattatatgtagattttatgaaaacgagtccaacaggcctttataaaaatctgtgtgattgaaaaaatacaaatctattagcttaaccatatgtccctgagttgattcccttgtcccctgtgaaaccattttattgttatattatgactcaccattttttatttttatgtctctctagcttatggtgaaagacacgaggagttaattaacttaggaagcccagactcccacactattagtgagggacaaaaatcttcagtaacttccaaaacaacaaggaaaggcaaagaaaagtcttctgagaaagaaaagacagccaaagaaaaacaagcacctcgctttgagcctcaggtgggtgtggaattttttttatttgagtgacttaatgattttaggttcagtggattcctatttgcctatctcgtctgaggacaaaacygtgaaacattctttctccctgattccagaaaccatctagatactttgaggacattccttggaca

SEQ ID NO: 663297 - DNA, 597 bp, Homo sapiens
agtatgtaaatttttattgcattattatttcaaattataagtaaaatacctagcatcatatcaggttatgctagtctgtgctagttgcatgttgattacctcttactcttccttcctttttcctgtgctagactttttcacttttcctctatcatgataagcactcattaatggttatttaaatatatcttgggtatagttatattgccctcaaaaaaagtagactctgaaaaaacagaaagcaccaaaagggcagagtgttgtagaaatgccaggaaaggcaataactggcagctctgcgaggttgtcctgttctccaaggggcatcccatagtgtgacatattagatattttgtagaattaagaggaagaaattagtagcttggagaaaacratgcccagaatattaatttcttaataaatatggttatagaacagacatttatttcagagtgctgatttagtaatgaaaaaccatgattttcttttcttagaacatttgcccccaaggtaataggttttaatgcctgtggaaatgatgagcatttatttggaagttgacccaggggtctgaattttgggcacagctgataatat

SEQ ID NO: 663298 - DNA, 616 bp, Homo sapiens
atgtcttgacttttattgcataacgataccttattttctcattctctgatgctttattatatattggtaaactgtamatatataattaatgtgaaaaccacagtagttctttattttcctatcaataaaataatttatgacttatgtatttatgcattctagcgcgataaaagcaaattaacttttctgatgtgtatatcaattccaaataaactgatatattctgttttatttcttagattgcacttgaagtgttttctctttaacaaaacagatacaagatttaattaaatatagtcaacttctcatatttgaaagcttctcctctattttgtgtcattcaacagaatactgctgaatgggcctgtgtatatgctaatatgttaatgttacatataattattagattattttattttgaagactattatttaaaatgtctggttttgttaatatttaacctaaaatttatataaagggctcatggaatggcaaatttaaagtgccaataatttgtattttcttgatttattgaacatttattaagtgacttatgttgacaacacccactacatccatatacaacattcataccatatcaccgcgtctttgtgaa

SEQ ID NO: 663299 - DNA, 529 bp, Homo sapiens
agttttatctataagctaaaatttagttaataaaaagaggggtttaaatcaaaatacattaatctkaccataactagaaatatttatttatagtagagaagaaatgatgactgttatttgtctggtgtgtgagcagaagaagaaattaaagataacattttgcagaagaaagggagtgggaagcttttcctctttatttggtacaaatttcagtgtggttcccctacttatcagatctacttattagaatgccactcatttttaaaacaattagcggttattttaattgataggataacagtattttcaaatcctttatagatgattatacttttctcgtcttgaccatttttatcttttttctttatatttttatttcaagaattcagggggtacttgtgcaggtttatgacactgatatattgcatagtggtggggtttgagcttctagtgtatcattcactcaaatagtgaatattgtacccaacaggcaatttttcaaccctcatccccttctcaccttctgccc

SEQ ID NO: 663300 - DNA, 282 bp, Homo sapiens
gtagtttgatgcatttgttttggctttaaggtattactacctaaacttctatgcctaagtagtagtatcaggcccatcctcaatttgaattttgattattacatctttagctaaataaccygctgttatttttatacattaagatatgaatactttttgaaggaggattgtaaataatcactaaaatttacacttacatgtctaaaatgaaatgtccagcacaactgctagactgtgagatatttgagaacaagagccatatcttatccttatacctccaag

SEQ ID NO: 663301 - DNA, 642 bp, Homo sapiens
aaccaataaatgttatacataatatcaagagaataaaggacaaaatccatattatcatttcaattaattctgagtaggcatttgatgaaattcaacatttttcatgattaaaataacctcaaagaactgggtatagaggaagcataactcaacataatgaaagccacatatgacagaaccacaagtagtatcatattgagtggggaaacactgaaagccttttctctaaaacctgaaaygtgacaagaatgcccactgtcaccagtattatttgacatgtattaaaggtcccagttaaagcaatcagacaaaagatagaaatacagggcatccaaattaaaaataaataagtcaaattatccttgtttacagataatataatcttatatttgaaaaaattgaaagggacacaaaaaatcaaaagatattccatattcattgattggaagtatcattattgtcaaaatgtctatacaatctaaagcaatctacagattcaatgcaattcctatcaaaataccatggcattcttcacagaaatagaaaaaataaactatgctaaaatgtatatggagacacaaaagactcagaatagtcaaagctctcttaagcaaaaataacaaaactggaggattcacatta

SEQ ID NO: 663302 - DNA, 590 bp, Homo sapiens
tactcttgttagcaattcctctaaccttttatcaaggttcttagcttccttgcatttggttagaacttgctcctttagctcagaggagtttattacccatcttctaaataaagcctacttctgtcaatttgtcaaactcattctccaaccagttttgtcccttgctggcgaggagctgtgatcctttgcaggagaagaggcattctgggttttggcattttcagcctttttgcactggtttttcctcatcttccttkgatttatttacctttggtctttgctgttggtgacctttggatgaagtttttgcttggtcattttttttaaagttgattctattgctttctgtttgttagtttcccttctaacattcaggcccctcttctgcaggtgtgctggagtttgctgggggtccactctagatcctgtttgcctgagtatcaccagcggacactgtagaacagcaaagattgctgcctgctccttcctctggaagcttcgtcccagaggggcacctgcaagatgccaaccagagctctcctgtatgagttgtctgttgacccctgctgggaggtgtctccctttcagga

SEQ ID NO: 663303 - DNA, 600 bp, Homo sapiens
ggctttaaatttctacacaagaaacattctgcaattttgatcaggaatctattgaaagttagaccactttgagtgacaattggcacagtattgagtattttaactggtaaagacacatatgccatcatttaattaagccttctttctttcaatagtgttttgtaawttttagtttggagaccttacatcctgtattagataaatatatttttaaatcccacaagatattactattattgatttagacttccatattcattggatttatcaatagttttactccttttgttttttatatttctttttgtaagcctttacttctgtctttctgaagaatttccttaggttttcctttaagatgcatctgctcagtttatgagtatttatttacttaacctttatttatgaggaatattttccggttaatataattctagattgatacactttaaaaaaggtcatttcactgtcctgtgctttccattataactgttgagaataagctattaatcattctgtaactgttttgaatatgaaatattcataatatctggattatgaatagtcaatctctggatgcttttaagatgtatactttga

SEQ ID NO: 663304 - DNA, 589 bp, Homo sapiens
tccttcctcttccactttttggaatagtttgagaagaattgaygttacctgttctttataattttagtaaaattcagcagtaaaaccatttggtcctcggcttttctttgttggaagatgtttcattactgattcaatctcattactcattatttgtctgttcaggttttctgtttcttcctggttcaatcttagtaggatatatatattcaggactttatttcctctaggttttccaatttattagtgtatagttgttcataacagtctctaatgatcctttgtatttctgtgtgttcattgtaatgtctcctttgtcatttctgattttatttgggtcttctattttttttgttagtatagctagtggttcatcaatttttcttgtattttttaaaaactaactttttgttttgttgatcctttgtattgattcttcatctttattttgtttagttctgttctgattttatttctttcctttggttgattttgggttttatttgattttgcttttccagttccttgaggtacatcatcaacttatttatttgaaatctttctattttttaatataggcttttattgc

SEQ ID NO: 663305 - DNA, 626 bp, Homo sapiens
tttgcccatctcttcttcaggaactccaaaaagttgaatatttggcaacttacggtgtttcatatatcatatagcctttcttcttattttttactgtttttcttttcttttcttttttgagacagggtcttgctctatcacccaggctagaatgcagtggtgcaatctgggctcactgcaaccttcatctcccaggtgcaagtgatcctcccacctcagcctcccaagtagctgggactacaggcatgcaccaccacacctggctaattttttgtaatttttgtagaaatgaggtttcgccgtgttgcccaggctggtctcacactcctgggctcaagcartctacccacgtggcctcccaaagtgttgagattacagacatgagccaccacacccagcactcttttattttttgtttgacaaggctatttcaaaagccgtgttttcaagttccaaaattatttcttctgcttgatctagtctattgttgaagctcttgattgtttttattttattttattcttcaaacctggaacagaattcttcagttccaggattcccatttggcattttttaatgatggctctgttttttttttttttaacttttttcatttatatcatgaa

SEQ ID NO: 663306 - DNA, 610 bp, Homo sapiens
gtcaccaaccttgtagtttttattttcactccaattttctgaagtagcaatgtacgtaacaggaattctgaatttaaagacatggaaaattccatttaatgaggtactaatgaagaaatactgtcctttaattacaaaataagaattttgaatatgacctagtgaaagctgaagaagcctggacctcaaattatttccagccaatttacctttgagggtaaaatttattcttgttttacttatgtatcaaacaatttattcaaaccctgatgaattacaaatatacaaatatatatttaaaaaccatgggatttttaaaggcttcaaaattaaatatttaattgtgtggtgatgtttaaatatagtaatattctttacaattctatgagaataaaggagggaagatggaaggctcattcatttccttgaaataatgtattcgtaggataaaatatggtatttctttcttaactrtatatggaaggattgtgattccccaaatacactggactctttcaacaaaagtaaatataactgtgcattaaaacatacaaatgatcaacaaactatattacaagaacatgcatatgtgaattcctattaatattga

SEQ ID NO: 663307 - DNA, 589 bp, Homo sapiens
ctcagagaaagggccacatagttaagcagctgctggtttgaaatgtaaagtacttagaaagtacctaaggaaaagagctttataataaattttttaatcaaaattttgaactcaccttgtgcagctttgctcacggggcatgttcagctcatgactaatggtcactcttacttgactttgcctattttcttccctacttcatttcccccatgcattgtacctttaaattgtcccgctctaatttggtatctcttgacttctgcttcaaacttttagttgtttccgaagcatgctaagcaaagtctgtgtttagctcctgaccgaggcttggtgttgactgtgggacatacttacagaatagcagctctactgctaggtgtgtgtgtgtgtgtgtgtgtgtgtgtgtgtgtgtgtgtgtgtgygcgcgcgcgcgcgcgagtgcgcacatgtgcatgcatgagggacagaaagagacatcttgtttttttttagactctagcttccaggaggtcaggaaaaatagtggctctagtttaattaacatcctgttttagcaccagttacagggtcattaccacagtaaatgtta

SEQ ID NO: 663308 - DNA, 589 bp, Homo sapiens
ctcagagaaagggccacatagttaagcagctgctggtttgaaatgtaaagtacttagaaagtacctaaggaaaagagctttataataaattttttaatcaaaattttgaactcaccttgtgcagctttgctcacggggcatgttcagctcatgactaatggtcactcttacttgactttgcctattttcttccctacttcatttcccccatgcattgtacctttaaattgtcccgctctaatttggtatctcttgacttctgcttcaaacttttagttgtttccgaagcatgctaagcaaagtctgtgtttagctcctgaccgaggcttggtgttgactgtgggacatacttacagaatagcagctctactgctaggtgtgtgtgtgtgtgtgtgtgtgtgtgtgtgtgtgtgtgtgtgtgcgcgcgcgcgcgcgcgagtgcgcrcatgtgcatgcatgagggacagaaagagacatcttgtttttttttagactctagcttccaggaggtcaggaaaaatagtggctctagtttaattaacatcctgttttagcaccagttacagggtcattaccacagtaaatgtta

SEQ ID NO: 663309 - DNA, 545 bp, Homo sapiens
ggactgcacccgaaagatcctgcatggccaagtatggagggccacattgagggagattccattgagcccgagcctcccagctcacaccaggactcactggggtggcgatgacagggccccctttggttgagctccacgtttataaatagctggagggccagcctccttcactggggtgtggaagcataattgggtaactgatgatccaccctctttgcttccttccttaatttcagcgggaagcctggtttacctgctcggttttactttctcaggtttgacaaacarggttatataaacttttgcattttatagattgcagaggatttacgcagagtcatttaggttgaatgcttgatttcagtgctggtagggactgttcaaactcatctttaggttattcaaatgttggagcagcactttttccctttgagtaatggagatgacttttcccaatagagcagccaccaggttagtaagtaaaacagttaaatgttaaaataaggtggcctaattttaaaaatctcataatttaaaaaattgaa

SEQ ID NO: 663310 - DNA, 419 bp, Homo sapiens
ttggaatgggtaacagagaaaaaaatgagctttttggaccacatagcatgtcattgctctgcctctggattaaagtggaggaaaagaatgaaaccctatgctacctagagcttagygggtcattggatcctgtcccattgccaaaacagcagacttttttccaggttcccttgacggtactctgaccctggttccttatcacctccagaatgttgctgatttgaatgtcttaagtttgattcttctgctggagatcaggctcatgcatatagaaaggagcaatgtagaaaagtgcgtcgtttccccttctaggggaaattgcttcataactgagcaatatagttatgaaaaaacactcacattcgtgtgtggagctctaatttgaccatcagttgtttaaaaagcaagattgtgcgatc

SEQ ID NO: 663311 - DNA, 661 bp, Homo sapiens
acagtggacaggatcaagtcctttgtcttccccaggaagcttcagtccccttgtaaattagtggaagggagagcaaatgtcaaggggaggagcagagtccagtcctacttaccagaagcttcaagggctggttagtgcctcatggagactctgttgtcagcaggttaccccttgtttccctttggtttccatttgattctaacatgaactctgtgagctggatagtatctagatattccagttgggactcagtgaattataagtgaaatggtcatttacagaagagagaaattagtcagagaaggtaaaatgagccgcattttaaaagagaaagatttagaaagtaactgtgaaaagtgacattttaagttcagagtgtttagggagggttaatagcccaagcaaataattcaaagacagaatgagcttggtacacatagggagagagtgcacagacagccctgctgggacagaacttatgatggtccagattcagataagtggagtgaggcctgtctccaggggtatccaaagttaggcaggtgaggcaaaggatgttattaagcaaggacagaaagatctcctrgtataaaaattctgtgggctgaggacagggccaagagaatgacaggagagaaaaatcttggggacagtaggttgg

SEQ ID NO: 663312 - DNA, 471 bp, Homo sapiens
tgtcacccaggctgtactcacactgcacacccaggagtgcagtggtgtgatctcgtgctcactgcaacctctgtcacccagggtcaagtgattcttctgcctcagcctcccaagtagctggaattacaggcacatgccaccacccccagccaatttttgtatttttagtagagaccgggtttcgccatgttggccaggctggtcttgaactgctgacctcaagtgatccacctgcctcggcctcccaaagtgctgggattacaggygtgagccaccgcacttggccaagatttttatttttgattaatgagaagttactgttgtttttgaaaaatggaataaagtttttagcaccaatttactgaaatttcttgcattttgtcttttgttacactgatacctttctagtgtacattccctgttcatcattttctaaagtcgagtcgtgttaaactgggttaaaggagggaa

SEQ ID NO: 663313 - DNA, 574 bp, Homo sapiens
cgaatttaaacctgcactgtcttgcaccttgatttttagagtgacccccttcctgctttccaagcctcctcccatccatccaaactttaaacaacacaacttttaaaaaatacaagtgtgattatgccctatccctgggtcaagactgtaaaggctccctgtgtccataggatgaaattcagatcctaayccagcacaccaggcctttgacacctgctcaatcttcatcacctggtcacaccaggcattctcatgctccttggcttttacacgtgctgttctttctgcccggaattccttccccatccattgtttttactggactcttgctcatctttcaagtcccaacataaaattggatcccctctcattacccaccctcaaccatagaactatctaggctccaacatcttgtgatccaaaccttaataataatacttacattgtgttatagttagccatttattaataaatgttttggatgaatggaatgaatgggtggatggatgaatgaatgaataaatgaatgaattctggatgagtaatgaacaggaaaggcaaatggataataccc

SEQ ID NO: 663314 - DNA, 587 bp, Homo sapiens
ctgtgtttattttgttcttgctttcaggtaaggctggctggaacagatcagccatgccgttaacagccatgagaagtgctgtatcattcacaagctttggtacagacaatttccaggcaccacattttccaggrcacctcagtgaggcatcactctcgcacagttcagggaggagaactcagtctatcctccgagagcacattaaacacaagtttgtgggtttggtggttagctgccaacaagaagactgatctctgaataaatagttcatgacaggaggactccagagttcttggcagaaagaggtgtttccaatactaatgctccttatggccggcaaggcgcatatgctaagtggtccatgtttactggtagtatttgcataaaggatcagctctcttattttattcaatgccaagatttcccaagatgaaggagatggtggatcctcagcacgaatatggtaatgtggctggtgccactacaaaccctgtaaacagtgtaactgtggaggctgtaccatcaacgtgacaggttttcacatgagattacactgctatgaatatgaattttcctctgtggcatgt

SEQ ID NO: 663315 - DNA, 503 bp, Homo sapiens
tagcttagctgcctggagcctcagtaaattattaatatgaggggatcagctgatcagcttctgatttctatggaaaaatgcaaggggggactccccccaatgaatctaccagaaagaaaatgtttctggaacatattgaaatatataaccagaaggataattgctattgaaaattagaggacggggagctgtgaccaaaatttggtgatatcatttaattaaaaatattagtaagcacagatgatgatgatggaattagtgctgccaaagtgtttgttcacaaattagagaagggctgggacgtggtatgagttgagccctcacaaaggggcatgmaaaagaagtagaaaaactgtaaatatttactttttcatatttgatattacttcatgcagccttgcctccttcccccttctctctgaagtcagcaaaggtggaaaagctgagactttagggccttcagctctggaaacaaagtaacagagtaagggaaggaggaggaa

SEQ ID NO: 663316 - DNA, 513 bp, Homo sapiens
tttaatacacctaacctactgaacaccatagctcagcctagcctaccgtaaacattctcaggacacttacattagcctatggttgggcaaatcctctcacacaaagcctatgttatagtaaagtgytgaatatctcatgtaactcattgaatactgtactgaaagtgaaaaacagaaaggttgtatgggtacttgaagtatggtttctactgaagacgtatcttttttgcacaatggtaaaatcaaaaaattttaagttgaactattgtaagacaggggccatcaccatctgtagtggatcctaatttcagggctgaacaagttacctgtggactaattgcctagggttcttctgtggaaattggaactactatatgagaagtagccataatgggagaaaagagtcacctagatctgttttaaattgaatatccatgaacaacctcttaacaaggcttataccactttaatacaataggttcccaacccctgtgactttctcccctagggtca

SEQ ID NO: 663317 - DNA, 522 bp, Homo sapiens
tttgcactgtccctcattctgggatcaggattttacctccaaagtgtgaccactgggaattctggtttcctgctgtcttacttgctgctgtatcacttgctgtatgtatcaccaggccttcaaaataatagatactaaataaatatttatcacattggcttattattacagggctgaacmtacgaagtacaggaagctttcaacacatatttactgatgtgttatttaatagttctacattctccctcacacaatattcttcctgtagttttattcaaaaataataatactgtacacatgttaatactatgcagtatgcaaataaccatcacatgcattacctcatttgattttctgaaaaatgttgtgagatacatagccaggaagtgttacctcacaggtgggaaaactgaggcaggcaaaaggaaatttagtaatgtcaaactgaggtctctgactcctataccaggcctctctccactctattagaatcccgttctcaggcttcaggttaacttctta

SEQ ID NO: 663318 - DNA, 521 bp, Homo sapiens
atggcttctgaaaataagtctattaggtacttagaggaaaggacactacattttacacatgtcctgcccaggcaagctcgggatccagttttctgcccttggggcctttcccccacccccgttacatgttcatgtaactttcttctttttcttcatcttttgtgctttggcacatgcaactccctctgcctgctacaacctgctcaactgataggatttagcccaggtgtcacttccagcrtgatgcccttcctgaatcctcccccttttccctccagtcaggagcaaggatctctagtgagctttctgtgccctgtaaatgtcccctccttcaagcaccacgacagggcaggatctggggctcattcagctgccatctgtcccagtacctggtgtacctggcactacatggagggtcagaatggattggaaatatgaacattcttataaggatgtcttcttccttctttttgctgtaccctgctgtagtttttaagaatgtattatttactttaaaatag

SEQ ID NO: 663319 - DNA, 596 bp, Homo sapiens
aagttaaaattcataggtgattccgaggcaaggccctttcacagcatcactcttacaccacagttgctacactgagatggcctttgaaaagcaggcagtcccactgaaccacagtatcctagagactaagaaacggggacaagagatctttaacttgcattttataattttcagtggcacatcaataatctgcagggatacactaataagatgggtattggacactcattacgacagaccctggaggatccaaaactgtaaaatctagctctgatctcctacaaatttttggtctacttgagggtaaaaggcagaaatacacagacagttgaatgaytgtgccagatcgtgacagttacctggagtaccgtgcacagaagggcaatagaatgatgcagtgactgagtaagaaagagcatgccattagctggagtggtctgcagatacctttggatgaggaagcacttttatgaggtttggctttagaaaagtgagaagccattccaagtgggaggagtgacatgagtggaatcctggcaggagatgggctatgaatggtgagggcatcagtttgacaggaacataggtttgtttgt

SEQ ID NO: 663320 - DNA, 597 bp, Homo sapiens
aatcaccaagacaatggggaaaatgttcctagggcatgtgaaggacttttgcagcagcccctcccattacaggccccgaggcctagaagggaaaagtggtttcatggactgggcccaggaccctgctgctctgtgcagcctaggacttagtaccctgcttcccagccactccagtcatggctaaaatgggcaaatttttaaaaagtcagctcaggctgtttgcttcagagggtgcaagccccaatccttggtggcttccatgtggtgttgggcctgcaggtatacaaaagtcaagaattgaggtttgggagcctcagctgagatttcagaggatgtatggaaatacctggatgtccagtcagaagtctgctgcaggggcaaagccctcatagagaacctctgctagggcagtgcaaagggaaagtgaggggttggagcccccacacagagaccccaccgtggcactgcttagttcagctgtgagaaragggccaccatcctccagaccccagcagatggtaaatccatctgcttgcactgggcacctgaaaaagccacaagcactcaacaccagcctatgaaagcagccaggagggg

SEQ ID NO: 663321 - DNA, 587 bp, Homo sapiens
taaaatcaaatctgtttcaattaataaagaacttgacaatgaaactaacaagacccattctaaagacgccaggaaaataaaataaaaacccatatgtactaggaattgtaaatagagaggaagcagaaacaatgtaatttgaattatcttattaaaatttwaaaatattaaaatttaactagtttctcttattcagctagagacggtataaaaacttggcagaagtgtgatttttgtctatctgctggccagaataatactatatagatgggattttgtaggttttagtctctctaccccgctgtcttccaatatgtatgcagaaaaagtaaacatgatccctaacctttctgaaaccttctttaccttcagtctacacatacatagtcttgggcaaagagttatcaggtaaattccatggaatcaagagtagaggcatatgttgcttttcttaataggaaaaacagtgactgtgtccccctaaataaagtcatgattcaatgaaaagacaaacagcccaattttaaaaaaatgagcaaaagatttgaacagacattttctcaaaagaaatatgaatgggcaataca

SEQ ID NO: 663322 - DNA, 543 bp, Homo sapiens
attattattgaaataactacattttttttcttttttttttggagagaaagtcttgctctgttgcccagctgaagtgcagaggtgcaatcatggctcattatagcctcaacctcctgggctcaagtgatcctccctagtagctgagaccacaggtgcacacttggctttttttaaaattttttttggtagagaaggagtttcattatgttgccagactggtctccaattcctaggctcaagtgatctcccacctcagcctcccaaatttctagaattaaagatgtgagccactgcacttgccctaaataactacatttttttgaatgctgcgatgtgcctagctttgtgctaagctctttgaatgtgttacctgattcagtccttgggaaaaccctaggaagaaggggccacctgatttctagatgggaaccctgaggcttagcaagaaaaagagagccggtgyggtagggtcaggactggagcccggtttatactcctactgacaggatggggatgcctgtttcacctcacccttgttaaaaa

SEQ ID NO: 663323 - DNA, 543 bp, Homo sapiens
attattattgaaataactacattttttttcttttttttttggagagaaagtcttgctctgttgcccagctgaagtgcagaggtgcaatcatggctcattatagcctcaacctcctgggctcaagtgatcctccctagtagctgagaccacaggtgcacacttggctttttttaaaattttttttggtagagaaggagtttcattatgttgccagactggtctccaattcctaggctcaagtgatctcccacctcagcctcccaaatttctagaattaaagatgtgagccactgcacttgccctaaataactacatttttttgaatgctgcgatgtgcctagctttgtgctaagctctttgaatgtgttacctgattcagtccttgggaaaaccctaggaagaaggggccacctgatttctagatgggaaccctgaggcttagcaagaaaaagagagccggtgtggtagggtcaggactggagcccggtttatactcckactgacaggatggggatgcctgtttcacctcacccttgttaaaaa

SEQ ID NO: 663324 - DNA, 547 bp, Homo sapiens
caatccttttaagtatttgccagcttaagaggtaaaaatgtgatttagcttctggttcttatgcgtccgtcttgggtagcattggacatcttggcatggttattggctgtttgcacttacagttttaggaattgcctcttcacatcctctgccccatttttactkgattgttcatacttttaaaaattgatttctgtgtattataaatagtaaccctttgtcatgtgttacaagtcctcttctccctcagtttctttctttcaattttctgctttgtatttttttttttttttttgccaaatagaactttaaatttcttaaattgcaaatctgtgaactttggatgcctttagagtttattatccctttaaaaaaatttttttaagagatggggcctcagtatattgtccaggtggtcttgaactcctggactcaagcagtcctcctgcctcagcctcccaaagtgttggtattacagacatgagctactgtacccggccaagttttattatccttatcttatcctaggagtataatatttttctgt

SEQ ID NO: 663325 - DNA, 635 bp, Homo sapiens
cagatgggaatgtatatatcattaaatgcatacagtaggaaagtagaaagatctaaaaccaagattcgaaatttccaccttaggaaactagagaaggaagataaatttaagcctcaagcgagcataagaaaagaaataatacaattagaacagaaatcagtgaagttgaaaataggaaaacaacagagaaaatccatgaaatcaaatgctgattctttgaaaggattaattgataagcctttaccaagctaaccaggaaaaaaccaaatacctcaaaaaataaagtatttctgtgtgaaggatggttttgagatcccctcatataaaaagaccagttctctgggcactttcaatttggttctcctgagaattgaatctgatgaaagctagatttgttttaaggtatgatgctatttactgacatgtcacctctctttatgtagttaatcctaaaaccttccacatgtcttgaaagatcttaagatgatatacatttttatactgcttcattgcatgtgtttatcctttgatgacaagctcaactatctgcagtrtatcacttatctagatgagaatgaaaaaaatgttattccgaaagttctaaatatttcaacagttgattaagccattcagca

SEQ ID NO: 663326 - DNA, 625 bp, Homo sapiens
gtcctttgctgaggagcttagactaaactgtttaggtaaaaggagccagcaaaatctttaagtgagggagtaacataagatttgcatgttagaaggctctctctggctgctatgtacagagggaggctaatggcagcagatctggtgaggatgctgggcccgtgatctgggaacttgcctgccccaaggcagcaatcatgggagtggagtcaaggaaacactaaagaagtagacatgataggactttttaagtgggaatggccagggctctggccatttggaagcctaaagagaatggaatagcatgagttcggtttgggggaaattcagtggtaagatgcttgtttgtcagaaacacacttgagatgggagatcagtttggtgtcatccatgtcctcttggtaagtggaaactataatataaaatctttcaggccaggtgcagtggctcacacctgtaatcccagcactttgggaggccaaggtgagtggatcacctraggtcaggagttcgagaccagcctggccaacatggcaaaaccctgtctctactaaaaatacaaaaattagccgggcatggtggcacgcacctgtaatcccagctactcaggaggttgaggcaggga

SEQ ID NO: 663327 - DNA, 527 bp, Homo sapiens
gtaatagtgaatgttagataatttttattctcacattttcctgtttttttttctgctgttagtgtcctcacctaattgcacatatgctcttttttcttttttattgttttatttcttttctttctttctttctttytttttttttaagacagtgtcttgctattttggctaggtcggtcttgaactcctggcctcaagcaatcctcccaccttggcctcctaaagtgctaggattacaggcatgagtcaccacacccagctcacataaactctttttctcttgagatgcaattgttgctttccttagagaaaaattttcgtatattaggggcatgaatgccaaagtaaaggatttcctgattgaaatttgctatttattaaccttgttaaatgcagttcctatcataaactcatgacagtattgacatcattattaaattataagagctttaaaaacagtgaatattcttaaataccgtgggagtcaaaataggaagagaacaagtagtaactctcttagagagagt

SEQ ID NO: 663328 - DNA, 582 bp, Homo sapiens
gaagggatttttgagtacaacttcctcactggttttgcttttaatgtaggattctggaatgtaaatcagtaggagatttctagttactggtggaagagaagatggcttccttatcccggaatcacagggatygggggtaaattctgtacataggtcctctctggaagttcttgtaaggaatatgggaaaatgaagctggaattattatagttacaatgttggctaaagttggttcatggaaaccttgaaattaagtttgttggtttgcttattcaatattggacagcagagggtctgagttagtgagaaccaacaaaccagaaataaatcaagttgcaatatttagctgcaaaggacagaaagaggcctttgaaaagctgaagtgagtacttttattgctgtaattaagggaaataatggtaaacaggctctttcaattggcattaaaatatattttccttggttagtttgaatatccaatacaagttggtggatgtgaattgttctgtcatgctttcaaggaggaaaactctagttttaaaagtacgtcattagggccaggtgtggtggctcatgcctgta

SEQ ID NO: 663329 - DNA, 582 bp, Homo sapiens
gaagggatttttgagtacaacttcctcactggttttgcttttaatgtaggattctggaatgtaaatcagtaggagatttctagttactggtggaagagaagatggcttccttatcccggaatcacagggattgggggtaaattctgtacataggtcctctctggaagttcttgyaaggaatatgggaaaatgaagctggaattattatagttacaatgttggctaaagttggttcatggaaaccttgaaattaagtttgttggtttgcttattcaatattggacagcagagggtctgagttagtgagaaccaacaaaccagaaataaatcaagttgcaatatttagctgcaaaggacagaaagaggcctttgaaaagctgaagtgagtacttttattgctgtaattaagggaaataatggtaaacaggctctttcaattggcattaaaatatattttccttggttagtttgaatatccaatacaagttggtggatgtgaattgttctgtcatgctttcaaggaggaaaactctagttttaaaagtacgtcattagggccaggtgtggtggctcatgcctgta

SEQ ID NO: 663330 - DNA, 599 bp, Homo sapiens
ttagcatataatatgatcaacctaactcatataaatgtagattaycttggtttgtcttttcctggctgcagaaaaggcttggagaggtgccttggattgtgagttagtcagtgagcagctgcttaaagatttgaaaaatcctagaatatgtcatctctgtaggctttatcctttaattaattatggatttttatctgcatatatgtgaagctaatgattgacttggttcggacactgaattgtcggcttaaacctgccattccactgggcttcatcactatgttctatgggtgtgaagcctttgttttttcagagacccatttccaccagcgggtttgcactgtaagtgtttccacaggaactctgccctttgccagtgtcactgttgtggctatgcagcagaacccacagggcggaggtgtttcagccctcactgaaaatgcaacagatcttaacatctcttgctgcaaattttccagtgtgttctggtctaccttggtatcttaaaaccaggctcactgactaccacatgagaaatgacagtggggtgtcttaaatgatctgttgaagaccagcagccaaaaagattgcccttagtg

SEQ ID NO: 663331 - DNA, 593 bp, Homo sapiens
atttgccttttaaggctatatgccttttaattctgatgtaaagtggtagagaaatgattaaaggtttaagagttgatagggccctgggtagcagggacactttacatgtgttgtgtgtgcatctgcagcagatgacagctccccaaatggacatgcctcccttgttcaagaaagcttgtcagggtggcaccaatttttttttagcaatttaatgaatgaggtatcaaatgatcacataatacaaatttgattgatctccttttggatatatctccccttaaacattgtgctggctacactatccatttctataatacctttgattttatcctctttactcctaacagtgaattcctaggtaaagtcacaactgaatttatcagcacaagcatgctgcatcatgttgtacgttctgcaaacagtaacttgagatagtgtgtcatttcccagttcttaaggctgtggcctacaccaatggtcttattttcccttttgattttttcaaaattaactgttattttgccaataagtttaacatttcattgsagcaattattacgtgtctggggttatgcaacacatgggatgtgcaga

SEQ ID NO: 663332 - DNA, 627 bp, Homo sapiens
ctttttgactcttttggtaggaaatggggaggaatgcttgtcaccttagaaatgctgttcgaggttgctcacacctgtaatcccagaactttgggaggccgaggtgggtggattacaaggtcaggagttcgagaccagcctggccaacatggtgaaaccctgtctctactaaaaatacaaaaattagccgggcatggaagtgtacacctgtaatcccagctactcaggaggctgaggcaggataattgcttgaacctgggaggcggaggctgcagtaagctgagatcatgccactgccctccagcctgggcaacagaacgagactccatctcagaaaataaaaaaaaaagaaatgctggtatgtccaagtctgtgttcactcttatgttcatggttgttttacaaaagctgtatttagcaagcactcaatgrcaagttatgccagcactgtgcttggcataacttggatatataggtgaatgaggcagccatacagagaaatatgacaagagtatgttttaaatgccccaaagaaggtttatggaaggtgctacaggaatgtggagctgggaaaataaccatcatttatatagtgctttatatgctgtctcttgcttttatatttgc

SEQ ID NO: 663333 - DNA, 504 bp, Homo sapiens
gatttaggaaattgcagaagtttcataaaaagatactctactaaaaagctttaagagagctattgattcccaaaaatagttgattgggccatagcatcaggtgtgctgatgcagaaccacatcgttgtgatttatttctgctgtctttgtgaggggatggaggacacaggcttctggaagaacatgtttataagtcttccttctcccagatggcgcttccagctaaggtcctgcagagttgcattctgccacccttcctggagcctgagagatgggcgaggagtgcaggtggtggtgttaggtggtggcatgtcaaggaggcaggcaggaaaaggcagactgatttttggtagcattagtctttcttctgtccttctctgcttttctttattctgaattttaagatttggatgcatgtgtacatttaagatttgttctaaatacaygaaagcacgcctgcttgttagaaggacatatttgagggaactaagtggtgttcggagg

SEQ ID NO: 663334 - DNA, 548 bp, Homo sapiens
tttattcacagtgtggtgggtgtggtactcaaggcctttaatgggattttaataatccaaacctaattcagtctccagatgactgtgcaatataatggagataatgctgctttacttttccttactcaraaggtggttgtgaaggtctgctcagggtagccagcgtgcctttcccaacacccttctttctgttttgctggttctgctttctctcattctctaaacatggctttggtccttgattctttgctctttgaactgtacaattgttccttgagggtcagtcagctgtcttgtggttcagttattcctgtgtggatgactctacctgcagcccagccctttattttaagtttcaggtcccatttatctttttgtcacacatttctaatctccctacaaatcagtatttttaaaaaccagagtcatcccaaaccaactgaccctctagattgccttacttcttgcagatttagtcttaccgtcttccagatactacagctgcctttgggcttttcatcatcccttatccttagccaccaagtcct

SEQ ID NO: 663335 - DNA, 548 bp, Homo sapiens
tttattcacagtgtggtgggtgtggtactcaaggcctttaatgggattttaataatccaaacctaattcagtctccagatgactgtgcaatataatggagataatgctgctttacttttccttactcagaaggtggttgtgaaggtctgctcagggtagccagcgtgcctttcccaacacccttctttctgttttgctggwtctgctttctctcattctctaaacatggctttggtccttgattctttgctctttgaactgtacaattgttccttgagggtcagtcagctgtcttgtggttcagttattcctgtgtggatgactctacctgcagcccagccctttattttaagtttcaggtcccatttatctttttgtcacacatttctaatctccctacaaatcagtatttttaaaaaccagagtcatcccaaaccaactgaccctctagattgccttacttcttgcagatttagtcttaccgtcttccagatactacagctgcctttgggcttttcatcatcccttatccttagccaccaagtcct

SEQ ID NO: 663336 - DNA, 541 bp, Homo sapiens
ttacctttcctatttttataggtgaggaaattgaggtggtcagatgaccttatttagctcttagatcaactcagcagatatgtattgagtgtttacttggttcaaggaactctgcgaggctccttgggaacataatgtcagatcctgctggaatggaggttacagacttattgcaagtgatgagatatgtgtatgaaaatgtaagtaattgttcaaggtatagataagtgttaataatagttgagatgtgaattttgagaccggagggatcaatgtgaatatcaaatcctggcaccagtttcttccttctgctgctcatgaagctgtgtcatcttctgtgctcggtaacccatccaacctgtagccctaggagctcctctggggagtcttgagtacctkgcagttgtcccgaccctgggagtcattcaataaaggttcaaatgaatgaatagataggtgcggtgaagagagacaggttttccaagcagagaacacggcatgagcaaatgtgtggctgagtgatagagccaggagaggggcc

SEQ ID NO: 663337 - DNA, 596 bp, Homo sapiens
ccgtggacatggtctttgctcgtaaggcatagccagtgtgaggtttcagtagaaatcccaaggtgttttaagcccattaattttatgkcactcaagcttctaactctttctcctatgggtgggaaacagctgaaatctcagttcctatctttcagcatcctagctcttgctcctgtctggacctcttagagtttcccttgcacatgcacagtttaggaagatgtgagggcttgaagagtttacatatgtggaggttcttctttctgtggccccatctttccaggttttctcccctcaatatccagtcatctggtaggcttgaattttgtcaattctgccttcaagccaataaaactgtggttccatattgagttctatttacccaatcctgcacaacctggggaataatctggagaaaagccctacaaatgtgggtctcacctaatgcggtttccctccttcacgtgtcagattctctctagtttgtatgtgtttttggttgttctctcacatcatcaactagttgtttaaaatatattttccaggtattttaatcttttggtgggagggttggtccatatcaagctacttcacca

SEQ ID NO: 663338 - DNA, 466 bp, Homo sapiens
cttctttctgtggccccatctttccaggttttctcccctcaatatccagtcatctggtaggcttgaattttgtcaattctgccttcaagccaataaaactgtggttccatattgagttctatttacccaatcctgcacaacctggggaataatctggagaaaagccctacaaatgtgggtctcrcctaatgcggtttccctccttcacgtgtcagattctctctagtttgtatgtgtttttggttgttctctcacatcatcaactagttgtttaaaatatattttccaggtattttaatcttttggtgggagggttggtccatatcaagctacttcaccattactaaaacctcatgaagatttttaagcatgtggcttaattgtttgtatttttggtattggcattttgcaaaattggttacactttctttgagaaatagttttctccactcctttcagccaacca

SEQ ID NO: 663339 - DNA, 521 bp, Homo sapiens
ttgagaaatagttttctccactcctttcagccaaccattcccattcatatgggtgaattgttttaatgttaaagtttttcaatatatcgtctscattattaaatcttgtctttttgcacaaacctggatttagcagaaacctagaatacttgacataaaaaaaaaaactgttcaggttacaatttgggggggtgttctgcctgctccaaggtctttttgctttgcttggtatcttttatgtacagagaaaaatgagtctgttcctagcctagtcaaataaaatcaatgtagtattatggaacattgttgataaaacattctcatcatgcacgtagaacatggatcagctatggtagaaagaaacacaacagtgagaaagaggtcaggaggaggagtgggtaagattctctctcattcgagctgaatcaactctctgcattaagttacaagggactggcgaagtaaagcaatgcatgttagaccaggtctgattgtgccataatcattacatgactttttta

SEQ ID NO: 663340 - DNA, 521 bp, Homo sapiens
ttgagaaatagttttctccactcctttcagccaaccattcccattcatatgggtgaattgttttaatgttaaagtttttcaatatatcgtctgcattattaaatcttgtctttttgcacaaacctggatttagcagaaacctagaatacttgacataaaaaaaaaaactgttcaggttacaatttgggggggtgttctgcctgctccaaggtctttttgctttgcttggtatcttttatgtacagagaaaaatgagtctgttcctagcctagtcaaataaaatcaatgtagtattatggaacattgttgataaaacattctcatcatgcacgtagaacatggatcagctatggtagaaagaaacacaacagtgagaaagaggtcaggaggaggagtgggtaagattctctctcattcgagctgaatcaactctctgcattaagttacaagggactggcgaagtaaagcaatgcatrttagaccaggtctgattgtgccataatcattacatgactttttta

SEQ ID NO: 663341 - DNA, 548 bp, Homo sapiens
acttttaatgctaaaattttaatattgaaatctacgggtggggtatattttaggaaccccatawctgttctctgtgtctctgtgcgtgcattgctttttcattttggctcctagactggggctcagcttgagcttgcacgttgctgctgcctttaaaacaccgctcccttgtcacatgcagaggacgtgatggctgcctgtctgtgttaagtaagaaggaaatggagcccccccccgcatttgcctgccacagctgtggcagcaacctggacctggcactgagagcatgtccctagcttgacctcgctcctggaagccaccttagattatgtccagccataatatgacaggttggctggtgcaacatttggagctctagttcccatcttggatactgaaagccttcatggaaaagcagtgtaaggtcaggcctgcccagtgtgttttggactgtgaaaagggcattgtcctaggatcctggaggcactgtcaaagctcaggaaatgttggctgatcctcagtctgtctcacatggttgtcttgaaggt

SEQ ID NO: 663342 - DNA, 586 bp, Homo sapiens
atggaaactgaggaaaatgcattaaactaaattcataactgctttaattggaagagaaacaacagaaagaaattaaagtatgacatcatcttatgtgaggacaaaaagatgtagctggattattatgctactaagaaatatggtgtaagattttacgatttgaagagaacatagtttgcagtaaatgaagtttgcttggactcagggaaccacaaacttaaatggttggcccacaaatraaaaaccagacatgatgtgtctcctgatggaagcccacacaacatcgtgatcttgccaaaaagtagaggtagttttgcccaaaactcaagccttagaccagtcaggcttccagatccaaccaccagttaagaggaaatataggggacagaggagcattttaagttacaccatgggatgtaatcagcaaaatccagactgtggaaaaattttacaggaaaagagacttggtttcttctaccaaacattggaagaaaaaagtaaaggaaagagaaccaaagtaacaagagagaggcatattaatcatttgcaatatatgggccacattttatcccaattcaaacacaaa

SEQ ID NO: 663343 - DNA, 381 bp, Homo sapiens
aagtgagtcatttcactgagtcatttatcttttatgcttgcatgcataatcaacagaagtttgtgttttgtactcaawtcctttctcaagacagccaacagctgttgcttccctcaagctgtaaacttcatcttcctgttttacctcagctgttttgcccaaactgccttagacataatggcagttgaaaatcagaagtttttgtaagtcatagcagttattgtcagtaataactgctagatgatattaggaatcaaagctgggtctgctaacatcagtgcagttagttcaggtggtgtttccaaacatgaaacatttagaaaaaggaaaatgagcctagcctggaaatcatgattttcagggagaaatccaaggattttc

SEQ ID NO: 663344 - DNA, 568 bp, Homo sapiens
ctgaagctgagactgacatgaagatgggcactcaaggggccctgacaagtcagaaggaaaacttttctcacggattatataragtgaaccggaaagtaacgacaacttcagagagaccagggggaataatttagttactcaaaaaggacactctgtggatgtgaaaaattcacatgaattctttgctccatgctgcacttgcacagtactgttgtgggatttttccacatactgcttgtcccagttaccaggtttccgataaagggctctgttgtggccatcgttaattaattacaggtacagtgaatggtagcagagtaccaactggagaaagttagtacaggaggctttgaaaatttcaccctaacttacacaagttataaaagggggtttaacttacccttgggtgtttataaataattccagtacctagcacagtgcctggcacactcgtaggaggaaacagctgaagaggagtcaatgaatcattttatagctcttctacccttgctaaagcaaccaaaccactttggtttgtaagaatagcagttcctaaaatagacaacat

SEQ ID NO: 663345 - DNA, 583 bp, Homo sapiens
gacaaagatattttaaataactaactttccaagtgggtatgatgtacagccagggttaagaatccctgactaacaagggtcatttcagcacaaaaacttaagactcccccataatttaacactcacaataaacccaaatagattttcttattcccagatgaagaaacagtggccccagagggttgagtgcctcaccccaggtcatccagtctgtaagtgctcctcatctgagacctgagacccaaagctctccaccatatgaggggtggaagaaaaggcaaaagtgtgatgtgcaggagtccccagtgcatcatttcacgagaacatttccagttgttttcagcatctcttctatttattccccaaacccccacagcctttgatgaattctggaggagagaaactgcctggcattttcaaccaagtgctttgatacttgaacacagcagtggatggaaagtgacagcaccttatcagtcacygtgtcccagctgctgtcagagctccttcctctctgccaacagcgtgggctgggctccctggctcgcagagtggtgagcgatgcttccgcgaggagatgcgg

SEQ ID NO: 663346 - DNA, 640 bp, Homo sapiens
ggatggtgcattgccagccactgaagccaacgtagcagaagcatgagagcccttgtcacataggtgagcaccagggcagtaatccscaaagtctgctgggtggaaagaatgggtggtcctctatctggtgcgctccctgcagccacacagattgcatttctgggacacttgctatggtttaaatacgatccccaaattttatgtattcgatatttaatccccaaatttatatgttgatggcatttggaggtggaaactttgggaggtaattaccattagataaggtcatcagggtggggtccccaagatggaactggtagctttataagaagaggaagagggacctgagctggcatgctcttgctgtcttaccatgtgatgccctttgtgatgttatgacatgataagaaagccctcaccagatgcagcccctcaaccttggacttcccagcctccagaactataagaagtattttttttcttcataaattacccgtccttgcgtattcagccatagcaacagaaaaaagacaaagacaatactgtgatctgcattcctggagaggggcagaacatctgagcttcccacgtcatcacagcctctgccaagcctctctgatagtttctgcttttctggcaa

SEQ ID NO: 663347 - DNA, 640 bp, Homo sapiens
ggatggtgcattgccagccactgaagccaacgtagcagaagcatgagagcccttgtcacataggtgagcaccagggcagtaatccccaaagtctgctgggtggaaagaatgggtggtcctctatctggtgcgctccctgcagccacacagattgcatttctgggacacttgctatggtttaaataygatccccaaattttatgtattcgatatttaatccccaaatttatatgttgatggcatttggaggtggaaactttgggaggtaattaccattagataaggtcatcagggtggggtccccaagatggaactggtagctttataagaagaggaagagggacctgagctggcatgctcttgctgtcttaccatgtgatgccctttgtgatgttatgacatgataagaaagccctcaccagatgcagcccctcaaccttggacttcccagcctccagaactataagaagtattttttttcttcataaattacccgtccttgcgtattcagccatagcaacagaaaaaagacaaagacaatactgtgatctgcattcctggagaggggcagaacatctgagcttcccacgtcatcacagcctctgccaagcctctctgatagtttctgcttttctggcaa

SEQ ID NO: 663348 - DNA, 617 bp, Homo sapiens
tcttcctctcatggagagttcataggttcagaggcatcaaattcttttgttaggtgacttgtgccttttatgtagtctgaggagatgtgctgaagactgatttcatgcccacttgtcaccagcctgatgtctgttacaccctcaaaattctatggcttcacagaagtgaagcttggggggccttggagaccatataaccaaagctctgtgctgacyatacctgcctttgtctctttcattccagcttatttgggagtgacttgaaaagtaccatgagtataacccttccctgaagtgtagggaccagcccctcccttcctctcctgcttcctatccctcagcatttttttaatgggagaatgtcttaatttttcctttattcttgagggatagttttgctagatataaaattattggttaagagggtttttttgtttgtttgtttggtttttttttttcaggactttaaatatgtcatcccactgccttctggcctctttggtttctgatgagaaatcagctgttatcatattgaggtttctttgtacacaatgagttggttctctcttgttgctttcaaaattccctttgtgactttgggtttccacaatttgaat

SEQ ID NO: 663349 - DNA, 617 bp, Homo sapiens
tcttcctctcatggagagttcataggttcagaggcatcaaattcttttgttaggtgacttgtgccttttatgtagtctgaggagatgtgctgaagactgatttcatgcccacttgtcaccagcctgatgtctgttacaccctcaaaattctatggcttcacagaagtgaagcttggggggccttggagaccatataaccaaagctctgtgctgactatacctgcctttgtctctttcattccagcttatttgggagtgacttgaaaagtaccatgastataacccttccctgaagtgtagggaccagcccctcccttcctctcctgcttcctatccctcagcatttttttaatgggagaatgtcttaatttttcctttattcttgagggatagttttgctagatataaaattattggttaagagggtttttttgtttgtttgtttggtttttttttttcaggactttaaatatgtcatcccactgccttctggcctctttggtttctgatgagaaatcagctgttatcatattgaggtttctttgtacacaatgagttggttctctcttgttgctttcaaaattccctttgtgactttgggtttccacaatttgaat

SEQ ID NO: 663350 - DNA, 617 bp, Homo sapiens
tcttcctctcatggagagttcataggttcagaggcatcaaattcttttgttaggtgacttgtgccttttatgtagtctgaggagatgtgctgaagactgatttcatgcccacttgtcaccagcctgatgtctgttacaccctcaaaattctatggcttcacagaagtgaagcttggggggccttggagaccatataaccaaagctctgtgctgactatacctgcctttgtctctttcattccagcttatttgggagtgacttgaaaagtaccatgagtataacccttccctgaagtgtagggaccagcccctcccttcctctcctgcttcctmtccctcagcatttttttaatgggagaatgtcttaatttttcctttattcttgagggatagttttgctagatataaaattattggttaagagggtttttttgtttgtttgtttggtttttttttttcaggactttaaatatgtcatcccactgccttctggcctctttggtttctgatgagaaatcagctgttatcatattgaggtttctttgtacacaatgagttggttctctcttgttgctttcaaaattccctttgtgactttgggtttccacaatttgaat

SEQ ID NO: 663351 - DNA, 613 bp, Homo sapiens
tttgcccatgctactcacttatgaaggatcagcagcctcttcctttatcaagaattctattgggtgtcattaatgtcctcaagttccagagttccagaagagtttatttcacttactcttttcagcttwatgtttgctttgggggagggactggtctatagagctatttgcaccatgattttgggtgatttcagggtatcacttggaagagctttctgagttcccctatctgggagggaggcatctggggcttggtagaatgtcagtggtaagttcaggtctcaaagaatagaagcagggatttgaccacttaggattggctccaggcttggattcagagtgagagggaggggtgaattggggccctctttaatgctactcagctcaccacctttgggtaggatgaagtagcaactgacatctactgagtgcctgacattttttcattaaagcttcaccagtcttgaatacgaaattttactgtcctcatttcataaatgaaatgacagaggctcagagaggtgatataatatttcccataccatatagctggtaatggtgggggcaggatttgaacctaggtctgtgcaagtccacagcttaacccctctca

SEQ ID NO: 663352 - DNA, 613 bp, Homo sapiens
tttgcccatgctactcacttatgaaggatcagcagcctcttcctttatcaagaattctattgggtgtcattaatgtcctcaagttccagagttccagaagagtttatttcacttactcttttcagctttatgtttgctttgggggagggactggtctatagagctatttgcaccatgattttgggtgatttcagggtatcacttggaagagctttctgagttcccctatctgggagggaggcatctggggcttggtagaatgtcagtggtaagttcaggtctcaaagaatagaagcagggatttgaccacttaggattggctccaggcttggattcagagtgagagggaggggtgaattggggccctctttaatgctactcagctyaccacctttgggtaggatgaagtagcaactgacatctactgagtgcctgacattttttcattaaagcttcaccagtcttgaatacgaaattttactgtcctcatttcataaatgaaatgacagaggctcagagaggtgatataatatttcccataccatatagctggtaatggtgggggcaggatttgaacctaggtctgtgcaagtccacagcttaacccctctca

SEQ ID NO: 663353 - DNA, 475 bp, Homo sapiens
tggggcttggtagaatgtcagtggtaagttcaggtctcaaagaatagaagcagggatttgaccacttaggattggctccaggcttggattcagagtgagagggaggggtgaattggggccctctttaatgctactcagctcaccacctttgggtaggrtgaagtagcaactgacatctactgagtgcctgacattttttcattaaagcttcaccagtcttgaatacgaaattttactgtcctcatttcataaatgaaatgacagaggctcagagaggtgatataatatttcccataccatatagctggtaatggtgggggcaggatttgaacctaggtctgtgcaagtccacagcttaacccctctcagcctatcatgctttggatggggagtccatgtagtagccctgcctagaaataaaaatgtagtatttgattagaccttcacctgggctgtacctctcagaggctaagtc

SEQ ID NO: 663354 - DNA, 475 bp, Homo sapiens
tggggcttggtagaatgtcagtggtaagttcaggtctcaaagaatagaagcagggatttgaccacttaggattggctccaggcttggattcagagtgagagggaggggtgaattggggccctctttaatgctactcagctcaccacctttgggtaggatgaagtagcaactgacatctactgagtgcctgacattttttcattaaagcttcaccagtcttgaatacgaaattttactgtcctcatttcataaatgaaatgacagaggctcagagaggtgatataatatttcccataccatatagctggtaatggtgggggcaggatttgaacctaggtctgtgcragtccacagcttaacccctctcagcctatcatgctttggatggggagtccatgtagtagccctgcctagaaataaaaatgtagtatttgattagaccttcacctgggctgtacctctcagaggctaagtc

SEQ ID NO: 663355 - DNA, 475 bp, Homo sapiens
tggggcttggtagaatgtcagtggtaagttcaggtctcaaagaatagaagcagggatttgaccacttaggattggctccaggcttggattcagagtgagagggaggggtgaattggggccctctttaatgctactcagctcaccacctttgggtaggatgaagtagcaactgacatctactgagtgcctgacattttttcattaaagcttcaccagtcttgaatacgaaattttactgtcctcatttcataaatgaaatgacagaggctcagagaggtgatataatatttcccataccatatagctggtaatggtgggggcaggatttgaacctaggtctgtgcaagtccacagcttaacccctctcagcctatcatgctttggatggggagtccrtgtagtagccctgcctagaaataaaaatgtagtatttgattagaccttcacctgggctgtacctctcagaggctaagtc

SEQ ID NO: 663356 - DNA, 619 bp, Homo sapiens
tctttcttagtctctttttaagtcaggtgtttttaacctgatgccatggacagtgattgactctgaaaaacagrgaatatttgaattgatgttaaatttttgtgtcttttttatgtgaattggggatggaggacatagcattcatcaaattctcaaaatggcataaacatagaaagggtctttattaagggcctattgactcagacttaacacacaatgatgacaaaatggtatgatgtgggcttcctgatccatggaaaaatggcagaatctaagcaagaagacccctgcacacagcagggcctaagccaagttgtctgatgtctgtggacatgacagatgaaaagaattggtgtttgtcttttgaaattatttggtccaagctgagtgactctctttatagagaagtgatcaaagaagagtctatcagcctgcaatcccagcatttggggaggccaaggcatgtggatcattgaggtcaggagtttgagactggcctgaccaatatggcgaaaccccgtctccactaaaaatacaaaaattagcctggtgtaatggcacacgcgtgtaattccagctacttgggaggctgagacaaaagaataccttacaccaggga

SEQ ID NO: 663357 - DNA, 619 bp, Homo sapiens
tctttcttagtctctttttaagtcaggtgtttttaacctgatgccatggacagtgattgactctgaaaaacagggaatatttgaattgatgttaaatttttgtgtcttttttatgtgaattggggatggaggacatagcattcatcaaattctcaaaatggcataaacatagaaagggtctttattaagggcctattgactcagacttaacacacaatgatgacaaaatggtatgatgtgggcttcctgatccayggaaaaatggcagaatctaagcaagaagacccctgcacacagcagggcctaagccaagttgtctgatgtctgtggacatgacagatgaaaagaattggtgtttgtcttttgaaattatttggtccaagctgagtgactctctttatagagaagtgatcaaagaagagtctatcagcctgcaatcccagcatttggggaggccaaggcatgtggatcattgaggtcaggagtttgagactggcctgaccaatatggcgaaaccccgtctccactaaaaatacaaaaattagcctggtgtaatggcacacgcgtgtaattccagctacttgggaggctgagacaaaagaataccttacaccaggga

SEQ ID NO: 663358 - DNA, 619 bp, Homo sapiens
tctttcttagtctctttttaagtcaggtgtttttaacctgatgccatggacagtgattgactctgaaaaacagggaatatttgaattgatgttaaatttttgtgtcttttttatgtgaattggggatggaggacatagcattcatcaaattctcaaaatggcataaacatagaaagggtctttattaagggcctattgactcagacttaacacacaatgatgacaaaatggtatgatgtgggcttcctgatccatggaaaaatggcagaatctaagcaagaagacccctgcacacagcagggcctaagccaagttgtctgatgtctgtggacatgacagatgaaaagaattggtgtttgtcttttgaaattatttggtccaagctgagtgactctctttatagagaagtgatcaaagaagagtctatcagcctgcaatcccagcatttggggaggccaaggcatgtggatcattgaggtcaggagtttgagacyggcctgaccaatatggcgaaaccccgtctccactaaaaatacaaaaattagcctggtgtaatggcacacgcgtgtaattccagctacttgggaggctgagacaaaagaataccttacaccaggga

SEQ ID NO: 663359 - DNA, 609 bp, Homo sapiens
aggcacaaatgcagggtacaagctgcctttccagaggattcccaaagcaggcagctgagcacccacaacagcatgagatcagttttgtggttttcacctcaagctttaggaccacagggtctctgctgagctgacttgcaggaacttggactagaagcagaatgacttcttctgctaggtacaggtcacctgaactaaccagggatgtggaccaggctctgagcagatgctcaaaggaggattccatgagatcactggctttcaggaatcactcctccctagggagtgtgttaacatctctggctatgaaatatatatactatgcagcaaggcataaaacaaatggcacctactgtctgcacctccagactgagtatttatatacgcatcggaggcagtctgaagtagcctaaagagaatcagaaaacctaggtctgaggcccagctcactaacttcctagcagagcaagtttggcgagtkccttaccctctctaaacatcagtttctaaatctgcaaaatagtgatgacttccacacagggtgatgtaaatatcgcacggggcaatgggtgagaaagtacctggaacgctttagggtgtgccataggt

SEQ ID NO: 663360 - DNA, 547 bp, Homo sapiens
tcccaaataaagtctcactctgaggtactggggttagcacttcaacacatcttttatgagcacrcggtcagcaggaatggggccacagagccaggggggccagcatgaggtggacactctgcctgtaacagcacctgtgtcaccaggtgagggacttgtggggagatctgggtttggggtatttccatagccctctatgtgggattgaaaaccatcagttgtccataacaaagaatggggcaaataattgataaggctatgggagactaaatcccatcctccagtcactcctgaagcagtcactgccttctctgtggatggttcctcctctctgataatgcacgtcaccactgggagcaacttgaagagcctctctgtacttttacattctaaattatgtacatgacccatgcctgggacagccatggccagtacccagccacttagcacccagaggtgccgcaactccagcccacacctctaagcagggcccccagcagaagttgtgcagactgcaaccctgtgtgcagcttgaagacctggggtt

SEQ ID NO: 663361 - DNA, 547 bp, Homo sapiens
tcccaaataaagtctcactctgaggtactggggttagcacttcaacacatcttttatgagcacgcrgtcagcaggaatggggccacagagccaggggggccagcatgaggtggacactctgcctgtaacagcacctgtgtcaccaggtgagggacttgtggggagatctgggtttggggtatttccatagccctctatgtgggattgaaaaccatcagttgtccataacaaagaatggggcaaataattgataaggctatgggagactaaatcccatcctccagtcactcctgaagcagtcactgccttctctgtggatggttcctcctctctgataatgcacgtcaccactgggagcaacttgaagagcctctctgtacttttacattctaaattatgtacatgacccatgcctgggacagccatggccagtacccagccacttagcacccagaggtgccgcaactccagcccacacctctaagcagggcccccagcagaagttgtgcagactgcaaccctgtgtgcagcttgaagacctggggtt

SEQ ID NO: 663362 - DNA, 547 bp, Homo sapiens
tcccaaataaagtctcactctgaggtactggggttagcacttcaacacatcttttatgagcacgcggtcagcaggaatggggccacagagccaggggggccagcatgaggtggacactctgcctgtaacagcacctgtgtcaccaggtgagggacttgtggggagatctgggtttggggtatttccatagccctctatgtgggattgaaaaccatcagttgtccataacaaagaatggggcaaataattgataaggctatgggagactaaatcccatcctccagtcactcctgaagcagtcactgccttctctgtggatggttcctccyctctgataatgcacgtcaccactgggagcaacttgaagagcctctctgtacttttacattctaaattatgtacatgacccatgcctgggacagccatggccagtacccagccacttagcacccagaggtgccgcaactccagcccacacctctaagcagggcccccagcagaagttgtgcagactgcaaccctgtgtgcagcttgaagacctggggtt

SEQ ID NO: 663363 - DNA, 555 bp, Homo sapiens
gataagtcaatttaccaagaagaaatagtaattctaaatgtgtatgtctcaaacaacagagctgtaaaatgtgtgaagcaaaaactgatagagctgaaataagaaagagacaattcatagttatagttgaagaattcaacatatatttctgaacaatcgatagaactagaaagaaaaccatcaagaatatacaaaaactcaacacaatcaaccaacagaatctaattggcatttatagaacacatcacccaacaaaagcaaaatatacatcttcttcacatgcttaaagaatataccaagatagaccatagcctgggmtataaaataaacctcaacaaatttaaaagaaatgaaaacatacagagtatgttcttcaaccataatggaattaaactggaagtaaattacagaaagataacagataaaatctctaaacatttggaaactaaacagcatacttctaaacaattcatggttcaaaaaggaagtcttaaaggaaatgaaaaattacattgaaatgaatggaagtgaaaatatgacctaaaaaatttgttg

SEQ ID NO: 663364 - DNA, 587 bp, Homo sapiens
aataaatataatatttgcagcaaagaaatgaattgtttgagagcagattggttatagcagatgtcagcattagtgaactggaagataaactaatagaaaacatcaacattgaagctcagagaggaaaaaaaaggaaacaaaacaagaacagagcatagagagcacggtacacttgtttaaagggtctgacaatgtgtaattggagtcactgaaagagagggaaagggaggaaaagaaaggatgagacgggaatagttgaagatacaatggctaagacatttcctcaaatagtggataaactattagagttaagtcartttatctaggtcttagatatagtgtcaatgcacacaaaccagttgcatttttttataacagcaacaaacataatacataatttgaaatgacatttaaaatagcatcaatcaaatacttaagagttaatttaatgaaatcagagagaacaattaaagacaacccaaaatatggaaggatacactatgcaattgcttcggatcgtaaggcttaatatgttggagatgttaattctcttcaaatatacctatagattcaacacaatcccaatc

SEQ ID NO: 663365 - DNA, 611 bp, Homo sapiens
ccaacaggttggccaccagtcacatgtggctgtttaaatttaattaatattgaataaaattttaaattaagtttctcaattatactagccatatttcaagtgctccatagtcacagaagctagtggctaccacattgggcgacacagattcagaacatgtccastattatagaaagttctttggacagtgctacagtagatagtatttttaaaggaaaggctggtcaggtacagttgttcatgcctgtaactctggcactttgagaggctgaagtgggaggattgcttgagcccaggagttcaagaccagtctggacaatatagtgagacctcatctctacaaaaaatttaaaaaattagccaggcatggtggcactcatctgtagtcccagctactcaggaggcagaggtgggaggttcgcttgagcctgggaagtagaggttgtagtgagctgagatcgcaccactgcactccagcctgggcgacagtgtgagacgcggtctccaaagaaaaaaaaagtaaaagaaaagaaagaaaaaaagaagggctgaggaaactaccctaagatattagtctaaaggtatgaaatgaaaatgcaacatgaagagaa

SEQ ID NO: 663366 - DNA, 611 bp, Homo sapiens
ccaacaggttggccaccagtcacatgtggctgtttaaatttaattaatattgaataaaattttaaattaagtttctcaattatactagccatatttcaagtgctccatagtcacagaagctagtggctaccacattgggcgacacagattcagaacatgtccagtattatagaaagttctttggacagtgctacagtagatagtatttttaaaggaaaggctggtcaggtacagttgttcatgcctgtaactctggcactttgagaggctgaagtgggaggattgcttgagcccaggagttcaagaccagtctggacaatatagtgagacctcatctctacaaaaaatttaaaaaattagccaggcatggtggcactcatctgtagtcccagctactcaggaggcwgaggtgggaggttcgcttgagcctgggaagtagaggttgtagtgagctgagatcgcaccactgcactccagcctgggcgacagtgtgagacgcggtctccaaagaaaaaaaaagtaaaagaaaagaaagaaaaaaagaagggctgaggaaactaccctaagatattagtctaaaggtatgaaatgaaaatgcaacatgaagagaa

SEQ ID NO: 663367 - DNA, 611 bp, Homo sapiens
ccaacaggttggccaccagtcacatgtggctgtttaaatttaattaatattgaataaaattttaaattaagtttctcaattatactagccatatttcaagtgctccatagtcacagaagctagtggctaccacattgggcgacacagattcagaacatgtccagtattatagaaagttctttggacagtgctacagtagatagtatttttaaaggaaaggctggtcaggtacagttgttcatgcctgtaactctggcactttgagaggctgaagtgggaggattgcttgagcccaggagttcaagaccagtctggacaatatagtgagacctcatctctacaaaaaatttaaaaaattagccaggcatggtggcactcatctgtagtcccagctactcaggaggcagaggtgggaggttcgcttgagcctgggaagtagaggttstagtgagctgagatcgcaccactgcactccagcctgggcgacagtgtgagacgcggtctccaaagaaaaaaaaagtaaaagaaaagaaagaaaaaaagaagggctgaggaaactaccctaagatattagtctaaaggtatgaaatgaaaatgcaacatgaagagaa

SEQ ID NO: 663368 - DNA, 494 bp, Homo sapiens
gccgccctctgctgctgctggagaggcaccggggtgaccttggccctttcttcttctggaagacccccccgcttccctcggctgccggaccgggactctgggcctctgctgggaactcacagtcgacaccaggatgcccagagccaggacccactcctcatcttatgggatcagaagagacccgcgcgggcytgagttaggcctgggctttcccgggttccctggatctccaccagcctgtgcctttgagtgtcagagtacgttttttggcaaaggacaactcctgacgctccctctccctcttccatacacaaagcatgcgttttccacaggtctgatgtgctgtggacatctaatagctattacaaaatggagaatcatgggtttttgcccttgggctttgagtttactagtgaaagcatagttcgaaatgaatacttaaaaagaaatccctccttccaccctaagatcaatggatttgaaaagtgcctggt

SEQ ID NO: 663369 - DNA, 595 bp, Homo sapiens
ccaggacccactcctcatcttatgggatcagaagagacccgcgcgggcctgagttaggcctgggctttcccgggttccctggatctccaccagcctgtgcctttgagtgtcagagtacgttttttggcaaaggacaactcctgacgctccctctccctcttccatacacaaagcatgcgttttccacaggtctgatgtgctgtggacatctaatagctattacaaaatggagaatcatgggtttttgcccttgggctttgagtttactagtgaaagcatagttcgaaatgaatacttaaaaagaaatccctccttccaccctaagatcaatggatttgaaaagtgcctggtttatatgatcaaaaccacccctctgtaaattacaagcaataaggaaaacaatttcactttattttgcagtaacgcattcccactaaggcaattaagaaagtcatgcacawtgaaaaacatgtgaaaccagctccagcctggttcaaacatcaccatgggatggagtttggtgtctcatcttccagctctttcccagttctctgaccaggcactaagaacataatttgtgatcctttgaaatatc

SEQ ID NO: 663370 - DNA, 614 bp, Homo sapiens
tgatagaattgcactggacactttgagctacaactgtggttgccatttgccagaggcaagttaaaattgacctacatttgtaytggaaacatttctcaatcctgggattactccacaccttgggtgttactgtcctactgatgctatgatgcctacagctttgtttttgtttttctgttttgttcaaaaatgttttagctattcagaccttttgtggttccatatgaattttaggattattttttctgttaatgtgaaagtgttgttggaattttggtagggattgcgttgaatatgtaggttgctttgagtgggatgaacattttaataattttaattccttcaatctatgaacatgagaaattgttccattcgtttgtgtcttcttcagtttctgtcatgggtattttgtagttttgcgtgttcagatctttcacctcattgcttacatttattcctaagtattttattattttttgtagctattgtgaatgggatttttaaaatttctttttcacatagctcattattagtgtatagaaatgttactgatttttgtatgttggtttttgtatcctgcagttttactgaattcatttatcagttcgaacagc

SEQ ID NO: 663371 - DNA, 614 bp, Homo sapiens
tgatagaattgcactggacactttgagctacaactgtggttgccatttgccagaggcaagttaaaattgacctacatttgtactggaaacatttctcaatcctgggattactccacaccttgggtgttactgtcctactgatgctatgatgcctacagctttgtttttgtttttctgttttgttcaaaaatgttttagctattcagaccttttgtggttccatatgaattttaggattattttttctgttaatgtgaaagtgttgttggaattttggtagggattgcgttgaatatgtaggttgctttgagtgggatgaacattttaataattttaattccttcaatctatgaacatgagawattgttccattcgtttgtgtcttcttcagtttctgtcatgggtattttgtagttttgcgtgttcagatctttcacctcattgcttacatttattcctaagtattttattattttttgtagctattgtgaatgggatttttaaaatttctttttcacatagctcattattagtgtatagaaatgttactgatttttgtatgttggtttttgtatcctgcagttttactgaattcatttatcagttcgaacagc

SEQ ID NO: 663372 - DNA, 591 bp, Homo sapiens
gataaccacagggctgggctactaagctttttcagttgaaaaataaataaataaataaataaacaccacacccagctaatttttgtatttttagtagagacagggtttcaccgtgttagccaggatggactccatctcctgacctcgtgatccgcctacctcggcctcccaaagtgctgggattacaggcgtgagccaccaygcccggtcacctttgtcctgttttctacaggttagaagcaaggcacaagtcatacctacattcaaggagaggggaccatgcaaaggataaactgcaggtgaagaacttgagagctattttagaagctgccttccacactttacaatctactttgcagctatactgagctcttagcaactccctgggcctgctgagcacctcttgcctttctgcctttgcgtatgctgttccctctgcctggaattccatgtcttctgcctttgcccacctcatcttaaggcctctgcttagatgcaatttctttgggctcttattagcagcatccaaatctgtgctggtttcttctcacgcttactctgcatcataatttttctgtttactcgttaatc

SEQ ID NO: 663373 - DNA, 595 bp, Homo sapiens
tcagcctggaaaagctgcagacattctactccaacccatgaaagcagagccacatggcctgcacccaacaaagccatggggatggagctgcccggggcttggagggcctaccccttgcaccagtgtgctcaggatgtggaacatggagtcaagggagattattttggagctttaaggtttaatgtctgccctgttgggttttggacttgcatggtacctgttgttcctttcttttggcagatttctcccttttgaaaagggactgtttacccagtgcttgtattatcattgtatcttggragtgaataatttatttttgatcacacagcctcataactctaaggaatttgccttgaatctcagatgagactttcgagttgatgtttggaacaagttaagactttgggagactactggaaacggatcattgtattctgcgatatgagaaagacatgatgagatttgggggaccaatgaggaataatatattttggatatttgtcccctccaaatcttattttgcaatgtaattcacaatgttggaggtgaggcctgaagagaggttttagatcatgggggcaggtccctcatgaat

SEQ ID NO: 663374 - DNA, 515 bp, Homo sapiens
tacctgtcaatatttgttttgctgtttgggagtgaaggctgttttcttttactccactatcttaggtgacatcactctacatttacttcttatatctatttttccttcctagattcacttcttgatggagtaattcctctaagagcccttatatataaggccttcgtgtgattaactttctaaagatgtgccatccaatatgtgaccattgtccatatgtggctattgaacatgtgaaatgtgccctggatttcaaaaatracatacatgcatgcacacacacacacacacacacacacacacaaacacacacaatgtaggttactcatatccccatatatgccagcattctgcattttgcttatacattttgcttttaatctttgtcaacaaaaaactcatgaatttcttagtattctgtgtgttgtacaaacagatgggctctgagcagagcctgagaggctcccataagagcagagacatgagctgtaatatgtagacattaaatcgcctaa

SEQ ID NO: 663375 - DNA, 571 bp, Homo sapiens
accagaagaaaggaacattcttacctttgaagtcacagggtcacagagaagaatctgaacaggacttactaaattcttccagtttgtcaccatttgctcataccatctttgtccagttatatttctccaaagctatccactcttcatcaaacttagcataaaaattgtaaaaccttacacatttcttcaggtcttccttttccttaggaagcctcccatgtcacatgaaacttaaataaaataaatctgtatgcttttctcttgttaatctgtctttgcgaggcctcagccatgaatttagtgatagatgaatttagtgatagattcttcctcccctacagtgcctagaaatgcattaggttaaatgtaataataattgaaaattgccaaagtgtccctgggtatttatccctttttwaaaaaatcagctttatggaggcataatttacattcaataaaatttaccaattttaagtgtataatttataaattttgacaagagtatgcggtcatgtaatcactaataataattattgattagaaaaatatcaaactcttcctatagtgtttg

SEQ ID NO: 663376 - DNA, 593 bp, Homo sapiens
tttatatttaaagcttttcaaactaatgcttgaaacctgttatctagaatttaagggctgttgaaaacagaggttattttttacttaatcattcttgttataatacttaagctagcaaaaggaggctttagaaaaatgagataagtgtttgatgactgttttcatggtgagttgaataactttgtacacacaggggcttttgaaagcaaccacagtaatacaagatgaagattatatgttacaagtctatggaaagccagtttatcagggccatcgaagcactcttaaaaaaggaccatatctcagatttaattctccatctcctaagtccagaccacagagaccaaaagtaatagaacgagttaaaggtaaggaatctcatttttaatgtttaatctcatttcttaatagtatcagtttaatatgtaaagtttctttttgctttttatttattgcttatacgtgccattcaarttatatgatgcttggggatggaaaaataattcctcttaggagaggtaggaagaaatagaccaacattttaaaaaagacacaagataggaataattgggaagaaatgtaggattaaatgg

SEQ ID NO: 663377 - DNA, 575 bp, Homo sapiens
ttatatagtcatttaaaaatataattatgaagtctatacaaaagcatgataagtgtttatggttcttgtaatcaaaatgaaaaatcaagaatgaaaactattttaaattttagttatgtataagtagatagtaaaagacaaagggaatagtgaaaatgaagtcatcttaagatagaattttgtgtgttttcctctttatttttcatattttataaaatatgctttcataattaaaaaattytgttatccattgggttcacaataaaaacttaaagggcatgctttgtttttatgtatatgtgtatacacacacacatatacatgtatatacacatactcataaaaatatttgagtaaaaatgataaacagaaagctgaatgttgtattctgttttaggtattacccagtgtagatattgacagcatttcaaatagtagtgctgatgtcctttcacctctgtctagccccaaagaagcatctcttcctcctgtgcaaacttggataaaggtatatttcagaattttatcatattattttgagtaatgtctgactgtagattttaactaattactcc

SEQ ID NO: 663378 - DNA, 575 bp, Homo sapiens
ttatatagtcatttaaaaatataattatgaagtctatacaaaagcatgataagtgtttatggttcttgtaatcaaaatgaaaaatcaagaatgaaaactattttaaattttagttatgtataagtagatagtaaaagacaaagggaatagtgaaaatgaagtcatcttaagatagaattttgtgtgttttcctctttatttttcatattttataaaatatgctttcataattaaaaaattttgttatccattgggttcacaataaaaacttaaagggcatgctttgtttttatgtatatgtgtatacacacacacatatacatgtatatacacatactcataaaaatatttgagtaaaaatgataaacagaaagctgaatgttgtattctgttttaggtattacccagtgtagatattgacagcatttcaaatagtagtgctgatgtcctttcacctctgtctagccccaaagaagcatctcytcctcctgtgcaaacttggataaaggtatatttcagaattttatcatattattttgagtaatgtctgactgtagattttaactaattactcc

SEQ ID NO: 663379 - DNA, 630 bp, Homo sapiens
ttagttgattttacttgttagattatgctaattccctaagtaatacttttctatttaaagtgtttttacttaactttcaagatttaacatggtatagtagaaagaatrggggactcaatgcaatttagttaacttttctgggtcttaacttcagaaagtaaaatcttcctcataatcccaccctccagaaataatatcactattaatggtttggggtaggcctttccagtcttttttgtctatgcatatatagacacataaatacatacgtatgtggatgtatgtttacctttaaaaataggatcttactatgcatattgttttgaaacctgaattttttttttttttttgagacaggttctcactgtcatgcaagctagagtgaggtggcatgatcatggttcactgcagcctcaacttcctgggctcaagtgatactcccacctcagccttctgagtaactgggactacaggcatgtgccaccacgcccggctaacttttatattttttgtagagatgaagtttcaccattttgcccaggttggtctcagacttctgagctcaagtgatccacccgtcttggcctcccaaagggctgggattataggcctgaaccacctcacccagcc

SEQ ID NO: 663380 - DNA, 575 bp, Homo sapiens
ttatgcctttgcatcctcatagtttagttcccacttacgagtgagaacatagaatgtttggttttccattcttgagttacttcacttagaataagtctccaggcctggtgtggtggtgcacgcctgtaatcccagcacttggggagggtgaggcaggtggatcacctaaggtcaggagtttgagaccagcctggccaacatggtgaaaccctgtctctactaaaataaaaattagctgggtgtggtgatgcacacctgtaatcctagctacctgggaggcccaggggagagaatcacttgaacccaggaggcggaggttccagtgagccgagatcacaccaccacactcaagcctgggcaatagagcaagactgtgtctccaagaaggaaaataataatgataataataataataataataataatagtctccaattccatctaggttgctgcaaatgccattatttcattcatttttatggctgagtagtattccatggtrtatatatatataccacagtttatccactaattgactgacagacatttgggctggttccatatttttgcaattg

SEQ ID NO: 663381 - DNA, 574 bp, Homo sapiens
ggaaaactaagaaaatgtgttaccagcatagctacctaaaataatcgctcaaktttctaaacgaagaaaatgataaaagtagtagtcctggaacatcaaggaggaaaacacagtaataggtacaatacacttctcttgagtttcctaaattatgtttgtcggttgaagcaaaaattataaaaccatctattgtggttctaaatgtatgtagacaattaaggtttctatacttcacttgaactggtaatatgctgacatcattacatggtgataaactaaatcagtgccatgagaaaaagttttagtactaaatgcatacattagaaaaggaaaaaggccaggtgtcgtggctcatgcctgtaatctcagcactttgggaggctgaggtgggagaattccttgggctctggagttcaagaccagcctgggtgatatggtttggctatgtccccacccaaatctcatcttgaattcccaagtgttgtgggagggacctggtgggaggtaattgaatcatgggggcaagtctttcccatgctgttctcatgatagtgaataagtctcccaagatctg

SEQ ID NO: 663382 - DNA, 574 bp, Homo sapiens
ggaaaactaagaaaatgtgttaccagcatagctacctaaaataatcgctcaagtttctaaacgaagaaaatgataaaagtagtagtcctggaacatcaaggaggaaaacacagtaataggtacaatacacttctcttgagtttcctaaattatgtttgtcggttgaagcaaaaattataaaaccatctattgtggttctaaatgtatgtagacaattaaggtttctatacttcacttgaactggtaatatgctgacatcattacatggtgataaactaaatcagtgccatgagaaaaagttttagtactaaatgcatacattagaaaaggaaaaaggccaggtgtcgtggctcatgcctgtaatctcagcactttgggaggctgaggtgggagaattccttgggctctggagttcaagaccagcctgggtgatatggtttggctatgtccccacccaaatctcatcttgaattcccaagtgttgtgggagggacctggtgggaggtaattgaatcatgggggcaagtctttcccatgctgttctcatkatagtgaataagtctcccaagatctg

SEQ ID NO: 663383 - DNA, 608 bp, Homo sapiens
gtttaaatgaaatgtaaactatagccctatccacttctcctcattactcattaaggttatattagctagtcagactccaacttgggcaattatctttttaaagtttctacatcttaaattgttgcccatagttgcccaagtctcccttaggctccaggctcagcaattgtaaatgcatttaatttcttataaattatttgcatgctgctgaaaacctccaagggcttttcattgcccatttaggtaaggactggtattccatgttctgtaaataagatacccagcttacctacctgctttttcgcctccttcctgacattaaccttccagttactatacacccttgtattagtccgttttcrtgctgctgataaagacatacctgagactgggcaatttacaaaagaaggaggtttagtggacttacagttccacgtggctggaaggaagcctcacaatcatggcgaaggcaaggaggagcaagtcatgtcttacatggatggcagcaggcaaagagagagagcttgtgcagggaaactcctgtttttaaaaccatcagatcttgcaagacttattcactatcacgagaacagcatgggaaagacctg

SEQ ID NO: 663384 - DNA, 346 bp, Homo sapiens
tctactttgagaagatgaccggtttggagtaatcagaatgaaccctcctcctttttaagggttttttttttttcctttttctaaaaagctatgtatcgctcctattgaaagaccagatccttaragaagtttgtggtataaaaaggaagtggggacagattcgcagcacagagtcgctggcatgtttcactcctgcttctctcagccagctgtttaagcctgcggcgccagcctcacggagggccgtgtaaaactctcgtggtatgtatgggagatggcagcagtgaagcagcagccaccagggagtggccatttggggttgggacagggagggtgttttgggtgg

SEQ ID NO: 663385 - DNA, 346 bp, Homo sapiens
tctactttgagaagatgaccggtttggagtaatcagaatgaaccctcctcctttttaagggttttttttttttcctttttctaaaaagctatgtatcgctcctattgaaagaccagatccttagagaagtttgtggtataaaaagraagtggggacagattcgcagcacagagtcgctggcatgtttcactcctgcttctctcagccagctgtttaagcctgcggcgccagcctcacggagggccgtgtaaaactctcgtggtatgtatgggagatggcagcagtgaagcagcagccaccagggagtggccatttggggttgggacagggagggtgttttgggtgg

SEQ ID NO: 663386 - DNA, 558 bp, Homo sapiens
gtgtatatgttgtactatcttctcaatttaagtcatttaaataaactacctcctaaaaatggaagattgcacatatttgaactcctcctctttcagaaacctcactcaaatgagagcaaagaaataaaaatgttaccaacaaagaaaaagagctagagtaggagactctactctattcatgaattattattcatgaattcatgaataaatacatgaattcaacaaattttagaacaaataatgtagttgggtggtaactgtcatagcagagcagagaaaggtaaaagataacttgctgccaaaacacttataagggaaaaccagaacaaactctctgaaaaattttctagaaactctattgaatatgccaggaactctactgaatatgtgtggaaggccaggataatatataaggctgaaaacagaaaaataggtatctcactacacagaataggycactacccctaattcctttatttaaacctttaatctcacaggagaatggaggactattatttattgcttattcattagaagtttacgaggttcagatacacc

SEQ ID NO: 663387 - DNA, 614 bp, Homo sapiens
caccacactgtttttcacatttgatgaagtaatttacactctcacaaacagtgtataagtgtctctttttctccacaaccttggcagcatctgttatttattgactttttaaaatagccattctgactggtgtgagatggtatctcattatgattttgatttgcatttctctaataatcagcgatattgagctttttaaaatatgcttgttggctgcatggacgtcttcttttgaaaaatatctattcatgtcctttgcccactttttaatgtgcttctttagtttttgtttatyttagattggtgcaaaagtaataacggtttgggccattaagagtaaattaaaagtaatggccataaccacaattatttttgcgccaacttagtaaatttgtttattaactttgtttataagttccttatggatgctggatattagaccttgtcagatgcatagtttgcaaattttttctcccattttataggttgtctgattactctgctgatagttacttttcctgtgcagagctctttagtttaattaaatcccgttcgtcaatttttactttttttgaaattgcttgcggcatcttcatcatgaaaactgcttgttc

SEQ ID NO: 663388 - DNA, 499 bp, Homo sapiens
ctatttgtaggtctctaagaacttgctttatgaatctgtgtgctcctgtgttgggtgcatatrtatttaggatagttaggtctttttgttgaattgaacccttgaccattatgtattgcccttctttgtctttttttctttttgtcggtttaaaatctgttttatctgaaattagattcaccacccctgccttttttgttattattttcattggtaaattttcctccatccctttattttgagcctgtgggtgtaattacctgtgagttgggtctcttgaacgcagcatacagttgggttttgcttttttaatccagtttgccactctgtgccttttaagtggggacatttagcccatttgcaagactagtattgaaatgtggggctttgatcctatcattgtgttgttaactggctatgatgctggcttgtttgtgtagttgctttatagtatcactagtctgcgtgtttaagtgtgtttttgtattggcaagcaagt

SEQ ID NO: 663389 - DNA, 499 bp, Homo sapiens
ctatttgtaggtctctaagaacttgctttatgaatctgtgtgctcctgtgttgggtgcatatatatttaggatagttaggtctttttgttgaattgaacccttgaccattatgtattgcccttctttgtctttttttctttttgtcggtttaaaatctgttttatctgaaattagrttcaccacccctgccttttttgttattattttcattggtaaattttcctccatccctttattttgagcctgtgggtgtaattacctgtgagttgggtctcttgaacgcagcatacagttgggttttgcttttttaatccagtttgccactctgtgccttttaagtggggacatttagcccatttgcaagactagtattgaaatgtggggctttgatcctatcattgtgttgttaactggctatgatgctggcttgtttgtgtagttgctttatagtatcactagtctgcgtgtttaagtgtgtttttgtattggcaagcaagt

SEQ ID NO: 663390 - DNA, 499 bp, Homo sapiens
ctatttgtaggtctctaagaacttgctttatgaatctgtgtgctcctgtgttgggtgcatatatatttaggatagttaggtctttttgttgaattgaacccttgaccattatgtattgcccttctttgtctttttttctttttgtcggtttaaaatctgttttatctgaaattagattcaccacycctgccttttttgttattattttcattggtaaattttcctccatccctttattttgagcctgtgggtgtaattacctgtgagttgggtctcttgaacgcagcatacagttgggttttgcttttttaatccagtttgccactctgtgccttttaagtggggacatttagcccatttgcaagactagtattgaaatgtggggctttgatcctatcattgtgttgttaactggctatgatgctggcttgtttgtgtagttgctttatagtatcactagtctgcgtgtttaagtgtgtttttgtattggcaagcaagt

SEQ ID NO: 663391 - DNA, 589 bp, Homo sapiens
ttgaaatgtggggctttgatcctatcattgtgttgttaactggctatgatgctggcttgtttgtgtagttgctttatagtatcactagtctgcgtgtttaagtgtgtttttgtattggcaagcaagtgtcttccttttctatatttaatactcctttcaaggtctcttttaagggagacctggtggtaacaaactccctyaacgtgtccttatctaaaaagagtcttatttctccttcactgagaaagcttagtttggcaggatatgaaattcttgtctcaagattttttttctttaagaatgttgagtataggctcccaatctctcctggcttgtaagatttcaacagagaagtccactgttgttagcctgatggggctccctttgtaggtgagcctgccctttcactttagttgcctttaacattctgtcttttacctcaactttagaaaatctgataattatgtatctttgggatgatcttgattagaatgttgcataggtctctgtattttctgaatttgtctgttcgcctctctagcaaggttgaggacattttcgtggacaaaattttgaaatgtgtttttca

SEQ ID NO: 663392 - DNA, 578 bp, Homo sapiens
agctgtgttgtgctggaggtctgctccagcccccatttacctctcacttgccaaagccctaaggcaagaatgactaaggaggccaaagggcaaggttgcctgggccaccccttccacagagagctccatccaagggaygtctgaaactggaaaccaccatcaggggtaactggagaccctggttgggagattgcacagtgaagaaaaaggggattcctgattcacatgaataagcaatctgaccacttatctgtagagctgctgggctgcactgagggactgctccagtccctagttgcctcgaactccctacaaccctaaggaaacaggggctaggcctgtgagagagcaaagatagtgactcgctcctccccctgggagcttcctctcagtgagaaccaatgctgttacaggagttcccagcgagtcttatcctgtgaggtgccatggaagcaggtcctgcagaccgttgttgctcagcccctttcccaggagtatgtatggaggtctaaccttccactttgctggagttgcagccacttttgctgggaagcccgggtttctaagtttcctggggc

SEQ ID NO: 663393 - DNA, 540 bp, Homo sapiens
acttcgtgtggatttagaattctgcaaaggtcttctagaaaagaaatgtccatgagtttgagaccttcagagtaccaatttatattcatcctcattaggtttctaatatttgatttagtctctatcctccagaagctattcattgcttgtcaaagctaggattctcagcctgtttcattttgttcagaatttgcaaattcctctagcaaataattacagataccagcttattgctcacatttctccgtcatcccaaatcttgttctctctggtcctcatgacgttgctgctcttaaaaaacgtgttttgtattatatcttgaggaatgctggtctgctacaaagaaatatgtcccatgctcttcagtcaaaaatttaaagtccagatgtaaaaataaaccattgttattacacacacataaaaatcacagagaagtatggcagactgagracagagttctgattggcagaataaatacttgaaaatagctttctgagagaaataaattgtgagtataaaattgtatatggacttaatttt

SEQ ID NO: 663394 - DNA, 555 bp, Homo sapiens
tgatattcccacgagcaatggatgaaggttttgatttttctacatccttgtcaacatttgctattttctttttctttgtaacattattataccaatttagtatgtgtggagtggtatctcacactgggtttgatttgcatttcactaataacttttatcacattttttttcatgtctttattggcaatttgtttatgttctttggagaaatgtcttttcatgtcctttgtcaatgtaaaaaaattgggttgtctttttattgttgagtggtgttttaaaaatatattcaggatactaaacccttaaaagatacataaattgcaaatattttctcccattctggggytgtattcttacttttttgacagtgacttttgacacacatttttcactttgataacttccaagttaataattttttattgtttattgtgctttaggtctcatatttaagaaacttttataatgcaagcttataaaggtttatacctatttttccttctaagagttttacagttgtagctcttacagttacatattagattcattagggct

SEQ ID NO: 663395 - DNA, 434 bp, Homo sapiens
agaactgagaaacaaatccacgcacccacagtgaactcatttttgacaaaggttgcaagaacattcagkggggaatggacaatctcttcaatacatggtgctgggaaaactggatatccatatgcagaagaatgaaaagagatgcctatctcttaccatttacaaaaatcaaatcaaaatggcttacatatttaaatctaaaaccctcaaaccatgaatgtctacaagagaacattggggaaaatctccaggacattatcctgggcaaacatttcttgagcaatatcccacaaacccaggtaactaaagcaaaagtgggcaagtgggatcacatgaagtttaaaatgcttctggacagtaaagatacaatcaacaaagtgaagagacaatcctcacaatggaagaaagtattttcaaactatctatgtgataaa

SEQ ID NO: 663396 - DNA, 434 bp, Homo sapiens
agaactgagaaacaaatccacgcacccacagtgaactcatttttgacaaaggttgcaagaacattcagtggggaatggacaatctcttcaatacatggtgctgggaaaactggatatccatatgcagaagaatgaaaagagatgcctatctcttaccatttacaaaaatcaaatcaaaatggcttacatatttaaatctaaaaccctcaaaccatgaatgtctacaagagaacattggggaaaatctccaggacattatyctgggcaaacatttcttgagcaatatcccacaaacccaggtaactaaagcaaaagtgggcaagtgggatcacatgaagtttaaaatgcttctggacagtaaagatacaatcaacaaagtgaagagacaatcctcacaatggaagaaagtattttcaaactatctatgtgataaa

SEQ ID NO: 663397 - DNA, 641 bp, Homo sapiens
ggatcacatgaagtttaaaatgcttctggacagtaaagatacaatcaacaaagtgaagagacaatcctcacaatggaagaaagtattttcaaactatctatgtgataaatgattaacaaacaaaatatattaataaaagtacctgaaataacactataggaaaaaaatctaataatccaatcaaaagatgggcaaaatatttgaatagacacttttcaaaaggagatatacaaatggcaaacaggcatatgtaaaggtgctcaacatcactgatcattagagaaatgcaaatcaaaactacaatgagatgttatctcactcaagttaaaatggcttatatctaaaagasaggcaaaaacatatgctggggaagatgtggagaaaagggaactcttgtccattgttggtgggaatgacagttagtgaaaccactatggggaacagtttggatcttcctcaaaaaactaaaaattgagctatcatatgatccagcaatcccactgttgagtatatatccaaaagaaagaaaatcagaatatcaaaaagaaatctacactcctatgtttgttgaagcactgtttgtaatagctaaggtttggaagcaacctaagtgtccatcaacagatgaatggataaataaa

SEQ ID NO: 663398 - DNA, 533 bp, Homo sapiens
tgatcaaagcaaggaaagctagatcatagatttataaatgactaagttacactactacctatgtctagtaaatacacaattgtttgtgtctattttagtttattttatttattttttgagatggagtcttgctctgctgcccaggctggagtgcagtggtagcatctctgctcactgcaacctccgcctcccgggttcaagcgattctcttgcctcagcctcccgagtaactgggattacaggcgcctgccaccacgctcggctaatttttgtatttttaatagagacggggcttcaccatgttggcaaggttggtctcgaactcctgacctcaggtgatccgyccgcctctgcctcccaaagtgctgggattacaggtgtgagccaccgtgcccagctgtttgtgtctattttaactcttctgtttttattctaattatacacttacttaaccagagttgatctacaaaacgagacagtgaaattttttcctgccttgactgttgtaagaggactagtttcagaccccacaa

SEQ ID NO: 663399 - DNA, 538 bp, Homo sapiens
ttataataatgtatctaaaataccatgaagatttctttctaaaatattttattaatcaatttgttttatttacaacatattaagcaaaatgtaaacaagttaaactttacctaaaacaagtgatggcaagcatgttataagaggagtcaatattgtgtttataaataggcataagcaaccttggaaaagaatttacagagttttaaattctgtcatgatcctgaaatgtattctcattataacagaggggaatgtgtttttcaagttactgttgggtctaaatgtaccattacgtgactgcagtctccttgaaatataaaggattttcagaatatttaactgttattaaatkattttggaagtatagtatttatggttgtttcatgagttaaatgtaggttaaaagcagtcttagtacaaataactttacaataaataaaattataattcacattatgtttataataaatattgctacatagcatatttaagctcccttatgccctaaaggtaggaactacaaacattaaaatatgta

SEQ ID NO: 663400 - DNA, 548 bp, Homo sapiens
ttgatgactctaattcttattttataaaaatatatcaaataaaacagttcccactgctatagtcaccttttatatgaatctctattcatacatcctatctggtcttttgaatcaactgcctttgctcctagcctaggccagtatctttacttatgcaataaaactcctcccctcttacatattcctgttaattgttctgtttttcaatattcaattgttatttccccccacactaatgaatgatcacattttgaaaaacaaaaatgtttctctcatatttaaaaacaaaagaaatttctccagtaatttaataatcctccagcaataatcctattgcactcaattgtttttattcccttatagcacaacaaatttgaaaaaaattgctcataaaccatacttcccattcacctcccttgtactcttaactctaatcaggcttatgttccacagctgttcttatcaagataaccagtgacttttacactgctaaatgtatggccacatttcagtctttatctttcctaacytagtgttaacatttgaca

SEQ ID NO: 663401 - DNA, 593 bp, Homo sapiens
agccctccaaactgttctaacatctgcctgttacccagttccaaagttgaacttccacatttttgggtatctgtttagcagtgccccactcgactggtcccaacttactgtattagtccattctcatgctgcttaaaaagccctaaccaagcatgggcaatttacaaaagaaagagatttaatggactcacagttccatattactggggagggctcacaatcatggcagatggtgaaaggcacgtctcayatggcagcagacaagagaagagaatttgtgcagggaaattcccctttataaaaccatcagatctcataagacttattcactatcatgagaacagcacaagaaagacctgtccccatgattcatttacctccttccaggtcccttccacaacatgtgggaattgtgggagctacatttcaagataagatttaagtgaggacacagcaaaaccttatcagtggttcttactgaacttaacaatatctaaatattggtgtgacccatgcatcatgatttgaatctcttctttttaaactactctgattttgtttgtaatctcatctatattatgattttaaatacc

SEQ ID NO: 663402 - DNA, 593 bp, Homo sapiens
agccctccaaactgttctaacatctgcctgttacccagttccaaagttgaacttccacatttttgggtatctgtttagcagtgccccactcgactggtcccaacttactgtattagtccattctcatgctgcttaaaaagccctaaccaagcatgggcaatttacaaaagaaagagatttaatggactcacagttccatattactggggagggctcacaatcatggcagatggtgaaaggcacgtctcacatggcagcagacaagagaagagaayttgtgcagggaaattcccctttataaaaccatcagatctcataagacttattcactatcatgagaacagcacaagaaagacctgtccccatgattcatttacctccttccaggtcccttccacaacatgtgggaattgtgggagctacatttcaagataagatttaagtgaggacacagcaaaaccttatcagtggttcttactgaacttaacaatatctaaatattggtgtgacccatgcatcatgatttgaatctcttctttttaaactactctgattttgtttgtaatctcatctatattatgattttaaatacc

SEQ ID NO: 663403 - DNA, 634 bp, Homo sapiens
attaaaccatacatatagtcaaaatacataagaaaatatggcatctcccaaaaataattcaagttttaatttattgtacattgtcgtggcagagaaccctaaataattaaagtatatttatattaatgtaaatttccagcttccatgttcagtaaattttgaccagtattctgatttaaagtgtctcttggtggtaacaagtaagagcatcttattaaccttttggaactcattaatgaggtaacataattaagttgtgttttaataattaagaatgtgttttcctggtggttgaacaaacaacccttttaaaaggtgaaatgtygtatccctattatacaaatatgttattttctttgccctactcttcctgaggtaagaaatgatgttgatcataaaatatatatatttaaaggagatggttgtgaggttgatttttgttccttccccttttcagctgtatgattctggtatgtgacttaacttcctctaaatctcagtttctttgtaaaacaaggataataagattctactacttgcttggaagattaaagtatagaataaacttaaagttcttaaaatactgcctgtttttaattttgtctttattatgtaggaaaagcaggacagtaaa

SEQ ID NO: 663404 - DNA, 451 bp, Homo sapiens
tatattttactgatagtatgtcttctttttgctaatcattgattacctaattaatttatactagaaaaattgacagtatacaattaaaatgttattgtaaattagtagaaaattaatgggttatttattggcatttgaggaaaaataaaatattttagggcaagttaagtcaaaacaatacttcaatcacaaataaaaattaatttcagaaagaaaaataaatactattgtattggaataaaatataagtaaatatataatcttgtagaaatagaccgtttaaagtatctcctsaaaaccaaaaatcatagaggaaaactctttagttgactgcattataaacattactttcatactgaaagtgaatcaacttttgattgtattaaaaggccatcaacaaattttaaatggatcttggaaatatacatggaaaaggctaactacactttta

SEQ ID NO: 663405 - DNA, 608 bp, Homo sapiens
cgtccactgggtagtttttcaacatataacccttccctttctctccgctctagtagttctcacagtgtctatttttcccatgtttacatccttaggtgcgcaatgtttagctctcatttataagtgagaacgtgcagcctttgattttctgtttctgtgttaattcacttagaattgtgacctctagctgcatccatgttgctgcaaaagacatgatttcattctttttatggctttgtagtattccactgtgtacatgtaccatatttttttatccaactgcccctcaaaattggggaagaaattgtcattcccggataaacaaaggtcatcactgatagaactcctctacaataaatgctaaaggagttctttacrtgggcatgaaaggaatttagaaattaactcaaactatgtgatggaatgaaaaatagtgataaagttaactatcaaggtaaatacaaaagctagtattgtatatatttttttacttttgacatttcaaaccctatgatttaagagacaagtacaaaaaccaatgatcgtgaatctgtattagtagacacacaatatagaaagataaaatttgtgatgacacaacataaggg

SEQ ID NO: 663406 - DNA, 655 bp, Homo sapiens
tgcagtattcaggtgtgacccaacaaatttccagctgtggwgattatggcaaaagactccttctgtttgagtaaaggagggggaaaagtaaagaggattctgtcttacaccttaggtaccagctcagccacagtggggtagaggaacaaatagcctcttggggtctctgaatctaggtctaggctcttagatatcatttctggaccttctctgggccagaggggagaccaagccctgaatgatgagttccaggcctagcagcattcactataagctaactgaagggttcttgggctttaattgaacatcagtggtggactggctgaactcccccatgggctgctgatggtggtggccatggggagaggctcctccacttgtgaaaattggagggaagagtgggaaagactgttttgtggtgtgagtgcaagcttagccacagtagaatacagaatcaggcaaattactaaggttttttttaactctagtgtctggctcccattcaatctgtggacctgcccagggcctggtaaaacttgctaccctaaagggaaggacacaaacctggctggcctcaccacctgctgatcatagagatgaaaggtcttgagtgagcataagtggtagccaggtagtgtatacagcagatcttggg

SEQ ID NO: 663407 - DNA, 655 bp, Homo sapiens
aataacgtatcaaaatcattgaatcatcaaagaaaggcaaatcaaaactacaataggatatcatcttactcctgttaaaattgctttcatccaaaagacaggcaataacaattggtgaagaagatgtggagaaaagggaacctttgtacactgttagtgggaatgtaaattagtacaattacaatggagaacaggttgaaggtttcataaaaaactaaagatagaactaccatatgatctagmaattccactgttggatatatatccaaaagaaaggaaataagtataccaaagagatatctgcattcccatgtgtgttacagcactgttcacaatagtcaagatttggaagcaacccaagtgtccattaatagatggatggataaataacacatggtacatatatacaacgtagtactattcagccataaaaagattgagagcctataacttgcaacaacatgaacagaactggaggttatcatgttaagtgaaaagccaggcatggaagacaaaatttgcatgttctcacttattagtgtggtctaaaattcaaaactattgaattcatggagatagatggtagaaggatgatagaaggatgggaagtgtagtggcagtggggggcaggtagggatggctaatgggtacagaa

SEQ ID NO: 663408 - DNA, 626 bp, Homo sapiens
tacaaacttacaaaaactatgcaataatagtaagagaacacccatatatattttaccaagattcactaatttttactttttcttagtttgctttatcattgtctcctctctctctctctctttctcccccagtctcttttattctctccctttcactttatgtctgttggtagtagttatcttttgtagtttaacagattacrtccaaaacttagcagtgctgtacatttcaatatcatttagttttatctagcttaggatttcatatgaaaagaaacatatagtatatattcactattgggtagtaaatcactccaaaacctggcaacttaaacaactttcaacatatcacaccatttgcaaggattaggaatcagggggcacctcagctgggtgtcttgcttaggatctctcttaagattctactcaatatgtctgcagagtgtagcctgaagatcctgcaagtctaagagatggtaaggctacactcactcttacaaactacccttgaaaacacataccatgtctctgccttctagtcctgaaaagcaagtctccaaaatccagcccatgaaatacctcaaggcagggatcatgggagcccttcgtggaggctaccttctaaa

SEQ ID NO: 663409 - DNA, 551 bp, Homo sapiens
attgacttctttttctggttatcattgaatattgacagagtagttgtacaaaaagaacagtttagtgtggtgagatggctgtgcctagttggtttcattttgtaggaaaggtagttattattacaaaaccaaaagatggtttttaagttcttggaaagttgagtgcatttactcccaccagacaaaactataaaatttgcatcattgtctcctaacacctaagttttcatgtatcccttttctctttcatatcattctgaacttcctccctatccccaaatacacagtgtcctaatgctaccctctagatatgtaattatcaccttgacctatgtatcaaaaactgggtagtttccctatgctcagtgacttcctcattcttctcttttatttttgaaaatattttatgtacccatattgaaagaccaacttgcctgctagaaaactgagttgaaatgagatagcagtgtttggtgatggcatgcattcattcattcrttaaaaattggtgtattattctaaattatgccactgtgaatggaacgagttat

SEQ ID NO: 663410 - DNA, 620 bp, Homo sapiens
agctttaaaaagtcctaatgcccaggccacacctcacatcaattacataagaatctttatatttgaaacccagccataaatactcttttaagctctccacgtgatttcaatgtaaagccaagtttgagaaccattgtaggagagagtgacatgttagcaattcagtagagacataagataaatgaagatgggagaaaattaaattcctagaacaagaggataaatttgtcatagatactataaggacataaatataagagcagtttctaatttgttttcagcaaacggaaattaagaagctgaaggatttccggcctggtagtttatatttttctgtgaaggagaatgctgagatatggtgtaaagagtagargacactggtaaggctgttgtggggagttagaaaataatatgagcacgcatcattgagatcctatagagaaacaggaggacttattttgagctaatacaaaattactggtacttttcccctgaatttattttaatcaggtagatgcagaataagagcttcagaaaccaaaggctaggtgggatgacaagaactaggattcaaagggaaaaagcgaatataggaagggtaaaattgtagaaaagtgact

SEQ ID NO: 663411 - DNA, 600 bp, Homo sapiens
aaggaaataaaaagaataaaagggaatgaagtgggcctacaggatctatgaaatagcctcaagaaggcaaatctaagagttattggtcttaaagaggagagaggtcagagtaaaacatgtattcaaagaaataataacagagaactttccaaacctagagaaagatatcaaaattcaggtaaaaaaggtcatagaacaccaggaagattcaatccaaatacaactacctcaaagcatttactaatcaaactctcattggtcagggatttaaaaagggcttcttgaagaagcaagakaaaagaaacaaataacacataaataagcttctatacatctggcagcaaacttcacagaggaaaccttattggccagaagagagtgggatgatatgcaaagtgctgaaggataaaaacttctttcatagaatattgtatccaacaaatgtacagcatggtgactatagtcaataataatatattgttcacttgaaatttgctaagagagtagatcttaagtattctcagcacacattcacacacctgcaaattgataactaaatgtggtgttggatgtattaattaatttgattgtggtaatcat

SEQ ID NO: 663412 - DNA, 600 bp, Homo sapiens
aaggaaataaaaagaataaaagggaatgaagtgggcctacaggatctatgaaatagcctcaagaaggcaaatctaagagttattggtcttaaagaggagagaggtcagagtaaaacatgtattcaaagaaataataacagagaactttccaaacctagagaaagatatcaaaattcaggtaaaaaaggtcatagaacaccaggaagattcaatccaaatacaactacctcaaagcatttactaatcaaactctcattggtcagggatttaaaaagggcttcttgaagaagcaagataaaagaaacaaataacacataaataagcttctatacatctggcagcaaacttcacagaggaaaccttatwggccagaagagagtgggatgatatgcaaagtgctgaaggataaaaacttctttcatagaatattgtatccaacaaatgtacagcatggtgactatagtcaataataatatattgttcacttgaaatttgctaagagagtagatcttaagtattctcagcacacattcacacacctgcaaattgataactaaatgtggtgttggatgtattaattaatttgattgtggtaatcat

SEQ ID NO: 663413 - DNA, 600 bp, Homo sapiens
gtattaattatagattacatccttcagccctctatcattatgctagcatattctcataaagaatggtacattaaccgtaaagtactgtgttcattgcatgtatgattgttcagctctctgcactgtgtgtgtgtgtgtgtgtgtgtaagaaagcgaaagaggtcactttataaatgtcagtggcaccagatgtacaaataaaaaatcaaaaggcatcaaaagagaggctggcacagtatcaagccaaaatggagctttcacatactttaccctccatttccatttcccagtacatgtcggttcggaatttcaagcctactgcttgaaatatagtcaacatcagagagctgaatttattctaagttaagaatcatctgcacagctactcctttcactcttcaaacctctctttttatgaacagtgacatgcaaaaagcatttacatattctcaaacttttcttagaagtttamctctatgctcctttcctctaattaaatattatattgagagttaaacagattgctaaatattttctttcaagttttctatacacgttcctatttcctgatggaagagtaaaaggataatataaaaacca

SEQ ID NO: 663414 - DNA, 418 bp, Homo sapiens
atagttcaaggaattttgactacagtatggcatagtgtgtgttgacttcaaaactatttaagtatatcaagtatacattgctgccatctatatttttacataaaatgtctattgcatagatcttgaggaaaacttttaatcaatcttgaatcttcttgtcaagagaagctattaaaatatgaaatgtgtgaatactttatatcacagattcattatctacattctgaatactatgagccattttacttycctccataatattagctttctatccactggtaaaggaagaccatgatttacctctataaaacagatggggttagaggaacctttattagactgtacttctattaactgtttttttaactctatactgtgtattatatagaaacaaacaacagtgcctccctcatcattg

SEQ ID NO: 663415 - DNA, 571 bp, Homo sapiens
atttggggttcaaggtcaggagttaactcagttaaaacttaattatgcttttatgcaaatgcatggaaagtaaagctgaccttttccgaagagatccctaggagggaaaagaagaaaacaaacttgaacgacttattctgaactatagtactaccaataattattttataaatacactttattcttaagagcagttttagttttacaacaaaattgagcagaacgtgcaaagagttctcayacactacacaggcaagggctcccgcactatcagtattctacacaagagaggtacatttgttacaatttgaacctacaggtcattatcacctagagcttatagtttacattagggttcactcttgttgcacagtttatgggttttgtataattatatgcattcaagattataatgtcagagaaaattgttttattgtactaaaagtcatctgtatatcttctattcatctctccctcccctccaacccctgataatcagtgatcttttttactgtctccatagttatgcctttttcagaatggcatatagccataatcatacagtatatag

SEQ ID NO: 663416 - DNA, 558 bp, Homo sapiens
gtgtatatgttgtactatcttctcaatttaagtcatttaaataaactacctcctaaaaatggaagattgcacatatttgaactcctcctctttcagaaacctcactcaaatgagagcaaagaaataaaaatgttaccaacaaagaaaaagagctagagtaggagactctactctattcatgaattattattcatgaattcatgaataaatacatgaattcaacaaattttagaacaaakaatgtagttgggtggtaactgtcatagcagagcagagaaaggtaaaagataacttgctgccaaaacacttataagggaaaaccagaacaaactctctgaaaaattttctagaaactctattgaatatgccaggaactctactgaatatgtgtggaaggccaggataatatataaggctgaaaacagaaaaataggtatctcactacacagaataggtcactacccctaattcctttatttaaacctttaatctcacaggagaatggaggactattatttattgcttattcattagaagtttacgaggttcagatacacc

SEQ ID NO: 663417 - DNA, 611 bp, Homo sapiens
gtttatctctcactctctctttacccacaaggcctagtctcacctgcaaaataacctactgccatccatctgcactccactcattcgcttggaaatcctgcaggttctatcaccagctatagaccaagtttcctggccctgttgtggctcaaatacgagaagagtgagttaatatgcaagagaaccatggatggtctcacactgaagatgtaacagcagctgcgcacacattctcaatgacctaggttggatccattggagggtaagggaggtcttgtacatcttagtcaccgctgcatgtccaggacctagaatggtgcctgcagctagaaacctttcaataacatttgttgaataacttaatgaatataggagggacttctctcctcttcccwtaggcgttgatttattttatttctactcctttctgtgcaatgtgtgaaccttcatgctaatgtcactattaattttgttcccataaacccttcaactaaagtagtgcagctcctttctctttcctttttggaatgtcatgtgttttatggcactggcaaatagctgagatgctaaaaccaagtcttagttgaagctgcatacataattataagcct

SEQ ID NO: 663418 - DNA, 438 bp, Homo sapiens
tcactggacagtcacactgcaacaagtgctatgggaatgcaggctctgcacttaccggctgcacagccaacaccagatcccacaaccaccctgaccgtggccacacccacctcctagggctatggcatgggctaaaggagagaagggaagggaaaagtgtgcactgtgctggtcctcgggatggtccagtttgtcagctgctaacagaatcctttctaagcagggtggacatcagacacctctttgtatcagtgactagtggggtgtcttcaataaatatttacacaaacaatgataaaaggagcaagaatattagacataaatgactataatttggaaacartttacatctgtaagttcaaattctttttctataattaaccagtttcaaaaatcagtaaaattataaagttatcaacaaataggtaacatgtaact

SEQ ID NO: 663419 - DNA, 535 bp, Homo sapiens
taacagccactgacaggtgcaggagcaagtgggcgagcacctgctctgtgcagctgaacccaggcatgtctcggacgtaggaggcatgcacaaacagatgcctgctgccggtaggggcaaagcgtgaacatggaagcctgccagccaggcaaaggtgtacctggaagacctgcggacactgcttagaatgacagcacatgtccagttccacacagcaacctgctctcagctctctatcccagaccacaactcttctcaggctgttcctcggccaaaagaacaccccaaccttccctcacctagctgggcagaggaccaaagccgctcgtactcacattccgtgcaatgaacaccccaaccttccctcgcctagctgggcagaggaccaaagctgctcatactcacattccgtgcaatrcccagaacacccttggttagtcgccacttctggctcgctaacctggcttcgggagccaaggaccatgcagtggcagaggctaatctcaggggcgcctcgcaggatttgtcaccagac

SEQ ID NO: 663420 - DNA, 606 bp, Homo sapiens
caggctgttttatttgatggagaaaatgccttccctttggatgtattcagaaagttcttttacagagaagaaagttgcatatgcagtttgtgtcacattaacatccccttagaggccaatgtggtgtctaatggagttgctagatacattttaaaagtcagcaacattttaaattactgtcgttgctctgttcagtggtcattagatgctcttttttttctgtttggatacaccggatgggtggtggcacacttaggcacccaagttgatctaatgtattcaatttatttccaggtgtcttgcttctccataaaaaaygatgtgcacatcctatgtgaatagaatgcacacccattgattgtgtcaaagatactatgacttctggatagctgcagaacagtaacaggcaatctcagtgtaattagctacctgagcacacctaggagagagagaaaggtatcttactgatgttaccttctgcatgtctcttggtgaaacaataataaagcagaaatatatttttactcatttgcaagactctgcctggtattaacacataagcatatatttttattccctaaatgtaactagaaatgtacagaacaa

SEQ ID NO: 663421 - DNA, 498 bp, Homo sapiens
tactatgaatcttaaattgatgcaataattttgagactgccatttaatagttacaagtttaagtaactttttttttttttctttagatggagccttgctctgttgctcaggctggcgtgcagtggcacgctctaggctcactgcaacctctgcctcgagactcaaaggatcctcccacctcagcctctcaagtagctgggactacagatgcaccactacacccggctaattttttgtatttttagtagagatgggttttcgccatgttgcccaggctggtctcaaactcytgagttcaagcaatctgcctgcctcaacctcccagagtgctgggattacagacatgagccaccacacccagcccgtaatatctttacacagaaattagtcttttatgagaaattctcggttgaatgcaattacaaattaagggaaacttctataaacgtctacattaaatatggagcaaaatttaagcctgtttcctataattttctg

SEQ ID NO: 663422 - DNA, 558 bp, Homo sapiens
acccactatgtaccaggtactctaataggggcttgggacatagcaatgaataagactgacagggtaactacacttaaagagttgacaatctgatgagagatagttattaaacaagtacttataagcataacaaatatcaagacaaggcaagtgcaggatgctgtgacctgattttttttaagaaagcacattaagctttaatatagaaatatttaggttacacttgtgctcaagtaataaaacatttgttcttttttgatctcatacattctctcctcargtatggcccatctcctgtacgcttggagcgacctttggctacgtggctggccttgttatttcaccactctgggtatgctggaatagaaagcaacttacatacaagaacaattaactggagaaaagggagatatttctttgtgcagattctgtaagggctgtgcagaaatgtgtatggtcaaagccaagcagttccatctacagctctgttttttatgtagttacaacatgatgtgattgtagctttttaaactatgaaacccctgagagattgtacct

SEQ ID NO: 663423 - DNA, 611 bp, Homo sapiens
tacttataagcataacaaatatcaagacaaggcaagtgcaggatgctgtgacctgattttttttaagaaagcacattaagctttaatatagaaatatttaggttacacttgtgctcaagtaataaaacatttgttcttttttgatctcatacattctctcctcaggtatggcccatctcctgtacgcttggagcgacctttggctacgtggctggccttgttatttcaccactctgggtatgctggaatagaaagcaacttacatacaagaacaattaactggagaaaagggagatatttctttgtgcagattctgtaagggctgtgcagaaatgtgtatggtcaaagccaagcagttccatctacagctctgttttttatgtagttacaacatgatgtrattgtagctttttaaactatgaaacccctgagagattgtaccttctagttgaaataaagtatttataatagattgtggcttcagatgctgcttactgcttcttaaatctttaaggaacattcttaataaactttacagaattctgaggacaggttttgttttctttcaagttttgaactgcttcattacctataaaaggtctgggtatagc

SEQ ID NO: 663424 - DNA, 579 bp, Homo sapiens
gcgtctgtagtcccagcttgagcctaggaggcagaggtagtgagcgaagaactgccctccagcctgggcgacagagcgagaccttgtctcaaaaaaaaaaaaaaaaagcctcaatctcagtcctttatttggtgttacttaggcttgggttgttgaagcatggattcagtaattaaataaatagatgaaagttacataacagttcaacggtgattttagagtgaaacagtggtatatactgccaaaaatgtatcttcctaattgtcagtctyaaaaaaggtagtttccaaactacctcttttttaaacatctatcagtttttggtatctcatttccctttccacatcctcccctttgtccacccaaatttaatggtttaaatacttggatgtgacactctagagtacacctaaagtttttggtcttagtggatcgattgtggagcaaagagccctttgaactttaccaccatacaaataaaatctgccccttgatctctatccttaattacctcgagtcagttttccttgtagacagactgaaaatggaaatacataaggagttaaaaataattggact

SEQ ID NO: 663425 - DNA, 626 bp, Homo sapiens
tacaaatgacaggctttcagctagaaggtattttataaattattacaatttctttaaaaagtaattctattagcttagaaatcactaaaatggtatccttaaaatagatcacyttctttctgcttttactcagttttatgattaatttagtacctctaaaacaaagtagttttacatattgaaacattcctcactggggaaaaaaaggcctatttgatattttagtacccaacatttctttttaaggcaaattcctttcctgcatataagatactaagaattaattttgtttctactaaaaacaaatgagaagtcaaatatacatttcctctagagtaatttaacttgaaatcagccttcacatttagaaaaaagagcataaaactttttcattatcaatgctacacaaatatttactttcactatttaatgatacatttaattaatatgagagatacatatacatttgtgtatatatatacacagatgcagaaatagtggtcaacttttttgtttctcatgtgagacatttactgaacacctgctatgtgctaggcactgttacgtgagatagaggtacagcagggaacaaaacagacacacatttctaccctcatggtacttac

SEQ ID NO: 663426 - DNA, 618 bp, Homo sapiens
aaacaatctgataaaatgaaattcaagacaaaaaaatgccatgaggggcagtatgtactgctaaaaggaataataaaacaagaagatacaaccataacaaacaagcctgcatgtttgtgacctagaaattacagtaacaaaatatgtcaagtaacaaatgagagaatgcagagaaaaatatatgaattaactatcatggccaggaatgttaatatgaattaactatcatgcccatcattgatggtgataatcttagcactttgggaggctamggtgggtggatcacttgagcccaggagttcaagaccaacctggacaacatagtgaaactgcttctacaaaaaataaaaaaatgtggaggtgggtgcctgcctgtagtcccagctacccaggaggctaaggcgggaggatcacctgagcctgggaggtcaaagctgcagtgggctgtgatcatgccactgcactccagtctgggtgacagagtgagaccctgtcttggaaaaaaaaaaaaaaaaattgcacttgcagattttaatactcccttctcagaaactaatcatgtagaaaaaaataaaagtactgaagatctaaacaatataattaacaattctgggctgg

SEQ ID NO: 663427 - DNA, 448 bp, Homo sapiens
tttgcaacctctgcctgttacccagttccaaagttgcttacacattttctggtgtccttatagcagcaccccactctctgtggtaccaatttactgtattgattcattctcacactgctataaattacygcccgagactgggtacttcctaatagagttttaattgactcatggttctgcatggctggagagctctcaggaaacttacaatcatggcagaaggagaagcaaacatatccttcttcacatgatggcaaggaggagaagtgcaaagcaaagaggaaaaaaccccttataaaaccatcagatcctgtgacaactgtctcactatcataagaacagcagcatgggggtaaccgccctcatgattcaattacctcccatcaggtccctctcatgacacatggggattatgggaactacaattcaagataagatttggatgggg

SEQ ID NO: 663428 - DNA, 461 bp, Homo sapiens
caaaactctgtaaaaataagcatcttattagaaattagggtaaaagaaaacaagatacaaacaaaaagcacctttgtcatgtctaagaaaaccaaattttctatgctgagagcccagtgattttgctgagcaaatttaggtttttgttgtaattagtttctatttttatttattttgatatttagagttctttttatctacattaagaagaactcattgaaatcaaattgttaatcatratgttaaaaaatatgtgaaaaacaattttgtattcaaatatggttctgcaccaaactcatgaggcaactagcttctaagaagcagggtttatgccaggctattgctttagagaccatgaattcaattgtgaaagtatcattcaaatttaagtatttaatattcttagtaatcttcatttagttcagtattaattctattgaggaaaagtccaaaaatgtatt

SEQ ID NO: 663429 - DNA, 535 bp, Homo sapiens
cccctagtctctgaagacatctccacagggcagctcatagtcttctacctttcacaaagacctgctctgttggtgttgtgtggtgtatgtgtatgtttgtgtgtgagcatgtttgcatgtctttgattagaatcttcctctgctaacccatctacatggaccccattgggtgcaagagaggacaccctcccctggacagcaccctcagtgactcacccagctgggacagaaccagttttacaccaagcatagaggcaatgaacgcctgtgaatgaatttaaactctctcctgagtcacatggactgcttttcaagtccacatggccttcmccattcagtcacaggactgtggaaggttcaaattggccaggatctcagagatcatctcatctgacccatgccatcaggagtaaaagggtcccaagagaggcctttatggggcctgagcctcttggtacctgccatataatgcatttcgttcttgtggggacaggagagcattaatgaattctgaacctatccctacccaaagtcc

SEQ ID NO: 663430 - DNA, 544 bp, Homo sapiens
gaaggagaaaatattataagctaaaaaagtgcagtttcaaaaggatgtgaggaaatagcttacatcataagaaaacttccagttacctgattctcacctcacacctgttccaccagtacctccccccactcaatcctctccactgggtttgcccctctgatgggatttgacaggcccatctttaattggttattgccatygctatcacctgcagcctcaaagacaaggtggcaggcactgcaaacccagtgagacccgcatggtctccatatctcctccccagaggagcccgccctccttaaggcagtggtgaaagccatgaaaaggcctcggtgctgtggaaagcaggggaggctgctttcatctaggtttggggtaagggtggaggcaacagaagaaactccctctccccggaccaggatgggaggaagatcctgccttgtaccgacactgtgatcacaatctacagagggaaccgccatatgcagggctgaggctgtgtcccaagtcaccatccagggatgagagtgtgtcccaacagacg

SEQ ID NO: 663431 - DNA, 534 bp, Homo sapiens
gctggaccagagctgggaactgtccaggtgctctgccccaagccaggcccatcccttactctgctgcccattttccactcaatgacctttaacctttgggcctgcctggggaagatacactccttgcacatctagggacctctaaaaccaaaggaaagggggcaggatgagggtgcacactggctttgaagcactggtgcattcagcaagttgttatgaaccacctagcattagccaaacaccctgccttgatttctcagaagtctacggatccatttgtgtcatgcccactgataccttctagaaaccttggcacgtagctcaaggctgggtttctacagtacaagcaggactgcaygcaatgctgaactttaaacaaatggtgggcctggcaagcagacgttgttagatgtgcaatgcttttcactgtgctccctgattaaataagcatttaggttagggaggtgtaaatgtccttttggtacaatcactagtcagacagttctacccacagaactatggtgttgttgagat

SEQ ID NO: 663432 - DNA, 551 bp, Homo sapiens
acaggttctggaactccctaaagccgactttcaaaatttccgtgttatttaaaagcaagattagactaaaatactattcaatttctctgcatagtttcacgacacaaaccctacattttccttcactgcaaatggaaaacagtttacagcactgtttctcaaaatgtggtctaaaacccactggcattggaatcataggggagcaatttataaatccagattcccaggccccacctcaggcctaatgaatataaagttgggggtggggaccaggggatccgctgctttaaaggttttctgtgtggttttaacgcatggtaaagtttgagaaccacatgctgaaagggctgtggccctgatctgtagaatacggccttgatgattatacgctggttgaattcatttctaaattgaaaacrggagtttttgcgcaaaatgtcgtaatttgccttttaataggatttttatgcatttatatcaactccaggaaagcacggaaggacccaaggattagaggcaatattctagaaaaacttctatccgttctgccc

SEQ ID NO: 663433 - DNA, 568 bp, Homo sapiens
cttataggataaatttggagattctctcatttctcttccctgttctcaggttccttttttttttctttttttttaaatagtaaactttccttactttaaaatgcaaccattacaaatgaactagaattcaattgtgtttggaatatctgattttttttcacagctggctgggtaaccagcargcaccttataccgcccatttgcagaaagtatggccatcattttatcagacagtgaaacttggcagagtagaaatcaaaatggataacagatgaaacacaggcagacacaagcttagctatgaacgaagagctaccaggctactctgcacggacaaagtttcaagcatgcattgcacagacaggtattaatgtttgtagcaggcagcccggggccaggtgctggggagccagaggtttccaagaaacacctgcaagaagtctcaagaggacactcccatactctgaattgttgaatgagatatggggagaacttggagatcttggaaagaaaagcacaaaaataaataaaccttctggatgccatgactcgcggggagtggctttgg

SEQ ID NO: 663434 - DNA, 619 bp, Homo sapiens
ctgaaagaatgactgattaaatgaatgaatgttatatatgttcacttcttcccatacagttagtttccactgatgtaaaaagaaatgtgactgtctgataaaatctgtgttgacatgtataagagctgaggccacggacagaagtgttctagaagacctctgtgcctccaatcaggtgactgagggtgtgtctcaatatcatctgatgtcttatagttatgggtcagagaaaacacttcaaacacttgtgcatacagcatcatgatcacatacttatattagwaatcttgagaggtttgctttgtggtgacatctgatgttttcttaagtgtgctattgatttgataacctctctgggagcacatgaataggagtgagtatatgttctatttaaataggaaacaataaaaattcaaatcaattaaaaatctatggaagaattgcataaccacaattgtctcagggcaagaaagttaaattctggcagtggctttccttagcggccattgtaaggcttgctgaatgagaatgcaacctttcagtaacactgaagttcttaaatcccaccataaaagtatgatactatctaatatatattccaaagacaaaaaataacaaa

SEQ ID NO: 663435 - DNA, 619 bp, Homo sapiens
ctgaaagaatgactgattaaatgaatgaatgttatatatgttcacttcttcccatacagttagtttccactgatgtaaaaagaaatgtgactgtctgataaaatctgtgttgacatgtataagagctgaggccacggacagaagtgttctagaagacctctgtgcctccaatcaggtgactgagggtgtgtctcaatatcatctgatgtcttatagttatgggtcagagaaaacacttcaaacacttgtgcatacagcatcatgatcacatacttatattagaaatcttgagaggtttgctttgtggtgacatctgatgttttcttaagtgtgctattgatttgataacctctctgggagcacatgaataggagtgagtatatgttctayttaaataggaaacaataaaaattcaaatcaattaaaaatctatggaagaattgcataaccacaattgtctcagggcaagaaagttaaattctggcagtggctttccttagcggccattgtaaggcttgctgaatgagaatgcaacctttcagtaacactgaagttcttaaatcccaccataaaagtatgatactatctaatatatattccaaagacaaaaaataacaaa

SEQ ID NO: 663436 - DNA, 579 bp, Homo sapiens
aacatctgtcttagtatcatcagggatttaaaggagggccaacatcaacaatattctcaatggctcaattctgaaaaaggagttaaaatcgtccatttctcacttttttggtatttactgtcattccaatttcattggaaatgccaaggtctatgtactttaacccggtcacacttaatggtaaatattatcacctcaacaacctcaaaagcacattgtaaaacaggatgtttcagaaaatactagtaggaagcaaaaaatagtcaataattctttccagatttcctaggagttctagtaaatatttttcttagtgaagggaattattaaaaagcaattttttgtgtktgcggccctcagaatgaacaaaaaaacttgtttttcattgtgtcatgctgagttgaaatgatctatattacttcatgtgccaatagcaaggtaatacaacaatgaaaacttccctgaaatcatgtgacaaacttagcctgatattttttaaaggctctaaaaatattgttttgagcaattaatatactcgggccccaaggtcaaaccataacaaccttatgaacaaattac

SEQ ID NO: 663437 - DNA, 565 bp, Homo sapiens
tttgttgagttaatcaataaaagatcaggtatgttaaggttatatatgaactcaattgcaaattattataatctatgaataacttagtcaaattccaagtggatcacatgaattttcagaacttttccttccatcattgttggaattaatataagctctttgcttccatggatgattcctttggaagatttattatttattttctatgaagcagtttgagcttcttattctatgtaataaactattgctaaatgcaaaacaaatcttcgtcaycaccactgtacaccatttttgagcaacttctataagcacagagagtatgggataataatatgggaaaaattcctttgtccaacaacaatcttggtttccctaattccagtgggttatgtgtattgcaaatgcaacctatgccaattaaaagatcagctttgaaaggagtcaaagtggggaaccagtggattctgattctgaaaaggcactgcaatatctagcagtcttctgtcctgtaaagctatatagaaagctttctctttagttattcaaaagtccattgtgcaatcag

SEQ ID NO: 663438 - DNA, 669 bp, Homo sapiens
agcttgtatattaatttcctattgctactataactgtaacaaattatcacagatttagtggcttaaacaacacaaatttattaccttacagttatggaattcaaaaggtcctaaaatcaaggggttagtagcatgggttctttaggaggctctaagagaaaargtagctgcctacattccttggcttgtgccccattctccatcttcaaagccagcatcataacatctcccaatctctctctctctctctgattaggatctctgcttccatggtcacatcctcttacctgactctgatcttcctgcctgcctcatctaaggactcttgtgattacattgggcccgcctggataatctcaacattttaatattcttagcttaatcacttctgcaaaatctcttttgccatataatgtaaaatattaacgggtttcagggattaggacatggatatcatttggtgacagcaggggtgggggtggggagacattattctgtttaccacagtgttgaagttaataaatttacagataaaaatttatttcaagtattagtgacttaaaaagtgactcaaactattaaaatgatataggattcttagcactcccataacagttagtgatttgctaagatctcttgaaaaacaattgccagatttttcaagcaatc

SEQ ID NO: 663439 - DNA, 650 bp, Homo sapiens
taggccagatagctaccgatatgggtggtctactagcagtgggaaacatatttgcactaggtagttttccaaattctaatttaacaagcagtgatagcatgcctagtgctccaggcatggactagatgctggaaaaataaagatgaataaactacagtaacaagtgggaggcagaaaggcaaagaagcagccacaatgcaggtgatattagtttctttcaaatgcttggtttctagtacagattaagaagcacggagttggagagatgaaaagatattttaaagagagctacaaattgccaggctctaaaaatgctttgaactggctttacctaaagccagagggattactaccaaaggaactatttaacaaacggcattcaaagaaagaaaccaaacataaaggctgtacgtgtgtgcccgtatgtgtgtgtatgttattcaacatattgaaagattaatcaggagttcagagctttatactgtagaaagaaaaaacctggacattgtataattctgaaatgaaagatgcaaatggcaaaggaagaagtagcaaagagaagttaataagtatctcaaaaytgcaaatggcacagattaaaagacaaagttatctatacaaactataatgaggctagtgtatatgtatca

SEQ ID NO: 663440 - DNA, 556 bp, Homo sapiens
gagacccaaaaatccatgcaaacctaacaaacccaaaagttggattcttgaaaacataaacaaaattgatagcccactagctagattaccacagaaaaagagagagaagatccaaataagcacaatcagtagcaaaaaaagttacattacaactgatcccacagaaatataacaaatcctcagagactattatgaacacttctatgcacacaaacaagaacatctagaggaaatggatacatttctggaaacacacaacctcccaagactgcatcaggaagaaactgaaaccctgaatacaccaatatcaagttctgaagttgaagttagtaattaaaamatgtaccaaccaaagccccagaccagactgattcacacccaaatcctaccagacatacaaagaacagctggtaccaattctactgaaactattccaaaacatcgaggaggggggactcctccctaactcattctataaagacaccatcaccctgatatcaaaacctggcaaagacacaacgaaaaaagaaaactacagaccaaatattactgataa

SEQ ID NO: 663441 - DNA, 460 bp, Homo sapiens
tatctatacaaactataatgaggctagtgtatatgtatcaggtacactcctcacctaaaattaggggaaattgatatctcaatttattcaaaaatacttgttgaaaatgcatattggggccagcacctatctcctctaggtgctggacttaaaagggcaagcaagtcacacatgaaaacaatacagcccagtggggtatgcagatgaatacacacacacacacacacacacacaaacacacacacattatcaaatggtgtkaaaggcaccatgatggaggaagctcagtgagttatggtgcacagaggagtggtggctaaccaagatatggtaaagagggtcagggaaggtttcctggaataaatagtgtctaaactaagtcttggcagatgaataaactaagtcacacaaatcatgtgtgcatatgggggtgaaggcaggaaagagagaaaggggaaaa

SEQ ID NO: 663442 - DNA, 556 bp, Homo sapiens
gagacccaaaaatccatgcaaacctaacaaacccaaaagttggattcttgaaaacataaacaaaattgatagcccactagctagattaccacagaaaaagagagagaagatccaaataagcacaatcagtagcaaaaaaagttacattacaactgatcccacagaaatataacaaatcctcagagactattatgaacacttctatgcacacaaacaagaacatctagaggaaatggatacatttctggaaacacacaacctcccaagactgcatcaggaagaaactgaaaccctgaatacaccaatatcaagttctgaagttgaagttagtaattaaaacatgtaccaaccaaagccccagaccagactgattcacacccaaatcctaccagacatacaaagaacagctggtaccaattctactgaaactattccaaaacatcraggaggggggactcctccctaactcattctataaagacaccatcaccctgatatcaaaacctggcaaagacacaacgaaaaaagaaaactacagaccaaatattactgataa

SEQ ID NO: 663443 - DNA, 544 bp, Homo sapiens
aataaaactgcacacctacagccatctgatattcaacaaggttgatatatcttaaatagaaaataaattattctactaaaaaggcaaaaataagcaatggaaaaaggactccctattcattaagaggtgctgggatagctggctagccatatgaagaagtaatgagccaccacctttaataattaggtatttgctaccagctgaatatttgccaccactcccctctcctaatttttaggtggaaatcttaaccccatcgtgacgatattaggaggtggggcctttgggatatattaggtcatgaaaatggaggycacatgaatgggcttagtccccttataaaagacacatgagagctggctttctccgtctgctcttgatcttggacttacagcttccagagctgtgagaaataaatttcagttgtttgtaagccacccagtctatggtattttattatagccacccaaattgagaagacagtattggttaaaaacaaagataactttttgcacaatttatcttttgcagcatttgctataat

SEQ ID NO: 663444 - DNA, 611 bp, Homo sapiens
agaaatcacatacgtaagtgtgtgtatgcacttacacayacatggcactttttctgagaatcagagatttatcacaatatattttatataacaaagcataattaaatatcgttttcaagaaacatgaattgcaggcttctggaaataattctgaaaatttgcacggtgcaaacacattaaagcacatcaattacaaaactgagaaaaatgctatatggtgtcttagagcctcacagctcaggttgaaaagaaaatttctgttatattcttataccttctgtgccattcaaaatttgttgctaagtttccaatattatggatcaatttatccttaggatgtggaaataactggttatacaactcaaagtagcttcacaaagtagtttgacaaggagtttacactagctacttgtttcctccccaaacccaaccctagagaagccacagaaagaaaaaggaggctgacagatctcagaaactcacatataaactgggaaacccttcaagagagagtggttgggttccagtgtggacagcaaactgctgccctgtgtaggaaaagtgggcagccacagacaaaggacagacggcatggggcttcttagtattct

SEQ ID NO: 663445 - DNA, 573 bp, Homo sapiens
aaaacagcaataccagcttctcagagtattctatcctccttcagggtggagaaaggttcccagagaggcaagggcacttggtgccacggttgagtgatggggtgagggtggtaggtagtgaggtggtgggcaggagggaaagtcaagctcagaccataatcccagagctttccattcagaagaacgttctctttaccactccctaggcttatgataagaaagtgatagaaaggagggtgaggatgtgaacaaacaactatacaaccttcatcctgcttactcatccactggctttgggcttggctatggcacaggctttggctaatgggatgtgagggaacacgatgttcacttaccacatttgagcagaagcctaaacgtgactgtgtggcttagctagggccgttttgtgccatccttgtatcaggacagcatgtcctagacaggggctgctcctttagcctgggttccaaaacgaaaacatgcatggagctaagccaagctgagcagagcccaaaagacttcagcagaaccaaaccctgatgtrttgtacagaagaaagactacttctca

SEQ ID NO: 663446 - DNA, 630 bp, Homo sapiens
taaatgaaaagatttcttatgttcatgaattggaaggcaatattgttaagatggcagtactcctcaaactacagattcaatgcagttcctatcaaggtacaagctaagtgtctttcagacactgacaagctatttctaaaattcatatggraataaaagtgacccagaatagtcaaaacaatattgagaaagaagaacaaaattggaggacttgcacttccagatttcacttactacaaagctacaatagtcaagataatatgatactagcataagtctagacaataaatcaatacaacaaaattaattgtctagacacagacacttacatttacggtcaatttatttttggccagggtgacaagacaatatattgggaaaagaacagcctttttaacaaacagtactgagacaactggatatctatatgcaaaagttgagcttctatctcatacaacatacaaaaattaactcaaaatgaatcaaagacctaaatgaaagaactaaaactttaaaactcttagatgaaaacaaacaaatgaatcttggttaacttgtattaggtggtactggtttctttgatgtgacaccaaaagagaagcagcaaaataaaaatagataaatgtaact

SEQ ID NO: 663447 - DNA, 630 bp, Homo sapiens
taaatgaaaagatttcttatgttcatgaattggaaggcaatattgttaagatggcagtactcctcaaactacagattcaatgcagttcctatcaaggtacaagctaagtgtctttcagacactgacaagctatttctaaaattcatatggaaataaaagtgacccagaatagtcaaaacaatattgagaaagaagaacaaaattggaggacttgcacttccagatttcacttactacaaagctacaatagtcaagataatatgatactagcataagtctagacaataaatcaatacaacaaaattaattgtctagacacagacacttacatttacggtcaatttatttttggccagggtgacaagacaatatattgggaaaagaacagcctttttaacaaacagtactgagacaactggatatctatatgcaaaagttgagcttctatctcatacmacatacaaaaattaactcaaaatgaatcaaagacctaaatgaaagaactaaaactttaaaactcttagatgaaaacaaacaaatgaatcttggttaacttgtattaggtggtactggtttctttgatgtgacaccaaaagagaagcagcaaaataaaaatagataaatgtaact

SEQ ID NO: 663448 - DNA, 608 bp, Homo sapiens
gtcaatgaggaaatcatggttataatctggtaataaaaatagtaagtagggacacaagaaagtagggacacgagaaagattcacttttttaaggagccatgaggagagatttatgatttgaaatgtatctcaaggagtcaaatactgcagtaagtggacagagcatgatggcaaaggaaacagaacaaacaaaaagattaatattaatattggagayttttcatcactaaacaaacacaaattctggtcctgaggcgggagatgcaaagaacaggcgtaattattttttcaaagatgatatggacctgccttctacaggtaaatggaaaaccattgtacgttggctttctcttgagtagattcaaagcacttggcacttacccatccttctagcttccaaaggtgacaataactcaggaatcatgacctcatttaaaataaagtgagaaagtgactaactaccccagtcatgaaaggcagtaatgtggattttagctttgcaaggaaatttcctagcaaaccacatggcccatttctgtctcttaatgttagaacagtcccctaaaatagtctttcttacaaaaataacattcttttctcactcccag

SEQ ID NO: 663449 - DNA, 604 bp, Homo sapiens
gatcctcaactctatttttacaggagttagttccttaataagttgtacacatagtkgtttgatatgatttcagacagcggaaaagtgtgaaagtttcaccagcttacttctgagtggttgactagagcacggagaaataagataaggagtggtgtaaattaagaaatattctgtacctccagagcactgctagtagcagcagcatcctctgctgggtgtcacgcactttacatatggaacttagggtctagggacaatagattaagctacttgtccaaggtcactgtagtggttttctctctgcccgcttggatccattcctttctttctctgccctctcctgtgctctgagaggctgacctacatagaaagcatacccaggattcctttccctttggtttctggttgtttttagccaataggaagcccaagggctgggatgaaggagatgttgagatatttataccctctgctgcttctgaagttccagctcttagcaggcttcaagaacgctgttccttcctcttggtctttaggtctaggggtagtaacagctccctaatgttaaggctttggcatcatttgtcggttttcttggccatct

SEQ ID NO: 663450 - DNA, 465 bp, Homo sapiens
ggtctgcacatacccctaggaaaagggcagaatccagggagctgagcagtgtcgttttgtgggccccacttctatggcacctyacaagataaggcccactggctcggaatttcagccagccaccagcaacagggtagagcctgcctgaaactgcattggagccccccggtgggagtgggggtcaccatctctgctgtttggtcaactcagccactccagctgcgggctttgaagagtccaaatggtccagtgaaggaagggtccccccagtagcacaacacaggggctttgccagattgtggtcaaactgctttttttttttttctttctttctttcttttgaggcagagtctcgctttgccgcccaggctggagtgtagtggtgcgatccctgctcactgtaacctccgcctcccgggttcaagcaattctcctgcttcagactccagagtagctgggattaca

SEQ ID NO: 663451 - DNA, 544 bp, Homo sapiens
tcacctcacctgacaaggaaagtaattttgaagtatagaattaagcataaatatcagtattgtgtgaaaagacaggttagaagattcccccaaattgctaacgatacttcatttagcaagtgacttaattttgtgagccacagacyagttgaaatctatacatctcagctaggcttctcattatacctttttttttttttttttttttttgcatatggcagcccctcttttaaagttagaccaaaaaatctcagtaacaaaaggaataatactaaggattgtccttatttcctaagcatagatagaacaccaaacaaaaaaactattaaatttaaatccatgggtgcacacacacctttatcctgaagaattattaaagcttctttcattatatgggctcagcttataggtagacctcattggaggcagggaaatcaacccgagatagatatttcactacagatatttggatcctaggattctctaccagttatttggaactatttgcaggtgttaataagtaattattcaccagaaagtgagg

SEQ ID NO: 663452 - DNA, 624 bp, Homo sapiens
tgtgcccccacccaaatctcatcttgaattgtagctcccatgattcccacatatttgggagggatctggtaggagataattgaaatatgtgggcagtttcccccatactgttctcatggtagtgaatacgtttcatgagatctgatggttttataatgggaaaccccttttgcttggttctcattctctctttgctggctgccaccatgtaagacatccttttgctcttccttcgtcttccgccatgattgtgaggccttcccagccatttggaactgtgagtcaattaaacctctttcctttataaattatccagtcttgggtatgtctttattagcagtgtgaaaatgaactaatacagagccctcataaatgggattagtgcccttgtaaaagagagccaagggagcgcctttgtttcttccactacttgaggacgcagagaggagatgccatctatgaaccagaaaatgggccctcacctgacactgaatctaccagtgccttgatcttggactttctagactccagaactgtaagagataaatgtttgctgcttataagccacctagtttatggtgttttgttacagcakcccaaactgaccaagaaacatagtatatt

SEQ ID NO: 663453 - DNA, 599 bp, Homo sapiens
gatcatcccagattcctgtttctgtctcactgttcccttcccctaccctcaaaccttgatttctactttccaaatctctcccaaattcatcctctcagctgctacagctttagtttatagtttagaccctcgtcactgctcactagatttttttagtgatcttctaactatccttttggttaccaatctgtccttctcatggagaaatctttctaaacataaatctgatcatggtgctaccctttaagaagctagaagatccagcatgtgctttttaatgtggctscttcccatctccccatcttcatctcccatggctttgccactgacatactttccagaaaaatggaattatcctaattccctgaaatcacatgctatttcaccctttgaggactttacacacattcttttcttcaactgaaattctctcacctgctccatatttcaagacttagctcaaggttcaactccatttgtcttcctttccttatggcattactatttctggtacatcttctcatgattattttatttatttgaacaagatttattacacatccaatgttataccatgcattgtgctggctgctgggtag

SEQ ID NO: 663454 - DNA, 531 bp, Homo sapiens
cagtagcctactagggtaggaagatgacattgttcctgctttttctccttttgctgttttatttttacacaagtagtttttttacttattaaaaaaaaggtaaaataaatacatcacttacttgcaattttggatttaacttctgaaaatctgaaagacaaaaaccaaccatgaggtttgttagttgtgataaacatcctatggcaatgtaagatgctaaccaaatgggaaactgggtgcaggagatacgagaaccatctgtactatctttgcaacttttctgtaaatccaaaaccaytataaagttaaaaggttattgtaaaaagaaaaaagacaaaatcagaggagagaattctgataggaagcatgccaggtgataaaacttaatgtaggtaggtagctggttctcatttaggaaattcacattgaaaatcaattctctttttaaagaatcaactgctctgcataagacactaacaacccagccagtcccaaaactgacttactgttcttacttttatttgctggcat

SEQ ID NO: 663455 - DNA, 623 bp, Homo sapiens
aactatatgttggcagtttagattacgccttgctttctcctttgctaacatgccctatatctccacagggctagtgactagtactctgagtcaggcacatgtttgacaaagcattttttaaaaaatagaaagacaagctctgaatgtcagaggctaagattttaaaaatccacacacgtttgtgaaacttccaagcccttctctgctgcctgtgcctcatgtcctgagcttcccttggataatcccatatgactttcccagtcacagattttccatttggtcactcactcaaccttcagcacagtcatatcttttgcagagctaaaaatagccattctatcaagtgggtagcgaaagtcccatttacagttaagaagataacttccctragattatttaatggtgacaatgcatcagcaaatcaagatttggacaaaataaaggcacaaaatattccctgttgcatgaaatctatcattaattcttaatcgagtgaatagaagtgccagctctgaagtcagacctcatagatccaaatcctgaatgtgtccagctgtataactttgggcaagctacttaaccttcctgagcctgtttccacatctgtaaaatagggttggaaa

SEQ ID NO: 663456 - DNA, 530 bp, Homo sapiens
ccacatgccccccagttgtgggtcatgaccatgctgtgtgctctcaaccactttgcattttctccattatttaaataaggtttattctctttatcactcactaggctgggagatctgtgaggacagggactgtgtctgttttttcagccactttagttctgccactaaggacagtgttgaaaagtgtaggtatgcagcaatatttattgaatgaataagggagtaaatgaatgaacttacggccacgaaaaatctcacctgagtccctggattctaaggagtctcacagcaccctgtacttactaaaattatcacactttccccattttttctataattatttttcttttttctatgctatgccattaactatgagttcctcacctggtacacttggcacaaggtaggtaatcagtaaatgtttgttgaattaattrttatataatgtgggggagaattatttgcacaaggagaaaaaaaatttaaaaaaatctcccctaagagttggctcttgagattcttattatgtg

SEQ ID NO: 663457 - DNA, 530 bp, Homo sapiens
ccacatgccccccagttgtgggtcatgaccatgctgtgtgctctcaaccactttgcattttctccattatttaaataaggtttattctctttatcactcactaggctgggagatctgtgaggacagggactgtgtctgttttttcagccactttagttctgccactaaggacagtgttgaaaagtgtaggtatgcagcaatatttattgaatgaataagggagtaaatgaatgaacttacggccacgaaaaatctcacctgagtccctggattctaaggagtctcacagcaccctgtacttactaaaattatcacactttccccattttttctataattatttttcttttttctatgctatgccattaactatgagttcctcacctggtacacttggcacaaggtaggtaatcagtaaatgtttgttgaattaattattatataatgtgggggagaattatttgcacaaggagaaaraaaatttaaaaaaatctcccctaagagttggctcttgagattcttattatgtg

SEQ ID NO: 663458 - DNA, 463 bp, Homo sapiens
taacacatccaaactggatgtgttggggacagtaagtcaatatgccatgttatgaaaaggtataatgcaaagcatgtgtgtaggctgggcacagtggctcacgcctataatcccagcactttgggaggccgaggtgggcagatcactcgtcgaggtcagaagttcgagaccagcctggccaacatggtgaaaccccgtgtctaccaaatatacctatctatagatatatctatagatatatatattttttagatggagtttcactcttgttgcccaggctggagtgcaatggcacaatcttggttcactgcaacctccgcctcccgggttcaagtgactctyctgcctcagcctcccaagtagcggggactacaggcgtaggccaccacacccagctaatttttgtatttttagtagagacgagatttcaccatcttggccaggctggtctcgaactcctgac

SEQ ID NO: 663459 - DNA, 557 bp, Homo sapiens
ataatttcaatatttgtgttatctgagcattggtttctgtttattggttcttcctatgcgagtgacattttcgtggttcttcttttgtaaagtaatgtttgtatgctggatattttaacattctaaacaagactctggatcttgtttaatttgatggaaaatgttgatgttttcattttaatgggcaaccttccatgtaaaactattccaattatcaattaagtttttgaggtttttgtagtgctgttcataactgtccagagtgagtgccaaccagcatcagcctgagatctgggaagtagaacctctattaataagttatcacttttttgtctgctaatgaggatcagakccttgcacgtgtgtcctcacagcaaactctggaattcataaacaattttatggggtctctttcctgagcttctgtctctctctctgcaatctcctcagtactttcaggttcagcgaggctcaccttcatggtcttcttgccagaaattgagcctctagttacccttctctccacacatttatatgactaggcccatgtctaggac

SEQ ID NO: 663460 - DNA, 526 bp, Homo sapiens
tactcactctctttggtaccccgcccttccaaaggacggtcaggatcctcctgaatagatcatacacttttggtctgaagtttgtatgcatactctatctgattatacttccctgaaatataccgtggggcattttctagagggcmtctgtcctacatgataaagcatgttatgcgtagtccaggcaccctgctgatattcactaagaataataatttcatgggaattttctagtctaggaaaatcataatttgctttttaataaaaactctccctcaggttttcttgacacatgtgtcaaaggtaaaaatactttaggtaaacagagcccgacatcccgcacccccagctttggggtgaaaggggttaaacaagggcagctgcaaatctatgcctaaccaatagggggagttgccagaatatattttataaggggacatatttctttcaggaattactttctgaagcattacttctcccccatgtggtgaaaggtttaactttcatttctaattcccgcatcctc

SEQ ID NO: 663461 - DNA, 605 bp, Homo sapiens
ataaaatattaaatattaaaaataagcaaatttagcgggttgctgcttataagataaaaatacaactgtaattctatgtattaaacaattcaaaatgaaatttaaataacgaataccatttacaatagcactttcaaaacattaaaatagctagccataacgctaacaaatgatatgcgaaacctctacattgtaaaccaaaaaatactgctgaaagaacttaaagacccaagtaaatggatagataatccatgttcatggactagaagactctatattgttaagatgccaattctccccacattgatctatagcctcaatgcaatcccaatcataatattaacagttttgttttcactgaaatatgattctaaatgtatatggaaacacaaaggatagagtatacccaccacaaaaaaaaatgttgaagaagaaataaaattgaaggaacttataccaccagataccaagatttagtatagagctacagtaattaagacagggtagtatttgtacataaatagaccagtggaagagcatatacactctagtaaractcacctgatttatatcaaaagtgttctataatccaatggtttaagggc

SEQ ID NO: 663462 - DNA, 531 bp, Homo sapiens
tataagtatgtttagcatagttgcagaataccaggtcaatatacaaaaatcaattgtatttctacatactaccaatgaacaaatggaaaataaaattaaatgaaacattttaaaatgccaattaaaataacatgtaaaatataaaaatgcttaggaataagtctcaagatagatgtgaaagacactgctatgagaatgaaaagatgtcaaagactgtgtgtaaatatttacaagcatatgtcttacttgcattctgaatatataaagaactctcaaatctcaacaataaggaaaaaactcaatttcataaaaggataaaacgtttgaatagacagttcaccaaaaaaaagatatacatatggtaaaaaaaaaaaaacctgagaatatcttcaayattactagtcaacaggaaaatgcaaattaaaattataataagatacaactagataccttttacagtggttaaaatttaaaagaccaaacataacaaatgtgggtaaggatctgaaaaaactgaaccttcctacactg

SEQ ID NO: 663463 - DNA, 610 bp, Homo sapiens
acaagcgtccttttcatgatctattttttgccatgtttttcaagttgtgatgcattttgttggtgattttgttgtgtagaatggtgccatgaagaatactgaagtgctgtgtagtattcctgagtgcaagaaggctgtggtgtgccttaaggagaaaatacattttagataaagtttattcagacatcagttctagtgctgttggctgtgaattcaatgttaatgaaacaacaatatatagtaaataaggtgcctttaaacagaaacacacataaaacaaaattatatgttgatsagttcacaaaaatgttgtgaccagaggatcacaagaacctaaccctatatttcccctagaagcaatggttcagtattcaataattcagtgtccacggtgactttacagaacataactagagtgaataacaagaatcagtaatatccacaaaaaggcttacatgtatatattcacagcagctttactcataatagctaaaaactgaaaataatcaaaaagtccataaaccaaatggatatacaaattataaaacagtcacagaatggaatagtactaagtaataaaatggaatggactattgttccaagcaataat

SEQ ID NO: 663464 - DNA, 569 bp, Homo sapiens
gttctgtgccactggtttacaatttggactattctagtatttatctgtcctgtacattaaatcaatcagttcacactcagagatgggtgaacacttcacttactttctcagcagtgcagtttgcaaatgtgaaaactcagaagcaaatatggactcaktaggcaactgcatgcgatttgtgaatagccacaactgtgtgtgtgtgtgtgtgtgtgtgcgtgtgtgtgtgtgtgtgtgtgtgtgtgtgtgtaatgttctttgagctgagaacttcctggaaagcatccagatcttaatctgtattgttcatccccctgaagttacaagaatctgggttgcaggctccaattaaaaggaaattgaagaagctaatacagtgagaaagcagcaattccctgcactgctctcttcaggtcgcaagtttagaaagagattcaggatcacgggtctttgcccgacatgggataaaggctttctcatcctggtgagcacacatgtgtaacttccattaacagcaacaagagtcgtgagcacacattgagaggaaagtccacagctaaatgtttgaa

SEQ ID NO: 663465 - DNA, 603 bp, Homo sapiens
tactgttctgaaacttgccaatacatgtcttgaacttcaggcatcattagcacatacagatctaactcaatctgtttcagcattagacaatatttcattggatgaatattgtaatttatctgtccagatgtatagggaaaagtattttcagctgtttttaaacttttaatattacaataatactgaaataagtatttctatgcattttcttgatgtattataggagtgtgtcagtagagatggaattaaagggtaaaagaatatacacattaaaaaacaactaatgcagagtagcatcaacttttagctcaaaggaggcaaatccctcatccgattgtgagaagaaaatgtttgggtttggctatttgacaatgaccaaaacaatatagactcatgaacacacttatatgtatcgataatgaaaaagttgcatttgtattccttttttgcttatctttataacagaattctacatgttaaatctaatgtttggggaattacatggatttataatacccctccaagtatttagatctataaactaattmatatgaacgttacaaagggatgacacatttttaaatgtataaaagttgaccatat

SEQ ID NO: 663466 - DNA, 577 bp, Homo sapiens
ggaggaagctggagaaaaatatgcatgagcccagatgagagacattccacttttgtcacttgaattactaatcacattttatagcagccatttaattttaattttttcttcactgatattaaataaaaatgttaacaagttaccaattaggtaacataaaagcattatggggcatcatctacccaactactaaatttttcaaagataatatttgaaattacattaacaatttcttccagttatactgcacagatatgaaatcacagcaaaattctccctgaaccaaaagacagtaaattatcacatgggagggactcattgtcccactatctcactatgcaaaattgagacagtccctttcccagttttatgcctgttcttcatatttgaacccatacaatctgattatctgacatcactttcttcttttagtgcacaattcttattatggaagatttcaatattcatgtgaataactccacaaatacctcctcactctgcctgatcccctccttcctcttttccttccayaaatatacacaactgcacaatacttctattatacatctactcattc

SEQ ID NO: 663467 - DNA, 612 bp, Homo sapiens
acttctacaaaggagatatacaaatagccagtaagcccatgaaaaagatgctaagtatcattagtcattaaggaaatgcaaaccagaattagatctcacttcacacccattaggatggctatgatttaaaagaaaaaagaaaaataacaagtcttggcaaggatatggagaaactgaaacccccatacattgctggtagaaatataaaataayacaactcctatgaaaaataattttgtggttcttcaaaaacttcagcacagaattaccatttgacccagtaattccactcccaggtatatcttcaaaataatggaaatcagagactcaaggagatatttgtacgccaacattcatgcagtattattcaaaatagccaaaaggtggaaagaacccaagtgtccatcaacagataaatagataaacaaatgtggcatttacgtacagtagaatattattcagccacataaaggaatgaatttttgatacatgctacaacacgtaagaaataagtaattcatgctaagtgaaacatgccaaatacaaaaggacaaatattttatgagcccacttatgtgaaataactagaacaggcacattcatagagagaaa

SEQ ID NO: 663468 - DNA, 587 bp, Homo sapiens
aacacataaggaaaagaatgctaaatgaaaaaacaagccacaaaaactagggaaggctgtccaacccacttttgagagatgcacaagaaattcagaagctgtgtgtgagacttatttaggcgatcgcatctcccagggcatggaattttcctaaagctgcctcattcacttctaagcaaggattttcgttattgtaaagtatgtcattccttacatgggtatgctgcaaatatcatcgtaaacttcccatattctagaataaccatgtctggaagttgggtttttcctcccaatgtaacagttagcaacrgtatctcttattattatgtggcatggtgaaggaattgtgttttgcccaattcctctgtttcttaacatattgctcacaaatgtgcattcaagaatgaacaaattctggacctgagatctcatttataaatacataaatctatatttatcaaaattagtattatcttctattttcagaaaaataatagtgtaatactcaatgaatacaacattttgtagtccacacatttcagatttcaacagcacaaatgcatgtaacacaggatttggtcttcagc

SEQ ID NO: 663469 - DNA, 445 bp, Homo sapiens
ttcctataagcctaggctgaataagtttgctacagaaartgtcactgtgcttgacagttttgtttgggggaaggaggaagtggggtaaatggtgcacattctttcaaaatgtaccttcaattaagcttaaaaaaaaaaagagaggaagtaagttttaaactaagcaaaaaaacaggtatttacattttcagtgaggcatagtatttcaaatctcctgcctttttccttctttcaacaataaattatcagccaacgctctgataaggcctccagattagaaatgattctactaaccttgttttatttacactacgcatgctttgagttttacagttcagtagtagagctgcacagctcctcacattagccctgaggctactttaagctccaagcaggctgctctgtaagcattggaacgaattctctgtagtccccatagaaatcc

SEQ ID NO: 663470 - DNA, 591 bp, Homo sapiens
tgagactatattacttactataactaccatgaaatctataattgtgttgttttttgattctacacccttatactgatttccttcattttgaaaagttcctatttttattattttcagtgcatagacttcatcacctaggcctcccccttggtctttgttcattcaatcacaaatcttcactaagtggtgatctatctttgccaagcaatacagctttcaaartaagtttttaaaacaagtttaaattaatgaataaattgacagagggcatctgaagagagagtagtctctttagagtagtaaaaatatggtaatatttaaaaatgcagagcatagcactattattcactattttgatgttgctggcatccccaaaatgggaatcaatacagaaaaatatgcctcatctacaacatgaagacagagggaagatacctacacaatttctgctgacacacacacctgcagaccacactccctacctaggattagctcggtgaactttggcaaagggaagaaacctcttccatagctgtgtttatctgctaaggaaacttggctctggtttatattcatatctcttaagcaact

SEQ ID NO: 663471 - DNA, 537 bp, Homo sapiens
gctctaaataattctcccatcaacacaaaagcttgagcaaagccatcccaatttcaaacaatgtcttcccacctacagatgtcagattatcacagctgacacttggcacaagaggaacagcactcatcccaaggcaaaagttttaaaccaagatcagcaaactatgccctgcaggcagtatctggcctagcaccagtttttgtttagtctgtgagtttaaaatatttttatacttttagatggctgaaaaaaaattaataataatacttgtgatgtgaaaaytctaagaaactcaaattgcagtgtccataaatatttatagaaacatggaaatctttaccaaaaacgcaaatcaactgcatggaaaagtaaaactctaggtagaaaactctgggtagaagcctcaaatggcaccttagaggcaggtcctagaattgttttcattaaaataacaatatcaaaatcatttcaaacatagtacaaaacaactattttgtcaacatctttcatgtaactaattgtcatatttgtttgtta

SEQ ID NO: 663472 - DNA, 537 bp, Homo sapiens
gctctaaataattctcccatcaacacaaaagcttgagcaaagccatcccaatttcaaacaatgtcttcccacctacagatgtcagattatcacagctgacacttggcacaagaggaacagcactcatcccaaggcaaaagttttaaaccaagatcagcaaactatgccctgcaggcagtatctggcctagcaccagtttttgtttagtctgtgagtttaaaatatttttatacttttagatggctgaaaaaaaattaataataatacttgtgatgtgaaaactctaagaaactcaaattgcagtgtccataaatatttatagaaacatggaaatctttaccaraaacgcaaatcaactgcatggaaaagtaaaactctaggtagaaaactctgggtagaagcctcaaatggcaccttagaggcaggtcctagaattgttttcattaaaataacaatatcaaaatcatttcaaacatagtacaaaacaactattttgtcaacatctttcatgtaactaattgtcatatttgtttgtta

SEQ ID NO: 663473 - DNA, 537 bp, Homo sapiens
gctctaaataattctcccatcaacacaaaagcttgagcaaagccatcccaatttcaaacaatgtcttcccacctacagatgtcagattatcacagctgacacttggcacaagaggaacagcactcatcccaaggcaaaagttttaaaccaagatcagcaaactatgccctgcaggcagtatctggcctagcaccagtttttgtttagtctgtgagtttaaaatatttttatacttttagatggctgaaaaaaaattaataataatacttgtgatgtgaaaactctaagaaactcaaattgcagtgtccataaatatttatagaaacatggaaatctttaccaaaaacgcaaatcaactgcatggaaaagtaaaacyctaggtagaaaactctgggtagaagcctcaaatggcaccttagaggcaggtcctagaattgttttcattaaaataacaatatcaaaatcatttcaaacatagtacaaaacaactattttgtcaacatctttcatgtaactaattgtcatatttgtttgtta

SEQ ID NO: 663474 - DNA, 613 bp, Homo sapiens
accaagaacccaacacattgaatgaaagtaaattcacaccacattacatgcatcagtgggawatttcagaacacccaggaagaagcttacatgtaaacaatcatcagaatgtcacaatctctctcaacaacaaagccagatgctatatgaaaatggaaaaacggcctcaaattccgaggtaaaattatttcctccctagaattccatataaaaacatcaatcacttaaggatgtaatagagacatttttagaaattaaatcccctccaaatctacttttcatataccctttcccagcaaactaccagagaatgtgcgctgtcaaagtgagggaagaaaaaaagaaatgggaaccacatgggacaatatggacaccatatctgagtcatcctacagaggccagctaagtgtaatgaatgtcattagaacatcactcttgctggtgagacacacagcaatgacggttcctgatagaaacaggagaagaaagagaaaagggaggaagaggagaagtaatgatgctcccaacaccaatggctctgatgaagctttgtatctattgaaatcaacaccttggaaaagccttccaagtccttatagactcgagttgccca

SEQ ID NO: 663475 - DNA, 594 bp, Homo sapiens
attttaaaaaccctccacacctaccagataattctgttcagaaagttgtacctccctttctccccaaaaactattgagaatctctagtctatttcacaacagaattccatatttaaatctagattaacagatttcccaaacttgggattcatattataaatgttagccaaatagctctagaaacacatatattttcatgtttccaactaacacgacaaagatactgggccattcttgagatgttaaatttaaattaactccagaaattaytgacagtattataaatattataaatcctggcttaattcttatgtaacgtatactaggctttgctcattgttacaatttccactaatcttgatattagctgaagacacaaacagcaaaaatctggttgatgtgtatatgtacccatttgtactcacacatatattgactttgaaatttgtacttcaattaaaatagtaccaattataatggccttttaaaatccaacagatacattacaattcctggtggattgcttgcttcaagaaaataataataatcttagttgatggtgaatcaaacaatcttatttagtaataagatgcc

SEQ ID NO: 663476 - DNA, 354 bp, Homo sapiens
cttgggattcatattataaatgttagccaaatagctctagaaacacatatattttcatgtttccaactaacacgacaaagatactgggccattcttgagatgttaaatttaaattaactccagaaattactgacagtattataaatattataaatcctggcttaattcttatgtaacgtatactaggctttgctcattgttacaatttccactaatcttgatattagctgaagacacaaacagcaaaaatctggttgatgtgtatatgtacccattkgtactcacacatatattgactttgaaatttgtacttcaattaaaatagtaccaattataatggccttttaaaatcca

SEQ ID NO: 663477 - DNA, 578 bp, Homo sapiens
tcattaaaactgagttactgtcattattactgcagtcctaaattccagaaaactatatagaactgctcatagcctgcattatcaatgtgttaaaggttatcatggacatggttgtcgttttgtgttttttcagaaccgaagaacttttcattttaaaaaggtatttatttggccaggcgcagtggctcacacctgtaatygcagcactttgggaggctaaggtgggcggatcacgaggtcaggagattgagaccagcctggccaacatggtgaaaccctgtctctactaaaaatataaaaattagctgggcgtggtggtgtgcgcctgtagtcccaggttctcaggaggctgaggcaggagaattgcttaaacctgggaggcggaggttgcagtgagccaagatcgcgctaccacactccagcctgagtaacagagcgagactctgtctcaaaaaaaaaaaaaaaaaaaagaaaaaaggtagttattgcacatgaatggccacagctcagagcttttaggtccacttacaccatgtctacttgtgctgcttttattacataagacaacctattgtgtc

SEQ ID NO: 663478 - DNA, 578 bp, Homo sapiens
tcattaaaactgagttactgtcattattactgcagtcctaaattccagaaaactatatagaactgctcatagcctgcattatcaatgtgttaaaggttatcatggacatggttgtcgttttgtgttttttcagaaccgaagaacttttcattttaaaaaggtatttatttggccaggcgcagtggctcacacctgtaatcgcagcactttgggaggctaaggtgggcggatcacgaggtcaggagattgagaccakcctggccaacatggtgaaaccctgtctctactaaaaatataaaaattagctgggcgtggtggtgtgcgcctgtagtcccaggttctcaggaggctgaggcaggagaattgcttaaacctgggaggcggaggttgcagtgagccaagatcgcgctaccacactccagcctgagtaacagagcgagactctgtctcaaaaaaaaaaaaaaaaaaaagaaaaaaggtagttattgcacatgaatggccacagctcagagcttttaggtccacttacaccatgtctacttgtgctgcttttattacataagacaacctattgtgtc

SEQ ID NO: 663479 - DNA, 594 bp, Homo sapiens
aggactgcagtttgaaaactagcatgctatggggctcttaaagttgccagttaatttctcgtgaggtatctatggcccattcayacagctgaaggctaaatggcggctcttcttgtgacctttaccttttcctaattcactagaaacatcaactgccatttgtgttcaaagcccttataaagcatattacccaaattggaaataatctgtattaatattaccttaaaaattcctttatgctatttaacatgttttctttatgaaaagtaactagtctatctaaaacattactatttttaagtaagtaataagtttgatcctctttcctaacatgtatggtttaaagatttttgtttctttcttctaactcctacttctagttgttcccataatagtcccacaaatattttataccctgggtttgaccatgtccagggcctttcatatatgaaacaggaagcagctgagccatgtttcacaggcttttgtccattctcatttaaagaaaaacacatcgggaacttcttaaaaggatttctatggaatcatcagttctcgataaagttcagaggtgagtaacgtcctcatgcaaat

SEQ ID NO: 663480 - DNA, 602 bp, Homo sapiens
ctgggcactgagaagtcaaagaagaagataaaagtccctgcactcaagcagctaatatattttagtgggaaaaaraacacatatttctttttctccatcctttaagtactttcttctttcctatcatcctgtcaatgttttcctataggtagttctccaggctcttgaactacatctattccaaatgtactttgaatgcctcctaatagcttcctaaggcattttccttgccatgaatcctaaaagctaatggtaccttcacttctttatattatgcaatttatcattgcccttttcttcttgtaacaccttttcctttccaaaattgatcactatgtttaaacatctttcttattttatactcaattataaagtctgcttaaaagacagtgtcttgccctcttatttaaatattctgctttgaaatattctcatctatttcctctcctgagttaaggttttctcccaacattagtcttcagatagctttcatttttgttgaggatacatgtatcaatctcgtgtttctctatatttcttatccattaacatgcctctttcagtccttatttcttagcaataaaaatatctagtactgacat

SEQ ID NO: 663481 - DNA, 602 bp, Homo sapiens
ctgggcactgagaagtcaaagaagaagataaaagtccctgcactcaagcagctaatatattttagtgggaaaaaaaacacatatttctttttctccatcctttaagtactttcttctttcctatcatcctgtcaatgttttcctataggtagttctccaggctcttgaactacatctattccaaatgtactttgaatgcctcctaatagcttcctaaggcatyttccttgccatgaatcctaaaagctaatggtaccttcacttctttatattatgcaatttatcattgcccttttcttcttgtaacaccttttcctttccaaaattgatcactatgtttaaacatctttcttattttatactcaattataaagtctgcttaaaagacagtgtcttgccctcttatttaaatattctgctttgaaatattctcatctatttcctctcctgagttaaggttttctcccaacattagtcttcagatagctttcatttttgttgaggatacatgtatcaatctcgtgtttctctatatttcttatccattaacatgcctctttcagtccttatttcttagcaataaaaatatctagtactgacat

SEQ ID NO: 663482 - DNA, 602 bp, Homo sapiens
ctgggcactgagaagtcaaagaagaagataaaagtccctgcactcaagcagctaatatattttagtgggaaaaaaaacacatatttctttttctccatcctttaagtactttcttctttcctatcatcctgtcaatgttttcctataggtagttctccaggctcttgaactacatctattccaaatgtactttgaatgcctcctaatagcttcctaaggcattttccttgccatgaatcctaaaagctaatggtaccttcacttctttatattatgcaatttatcattgcccttttcttcttgtaacaccttttcctttccaaaattgatcactatgtttaaacatctttcttattttatactcaattataaagtctgcttaaaagacagtgtcttgccctcttatttaaatattctgctttgaaatattctcatctatttcctctcctgagttaaggttttctcccaacattagtcttcagatagctttcatttttgttgaggatacatgtatcaatctcrtgtttctctatatttcttatccattaacatgcctctttcagtccttatttcttagcaataaaaatatctagtactgacat

SEQ ID NO: 663483 - DNA, 602 bp, Homo sapiens
gattcaaacattctgagtaatgtagtggctactggaactatatttctgaaagataattttggcagtaattatcaccgaacaggagggataaatgatggaagacagacccattacgaactagagtttgcgcatgtgaattaaaaatacaaaagaagaatgaaaatagtgctaaggcgtcctgctactagcaggtcctaaaatagctgataaactcatacttctccttcccctttagtgtagttttctctctaattttgaggctcatagccttaaaaaaaccaatgcttctcaaattcaatggatataggaatcatccrggcatcttgtcaaaatgcagattcttattcagtatctcttgagaaggaggagagctgagattatacatttctaataagctcccaggaaatgccaatgctattagcccatggaccaaactttgagtagcgtgtcattatgagtcagttatattgctgccctttctcaataaatcacaatgaaaactgaacacttgaacatcgctgttggttggatgggtgtaaggaagcatgtatgtttgttgtctaataccacttaagaagtgatatgacacactggctaagcat

SEQ ID NO: 663484 - DNA, 518 bp, Homo sapiens
caaacctcagcaccatgcaatatacctttgtgacaaaacttgcacatgtactccctgattctaaaataaaaattaggggaaaaaagaaaatatattgttttacagagcataaagccccaaagatcagacttaatctttggattacctagccctgtgataccaagaaagaagtcacaagaacccaggatagagagttcagctcaagagaagggtctggttaratgcacagctgcatcctgataaatagggagcacctacccagcagcctttattctaagtggaagacacagaaaaagtgagaatacaacagccagtgacactcaaagggaagcaatagtccatggtcccccaacccaatcctaaaagtaaatgcaagtacaaacaaaccaacacatgcacacacacatacctattttcagatgtgtcactgtaagatattcattatattcatagtgttaagggagaaatccatctgtctagcagcattcagaattgaaacactaggaaatcatgtggtg

SEQ ID NO: 663485 - DNA, 518 bp, Homo sapiens
caaacctcagcaccatgcaatatacctttgtgacaaaacttgcacatgtactccctgattctaaaataaaaattaggggaaaaaagaaaatatattgttttacagagcataaagccccaaagatcagacttaatctttggattacctagccctgtgataccaagaaagaagtcacaagaacccaggatagagagttcagctcaagagaagggtctggttaaatgcacagctgcatcctgataaatagggagcacctacccagcagcctttattctragtggaagacacagaaaaagtgagaatacaacagccagtgacactcaaagggaagcaatagtccatggtcccccaacccaatcctaaaagtaaatgcaagtacaaacaaaccaacacatgcacacacacatacctattttcagatgtgtcactgtaagatattcattatattcatagtgttaagggagaaatccatctgtctagcagcattcagaattgaaacactaggaaatcatgtggtg

SEQ ID NO: 663486 - DNA, 552 bp, Homo sapiens
cattcatcttcctctaaggaggcaattactttaggaatataatttctaacagtacacacaggtttaaagatacaatttttaaaaactttttcaatcgctacatgtacaatcagcaaacctgtgccacccttttctagtcagggtttactacaagttattgttgttcatatgttgccatctgaacatatcctttgtttacaatacacctgcactcttttttcccctaaattatatattttttaaagataaggatttataacttccctttttaaataatatctgctaagagtcccagtaacaactaggcataactttttaaaattaaagggcatttttgaataagggaagagactggaaaaggtttaaattggcaaacactcagaaatgctcaagtattagatactgaggtgtatgtcagtgtgtgtgcaggtgtgtgtggggggcagggcggtgatggtatgtctggggaaatccatctagggtctacctatttcacaaagaactagtcccatccttctgaacactctstaactaggaacacagcattacaat

SEQ ID NO: 663487 - DNA, 606 bp, Homo sapiens
agtatcactaccctttggtagagttttgtttctcccaaagtaactgctttggaggaagactattcacttcttgcaacgtgttgtctaccagaattccagtgatattttgatgaaacaaagtaaatgcttrtaaaattaggccaggaatggtggctcacatctgtaatcccagcactttgggaggctgaggcaggaggatcacttgagatcaggagttcaagaccagcctagccaacatggtgaaaccccatctctattaaaaacacagaagctagctgggcatggtggtgcacacctgtagtcccagccactcgggaggctgagggaagagaattgcttgaatctgggaggcagaggttgcagtgagccgagatcatgctactacactccagcctaagtgacagagtgaggctccatctcaaaacaaaaaaaattaaatgaagcaaacattcatttctcatctggcccttctaagagatacttaagattatgactctaattcagaaactaaatctgtagccaaactaagtagtttagacaaaggtcatgaatatcccactgctataattatgagtactgtgatcaagaaggtggtgttctttgtgg

SEQ ID NO: 663488 - DNA, 606 bp, Homo sapiens
agtatcactaccctttggtagagttttgtttctcccaaagtaactgctttggaggaagactattcacttcttgcaacgtgttgtctaccagaattccagtgatattttgatgaaacaaagtaaatgcttataaaattaggccaggaatggtggctcacatctgtaatcccagcactttgggaggctgaggcaggaggatcacttgagatcaggagttcaagaccagcctagccaacatggtgaaaccccatctctattaaaaacacagaagctagctgggcatggtggtgcacacctgtagtcccagccactcgggaggctgagggaagagaatygcttgaatctgggaggcagaggttgcagtgagccgagatcatgctactacactccagcctaagtgacagagtgaggctccatctcaaaacaaaaaaaattaaatgaagcaaacattcatttctcatctggcccttctaagagatacttaagattatgactctaattcagaaactaaatctgtagccaaactaagtagtttagacaaaggtcatgaatatcccactgctataattatgagtactgtgatcaagaaggtggtgttctttgtgg

SEQ ID NO: 663489 - DNA, 524 bp, Homo sapiens
cctgccacctcaaagacttgataattttacataattatgtcttactatattagttttatttacaaaatcttctatggagagatagcatctcgtaaatttatacaggaaggagtcaaaaagtctaagctggggaagagatcaagcaggtctstattcattaagagagaaagcagccagtaacaagagcaggctccaagacttcagatcaaaaaggcagcagaaatgctgtcctgggactgggcatccttgtccaatggacaagagaaggggctttaatgacaaggtcactgggaggttaaatcacctggggccaagttcacataagacctacacctctttgggaaagtcccctatcacaggccattctgaaacttagcagctgaaaaaaaaatcaagaagaatatagtaattatgtttttaatttttatgtcatccttaggcatacagtaggagataaaatgaaacttgttgtatggacaagtagatgccaaattcttcacaagtctgagaggaactagagtgag

SEQ ID NO: 663490 - DNA, 589 bp, Homo sapiens
ggagcaaaaagtagaactgtattgcctacacttatttcttggcttacgatgcacaatgtgtctttaaaatttaactatgagacaatcaacacaaaattaggcaaaagtttctcctgggattctgagtttctaattaccagatctagaatgatgaaggcagaggcagaaataccaacaccatcagggttgcatgcctgctgctttctaaaagaaatgctgcctcccttcaacttgttaaaaattgtcctctctacttatatctttggaatacatcaggcttaaaacaaagtggaggacagagttatttttaaagccaatgctttttctttctgtcaagccactagcaggtagtttatttgaaactctagatgagctgtacctcctgcttcattacctttaccaaatactgcacatttccaaaatctgtccccttgctctcaaggcaagcacagactcctcatgatcattgctaagcccaagagccaagaattcctataataagatagataccacctctatttcctcmcattgctttaggataaaatgatgtgtgaatttcaaactctattacattaaaatagaaataaaa

SEQ ID NO: 663491 - DNA, 598 bp, Homo sapiens
tgtgttgctggtacttaggtgatgccttgagtgcataagctgcccactgaagtgccaagaaaaatggcattccaaattccaggaaatgctgtttaacaaagtaggagaaaacatgagagctacagtaaaattacatcaatgagcatgatgaaatatcagaaatctaaagaatgtggcgtcaagacaagtctttaaagtgttaagtaaccacactccatttctatagtaaagattcaatgaacacatacctatgtatccacggttgctctgttgtgttaaaaacatgacgtttcttcaaaaaggcaaccatagcctatgaaagacttaatcataatatattaagtttttcctaaaagccactgaaaacataaacaaaaatctcattttttagataattcagtttgatttttgtaatgtaaaatcaaaactgtaactgtaaaattgtaactgtaaaatcaaaacrctgatttatctttcataaagactgaaaattttaaagctaagacaggttcagtataatgtcgctgtggtcaatgtgaacttaaacagcttctccaacaaactgagagcactgtttgaatatatctttgaatatatg

SEQ ID NO: 663492 - DNA, 620 bp, Homo sapiens
ccacagtagaatgtcaaattatgaaaaacagattgagtgtattcagaaagtatgatctcataatatggtttcaacatataaacaactaagagtgagtgatgaagtgtgcaagtgtagtttagtacttgttaaacaaaggaaacaagctctgttgtggggatgaatccgtccaaagcacccacactcttaatctgagtccacgctggcccagcaacttggttatgtctagagagaagtttatggactggatctgaatgttttcttcttgtggagtttactcacaagctaacaaaaacaatamtactgacatcagctggatccgcaatctaagcaactgtcttcttgctactgtcactcaatctattttggggggttctggctagaatgtgctgaaatgtaatcattacctaatggttgataagactacatggtattattatgaaatacataccaattctctctataggactatctacatgaattgtaatagataagcatttatagaaaatgatttttgagtttttcttgctttttgcacagaggctagtatgaatggatttgagcttcttgaaccatttgcctacgtcaagggccaaagtgaatgcatttcatttggaaaa

SEQ ID NO: 663493 - DNA, 583 bp, Homo sapiens
tatcagattttatcctctgctgttagtagaagtttgagtgttctttccaagggtctttaatttatggaaatcatcttattttcttaactccatccgtgggttcaaagctagcagagtctgttgctgtagatttgggatagccagagcacagaggacagatctgaaaacagaccaggttttgataccagaaraactgcatggtgtctatgatgttaaactacagagaattaacacataatagtttggcgctggttgtgtaaacgcttctggcatttccttcagcacttaaactcattttcagagaatggactgctgtaaaagaatgcaggctcattaagagtttatttcctcaaaatgctgaaggataacaagtttctgctgtgaggggatcagcaaactgcatttatctctttagctggggagaaagaccccaaagctttctgtttttcagcaggcatcacaggtctgaaaatgaagaatttcatcttgtcacaccctgccttacctcgtttcagggctggctgtgttttcgttccacagaatgaaattttagcaggagcagaagccaaatgcttaaaatgaa

SEQ ID NO: 663494 - DNA, 532 bp, Homo sapiens
gtatgtttgaacttaataattaaattaattggttttagccaatgagcattttcattcttaacactttaaataagaggatttaattccagaatgagtcattagaatagtaataaagaacgctgagaggtctgcacagtccttttcaactgatgttcaccttgattcaaataacccttgaataaaccacagcaagaccaaactattcattgtatgctttggtgtctgccaaaaacctcatgaatcaaagtgttttgttcttcattttcccccagaactttaaactatacaactggcagttccataataacggaaaaaaaaaactgcagttttatcaagtaatttctttccacccaataaattgcactttaccttgaagcaacttgtatatttcacaccttaaatttctatttaccaaatcagctaatcacytcacaattgaactcagaacaaaaaaaaattatcaattaaagtggttgaaactcctgcaaattatcatttaggaatgaagtaattgctttcatcagggcagaaa

SEQ ID NO: 663495 - DNA, 557 bp, Homo sapiens
gtgttctcactcctgaagctatggatgacacagctgatataagactaaatgccaagaccaatcaattgcttttgtgkctctgctctgagctgctgtaaaaggggccattttctaggatctactcttcattatagtaaatgctatctccttggtaacataattccatttctcataaattctgtctgagagcattgtcctaacaatggatgtttgtggaaaagaatgctgttggtttaatgcacagaattaagtgtgaatggctgtcaaactgctatagtttactagttcttaaacataaattgaaatcttatacattaaaaagaattcttgaggataaatgaatgtcctgaacaagggtaaaatattgtacttgaaggttctgtgccactggtttacaatttggactattctagtatttatctgtcctgtacattaaatcaatcagttcacactcagagatgggtgaacacttcacttactttctcagcagtgcagtttgcaaatgtgaaaactcagaagcaaatatggactcattaggcaactgcatgcgatttgtg

SEQ ID NO: 663496 - DNA, 569 bp, Homo sapiens
actgtactgaatgctgtaggcaactgcaacacagtgataaatatttgtgtagctaagcatagaaaaggtatagtaaaattaaggtattattaatcttatgggaccacggttgtatagtctgctgtagttgactgaaacactgttacatggctcctgactgtatttttaactggtgggggttggggggggaatccaaagaacagtattttacataattttatataaagttcaaatttcaatgcccataaacagttttatgaaacacagccacactactctgttcacacattgtctatgtctacttcwgcaccacaacattagacacagactgcatggcggcccacaaagcccaaaagcccaaaatacctactatccatacttaagaaaaaagaaagaaaagaaaagaaaactttgcaggcccctgttgtaagcagtgttatcttgcacttagataatggtacaataaaatctcaattttccatcaattaggcttccaactgtgacctcagaaacatatatctcccctgatactcatccttccctttaaaacctgtccctcccccatgaat

SEQ ID NO: 663497 - DNA, 594 bp, Homo sapiens
gtaggggtgggggtggggttagggggtggcagctggggatgattttcgtattgctatcattccttcattcctatttaggtgtcatgcattagactctgtctcaaggagagggattattccactgcctttcttttcttttcttttctatttttcttgwcacccaggctggagtgcagtggtgcaatcttggctcactgctgcctccgcctcctgggttcaggcaattctcctgcctcagcctcctgagtagctgggattacaggcacctgccaccacgtccagctaacttttgtatgtttactagagacagggttttgccatgttggccaggctagtctcaaactcctgaccttgggtgatccacctgccttggcctcccaaagtgctgggattacaggcgtgagccactgcccccggcctccactgcttttcatagatctcggtaaagactttgtaatgaaaaatatgtcacctgccttaaaaacagtgtgttgtcagtaaattatcagcccacttccagagtccaatcaaatatatcagtataactggagactctactatgtgttccatgaaaacatagcatctgaatgatga

SEQ ID NO: 663498 - DNA, 562 bp, Homo sapiens
gcaacctctgcctccaaggttcaagtgattctcctgccttagcctccatgcccagctaatttttgtatttttagtagagacgggatttcaccatgttggccaggctggtcttgaactcctgacctcaggttatctgcctgcttcggcttcccaaagggctgagatgacaggtgtgagccatcgcgcctgtctatgatcatgggttttttattctttttttcaatagagcacctttcctggttggtgaaggtgcagagctggatgtttaggaaatacagcctttcaggagaacttccttgagttttgctgattggcctagattttgtcactgtttgcaggrccatgaggtgggtggtgagctcaacttggaatggcctggaagcatttcaatgttttggggtggttgcttctctgtttgtgttttattttttaaatctgtaattcccagagttgtttgcaaagtcagatctaaaaatcaagaaatgtccacctcctgtgtactcatggaagttgatttggaatcaaggaagaggcagagggaatggaagattcagttacttcc

SEQ ID NO: 663499 - DNA, 479 bp, Homo sapiens
aggagtaagggtaagggaaggagggatgaacaggtagaccataaggaatttttagggtcgtgaaataattttgtatgatactgcagtggtggatacaagtgattatatctttgtccaaactcacagatgtacaactcaaagagtaatggaamctatggactttagttaataataatcaatcagtattgactcaacagttgtaacaaatgtgccacactaatgcaagatgttaacaggggaatttacatgtgtagggaagaagggggaggaggaagtatataggaacgtaattcgaattctctttactttctgcccagtttttctgtaaacctaaaatggctctaaaaaataaactcctactgaaataaataaatatttgttcatatttcaaaccaccatgacctaaatgtcagatttaagagacaatttaaatgttttcattttctatttttttataacaatttcagattctttaaaaa

SEQ ID NO: 663500 - DNA, 576 bp, Homo sapiens
ctgctgttgctttcattctcttataatactaacatcttagaatatacttctcaaactcttatttattcatccctttttacatcccatgccagaaaaacattgtcctgcttgttttgcaaaacttcrgtagttttggaccaaggttataaaccaaaatgtgttagttgaggatttcttatgtgctaggcactgtgggtgttagaaacacttagatggtttggcttgtgcctaacagaccagcttcacctcctgccgcctcgaccctcattctcattatccatccttcccacctccagtcagtcctcactactctactcaaagtcctagcagcacaagacagagcacatggtgtgtgtggtccctggagggcagttctcctagctgaagcaaagctctgtccttggaaggccaaggaggagcagttagcaccttccctacctttctgcatttcccctttaaacacaaccatccagtgtcagcatgcagttcctttagccttaaaaggacttgctttcagcttttcacttgctggagaaaggacactagagcaaaaatattgcaaacaatgtcactaga

SEQ ID NO: 663501 - DNA, 613 bp, Homo sapiens
actaaaactgaatgtatgaatatccaagatctggcacttaatgtacttccggttcctaaagataaataactggagaatgctggggttgaagaagacgcccaaatgttttccccacaacaaaatgtttaaacctgaaatcagaaactttaaaggagaggctatactaatgttacatatagcttccagatcatctcaattttgcttcatctccctaaacaatatgaagacaaaatttagtggtttcatttgatttgtgtcacaatctttatctttcttaaacaacatttcagctgtaattagtgttttggttgtattaacatcccttctatctctcaatttctttgctttgtctctcccaaacaatatttagctgaaaattagcattatcattccattcatattccttctgtttctcatctccctgaaaattttggttacttctcaatgccctrtctccttcataagtccctctagtcacttttttcttttctttttcccataatcagcttgttcttgctcctagtaattccatgttatttttctaaaatacctttctgttgttaataaactttcctatactcctagcctttccttaacaatcctttgattgtta

SEQ ID NO: 663502 - DNA, 529 bp, Homo sapiens
ataacatccctctatttttgcttttgatatgagattttgctccataagttattgtgtctcttctttcttcaatttcactatctacttcctcttgctctaaaaatatgctaacattttttgtatcttaaaaaaaaatccccttaataytgctgtcctacaaaactactgtcttccatctccttcccttcatctataacttcctgaaagaattttctacacttttctatttttatataaaagtcccattcatttctcgagatatttggcttacataattccaagggacctgcactgaataatgttcatagtgacctcctaattgtaaatcctattttttttttaaatagtactttcttactctagtggattgttctaggattggacattgttcaccacaaaccacttggatagaaattctcccttctcttggattctcttctagttttgttttgttttgtttctaggtttctttctaggtttttctttacgtcattctcttctagtttttctcctacctctttttccaccc

SEQ ID NO: 663503 - DNA, 485 bp, Homo sapiens
taaaaaaattccaccatacttgcttactttaaactttgaaacaggcaaatagctaaggccaataacactagatagaattaagtaattaataayttaacagcacaatttaacattgtgcttcttaggatgggcagggattggttaatggatacaaaattatagctagataggaggaatgagttctggtgttctggagcactgtaggatgaatatggctaactataatttattgtatactgtcaaaagtctagaagaaaggattttaaatgttcacaacacaaataataaatttttgagataatgcatatctggtttgattgttatacattgtatacagtattaaaatatcactatgtatcccatgaatatgtaaaattattatttattattttaaaaataaaaggggaggaaagagattgtgctttttgtcccttcgggttcatttgtctattactattctttctcactctctttttttttttttt

SEQ ID NO: 663504 - DNA, 594 bp, Homo sapiens
gctggctgcccctcctgcatctgaggactcccttcttcacattgctcctcttcttccacttcctgaagcatggtagctgagcaatctgagcgggtccatttctgattctatgggaatttaggccccagggtcttcaagccctccttccgatagggaaagcactgcacatcacagggtgactgtgaccttggcctgggcctttggcggacagtgaccagagtcctcccatcttccatcagctgaggttctcacctgtgcacctgaccatcttggtatccacataggaggctctgaagagyacatatactggtacatcagcgtacattctaagcttgttaaaggcagagatgtggtatatcccttcaacacctaatacttgccatataatagatgctcagtaaatgtgtgttgttgaaaaggtatgtgactaggtaaatttccttgaaatgatcaatagtagtttatatatacatatataagtaataccacactattttcatcatagctactgttttttgtttgtttgtttgtttcagcacctactatgtcaggcactattccaggcattctatgcacattatttctaatcatctc

SEQ ID NO: 663505 - DNA, 587 bp, Homo sapiens
tttagtttaaatactgtagcatagatcatgggacataacccaggcayggaatatatatacttcaaaactatccctgctgtttctctgcattcgctaatatctctacggcaaacatgccatgctttctaaaataataaggaaaattgcctttatttttttttaaaagaatatgtcatatattgtgcttgaagattaaaatctgagaatcagcaccatttcaggtccaaagatgagagatcctgcttcctacggtgtaactacaagaagaagaagaaaaaaaaatacctcagaaaccattgtgttaattgataagtgcacggctcaataaaagaatgggaaagggttgagaagcaggggcagccagggcagttaacactcaaaagctggtgagcctgtccaactaatctgcctcgtttgttttcacagctttgcccggaacatttgcagggatggcccgacactccccgcagagcctgagagcgagtggcgagccaagataccagcggcacaatgtttcacctgcgctgccagatactcagacagagaaaacacacgacagtttgtcaaaacagccatcagcgcggcgc

SEQ ID NO: 663506 - DNA, 201 bp, Homo sapiens
tgaagccatggcagaagaatataaawtgtgaagatttcatggacatttattagttccccaaattaatacttttataatttcttacgcctgtctttactgcaatctctgaacataaattgtgaagatttcatggacatttgtcacttccccaatcaatactcttgtgatttcctatgcctgtctttaatctcttaatcccgt

SEQ ID NO: 663507 - DNA, 201 bp, Homo sapiens
tgaagccatggcagaagaatataaaatgtgaagatttcatggacmtttattagttccccaaattaatacttttataatttcttacgcctgtctttactgcaatctctgaacataaattgtgaagatttcatggacatttgtcacttccccaatcaatactcttgtgatttcctatgcctgtctttaatctcttaatcccgt

SEQ ID NO: 663508 - DNA, 605 bp, Homo sapiens
agtcccaggaggaactcgtttgctagattggggatgcctgggtgttacctgagtgggagggtttgcttcacggacccggggactgaacactgctccacactgggtatgactttagagtctcactttccttaccctttaaattaaacacaggcgtggtacatgaggtcaaggatgtttttaggtctagcattctgtgtttttaaagtcactagcttgtagtctcccaagctcatgacctccaaattccccaaacaattaaagaagtacatgtgtgcgtgaaagacaacttggtggagggttgccrcttgcatttgcctggaaaacagatgggataatgggattgctggaaagtaagggctgccccttctttgagagaaagcagtagcctgctgtggatttgaggatgtcttcagacaccatctctggttccagaaatggtcagtgactttgattcactgcacaaagcagtcaccctggctgggagccagtcagggtcctgaggctgcagtgcacttgaagatgtcagcggggcccggcatgaagatgccttggacccatgcccaccctggttagtgggaaccagctgggagcacctgaggcccccg

SEQ ID NO: 663509 - DNA, 529 bp, Homo sapiens
cactacaaaatgaaaatggcagaccatttgttcaaaaacaaacaatttcaagatggtgacagtagaacattaaaccaagtgtggggctcttgactgagcccaagctgcagtctgagaagctggcccttattaccctaggggtggggaaggaggagagggagaccccctgccagatcgctcctgggcggtcagagggcacgtgcctcaccactggaaggttccctgagccagccaaggccttcctattgccaagatgggtaaaagccacagtttagggagccctccggcacagagtcactgcrgtgcaatgccaggcctccaaaagataggggcaagacagactcagaagtgtgtctttagagtggctaactgccttaaacatcccctgctggaaagttcttgggggcccaggagggattggaggtgcagccgccaccaccagcaggggcttcaggctgagtgatgagggaggtgcagaggggaggaggctgcacagttcctaccaccttatgcaagagggagaacaaag

SEQ ID NO: 663510 - DNA, 502 bp, Homo sapiens
tcacaggggggttctctgtggttggttttgtgttacagaaacagagtagtcaaggtatctaatatttgtgttataccaaaaaaaaaaaaaaaaaaaagatggaggttgtttgttcagccaagagaacctaaagtaggaaaaatatgaggaagtgtttatggaagtagttgtagcttggtgttcgctgcaccagacgacagaaataggactgatgtgaaagttatcagaaagtaattttcaacccaaaggaaggaatttgttaagtggagatactcaaaartggaacatggtacatcctagaggaaagaaacaaccatttgtagaacatttgtcttgggtcttctccagcaggagatatttaaaactgggtgaccttataatttatttcccaaacagggacacatttgagaatgaaagaataacagctataaactggggtatcccaggcaaatgggttcacattaccctaattcacccttgtagacccccagctgtgtgtact

SEQ ID NO: 663511 - DNA, 265 bp, Homo sapiens
tcagtggcttcacctccctgttgtgaccctgacccragtcccctctgagccaggccttcctggccccaaagctcccgcctgagcttgcagccccctctcctgcctgcgtttcccctaagcccatatcagccgcatgtcctacgcctccttcgctgttctcttgttgctggttgtgtctccccaagaggacagggcatttttgtttctgttgctgatggaccctggaaccagcctggcccacagcaggggcgccccacacagtggt

SEQ ID NO: 663512 - DNA, 223 bp, Homo sapiens
ccatccttctactggggaagaggacagcccctcctcccaccttgggactgcccccacactgttacctgtccctggtccaggaggattcgggcagctaactcagcctcctggagagacacacacggattcacacagaaacacatgaccatgtggcgtcccagatggagagacaaacagacaaagagaggcaagtraagacagaccaacaaatgaccaaagacag

SEQ ID NO: 663513 - DNA, 571 bp, Homo sapiens
ttactagcatctctgagagtctacccatgaggaaacaagtggctgggaaastgggaatgaggggactagatccacacagatccctgcaaatatgctgctcattcgccccaaaacactactccaccttcactctaaacttaactcttacgtgattatctgtatttcctcgacactggaaaaccaggtttttctttcttctatgccagttacccaatgtacatttgtgctgtagatgagagctgaggaccttcctgcccttcagggttatagtaaagttagaggcatgttatgtggttcccaaatatttgggaattttctaggtatctttctgttattgatttctgatttaaaagcatatggtcagagaatacattttgtatgacttgatacttttgaatttattgagacttactttaaggcccagaataggacctatcttgggaaatgttctatgtccacttgaaaggaatatatattctgttttgttgagtggagtgttctatctgtaactgccaattaggtcaagttggttgatattgttgtttgagtctttctaatctgctgctaatct

SEQ ID NO: 663514 - DNA, 571 bp, Homo sapiens
ttactagcatctctgagagtctacccatgaggaaacaagtggctgggaaactgggaatgaggggactagatccacacagatccctgcaaatatgctgctcattcgccccaaaacactactccaccttcactctaaacttaactcttacgtgattatctgtatttcctcgacactggaaaaccaggtttttctttcttctatgccagttacccaatgtacatttgtgctgtagatgagagctgaggaccttcctgcccttcagggttatagtaaagttagaggcatgttatgtggttcccaaatatttgggaattttctaggtatctttctgttattgatttctgatttaaaagcatatggtcagagaatacattttgtatgacttgatacttttgaatttattgagacttactttaaggcccagaataggacctatcttggraaatgttctatgtccacttgaaaggaatatatattctgttttgttgagtggagtgttctatctgtaactgccaattaggtcaagttggttgatattgttgtttgagtctttctaatctgctgctaatct

SEQ ID NO: 663515 - DNA, 541 bp, Homo sapiens
cccgaagtcaggagttcgagaccagcctggccaacatggtgaaaccccgtttcactaaaaatacaaaaattagccgggcgtrgtagcaggcacctataatcccagctactcgggaggctgaggcaggagaatcgcttgaacctgggagacagaggtttcggtgagccgagatcatgccattgcactccagtttggggcacaagagtgagacttcgtctaaaaaaaaaaaaaaaaagaagcctagacccctgtacatatctctaggaaacgggctgaatctaggggactgagcggcaatggtgtgcaggccctacttccgtggcacttcacaggataagacccactggcttggaactccagccagccacggtagcagcatttcatcttcctgagatggagctcccagagggatggcacgccaccatatttgctgtctcacagccttagctgttgttgccatctggctctggggagtccaagatgagtagggactggagcagtcccctggcacagcacagcagctctccggagagatggccag

SEQ ID NO: 663516 - DNA, 580 bp, Homo sapiens
gtcttatgtcctccaaatgatcacactagttctccaacaagagttcttaaccaggctgagttgactgaaatgacaagaaatagaattcagaatgtggataggaatgaagatcatcaagattcaggagaacagcaaaacccaatccaaggaaactaagaatcacaataaaacaatacgggaactgacagacaaaatagccagtataaaaaagaacttcactgatctgatagagctaaaaaacacactaaaggaatttcacaatgcaatcacaagtattaacagcagatcatgctgaggaaagaatctcagaacttgaagactggctttctgaaataagacagtcagacaaaaatcaagaaaaaagaatgaaaaggaatgaacaaaacgtccaagaaatataggattatgcaaacaggccaaatgcatgactcacaggcacccctgaaaggggcagaaagaaagcaaacaacttggaaaacatatctcaggatactgtccatgaaaacttttccarccttgccagagaggccaacagtcaaattcaggaaaaacagagaatccttgcaagatttacacaaaa

SEQ ID NO: 663517 - DNA, 569 bp, Homo sapiens
cccacaccacactcctcctcccccatgagtgaacggctcttaccggagtacctgcccacagctgtatctgggccctaagaaagcagcaccccatgccagtggcagagcaagagctccaagcacttgttctaagtatctcgggccatctttggggaagggatatgacagcgtaaggaaaggaagagagctcaaatccatccctggcttgcagaaagcaacaacagtgggtgcagtggaccgtttgacagacaccagcaagtacaccggcacccacaaggagckctttgatgagagtggcaagggcaagggcattgcgggacgggaagagatgactgacaacacaggctatgtgagtggttacaagggttctggcacctacgataagaagaccaagtagagaggagcttcatctcagcctgctagccccctgaccctgcatgtttaacaccagggagcttggaaaacaataaacatctgtgtgtgcagcagccaaaatctctgtctgtgagggacagatgagcctactagtgtagagagagggagaagaggcagcacgggagggtgggttc

SEQ ID NO: 663518 - DNA, 552 bp, Homo sapiens
ctgaggccctgggcctccatccaggacttaggatctggcccagtgggtggacagtcactgccaactggacacagtcaacttcttgggtgggttttactgtctctgggagaggraggatgatgaggaggtgggggcgaagagggggtaaacaagctggaaagaacctagaagatagcaccactttgcatggtgatcaaagccctggacattttcgcacccacctggtctcttgggaggggaccctgcctgcctcgtaagtcaggaaggaagtcttgttacagggatcagagtgttggaaatggagacagctggcctgtggtggtagaggttggggagtggctcaggaattaaattcccgaatagagaccagcgatacctattggatcagcttcatacttgcgggagcagagtaggtagagcttctggttggttagggtgctattgtagtagcagctagtgggtggctgttggtggctcagggagcagaccgtgatggggagggaatcctgggtgagtgtgcagtattcattgtaattctcacagaagctgtca

SEQ ID NO: 663519 - DNA, 574 bp, Homo sapiens
aagatgtatatcaagagtttttagaccagtgcccggcacatggtgagtcctcagtatgagcctgagtccatcagtcacacagccctgacaatcttaaacttttcccaagcccatctcttccattcttatttcttcctcagtggatgctctcgtctcgcctggacagcacacacactccaactccagtaagactcaactcaaatatatctcttatacaacttcaagagaaaaagtgtggtcccttctttcgtctaaaagtctgcaatagcttgtttctcatagggtaggggtgcccagtcttttggcttccctgggccacattggaagaagaattgtcttgggccrcacataaaatacactatcactaacgacagctgatgagcttaaaacatgcaaaaaaattcataatgttttaagaaagtttacgaatttgtgttgggctgcattcaaagccatcctgggccacatgtgacccgcgggccatgggttggacaagcttgtcgtagggtatagtccaaactacatctcacaggacataagacttcccatgatcttgcacctgcccatgtgtaca

SEQ ID NO: 663520 - DNA, 529 bp, Homo sapiens
acaagcccgcaggcagagtcctgggagggcagccaggttgtctgagatgatgaggagagaaagtaaggaaaggatgattaaaggaaaggagagcagatcattaaacagttctaacagaatgagggccaataagtggatgagttggtcacaacagccaaacgactgagtgtaaaaacaamtgttacctgaaaacagaacattgccatcatcgaatggacttctgggattcttgaataaatctgaagtttatccaaaatctgaatttgttttgaactcttgtggtcagtatactacatttaccatcctaaagagatgattttcacttgtggtgcacagaaaagcaagatacttggggcagccgatttttctcttcattttattcttttttcacaactctatcttctttattgatgatctttcttatggataatatggttttagagacattctcctcacaaaatttaaagtggctaaaattatgccttcaatgcatcctcccaaaataagaagaatttccaactaaaacttt

SEQ ID NO: 663521 - DNA, 562 bp, Homo sapiens
aaattaaccaagtgaaataatccaaggcaaagatcactatagaatcagaaaattcgtacgttgttttctagacaatgcccagcattctattaaaaggaagtgctgcaatcttgtctgcccactttaaagtcttccatatcttgtcctaatatgccatcaattaaactcatccctcatcaagtcacctaccccacaaatagaaatacagatgcagatatactaagccacttacatgcaaataaatatttgaagaatggctatgtagaagaggaattttatattccacgtgtaaaccaatttgtgagttaattcatttcctggcatattagcaggaaacaactatattcctttccactgctaccattttaaatctagtctttcaatttgttttttctaaatctgtccataatcttkggcaaagctcatagatttcccagtgacagtcaggcaatgcgtgaagaatttgttgttttttgtttttcctggtaataaaatcttgtttcaggcaatatgaagtccctaaatatcattcagattaaaacttcttttccctagatcacac

SEQ ID NO: 663522 - DNA, 562 bp, Homo sapiens
aaattaaccaagtgaaataatccaaggcaaagatcactatagaatcagaaaattcgtacgttgttttctagacaatgcccagcattctattaaaaggaagtgctgcaatcttgtctgcccactttaaagtcttccatatcttgtcctaatatgccatcaattaaactcatccctcatcaagtcacctaccccacaaatagaaatacagatgcagatatactaagccacttacatgcaaataaatatttgaagaatggctatgtagaagaggaattttatattccacgtgtaaaccaatttgtgagttaattcatttcctggcatattagcaggaaacaactatattcctttccactgctaccattttaaatctagtctttcaatttgttttttctaaatctgtccataatctttggcaaagctcatagmtttcccagtgacagtcaggcaatgcgtgaagaatttgttgttttttgtttttcctggtaataaaatcttgtttcaggcaatatgaagtccctaaatatcattcagattaaaacttcttttccctagatcacac

SEQ ID NO: 663523 - DNA, 605 bp, Homo sapiens
tggaagtttttttttttgtttgttttcagtcctggggaaaacagaaggcacagcaacagaaatttagactgaatcgctcaggacacggcatgcctaaaccctatgcactttttatttgcaaagtattcaaatgcctttacaaggaaagtcggttaggaaggaagggctgcctgcagaattaagagcgagagtgtggctgtgcatttgtctttgagctggttaactgaaaatcaatttcctattttaaaagcagacccatcaaaggcaagtgtccaattttaagctaagctctacaatatgcttttcaataaaatgtctttctgtctctttcccttttctcatttcaacgtcctgttacatatttccgaaagcacrgctttcatacttgatgtatgctatgattgtgtggaatgaaaagctctgaaagaccacagagaaaaatatcacttgcctccatctctgaggagagggccctttgaattaagaccgattccacctgagaagcctgattgaacctgaattgataataccttcgtgttgtgggctttctcgctttatttccccttgcattcttttttatttcagaatgtattgtgggtcattat

SEQ ID NO: 663524 - DNA, 605 bp, Homo sapiens
tggaagtttttttttttgtttgttttcagtcctggggaaaacagaaggcacagcaacagaaatttagactgaatcgctcaggacacggcatgcctaaaccctatgcactttttatttgcaaagtattcaaatgcctttacaaggaaagtcggttaggaaggaagggctgcctgcagaattaagagcgagagtgtggctgtgcatttgtctttgagctggttaactgaaaatcaatttcctattttaaaagcagacccatcaaaggcaagtgtccaattttaagctaagctctacaatatgcttttcaataaaatgtctttctgtctctttcccttttctcatttcaacgtcctgttacatatttccgaaagcacggctttcatacttgatgtatgctatgattgtgtggaatgaaaagctctgaaagaccacagagaaaaatatcacttgcctccatctctgaggagagggccctttgaattaagaccgattccacctgagaagcctgattgarcctgaattgataataccttcgtgttgtgggctttctcgctttatttccccttgcattcttttttatttcagaatgtattgtgggtcattat

SEQ ID NO: 663525 - DNA, 625 bp, Homo sapiens
cacttctcaatatcactacttctaccatccttttgtgaccaacaatctaacatctattttctcagttatttcaatggcttcrtactggtctacatgtttctactcttgattctttatattattttttccacaatgcatccagaataattaaacataagtcagatcatgccatacacttcttcagaatttttcttgtggtagactccacaatggcagccaacaacatcaccccctagtcatcttcatgcttttatgtgaatccccttcaaagaagtgtactaggaccaataaaaggacatgatgatattctacttcaaaaataagattattaaagactgttggttctctctcaggtctctctcagtctctttcacacacacacacataccccacactcactttttcactctcacattactctttcggggggaaaccatggcatgaacagcagttctatggagagacccatgtgcaagaagacaaagccgcctgtaaatattcatgtgagacccagtcaagtcagagatgactgcatccttggccaacatcttgataggagcctcataaagactctgagcagaactacctaactaagctgcccccattcctgactcacagaaactgt

SEQ ID NO: 663526 - DNA, 625 bp, Homo sapiens
cacttctcaatatcactacttctaccatccttttgtgaccaacaatctaacatctattttctcagttatttcaatggcttcgtactggtctacatgtttctactcttgattctttatattattttttccacaatgcatccagaataattaaacataagtcagatcatgccatacacttcttcagaatttttctygtggtagactccacaatggcagccaacaacatcaccccctagtcatcttcatgcttttatgtgaatccccttcaaagaagtgtactaggaccaataaaaggacatgatgatattctacttcaaaaataagattattaaagactgttggttctctctcaggtctctctcagtctctttcacacacacacacataccccacactcactttttcactctcacattactctttcggggggaaaccatggcatgaacagcagttctatggagagacccatgtgcaagaagacaaagccgcctgtaaatattcatgtgagacccagtcaagtcagagatgactgcatccttggccaacatcttgataggagcctcataaagactctgagcagaactacctaactaagctgcccccattcctgactcacagaaactgt

SEQ ID NO: 663527 - DNA, 620 bp, Homo sapiens
ttgggctagcttctttaccacatcctgttttatcagtaggttctttgtgacctgtatcttgtgttgacctcctatctcatcctgtgactaaggatgcctacccttctgggaatgcrgcccaacaggtctcagcctcattttacccatcccctattcaagatggagtcactctggtttgaatgcctctgaaaccttctgctatacacaaggtttcattcaggcctatctgtccaatccttgcctctgaattcagtcagctttcctgaccatcatatcatagcaagaaccagtcagaagcaaatgggttttctctcctaacttttaccagatcccacaaagcttgctgtatgctgccgactcgtgtacatctagtagtggttactccccacttcctgagtatacactctggctcagtgtaacgtccttgagtacctcatttggtgaataacttaatcaacattgtttctctactcagatcccaaccagatagccttcattactttggttatctttcagaaaatccagagctctgagtgattaataccttttaccagctctctctgccttttcctaaaagagaaatttttaaaaagtaagttaagtcatccctctcacacaaa

SEQ ID NO: 663528 - DNA, 620 bp, Homo sapiens
ttgggctagcttctttaccacatcctgttttatcagtaggttctttgtgacctgtatcttgtgttgacctcctatctcatcctgtgactaaggatgcctacccttctgggaatgcagcccaacaggtctcagcctcattttacccatcccctattcaagatggagtcactctggtttgaatgcctctgaaaccttctgctatayacaaggtttcattcaggcctatctgtccaatccttgcctctgaattcagtcagctttcctgaccatcatatcatagcaagaaccagtcagaagcaaatgggttttctctcctaacttttaccagatcccacaaagcttgctgtatgctgccgactcgtgtacatctagtagtggttactccccacttcctgagtatacactctggctcagtgtaacgtccttgagtacctcatttggtgaataacttaatcaacattgtttctctactcagatcccaaccagatagccttcattactttggttatctttcagaaaatccagagctctgagtgattaataccttttaccagctctctctgccttttcctaaaagagaaatttttaaaaagtaagttaagtcatccctctcacacaaa

SEQ ID NO: 663529 - DNA, 587 bp, Homo sapiens
aaaaagaatttttctgggaaaataaaattaatttcagcctttaaaaataatttatgcatactattaaaactactttaaaaaagaaaaaggagcagagagtaaggaggtggcacttccttgcactgaaggagttctcagatttatagcggaagtgtcagaaacaggatgtaatatccatatgacccccccacctcccccaaacaaaaccattatacccttgatgaattattgacttkagagttttatctgtgccatgaataatcacaaacttgggagtctcagggcacagttcataaacaaataattatatcacaatgataatttttcaggaattgcaacatcaatcatggccatgttattatcaagcacattttctggttgcctctattcatcaaaccctcctccctctccacccttccacatcacacaagcaaaactcatcaccagattgcctcttatttacacatcactcaaagcaggacagagcaggcacacacaaaatgggccaacccagtgtttacgagagctgagttttcattaaggaaattcaaattaaacacattgagaaagatggaggtggggggaga

SEQ ID NO: 663530 - DNA, 591 bp, Homo sapiens
cctcccttctccctgcctacagagaggctgcctctccagtgggtgtggccctccctctgtctggccttttgcctccctcctgcaccatgagagctcctctggggtctgtctccctttttctcctgtggggcggctggacctctcttgcctactcccaacctcctcttcacctgtcacccctctcagtgtgatgaggccctcagctggccaataarccaaagaccctttcagaaaatctactctttttagaaatctggggagaaaatgatgtaaatttttaaaatttcaatttttggaccatgttaaagcatcaaaaaagtacacataaaccaacaatgtaacttcctttccaatcccaaatcctctggtggaactgctgagagccctgcaatgaacttgcctagacccccgcccatcccctccctggtggggaactcccttctgacagagggaagttgggcagtttggagataagaggagagagtaaagaaggtcacgtaagccctaagttgataacctgctccagggaaagcgacagccgtccaccatggccagagtcctcccggtctcacccgagaggccagggtcccc

SEQ ID NO: 663531 - DNA, 565 bp, Homo sapiens
gtatgatctttctttgaaaaactgtagtccctgcatcactcatattaaatggctacygaacaagagggcttggaggcaaagtcttgcccttgcagaatctatcttgtcaccttcctatgtgcctcacgttggtttgtcccacagcctaggctctggccccagcactgcattcagaggagacactatgcatgcattaaggtcaggcatgtaagatgttgtgcctgtttcaaggactttctgtactctcaatttctccccagagaaatgaattgactttgtttggtatgacctctctgatcatccacagaggctcttgtgtgatattctatatatttaaaaagaaacttctaggaaagagaaagtaataaagtgtatgactggggctttattcaatggagaaagaataaggttggtcccaaacctgtatcagactagcgttgaactgtgtggaatcattgaccctagttaagccactatagccatgccaacaaaattgttggttgactacctgatatccttttgttttttctccttggtaatggaacccaaaacttttcttagctag

SEQ ID NO: 663532 - DNA, 565 bp, Homo sapiens
gtatgatctttctttgaaaaactgtagtccctgcatcactcatattaaatggctaccgaacaagagggcttggaggcaaagtcttgcccttgcagaatctatcttgtcaccttcctatgtgcctcacgttggtttgtcccacagcctaggctctggccccagcactgcattcagaggagacactatgcatgcattaaggtcaggcatgtaagatgttgtgcctgtttcaaggactttctgtactctcaatttctccccagagaaatgaattgactttgtttggtatgacctctctgatcatccacagaggctcttgtgtgatattctatatatttaaaaagaaacttctaggaaagagaaagtaataaagtgtatgactggggctttattcaatggagaaagaataaggttggtcccaaacctgtatcagactagcgttgaactgtgtggaatcattgaccctagttaagccactatagccatgccaacaaaattgttggttgactacctgatayccttttgttttttctccttggtaatggaacccaaaacttttcttagctag

SEQ ID NO: 663533 - DNA, 571 bp, Homo sapiens
ccacagagtatgcctcacttcatggaacaattctattccttggaaaaggtgccaatatagcaaatttgtttttgttattaaatgctattataatatcatggctatgagctcttacgaagtcttaaccataaacctcaaaaaataattacatctagtgataaaaagaacatatttagattaaatgtagggaaaaaagctttttaaagaatattccaaatgaatcctcacaaaaaaatactacatattagactatgagtcaagaaagacagacaataataacagctctctaactttgtgacctgccttttgtcccttaacctctctggggtccacctgacttaactgcagagtgaggtaagtttgcaggtgacctccaaaakgagaggttctcctatctgacctcagcctagcagccagctagagtcactgacatgccccattcttcatggctggtccacagagcatgctgtattcttgccactgttgggtcagtctgtgactgtgaatgacagagtctcctgctcaccaagagcctgtagcgtgtatacaaatctgttgtgcttgttatcat

SEQ ID NO: 663534 - DNA, 544 bp, Homo sapiens
ttctctttaaataaaccaaagtttggacaatgaagacaatatttgggggcgtcatttatgcaagaaagatgatgcaggrctataaatagtagacgtgcactttaaaaagcctagaatctacatcaagtctatgtaaatgagtacatttaggtgtcttaatttaatacaaaatgttctaggtgcatatgcattgggttttgacggctagtttttaaacacattctatgctttatccaactttttaattaaactgtcttgatcttgttagataacaagttttcttctgtaatttcataattaggatcccatttataagaattgaacacagtggtttcaagccaggcacggtggctcatgcctgtaatcccagcattttgggagcctgaggcaggtggattgcctgaggtcaggagttttgagaccagcctggccaacatggtgaaaccctgcctctactaaaaatacaaaaattagccaggcgtggtggcacacacctgtggtcctagctacttgggaagctaaggcaggaggattgcttgaatcc

SEQ ID NO: 663535 - DNA, 572 bp, Homo sapiens
cctctatgaatctgcaagagccacagtaatattgggcttggggtgtcccctaatgtagacacagctgcagtgagtgaccaaagacttaaatagcaacacccaagtccctttggataccttgaaaaccttcccgagaagaacaggtacaaacaagtgcagactgtgaagactacaataaatacctaactcttaaatgcccagaaaccgacaaacatccacaagcatcaggactawccaggaaaatatgacctcaccaaaaagactaaataaggcaccagggaccaatcctggagagacagaggtatgtgacctttcagacagagaattcaaaatagctgttttgaggaaagtcaatgaaattcaaggtagcacagagaaggaattcaaacctatctgatatatttaacaaagagattgaaataatttttaaaaatcaagcagaaattctggagctgaaaaatgcaactgacatactaaagaaagcatcagagtctcttatcagcagaattgatcaagtagaagaaacaattagcttgaagacaggcttttgaaaatacacgttcagaagagac

SEQ ID NO: 663536 - DNA, 618 bp, Homo sapiens
tcatccagacagaaaatctacaaagaaacattagacagaatctgcagtatagaccaaatggacctaatagatatttacagaatgcttcatccaatagttgcagaatacacattctttgtttcagcagatggawcatcctcaagaacagaccctatattaggccacaaaacaagtctttaaaatttcaaaaaaattgcaatactattaaaatcttctctgacacaatggaatataatgagaaataaatagcaaggaattttggaaactctacaaatatgtggaaattaaacaatatgctgcttaatgaccagtgggtcaatgaaaaaattaagaaggaaactgaaaactttcttgaaacaaatgaaaatggaaacacaagtcaccaaaacctatgggtacagtgagagcagtagtaagtggaaagtttatagcaataagcacctacatcaaaaaagtataaaaacttcaaataaacaacataatgatacatcttaaagaactagaaaaacaagcacaaatcaaatccagagttagaagaaatgataaagattagagcagaaatacataaaattgaaacaaaaaaacaaccatgcaatacaacagatcaacgaaacaaaa

SEQ ID NO: 663537 - DNA, 540 bp, Homo sapiens
tttacagaatgcttcatccaatagttgcagaatacacattctttgtttcagcagatggaacatcctcaagaacagaccctatattaggccacaaarcaagtctttaaaatttcaaaaaaattgcaatactattaaaatcttctctgacacaatggaatataatgagaaataaatagcaaggaattttggaaactctacaaatatgtggaaattaaacaatatgctgcttaatgaccagtgggtcaatgaaaaaattaagaaggaaactgaaaactttcttgaaacaaatgaaaatggaaacacaagtcaccaaaacctatgggtacagtgagagcagtagtaagtggaaagtttatagcaataagcacctacatcaaaaaagtataaaaacttcaaataaacaacataatgatacatcttaaagaactagaaaaacaagcacaaatcaaatccagagttagaagaaatgataaagattagagcagaaatacataaaattgaaacaaaaaaacaaccatgcaatacaacagatcaacgaaa

SEQ ID NO: 663538 - DNA, 540 bp, Homo sapiens
tttacagaatgcttcatccaatagttgcagaatacacattctttgtttcagcagatggaacatcctcaagaacagaccctatattaggccacaaaacaagtctttaaaatttcaaaaaaattgcaatactattaaaatcttctctgacacaatggaatataatgagaaataaatagcaaggaattttggaaactctacaaatatgtggaaattaaacaatatgctgcttaatgaccagtgggtcaatgaaaaaattaagaaggaaactgaaaactttcttgaaacaaatgaaaatggaaacacaagtcaccaaaacctatgggtacagtgagagcagtastaagtggaaagtttatagcaataagcacctacatcaaaaaagtataaaaacttcaaataaacaacataatgatacatcttaaagaactagaaaaacaagcacaaatcaaatccagagttagaagaaatgataaagattagagcagaaatacataaaattgaaacaaaaaaacaaccatgcaatacaacagatcaacgaaa

SEQ ID NO: 663539 - DNA, 568 bp, Homo sapiens
ccgatactggtagagtgttaaagtgacacagttgtgtgacaagaatatatttctctcacatatttagtgaaaatgtgtcagaaagaacaaagcgatatcactggcaataatagaaacagaccatttaaataaagtcgctatcagagctgagaccagctgcctgtgtgcctgtgaaatgatcccctccccccgtgcccaagcttcatttgcctatcaaatactgactcccttaaggacccgtctagaatgtctcaactctgcaggtttttgtttggattgtctctgaagctattaatactttctaacagccaatagtatattcactccactcatctttaaaaactttggaagaagtaagttttagaaatattaggttagtgcaaaagcaattgcagttttgccattaataacagttcagcrtttgggaagagatgggagaatggggataggaaacatgatgaccccagtgacacagggcaagaaaggaagcccacgaaggcatggagtccaggaagggagaagagcacaagagcaggtgatgggtttcaggtacaaagaatttaaggcc

SEQ ID NO: 663540 - DNA, 576 bp, Homo sapiens
gggaggaggaaaggtgggacttttactccagcttgttagctcattcgcactttccttggtgatttatatggttttagaccaccacctgacttcccaatgaggagacatatgtgaaagcctttgcaatgcgcaatgaaaagctgtgctatacagacagtctcctgagctaccattctcagatgcaaaataagtggagagaaaatccagacttgaccttccacactggatgtttaatacattaaatcttctgcccaaacgtttaatgtgttgtttccttctgggcatgtgccagttaaacatctattacatagaacccatgtaatgccaattggytcagtcccattgctaccttagaaatcaatagattaatatagtttgctggagtgtcaggtagtgagcagcagcatatgcagttgtatgacatgtcttacaaatttaaaaaggcttagaaaccattatgcttctgtggctcctgggaaatcaagcaaattgaaaacttgcattcatgtgtggcagaaatagtctgtgtgtatcaaattccatctaaaactaaaaagactttcaattctcttcccc

SEQ ID NO: 663541 - DNA, 580 bp, Homo sapiens
ataagaatcttaccttgtggttaaacattaaaattgggtaaatgtgtctataatattttattagaaattcagtttaacattgatagcacattaatgtaaatgtgaaatttggcttatttggtataaaatttatacagagaaccttatcaaacgtgaaatagtgctttgctttctttggactatatttgcataaatgtgttattggtttatgttccaaagttatgagaaactcctctaattctaatatgacttagtgtatgttattaataattataattgttatgtaaaattttgtgtgccacagaaataaccaaayttccttatcaactgcagctttaatagtggctgtcctaaaactttttattttctacagacaattgttgtcttgttttaatcctctttagaaggtggtttataatcaactatagaactctagcaggtgttcttaaacacaggtttctaataattttggaagttataacattagaacagaggaaacaactttcagaactctcataagagctggaatgttcatgaatattaactagaataggagtcaactgaattaactgaaccaata

SEQ ID NO: 663542 - DNA, 532 bp, Homo sapiens
ctaatacagcatcaaagataataaaatacttggaaataaacctaaccaaagagagaaaagacttgtacagtgaaagctgtaaaacattgctgacagaaattaaagacacataaagagacatctgtgctcatgggttggaagacttactgttgtcaaagtgtccatattacccaaagagatytaaagattcaacacaatccttatcaaaatcccaatagcacattttttccagaaatagaaaaattcagcctaaaagccataggaaatctcaagggataccaaatagccaaacaattttgggaaaaaaaaaaaaaccacacagctggaggacttaaacttccagatttcaaaacatattacaaaagccacagtaatcgaagcagtgtagtgctaacaaaggcagacaaatatcaagggaatagaatggagagtccagaaataagcctcatgtatatgggcaaatgatcttcaacaagggtgacaacatcactcaatagggaaaggccagcctcttcaacaaatggtgctggga

SEQ ID NO: 663543 - DNA, 554 bp, Homo sapiens
gactaattaattataaaacacttattatggtgcctggcacagaaaagcttccttctctcatttttatgcattctatatacatacaacactggaaagtaacagcatttggcctgctttataatgaaaaatggaagcataccaacccttcaaagtcagaaagcaggcagaaataaattgtcagaggaaactggaatacttcagatcatctgtaaacaaagccctcttgaaaacaaagcaaaaacaaacctcaaatctctgattaaaacattaaaaaaaaaagaaatgcacacctttcttaaaggtaagagcagctaataacacaaaagttattagaacaaaagtaactctggaggtaaatgagtatagaagccacttttgtctggaagaggtttattactccccctagatttgaacttgcatgttaatgccttttggctataaamgggacatatattaaagcccagacccacataaggtgacaatgatcgcagcagtggactgtctagagcagccactgccccatgatgccagctgcagtgaaggaggtgcggctg

SEQ ID NO: 663544 - DNA, 618 bp, Homo sapiens
tgtcctgagatattcccatgggtcacacctgcatttcacttcgatttctgctgaaacatcactttcctcacctccccatctacaatatatcaagtgttccttctgcaccccatcrtctgctttatcctgctccttactgttcttcatcacacttaacacaacctgacactgttttatacatgtatttgtacatagttttcctctcctactacagtataacaggaaattcctagaacagtttcaggcacacagtagaaattcaatataaacatttgttttttaaaaaatgaattaatttataaatattagacatgatttgtactaagccagaacatatttcttccttgggtcagtgttctacatcttccttgagtcagtgttctagtccctttaaaagaagtttagagatgagaatatgtagccaatggaattatacaagttttttagtattggggccctgatgataaggataagatgatactataacttttctttttaaaaagcctatactaatggttgacacattctatgacatatttttcatgctatcatattcagttttttaaaaatcaacgtgtatttaacttgtaccccacttgtacccaattctaggggcta

SEQ ID NO: 663545 - DNA, 477 bp, Homo sapiens
catcacacttaacacaacctgacactgttttatacatgtatttgtacatagttttcctctcctactacagtataacaggaaattcctagaacagtttcaggcacacagtagaaattcaatataaacatttgttttttwaaaaatgaattaatttataaatattagacatgatttgtactaagccagaacatatttcttccttgggtcagtgttctacatcttccttgagtcagtgttctagtccctttaaaagaagtttagagatgagaatatgtagccaatggaattatacaagttttttagtattggggccctgatgataaggataagatgatactataacttttctttttaaaaagcctatactaatggttgacacattctatgacatatttttcatgctatcatattcagttttttaaaaatcaacgtgtatttaacttgtaccccacttgtacccaattctaggggctagag

SEQ ID NO: 663546 - DNA, 500 bp, Homo sapiens
ctggggcctttctgaagcatctacatttctcgctggactgtctgaagttatttggggtaaatgccatgacgtgtctcatagacgagaccrtggacacagcaggacaaatctttagatagggacagtgagagttagccaaatggagacacatattgttgttttgggtaactcagtaggatgcagagccctggccttaggatcaacagatgtaggttttagtcctcgttttgccacttgatatatatttgactttggggaactcatttagcttgcctaagtctgttgaaagaggataatagtacctctcctgaaacatcgtagagttattatgaggttaatgtaagataatatgagtgaaaatattctgtaaactctaagtgactgtgaatacccaatattatctttattggattataactgtaaaatgtagggttttagcatttcagaatatattggcttagcttatgtttatcacaagtaattgacctcctcattttatt

SEQ ID NO: 663547 - DNA, 615 bp, Homo sapiens
aatcttctaatggaatgtaagctctattagggagacattttttttctttctcctcccacccgtcactctcctactgtaacttcaaaacctagaacggtgacwggaaccagtagaacttcattaaatacttgttaactgaataaattctaacaccagctgtggacaactggaccccatgatggcttacaccaattacgatccatacttgggggtgaacttgctttccctgaagatcgtagctgggcacaggaagatggatacttgggaggagataaatgcctgggggaaaattgagtctttcttaggaaaataagaaaggaagactttgggtaagaagtcaacagtactaactatattttctttaatttatttccctttttaaaagcaagagagataattatcaaatttatcctggagtcatgaaaaataccttacgtcactgattctatttttttcacattttaacatctctgactttggagtgcatcttacaatcactgtcatccaatgatcccataactggcagtgatgttttctttcttggtgcttcacaaaaggatggggcattcttaaaatggatggggtcttagattcaatgacatctcacttctgatg

SEQ ID NO: 663548 - DNA, 469 bp, Homo sapiens
ctagagagagtgcttgccccatcgcagagcattcatatgaaacattcttaaacacagtgctrtgtatactttcatatctggagctgaaggtgacctggaatacatggatttattcttcagccctggattttgaatttgtttcttcacttgggaagctaggtgctttggaaataatgttttaagaaagtataggaaaaataaaatgtatctagtaaaaagagcttgcaggctgcgtagtctttataactataatggaagattgtcattatttacctggcctgctactggttgtctttagtcctgactgagtagcgtgttttaccacaaaatacttccaattgtccttttagacgtggattaaaaagaaatcaaagatcgcaacatgcacatcacaaatttctccattttgccaagggcatttagcataatggatatgataaagtttctagaatgatttttatttaagcat

SEQ ID NO: 663549 - DNA, 615 bp, Homo sapiens
aatcttctaatggaatgtaagctctattagggagacattttttttctttctcctcccacccgtcactctcctactgtaacttcaaaacctagaacggtgactggaaccagtagaacttcattaaatacttgttaactgaataaattctaacaccagctgtggacaactggaccccatgatggcttacaccaattacgatccatacttgggggtgaacttgctttccctgaagawcgtagctgggcacaggaagatggatacttgggaggagataaatgcctgggggaaaattgagtctttcttaggaaaataagaaaggaagactttgggtaagaagtcaacagtactaactatattttctttaatttatttccctttttaaaagcaagagagataattatcaaatttatcctggagtcatgaaaaataccttacgtcactgattctatttttttcacattttaacatctctgactttggagtgcatcttacaatcactgtcatccaatgatcccataactggcagtgatgttttctttcttggtgcttcacaaaaggatggggcattcttaaaatggatggggtcttagattcaatgacatctcacttctgatg

SEQ ID NO: 663550 - DNA, 573 bp, Homo sapiens
ttgtccaactatgccagggaaactgaggaatattggcttccactctgcattctttctttcttacatatatttgtgtctacaatgccttaagagaagtctctttgttcttttattactttaagagttccagatacctactgcagcctcttgggaattgatcatttttaggtttgatcactaaagaattttttatctaaatttggggagtattggttttttttttttccaaaatatatatgacccacgtgtttgctttaaacaattttaactataagaaatagaatcactgttatttgtggtttcccctttaaggggatggcttctttaaaaaaaaaatttcagctcaagagacagcagagttgcacttccctagggctggtctacccatctacatggacaattgtctttacttctacatcctctaaagctgaggaagacaggagtggctggcttcacattttcctttattatcaaaatataatcatttattctcctagagcccttgaagttaaatggggrcactggggaggctatccttccgtgaggctgccttaacatcttctcacagcagca

SEQ ID NO: 663551 - DNA, 626 bp, Homo sapiens
gtttctggcttgtgtttgtaagctggctctgattgtgcctttctcattctgatatttatatgatttgttgctgtcctataaaataatgacctttgagtccttgaaagtaaaccctctctgattctgtttatttcaataagtccttggcacttgatggcatagtgtgaatcacctttactgtcctgattgctaattgaagtgggttgtttttcagtattttaaatctatattaattaaatgagcattgggctgggagtaaggagactccttagagttgtactcccaactctgttcctggggaacaggataaacctgggaggtcgcttactctcccctgctcttgcctgtacatggggagattgttctagatcagctagctctatacrtctgtgttggaatgggctaatggtgccagtcacagtgtatgcttaatttgggctacgattccagcctccatcacaagtctgggcctcagtaaatgtactaatttatctacaaaataaagtttaataaacactgatatggtttgactgtgtccccacccaaatctcatcttaactgtagctcccataatccccacgtgtcattcgagggacccagtgggaggtaactgaatcatgggagtg

SEQ ID NO: 663552 - DNA, 549 bp, Homo sapiens
gtcttttgctgtctctcctataaagtggtggggaaacctttgtcttaagtgctaccttgaccctttcattttctggagaacaacttccactctgaaatttgtggtctcagtttcaaagtacacatgggagaagacaagttcaaataagccagagccttataaaaatgcctatttgaccagccacaaaactggggtgaggggaagccagggagatggggcagagcacgttctttagagaaaatgttgtgtggacacagcagctctcgaagacagtgctttcgctgtttctggawagagagttattcagaagagtaggtatctccatcccccaactcctggggaacagaaacttatctcagctctttgaatatggctcccagcccctgagccacaggctgaactccaaaagaccttctgtgcatgtgagcaaagcaggagcatcagtggtgtggctggctccagcaacacaccagcagaaccatgcaggaccccgcatccaaccgccctggctgttcgcactgtccatggaaggggtctgactagagcact

SEQ ID NO: 663553 - DNA, 617 bp, Homo sapiens
taattagtatatccccttccagtctgcaggccctccattgtaattccttcccagctcatttttttccacaaccgagcatcaatcaaagtaagtgccctgcctgcctaggcaacacaagatgtcctccatgcatttgtcatctgccacacaaacaaagggggaatttaattgttggtttgggtatgcagccactgcacacagaaacggaagctgcaagtgaaggaaagagaaaaggtggaaagtttgatgggtgggccaaatgcagatagcacgggggacttttttctgttttctgatctcagcctttcttcaggggtgggtcttcagggatttagctgcaacctggtcattggctggactyttcccagagcaagtaagtgttccccttctgccatatgaatatgaaaattcccatgaaaggaaatgcatgtaatagctaccatgtctgactttcttcagaagccaagtcagccttcatcgtgtgcctggccattaaccgaaaaaaccgtcacaaggaggcaagataaaggcaggtttttatgcagggatgaatttgtattattttgtcttagttttttgggggggtggtgtgggggggcgggtaccggcagggagac

SEQ ID NO: 663554 - DNA, 582 bp, Homo sapiens
caagggctatcacgtggctccccgactccccaaggaagccgtgagccattcccttccccttcagtctttttacagatacctcctcacatcagaagtcacctgtcctgcccctctcatatttagctctcctctcttgctagctgacccttggcctgggtgataaagaaagctgtattattatattcatgggccctaacaaaygagtgctggatttatcttctcaggaaacacagatccatttaggtagacccagagtcatcctactgtaattcaaaaagatgacaccatacggtcccttagcaaagaagcctttcagcccccttcgctacacatacgtgcagaccactggggaggccaaacgtttggctggatgtctatttccaaattgggattttattaagagaaagtattatcaggaaggagggggtgatctttacattgattctgcagattctaatttgatattataactcctttatccctttgccccttttgtatactttgtaaagtggagataattctttttaaaattttgcctgcttttggtcaaattctagtctagaactcccaggcaggctgtgc

SEQ ID NO: 663555 - DNA, 345 bp, Homo sapiens
tatagaataataaatactcatttcataaaatctggaaaataaagtaaaaattaaaatcaccccaaattcctgccatctttttgcttgcattctcatatatttctttctatgcccaaggaaggaccgtgaaatatgttgcaggagagaccctgacagaaagctaaagatttctaagtgaattacaatgaccacatctagattccgtttaggccatgctatataagcaacagtgggtgttttaaagtacatggtcatagacaacagatcctctttaaaatagggaaaataaaggtgcttatctcaaagagtgctgygacaactaaattaaatgtatatgtaaatcac

SEQ ID NO: 663556 - DNA, 625 bp, Homo sapiens
ggctgggtgcggcggcttatgcctgtaatcccagcactttgggaggccgaagcgggcagatcacgaggtcaggagttcaagaccagcctggccaacatggtgaaaccccctctctactaaaaatacaaaaattagcccagcatggtggcgggcacccataatcccagctagttggctgaggcaagagaatcacttgaactcgggaggcagaggttgccatgagccgagatcgtgccattgcactccagctctgggtgacagagcaagactccgtcttggaaaaaatgataaaaataaaaataaataaattggttttagcccttgtggactacaattcttacccgtccttctcctactcctagacaaagtctatttaacattgagaacgtttaaagtaatttgaaaatcaacttgccctatgtattatatttaagagaggcgataatatatctcaagcccagaagayagtctgttcaagccaagattattatccaggttcaaaaagtagaaagggtcaaagatttgggagagaaggaagaatatctttgccaacattccatatcatgtagtgggaaaaaaaggcaaacctaattcttgagcataattcccaaagatgtatgtcaac

SEQ ID NO: 663557 - DNA, 625 bp, Homo sapiens
ggctgggtgcggcggcttatgcctgtaatcccagcactttgggaggccgaagcgggcagatcacgaggtcaggagttcaagaccagcctggccaacatggtgaaaccccctctctactaaaaatacaaaaattagcccagcatggtggcgggcacccataatcccagctagttggctgaggcaagagaatcacttgaactcgggaggcagaggttgccatgagccgagatcgtgccattgcactccagctctgggtgacagagcaagactccgtcttggaaaaaatgataaaaataaaaataaataaattggttttagcccttgtggactacaattcttacccgtccttctcctactcctagacaaagtctatttaacattgagaacgtttaaagtaatttgaaaatcaacttgccctatgtattatatttaagagaggcgataatatatctcaagcccagaagacagtctgttcaagccaagattattatccaggttcaaaaagtagaaagggtcaaagatttgggagagaaggaagaatatctttgccaacattycatatcatgtagtgggaaaaaaaggcaaacctaattcttgagcataattcccaaagatgtatgtcaac

SEQ ID NO: 663558 - DNA, 554 bp, Homo sapiens
gagttcaagaccagcctggccaacatggtgaaaccccgtctccactaaaaattgaaaaaaaaaattagccagccatggtggtgcatgcctttaatcctagctaccagggaggctgaggaaggagaattgcttgaacctgagaggccgaggttgcagagagccaagactgtgtcactgcactccagtctgggtgacagagtgagactccacctcaaaaaaaaagaaaaaggaaatgaaagtaaggtcaaatgctgggtactctcrtgttaagaaactgggggttaggacttcaacttttggtggggcacaattcagctcataacagctcctattcaaatatggcaccttgggccagtcacgtgactccagacatgatctgatacttgcgtggcacagaagttccatcctatctcttcctcaagactctgagctcctaggtaaaactgcctgcaattgcagtcacatcttagcagccaggtcaaattactatctcatcttaagcctccagtcaaccagcctcagtcttttcaccaatttttgtgaaagtaggtctc

SEQ ID NO: 663559 - DNA, 574 bp, Homo sapiens
cttatcaggggtttccacttttgctttttcctcattctctcttgtygccaccatgtaagaagtgccttttgcccttcaccatgattatgagacctacccagccatgtggaactgtaagtcaaattaaaccaccttttcttccaagtcttgggtatgtctttatcagcagcttgaaaatgaactaatacattacatagtatattactttgtcaaaatagagaaataaaaatgttcaaacattgttttaggttagaaaatacaaataccttggaattagagagccatgttaggaagcaattgacacttgcattataataatctaggccaaagatcacctttccatactagaaaatggaaactgtaaagtgagaatggaattgctcctgctgttgaggtccaatcatgcacatttaggaactgactagacatcagttcaagaaagatgaaatcattgatgattgatttttcttctctggttgaatggaataatttctgcttttaataggaactaagggtttgtttgtttgtttgtttgtttttgttctgttgttttgtttccaagatagtggattag

SEQ ID NO: 663560 - DNA, 501 bp, Homo sapiens
cactagaaagtatttcataatatattaatattaaattaatattcaatagtattartctagtaatatgttaattgaccaataaattaataatctatcagtataatctattaatggaatatattattaatctattgattaataatattgattatctatagatattaatctattgataaattaatatattatattatttattaatattgagtgaatattcagtattctatgatgactcttggtaaggaacagagtggagggtctccttagtcttgctaatcagtgaagtggagaaggttttggggaacttctcttgtatttatggcatttatggcatgttcttaaaatctccaactgtaaaatattcacttaaacaatttctggattattgtttttaagtctaatttgtcctgcatatgctttatgataccaacctttttccatagctgtttctaaatagctatgtcagtttttgaaaaacaatcacacgagaaacgatgcatc

SEQ ID NO: 663561 - DNA, 564 bp, Homo sapiens
tcagagcagaataggcagtagaagcaaataaaaataaaatgaatcaataattgaatattcattaggacccacaatgtgctcagcatttatgtccatagaattccagggyaagtataaaaattggcctctgcatttcatgagattatattctattagagagatgattatgatgattataatgatagtgatgataataatgatagataacagatttgagtgcttattgctctgacaaacaccttttatacaccaagttattattactcacaatgagcctaccagttaggtacagtcacaaaaatgaaaaaaaaaatcaatacataaaaatgtaatttactttagggttatgctagatcaatgataaaaacaatatttcacagtagatgtaactagagcctatacacttagtcatagttgtaccgtattgactaataaaatgataatataaataagtaacatttaaaataaatactaataaaacaaaaaaacattttttccattatgcaatatatttggtagcatatttactgctgaagaagtttacaaaagacgaatgctattatg

SEQ ID NO: 663562 - DNA, 564 bp, Homo sapiens
tcagagcagaataggcagtagaagcaaataaaaataaaatgaatcaataattgaatattcattaggacccacaatgtgctcagcatttatgtccatagaattccagggcaagtataaaaattggcctctgcatttcatgagattatattctattagagagatgattatgatgattataatgatagtgatgataataatgatagataacagatttgagtgcttattgctctgacaaacaccttttatacaccaagttattattactcacaatgagcctaccagttaggtacagtcacaaaaatgaaaaaaaaaatcaatacataaaaawgtaatttactttagggttatgctagatcaatgataaaaacaatatttcacagtagatgtaactagagcctatacacttagtcatagttgtaccgtattgactaataaaatgataatataaataagtaacatttaaaataaatactaataaaacaaaaaaacattttttccattatgcaatatatttggtagcatatttactgctgaagaagtttacaaaagacgaatgctattatg

SEQ ID NO: 663563 - DNA, 564 bp, Homo sapiens
tcagagcagaataggcagtagaagcaaataaaaataaaatgaatcaataattgaatattcattaggacccacaatgtgctcagcatttatgtccatagaattccagggcaagtataaaaattggcctctgcatttcatgagattatattctattagagagatgattatgatgattataatgatagtgatgataataatgatagataacagatttgagtgcttattgctctgacaaacaccttttatacaccaagttattattactcacaatgagcctaccagttaggtacagtcacaaaaatgaaaaaaaaaatcaatacataaaaatgtaatttactttagggttatgctagatcaatgataaaaacaatatttcacagtagatgtaactagagcctatacacttagtcatagttgtaccgtattgactaataaaatgataatataaataagtaayatttaaaataaatactaataaaacaaaaaaacattttttccattatgcaatatatttggtagcatatttactgctgaagaagtttacaaaagacgaatgctattatg

SEQ ID NO: 663564 - DNA, 592 bp, Homo sapiens
gagggtgggaggactagtaacaaggttatagataaattgatatgatatgtatgggatagaaaactagatagcatgtttcaaacaaggttggggacagttaatgtgaattaggctagatgaatacattgcagctacacaatggagaggtttgagagtcagagagaagcctgcatggcaggcacattcttcgatcaatttaaggaagggtacacgtgtgttcttagaagagtagtaccgtgtttcaagtcatgctaaggtacacaaaagagttggcagcagaaggacccaaagttagagaaaggagttataaattaattatagcaactgaggcataagatgatgaacgaaagtcttgaataagaatatggtaaggtagacaataaagataattttaaatgagtttttaaaatgttttttgctgtagaatatttttacaaaaaagattttgaaatggatgtaacatttactttatccccatggaattctgtcatagctggtmgctatagactagtaggaaagaaaactttcaataattggaacagattccactctttttaagacaccatagttttcagtgaatcataatattctc

SEQ ID NO: 663565 - DNA, 697 bp, Homo sapiens
actcagtcatctgcattcaaatcatgacaggatgaggtgtcagtgactacataaatataaatattgtacacatgatcaaaattgcaccatagtgactaacatcatgcctaaagggaaaagcaagacttccagaaaaagatccatgaagggctttcagtcacattttaactaaaaagccaaggttatttctgaagagatcagccttaatcatgctgaagtatttgtaatcagcattagactatttttctgggcctrcaattgagtattgaaaaacgctggcctcaaagcacacttgctgttttatcattatagaacccagcagctttgattttaattcagtgaaatattgccagttttccaccaactaatctaaaaactgggcttataagaatagtatttcccttactcctgattgtgtcaacttaaatggcaaatataaagaagtactacataattttaaaaatatcttgcatattaaagcattgtgttttaactgttcaaatgttataatcaacatgttcattacaattttattcacaacaaatgtggaacaatctaaacattgacagaagggtaataaataaatatagagtgtttatataccatatgataatattgcataatcataatgtgtatgaactaactcactttagtaaattgtaaatatgctcacaataaagtgtgaaaagaaaaacag

SEQ ID NO: 663566 - DNA, 697 bp, Homo sapiens
actcagtcatctgcattcaaatcatgacaggatgaggtgtcagtgactacataaatataaatattgtacacatgatcaaaattgcaccatagtgactaacatcatgcctaaagggaaaagcaagacttccagaaaaagatccatgaagggctttcagtcacattttaactaaaaagccaaggttatttctgaagagatcagccttaatcatgctgaagtatttgtaatcagcattagactatttttctgggcctgcaattgagtattgaaaaacgctggcctcaaagcacacttgctgttttatcattatagaacccagcagctttgattttaattcagtgaaatattgmcagttttccaccaactaatctaaaaactgggcttataagaatagtatttcccttactcctgattgtgtcaacttaaatggcaaatataaagaagtactacataattttaaaaatatcttgcatattaaagcattgtgttttaactgttcaaatgttataatcaacatgttcattacaattttattcacaacaaatgtggaacaatctaaacattgacagaagggtaataaataaatatagagtgtttatataccatatgataatattgcataatcataatgtgtatgaactaactcactttagtaaattgtaaatatgctcacaataaagtgtgaaaagaaaaacag

SEQ ID NO: 663567 - DNA, 609 bp, Homo sapiens
gatatatttgagtgtgtgtgtgtgtgtgtgtgtgtgtgtgtagaaatactatatataaatgtatatatactaatatatatgtatttactttgttcttctttctacctattttctgcctactaattgaaatttgtggcagagaattattaaactctttgccagaggataataatgcatattccatatacattccttgcagtattattgrgaggataaaatgaaaatgcacacgactctcttcattaaaggtattgttataaataacatctctgtcctggctggatggtgttttctatttaatccctttacttgtaagagtaggtgggcaaaaattgcgagcataagagatccctcaaagacacaagaaagagggagggagaagactattttcatgtaaagataggattcaagaactgggaatatgtaacaatatcaatgacaattcaaaaaatagtattttgcttttagagtaagcaaaatactattagtatgtgttttactagagtttttttagtttaaattttttttaacttttaaaaactttttttaactttgaaaagtttggaaaattcttgtccaaattcaaaactaaaagaaggagaagaaaaa

SEQ ID NO: 663568 - DNA, 609 bp, Homo sapiens
gatatatttgagtgtgtgtgtgtgtgtgtgtgtgtgtgtgtagaaatactatatataaatgtatatatactaatatatatgtatttactttgttcttctttctacctattttctgcctactaattgaaatttgtggcagagaattattaaactctttgccagaggataataatgcatattccatatacattccttgcagtattattgagaggataaaatgaaaatgcacacgactctcttcattaaaggtattgttataaataacatctctgtsctggctggatggtgttttctatttaatccctttacttgtaagagtaggtgggcaaaaattgcgagcataagagatccctcaaagacacaagaaagagggagggagaagactattttcatgtaaagataggattcaagaactgggaatatgtaacaatatcaatgacaattcaaaaaatagtattttgcttttagagtaagcaaaatactattagtatgtgttttactagagtttttttagtttaaattttttttaacttttaaaaactttttttaactttgaaaagtttggaaaattcttgtccaaattcaaaactaaaagaaggagaagaaaaa

SEQ ID NO: 663569 - DNA, 558 bp, Homo sapiens
tacaaacagtacccatgtttgtttttaataaccagaattatttcagcttaaaaaaaggtgtagatttacatagacagtctgatgagtgcctcagattgttccattagtaacacagaggagaaacaatcttaagaaaaacattttgaatttgtgtgtggaggtggagagaggattgggttagtgaaatcagaaagcttccaagtaatgattattacatttaataataattarattagcgttccacagggactgttttctggaaattttggtaggacagtcactgagtaacacacacactcagagcaacctaggtttcaggccattgggtgggacatggcctatttgctttgttttggtcgcgtttaaagttaatccaaaatcaatttctttttcaagattaaaatgtcactactctgtcttccacttcaggcttctgcaaactttttctatgaagggtcatgtagtaactgtttagcacaaaatagacgtacacataaacaagtgagtgtgttgtgtcccaataaaatgttatttatggcattgaagtttgaatttcat

SEQ ID NO: 663570 - DNA, 558 bp, Homo sapiens
tacaaacagtacccatgtttgtttttaataaccagaattatttcagcttaaaaaaaggtgtagatttacatagacagtctgatgagtgcctcagattgttccattagtaacacagaggagaaacaatcttaagaaaaacattttgaatttgtgtgtggaggtggagagaggattgggttagtgaaatcagaaagcttccaagtaatgattattacatttaataataattagattagcgttccacagggactgttttctggaaattttggtaggacagtcactgagtaacacacacactcagagcaacctaggtttcaggccattgggtgggacatggcctatttgctttgttttggtcgcgtttaaagttaatccaaaatcaatttctttttcaagattaaaatgtcactactctgtcttccacttcaggcttctgcaaactttttctatgaaggktcatgtagtaactgtttagcacaaaatagacgtacacataaacaagtgagtgtgttgtgtcccaataaaatgttatttatggcattgaagtttgaatttcat

SEQ ID NO: 663571 - DNA, 548 bp, Homo sapiens
atggcaggctacccccagggaacttccatccccccgggacctgaacgggtgaaggagaagagcagataatagatgccagaggagaaagtagctgggctaatgggtgtctggtgggggtcatggtctttgatagcagggtgcagctcactcactgcagcccagcacagagggagtcagggggttaactttctyatcctcactctcctcctcccctctctgcttgctctggtgcctccctttggtggagcttggtggaagtccatgagcaggggagcctgtagatgcatccataaatgtcagtctcctggggctaggagcaggcaggaggaggctaaagaggtgctctgcggggcaggtggaatatatccagcacacgtacataatatagactggggagaggaccaacagctgttgcagcagttcccatgtgccttgaatatctagtagatttgtgtgcttaatgccgggcacacaagatgaatgaggcttctggtggccaagtgggtcatgatgggaggttttcttggattgttggttggtttaatatc

SEQ ID NO: 663572 - DNA, 589 bp, Homo sapiens
ttttacataacagtagtagtcacatcatagatataattttgggttttgttctattcctttaacaacatatgaatatttttctatattgctacaaaaacttccttgcaaatcaaaacacaatgatatatcatctcgccccaattaaaatggctttaagccaaaaaccttttattcattatatcaggcaataatgaatgtcagtgaggatgtagggaaaatggaacacttgtacattgttggtgggaatgtaaattaatacaaccactatggagaaaagtttggaggttccttaaaaaactaaaaatagaactaccaatatgatccagcaatctcaatgccaggtatacacccaaaagaaaggaaatcattatattagagatatctgccctcccacgtttattgcagcactattcacaatagccaacatttggacctaagtgtccatcaacagttgaatgaataaagaaaatgtggtacatatacacaatggagtactattcagtcataaaaaagaatgagattctgtcatttgcaacaacatggatgaaactagaggtcattatgytaagtgaaatgagccaggcacaga

SEQ ID NO: 663573 - DNA, 567 bp, Homo sapiens
cgaagtgtttgttcatatcctttgcccactttttgatggggttgtttgttctttttcttgtaaatttgtttacattccttgtagattctggatattagacctttgccagatgggtagattgcaaaatttttttcccattctgtaggttgcctgttcactctgatgatagtttcttttattgtgcaaaagctcttcagtttaattagatcccatttgtcgattttggcttttgttgcagtgaagcaaagtttttctatacaattaaaagtgagatgctattaatctgaattagatgttataattaagatgtcaattgtaacttctgagacaatcactaagaaaataactcaaataacatatgtagtaaaggatatgacaaaggaattaaaatagtatactagaaagtatctctttaatattaaagaaggmaatgatgaaggaatagagaaataaaagagacgtaagacatgcaggaaccaaatagcaaaatggttggcataaatcctatcttttcagtaattacattaaataaggcagagattagtagcatgggtaaaaaaccaacag

SEQ ID NO: 663574 - DNA, 215 bp, Homo sapiens
acatagttttaaatgttttgacctttaaaaagaaaagtgccacaaatatttcaaatatctggctcattctaagagctaaaataagacaaaatatatgaatatcagcttgccaagcattgagtcctgtgccacaactcacacacgcamactaattacttcataatgacgccaatagggtacacatatgcagcattgtatgacctgaaaaataaggc

SEQ ID NO: 663575 - DNA, 621 bp, Homo sapiens
ttatatcagataaaacagactttaagtcaaaagcagtttttaaaaaaagacaaagacagtcattatgtaatgagaaagggataaatccagcaagaggatacaataattttaaatacatatgcacccaacactggagcacccagattcataagtcaaatattactagatctaaagaaagagctagactctgatacaataatagtgggagacttcaactccccactcccagagaagcattagacttaaactggactttagaccaaatggacctaatagacawttacagaacattttatccaacaactgcagaataaacattcttctcatcaggacatggtacattcaccaggattgactatacgttaggccagaaagcatgtctcaacaaattttcaaaaatcaaaattatatcaaatatcttctcagaccacaatggaataaaactatataaatcaataccagaaggaacttggaaactatacaaatacatggaaattaaacaacatgctcttgaatgaccattaagatgaaaatcaaaaatttcttgaaacaattgaaaatagaaacataacatgcaaaacctgtgggacacagcaaaagcaatgctaagagagaagtgta

SEQ ID NO: 663576 - DNA, 598 bp, Homo sapiens
ttaaatgtgactagaaattcctttcctaagtatttcaaatatgtttttctttttagtctagcttcattgtccttagaaggattaggaaatctcacctatagtgaaagaaggcagaaacagagaaacttatcctaaacaccatcacattttggcagtgattttagacttccaaaaaaaaaatcaaggaagtgtaacttgatatgaatttyactaaggcatatcagcattctgatctctctcctcagaaaatgcacatgcagaattttgcacataatttcagaggattcacagaatctctgaagccaatccacaaattccaaatacctcccctatagaatgacagagcccataaaaaacactgcataaatacttttttgagttactgatccattattagcaataagaatgtagctgaacactgaaataattataccacattcagaaattttgaaacttttacgtgaagcaatgactccagaagaattcctcataatttcaggcacggtgttcactgatgaaataaaaccactgattcaagagttctttagtacgtagataacaaccctgattcaacaagtctccaaagagaatatttccc

SEQ ID NO: 663577 - DNA, 558 bp, Homo sapiens
ctggcctccaaatgaaagatggagcaggaggataggggacacgagggatagaggggttgcttccaggagggagcccttcagaagaaaatgaggctgatggattatctgatamgtttgatcgcagagaaaacagcgttaggacttcagtgtctgaaagaagcaaatatgagggggttttctaggtcattctagaagtcatcagaagacactgtttacacctaactttaaaacgagaagcagttttgacctttactggacaggagtttaaatcttcatacagttgaaaacttatgagaggtccagtgcttttttttttttttttacttttcttgagtccattaggtaacatgctctttattttgtggaatactcaggcttcatgaaaaatcaatacaactgtacatgtttagcttaattaaaaaaaaaaacagcattaggaggccctcatagatctgctaaggtctgtaggaagaattgataaacacagagaaaactaacaaacaataaatgaagcaattattaattccaaagtttaaaaaaatacacaagaaaaatttt

SEQ ID NO: 663578 - DNA, 579 bp, Homo sapiens
atttaaatatcttaaattcaatagagtaaaacgaatcaatcttaaataaatttaactgcagtcctttactagtaagaggtctattgagtcaaagatgactggatcrgtgtaatggctttggttctcttgagggtaatgcaaaagcttgagctttctcttttcttaggatcatttactaagaaagcttgcttaagcacaacctgacttgcgttggcagcgaatttctgaatcctgacacgacaggaatgagtatctttttttaaatcttctttcttctggcacgtctgaaaaatccagcattagcctgaggaataaagtcaccaaacattactgtactcccaacagaaagaagctgttctgagagaagtctgtaccatttaattggagcaaatttgacaagactcgcttcctcttgtcacaggctaatactctcaccatgttctgagtgatctttgaaaaacatattagtgctccaggccactccctgcccctccctatagataaggctgactagtttggaagttatctttgaagaactgagctgacagcttcagataaaagtgtttctaatttataggg

SEQ ID NO: 663579 - DNA, 595 bp, Homo sapiens
gagcccagtgtaatcccggaggtcttaataaatgaaagaaaaatgcaaaagtataaaagagaaggggttgagatgatggaaacagagttctgaatgatgaggtcaggagccgaggaaagcaggcagttgctagcagctgaataaggcagggaagagattctggagcctacagaaggaagacaacctttcattttagccccataagatccatttcagacttctgacccgcagaactataagataatatattaagccactaaatttatagtagttgggtatgggagcaataggaaacaaactattaaacatttaaaagaagtttatgattatttttaatgatagctaacataaatcaataaatcatttagaaaaaaawttaaactaatggtacagtaaaaacagtgaactacaataatgctattaaactattgcatctgggattcagaaatgctctgattttaaagtaataatattgattgaagtcatgcaaacgatgctttgaaaatgatgcatcacagatacataattcctttctgaagcatattatttaatctactttaagattttagaaatatacacaaacacccaatgataa

SEQ ID NO: 663580 - DNA, 610 bp, Homo sapiens
atatgtattcttagccagggatcactttattgaagtttattgtcttgaaatagtaaatagcactggcattgttttactaaactggtgcacattttcagtattgttttgctaaacgggtatatatttttgtagaatctttggtctaatattttatgttaaatattgaacaaatatttgggccatgagttgacaaactgtaacctgctagccaaatttggcttactgcttgttgcttccagtctgcgatggcagagttaattagttgyaacagaaacctatggccaaaaatgacttatctgaaacagaaaaaaatttgtctgtctctgatctaagttgtgaaagtttaatcaagatgttaatataaatatgtctaattaacaaaggaatattatgtctataaatatagaaatttaagtagaaccttagaacaaagtacatatgaatatgaaatccttattttctgtaaatgtattaattatgaattttcaagtacatgcacacagacacacacatttgcgcacatgcatctggaaatcttatgaagataattcatagtttctgtattcaatttataatatccagctatcgtttcatgaaaacaggaagtagc

SEQ ID NO: 663581 - DNA, 367 bp, Homo sapiens
caggttgtccaggctggtctcgaactcctggattcaagacatcagcccacctgagcctcccaaagtgctgggatttcaagtgtgatatttatcatagactctaaaaatattaaartgactgctattaaaaatatgaagctattaatgttatttcccagaatcatttacatgtgggcaagtcttgttcaccttgtccagttgtttttttccaccattagtttcttgttcaaatgcattatctgataatgtcgttatatgaatgtactcttgacaaaggcgctaacaaagctgcaaatgaacacagtttatacctggtgtcggtagtcaacaggctctgtgttcttcattaaatggtgaccaaaccgga

SEQ ID NO: 663582 - DNA, 633 bp, Homo sapiens
taaggcttgagtttgaatccgtgtgtctttgtacatttggagaaattacttaaccttcataaatcttcatatcctaatatttaaattgtaattaaataatatgcaccttggagagttgctatggttattggtgttcaagaaatagaatttgtcatcgttcacattttatggatgaagaaggttaaatttagaaaatttaagttacctgtataaaattgtacagctaaatagcagaaytagaacaataatttgagtcaaagaatttcaccttctgtgtttatttcaattatcatttctagcttttacacccaagcttaaatattacctttgcttggaaacctttgagaatgacagagtttctctcctagtttatagcaatctcacttcttttgcctcccgtaatactatctttataccttatttgggactttttatcatatatattataaataatagatgagtcaataagtagacaaatcaatagaaaggggaatggatatatagacagaccacatgaagagattatctttacctaactgcacagtaagttcctcaaggacaaagaaccacacttaccttataatggagatgctcaatatttttgatgcttttctttggatacatgaagtttac

SEQ ID NO: 663583 - DNA, 478 bp, Homo sapiens
gtaatagggaagggagaaaagccgatgagtggttcattaatgagagggctacctctgtgggtgactggggctcaatcctgatgggaacccactgagagactgtgtgagacacacctcagaagtgccttgcagaggagtgaggaagctggggaatttatccgtgaattctggttctccagtggttgaggttgtttctgaggttatcacttttgaggcacttctggcctgcccatgcatatggtcaccatgcgccagtggccagatgaagctgtcaggcaaaaggaaggaggtatgtgaggttagaagccactagagaactcttggtmtgagggatctgagtctctttctggtcatgccagtgctatcatttctcccaaatccttagactaattgtgttaataccattacgatcccttggacccaattttagttaatttttaagagcatttctcacaacattttttgacttttttctttc

SEQ ID NO: 663584 - DNA, 606 bp, Homo sapiens
ctcctgtggtccaaactacttggtgrgctgaggtgggaagattgcttgagcccaggaagttgaggcttcagtgagccgtgattgtgctactgcagtccagcctgggcaacagagtgagatccctatttcaaaaaacgccccccaaaacatcacttcctgaggaaaattattactgactctccagactgggttacataccttttaaaataaagtccccaaacacctgtgcctccttgcagtaccgtggatacttgtaattagtgaattaattgttgataattagttgcttaatatctgtcttcccactagactgtaagttccttgatgtcatttgccttttgtctttgttcacactgcatacctagaccctggtgcagtgtttggcactcagtaggaatgcagcaaaatttgtttgattgactggtttgcctctatgccaatggattaggaccacatgatgatgatttatgatggagtattaaaccacaggctgaatgaagtcgttgcggtaatgctttctctggagcatctaaacatggtggttctggtcctgaatacaagggaaatgccccttttccaactggactcttgtataaacaacacaga

SEQ ID NO: 663585 - DNA, 631 bp, Homo sapiens
tgtttaggcagccaagtcctggtattgctgctagtggtagaggatgtcagtgtggagggccccctccttccatgtttggggaggacaaaggttgagttgcggatgagaaatmaatcggagctgcttgtgaggccgccaaacagggttagatttgtacagtatgtgctctgcatgggtcatgagtcactgagaggttcagagattggattgccatgaatcacttccaactgtccccatgaagaccccaaagcaacataggtgactatagggttttcttttgcatccaacatcattcggaattcagttgctagatcacaaaataatcttacctttggccacatctaagcttgttaggtatggagctctgcatacttcctggacgtcaccttggttgatttcagcatcctttttttgagtcagaatggggcagcctctctaagacaggaaaggtagctctcatctcagtagagcctttcccaccaccagggagcactgggactgagcaaagttccatgaggtcaggcataatgtgttttgaaacctgacaaattatctagaggtttgaacaactacgcctcgcctccttaaaatctattttacactacggtgttgattggattctataagataa

SEQ ID NO: 663586 - DNA, 631 bp, Homo sapiens
tgtttaggcagccaagtcctggtattgctgctagtggtagaggatgtcagtgtggagggccccctccttccatgtttggggaggacaaaggttgagttgcggatgagaaataaatcggagctgcttgtgaggccgccaaacagggttagatttgtacagtatgtgctctgcatgggtcatgagtcactgagaggttcagagattggattgccatgaatcacttccaactgtccccatgaagaccccaaagcaacataggtgactatagggttttcttttgcatccaacatcattcggaattcagttgctagatcacaaaataatcttacctttggccacatctaagcttgttaggtatggagctctgcatacttcctggacgtcaccttggttgatttcagcatcctttttttgagtcagaatggggcagcctctctaagacaggaaaggtagctctcatctcagtagagyctttcccaccaccagggagcactgggactgagcaaagttccatgaggtcaggcataatgtgttttgaaacctgacaaattatctagaggtttgaacaactacgcctcgcctccttaaaatctattttacactacggtgttgattggattctataagataa

SEQ ID NO: 663587 - DNA, 530 bp, Homo sapiens
taagacaggtgccatgggctgaattctatctccttcaaattcatgtgaagtctcaacccctaggacccagaatgtgattgtatttggagayagggccttgatgaaacaattaagttaaaatgagtctgttacggtgggcccttaatccagtctgactggtgcccgaataagaagaagagattagaacacagagaaaaactagggacatgattgccatgtgataaggcagcaagagggtagccatcttcaagctaaggagagaagccagagaggagaccaaccctgccagcatcttgatcttgaacttccagcttcagaattgtgagaaaataaatttctgtgatttaagctactcagtctgtggtattttgttatggcagccctagcaaactaatacagtgacttttagaggtggtttgattcagtggctcagtagcatcatcaaatatacagtgtctttatgtagcttccctctgccttgtgtggtgcatgttttatcccaagtccagcttttgtcatgggggcaaatg

SEQ ID NO: 663588 - DNA, 530 bp, Homo sapiens
taagacaggtgccatgggctgaattctatctccttcaaattcatgtgaagtctcaacccctaggacccagaatgtgattgtatttggagatagggccttgatgaaacaattaagttaaaatgagtctgttacggtgggcccttaatccagtctgactggtgcccgaataagaagaagagattagaacacagagaaaaactagggacatgattgccatgtgataaggcagcaagagggtagycatcttcaagctaaggagagaagccagagaggagaccaaccctgccagcatcttgatcttgaacttccagcttcagaattgtgagaaaataaatttctgtgatttaagctactcagtctgtggtattttgttatggcagccctagcaaactaatacagtgacttttagaggtggtttgattcagtggctcagtagcatcatcaaatatacagtgtctttatgtagcttccctctgccttgtgtggtgcatgttttatcccaagtccagcttttgtcatgggggcaaatg

SEQ ID NO: 663589 - DNA, 530 bp, Homo sapiens
taagacaggtgccatgggctgaattctatctccttcaaattcatgtgaagtctcaacccctaggacccagaatgtgattgtatttggagatagggccttgatgaaacaattaagttaaaatgagtctgttacggtgggcccttaatccagtctgactggtgcccgaataagaagaagagattagaacacagagaaaaactagggacatgattgccatgtgataaggcagcaagagggtagccatcttcaagctaaggagagaagccagagaggagaccaaccctgccagcatcttgatcttgaacttccagcttcagaattgtgagaaaataaatttctgtgatttaagctactcagtctgtggtattttgttatggcagccctagcaaactaatacagtgactttyagaggtggtttgattcagtggctcagtagcatcatcaaatatacagtgtctttatgtagcttccctctgccttgtgtggtgcatgttttatcccaagtccagcttttgtcatgggggcaaatg

SEQ ID NO: 663590 - DNA, 530 bp, Homo sapiens
taagacaggtgccatgggctgaattctatctccttcaaattcatgtgaagtctcaacccctaggacccagaatgtgattgtatttggagatagggccttgatgaaacaattaagttaaaatgagtctgttacggtgggcccttaatccagtctgactggtgcccgaataagaagaagagattagaacacagagaaaaactagggacatgattgccatgtgataaggcagcaagagggtagccatcttcaagctaaggagagaagccagagaggagaccaaccctgccagcatcttgatcttgaacttccagcttcagaattgtgagaaaataaatttctgtgatttaagctactcagtctgtggtattttgttatggcagccctagcaaactaatacagtgacttttagargtggtttgattcagtggctcagtagcatcatcaaatatacagtgtctttatgtagcttccctctgccttgtgtggtgcatgttttatcccaagtccagcttttgtcatgggggcaaatg

SEQ ID NO: 663591 - DNA, 536 bp, Homo sapiens
ggacttgtggtaaataggcctttagtgatgtggtggtaagatgtggggggaggagaagcattctatagtcctatgattaggtctcagttttttggtgagcctgtgcccttgggctgtgaacttcgtaagtgcttctcagtgtttccccctaccttaggtggagcatgatggctagggtgggctggagtttatttcccttctcccaggtaggttagtctctgataaaatcccaacagattaggctctggtaaaatagtttctcctgatggcaaaggccttgttacgggaacagaatgctttgctgtggttcaaaatggctgccttctccctcttctgccggaagggttgggatctgtgtctctacccgagtttcatgttcaattgtaatccccagtgttggaggtggggcctggtgggaggtgattggatcatrgggttggatccttcatgaatgatttagcatcatccttttggtactattctcgtgacagagttctcatgagatctggttgtttaaaagtgtgtggcaccttccc

SEQ ID NO: 663592 - DNA, 564 bp, Homo sapiens
ataggacataggggctgagagtcttctgaaggcagagtcaaagcagtcccgcctgatgtaggtatttgacacctagcaggaatttctaaggcaggagttggagaggaacgtccaagcagagggaacgcatrtgcaaaggcatagaagtatgagaaagtatgttctagagactgcaagaagttcaggatgctgtgatgtaggttgattgtgagggaatagaaggagggtagctgcaaagggaggtggtgacccatcatgagggacaaggcacctacacacaaaggaacgtcaacttggtgctgtaggcagtgggcatcattacagaattttaagcaggagagtaacatgaataatgttttagaaagatcaagcagtgagtagtttggagggggtgcaagactccaggctgggagaccacttatgaattaattacaaaaacccacctagagaccatgcgcatctgagttaaggtcaatgagttgatagtggggttgaagaaaagaaggactgaaaatatcaagcaggcagtattgttgaaagatggcagccagttggatgtggaag

SEQ ID NO: 663593 - DNA, 429 bp, Homo sapiens
gcacctacacacaaaggaacgtcaacttggtgctgtaggcagtgggcatcattacagaattttaagcaggagagtaacatgaataatgttttagaaagatcaagcagtgagtagtttggagggggtgcaagactccaggctgggagaccacttatgaattaattacaaaaacccacctagagaccatgcgcatctgagttaaggtcaatgagttgatagtggggttgaagaaaagaaggactgaaaatatcaagcaggcagtattgttgaaagatggcagccagttggatgtggaagggtgaaggtgaaagggagamatcaaagatgcctacttgttttcttacttagatgacttcagaaattaggtggtgtcatgaatcacattgggtagtacagaaagagaagcagacttgatgaggggccaagaag

SEQ ID NO: 663594 - DNA, 576 bp, Homo sapiens
tgacagtcattgctattatctcgattgaattactttctaataggaagtactagccggacatcatgagtggctgtcgggtattcatcgggagactaaatccagcggccagggagaaggacgtggaaagattcttcaagggatatggacggataagagatattgatctgaaaagaggctttggttttgtggtaagtatttagaactgggtgaattatctgctaagtaggtagagttttgataagcagttgttttcgatcttgagtccgggtggaatatttgccttcagaaaatgttacccagccttatgtctgaattttattgaggctgaaaacaactttaacttgccggctcactggaaccccactcccagtggctccttgattaggtttgactgtatggcagtgtcgttaagatactcttcccattctgtctcctgatttcagtgctcttaatgtgttgtagaatastcttctaaagccaatgttaagagtcttatgcttacattttaggaatttgaggatccaagggatgcagatgatgctgtgtatgagcttgatggaaaagaactctgtagtg

SEQ ID NO: 663595 - DNA, 518 bp, Homo sapiens
gacagaacagaatgaacgaaacaatttaaaagaatatcatatttctaaaactattctttttatagaataaatctgtttcactggaggcaatcaagagtttaatgccataatcaatatatgacattagtttttaattactcatatatgcaaccacttccctttttctatttttcttttcttttttctttttcttttctttttttttttttttgaggagttaacagtctttattgggctcagaccaggagtccgtgagtcttgaagacctctgtatatttgtcaattttcttctccacgttcttctcggcctgtttccgtagcctcaasagctgtttcttcttccagtactggatcttggccttctccttcctcttctcctgcagggtggctgtcactgcctgctacttccagccaacctcgtgagccaggcgccccagttaggcaaactttcttgcaggcttcaaacgcacgaccttcagggcagcaggagccaccatccattttttcttgtcataggg

SEQ ID NO: 663596 - DNA, 588 bp, Homo sapiens
agtatataggtagggctgggtgcggtggctcacacctgtaatcccagcacattaggacgtggaagctggaggattgcttgaggccaggagttcaagaccaaactgggcaacatgcaagactcagtctctacaaaaagctagtaaattagccagccatggcagtgtgcacctggagtcctagctactcaggaggctgaggtgagaggatcacttgagcccagaagttcgaggatgcagtgagagctattattgcaccactgtactccagcctgggcaacagagtgagaccttgtcctaaaaaatggagagatgatagatagatgactgacagaccatttcttagaagtcagagatcatgaaagtccacaagtctaaagaaggatgaagataaaaattcaaatgcacattttaaaagagataacatcactttgattttgtctccagtgcccttgagtaattaagcaacacgtgtttctcataccctaagttygtcactgagttgttcatttggacatagttacagtaaataatgacataaggtgacctctactctgtaggagtttacaagacctttgggagaacaaaatg

SEQ ID NO: 663597 - DNA, 510 bp, Homo sapiens
ttactgaaaacaagtcttttgtaatcttttaggttaaaaaatacaaagataaacattcattcagtagaaaaagctgtgtgcagccttttcatcaaacactccaaatagaaactgtacaaaaactttyttcacatatagcacattttttttctgcttacactgccgtgctagcctaaataatgcatccctaaataaaaacaggagaaatacattataatgacatttcaagtgacacattcagaaatattttgtcaaagttagagctgtattatatgaaatcaatctacatcggaaatatttaaactgttcaattgtactgtgtttttttaatatattaacttcagcttagagttgaggagtgttttactcagaataaaagctagactacttgtgaagttcaaaactgtctgccgtgtttgaaaaaaaaaaaaaaaaaagccagaaaaggcaagaaaataatttcacattacagttctatgggaaagacatgaagtgcctgtatgacctttt

SEQ ID NO: 663598 - DNA, 510 bp, Homo sapiens
ttactgaaaacaagtcttttgtaatcttttaggttaaaaaatacaaagataaacattcattcagtagaaaaagctgtgtgcagccttttcatcaaacactccaaatagaaactgtacaaaaactttcttcacatatagcacattttttttctgcttacactgccgtgctagcctaaataatgcatccctaaataaaaacaggagaaatacattataatgacatttcaagtgacacattcagaaatattttgtcaaagttagagctgtattatatgaaatcaatytacatcggaaatatttaaactgttcaattgtactgtgtttttttaatatattaacttcagcttagagttgaggagtgttttactcagaataaaagctagactacttgtgaagttcaaaactgtctgccgtgtttgaaaaaaaaaaaaaaaaaagccagaaaaggcaagaaaataatttcacattacagttctatgggaaagacatgaagtgcctgtatgacctttt

SEQ ID NO: 663599 - DNA, 445 bp, Homo sapiens
tgtgagcattttggaaaaaataaaaactgtttggacattttaaagagcttcgtttttttcctaatgttttgaagttgcatgctgatatgtgcattgaagatttatttcattgtgttaaggatccagtggtagctttataattaagaacacatgtccaactatgataggaaattcttaatttaaaaaaaacgtcattttgactgtttggaactcttattattcaaatgtttgatctgctagataaatactctaattttcttatcttcttaygtagtatctacttgattgtaaaattttgttttactgttttccagcccttctgctgatttttatgttatcacttttaatatgtaagagctattttatattctctgaaagtcccttgtttgtgttttcctgttcttgtttcatgaatacagtattttccttttttttctgagaatac

SEQ ID NO: 663600 - DNA, 645 bp, Homo sapiens
tttgaaaatttactatctgaaggaattaatttattcaagccatcaaaaataggaataactactttaaatatatgtttacatccgcatagtagaaagatcattggtgctaaaggtaaggcattctctgggaaatttatattagagagatgtcawgtttatttatagagtatagaacttaacatcatgttattttctcaaatggtataattgtagacagcttgttaataaagcctagccaccaaacaagtactgaaaatagtacttcaacatggtatgcatcacagtgatgtttcattgaaataacatagaacgagatgcttgtcaagtcgaggttgcatgagaaaaccccaaaggaagtcaaagaagagaaaggtaacaaaataaatgtcttcaggcgtggttgaatggaagaggagtcaaactttagaaggctagcagggtttgggaaatctggagataacagtgctattatttccagtaaggtgtgtgatatgaatgagatactcaggcacaacccagtctgcacagcaagagatatgagcaggtagaaaggagaagggatactgcagactagcaatgaaaaaggctttctagtaaaaggaaaagagaaaaatattttttaagtctctaaaaatgtgaatttcc

SEQ ID NO: 663601 - DNA, 466 bp, Homo sapiens
tcatttcaggtcaaattttgacaccacactagttaacatcaagttttgcttataaaagttacaaacaaaacatacccactgattttcagaagtttttagattttacaattgtgtttaaggtattgaagaggtgtattttaaaatttcatgacctaaactacaataactaaaacagcagaaggatgtactctacactattatattacaaaaagtattcaattcatgtaaattaaacttaacctaatttaaaattgtatatgaacaaaaatactgaaaatatttagtcaggaaaatggaagccaggggctatattattttgggaagtatacaggtgtggtcaacctgtgcacccataataataaggaaagggtggtacaggggatgaakgtttctgaattatgctaagggatgaggggcagggggcctcaggaaatagaagatactggagaggatgaaacaaggattt

SEQ ID NO: 663602 - DNA, 605 bp, Homo sapiens
taacataaagagactgagattcacatgctatttctgtgataaagaaatgttaagtaggcaggatgctttcttcgaatgaccttttaaaacaaaacaaaaacaaaaacaaaaaacctgattttgctagtgatgtcttctcaaatgcttccctagtttctgggcaaagatagatgaagcaatgatagcatcccrtaagtgattgctaaataaataaagaaccatttcagtgccttctgagagcagataaaaggatgctgtgtctttatacattagcaaagtattaaaatacccaataatcaactagtttgaaaatgtccaaaataagttaacataaaatatcagcttttagattttggaaaagtttattttcaagaagctttttcctgaactgggccataaactataaagaaaagtctccatgaaaatgcactctaactttgcttgcaaaataagccaagctgttagaaaccttgtaaggcaccaatttaatatctccctctgacccagttcttagaaatgttatcaagttacctattaatataacttactagtgcaaataccctgaatgtggagtacttataatattcaggttcctataaaaatag

SEQ ID NO: 663603 - DNA, 574 bp, Homo sapiens
accattgtgatggtacacttccacttaataaatagtaaggatattttctcttccacatgactctcttttcatttctttttttatttgtttgtttttgagacaaagtctcactctgtcacccaggctggagtgcagtggcaaaacatggctcactgcagccttgacctcccaggcttaggcaatcctcccaactcaagtctcctgagtagctgggactacaggcacatgccatcatgcctcactaatttttaaattttcttctgtagagatgaggtgtccctgtgacgagcccagsctggtctcgaactcctgaggtcaagagatcctcccctcttggccttatgattttcttcataacagtttcttttctttatcttactttattggatataatacatacaacatacaaaatatgtgttaactgacaatttatgttactggtaagacttctggtcaacagtaagctattagtagttaagctttggtgaagtcaaaaattatacatgggttttcgactgtgtagggttcagtgcccctacccactgggttcttcaagggccaactgcacaattaa

SEQ ID NO: 663604 - DNA, 557 bp, Homo sapiens
catagtgatttcgaatgacaagaaaataagagaagagagaaagaaaaggaaagaaaggaagggaaaggggaacaaaaagtctgtggtttctattttccaaaatcatgaactctcaatagaatttcaataactgcaacatagaaagtatattttagaaaatatctttgagaaaaaggaattcttcctatttccccataagcacctcttctcctggcaaacaawgttttcttggactgagcaacagacacttcagtgggtccaagagaggaataactggcctcttgacacccacaccaaatcccaaacatctggatattcaagatcataggagatcagtttgtcccttcctatttgaggtcactgagtgtggctgcctatatagacaaggacatagtcatctcatggaaaatactccatgttccagggagacagctcccagtcccacaatggtggaatggagggagcagagagaccagctagcactgaaaagtgccaaaaacaataggaatgagagaagtctcaggaaatatatgcctgtcaaaggattcagacatcat

SEQ ID NO: 663605 - DNA, 557 bp, Homo sapiens
catagtgatttcgaatgacaagaaaataagagaagagagaaagaaaaggaaagaaaggaagggaaaggggaacaaaaagtctgtggtttctattttccaaaatcatgaactctcaatagaatttcaataactgcaacatagaaagtatattttagaaaatatctttgagaaaaaggaattcttcctatttccccataagcacctcttctcctggcaaacaaagttttcttggactgagcaacagacacttcagtgggtccaagagaggaataactggcctcttgacacccacaccaaatcccaaacatctggatattcaagatcataggagatcagtttgtcccttcctatttgaggtcactgagtgtggctgcctatatagacaaggacatagtcatctcatggaaaatactccatgttccagggagacagctcccagtcccacaatggtggaatggagggagcagagagaccagcyagcactgaaaagtgccaaaaacaataggaatgagagaagtctcaggaaatatatgcctgtcaaaggattcagacatcat

SEQ ID NO: 663606 - DNA, 508 bp, Homo sapiens
ctctgaaatctaggcagaggttgccaaacttcarttattttcctctgtatactcacaggttaaacagcacatgtaagctgccaaggcttggggcttgcaccttctgaagcaatggcccgagttgtacattcgcctcttttagccatggctggagctgaagcagctgggatgcagggcaccatgtcctgaggctgcatagagcaggggggccctgggcctgccccacacaaccatttttccctcctagccctccaggcctgtgatgggagaggctgccatgaaggtctctgacatgccctggagacatttcccccactgtcttggtgatcaacatttggttccttgttacttatgcaaatttctgcagctggcttgaatttctcctcagaaaattggtttttattttctatcacattgtcagggtgcaaattttccaaaattttatgctgtgtttcctcttgaatgctttgctgcttagaaatttcttccaccagataccctaaatcat

SEQ ID NO: 663607 - DNA, 628 bp, Homo sapiens
aatgcaataagtaagtaaggatcaagttttataagctgctgtttgaaagattcatctgctaaaagcagcaaagaatggcatatcataagatgttaaagcagatggcctaagtcacagtgctacattacacaagtatgaagactagaactgaaatagcctaagtaatatttttattaacaagatgccaagtacagcagcaaaaatacctttaggaagaaatctcacttcaagaaaggtttttcctctttacactttatgctattttctgaattactcttgttctgttgcatatgtttaagtgtctgggtgctcaccatgcccagatgaaagaarctaacctctttccttaaatgagggcctccttgtcttatgagcccacctgtgtgatggagataaatgagtgtaaactaaaccagcaacctaggaaagagtgcactatactgtatagtcttgcagataattttttgcacagtaaacaaggagagtgggggactcattggtctttgaattagttataaagaaagcaacactcattaagtctgtgatgacactaaatgttgctagagtgatcttaagattataaaggtaatgccaggtagtcacttccagaatccagacacacagtagt

SEQ ID NO: 663608 - DNA, 392 bp, Homo sapiens
agttcaatagggaaagttttgagcaaagtacagtcaaaagacaaagatggcagaccttattcaaatacagaacaggaaagttaagaccaaaaggtcataatatttggcctgacaggccctggtatcttggacttcactttcatggagatgaagagcatagatttgaaagcttaatatcattatatgtgaatcctatatctatctctctktatgaaaatttggctttctttacagctttctaacaaggaaaaaatgtcatagccaaagaatgatactacctctttggcaggtaaatgtatcataatacataaattaatcatcattctgcttataaacttaacattattgtgagttttttcagcatgagtcagcctcccaagttcattgcaaag

SEQ ID NO: 663609 - DNA, 442 bp, Homo sapiens
aacaataacaattcttcaccaaaatttccagcttttgtccagaccaactgagttgcttctttctttgtgtgagaatagctctttataataccccctcattaggacatttgcccctatgctttcactgtgagatatttaggagtaggacatcagagtaaaaagggtagtgtttttcatctttgtaccaccagcacccagaagagtatttgacaaagaataggtgctcaataaaattttactgartaaaagaaagttgaatttaaaaattattaaaccaaaactccatctaagctctgagtattcatcaaacttaatttaaaatgatcaaaaggccaggcatgatggctcacacttgtaatcccacaatttgggaggccaaggcaggagtaacacttgaggtcgggagttcaagaccaacctggccaacatggcaaaaatatgc

SEQ ID NO: 663610 - DNA, 632 bp, Homo sapiens
tgtccctgtttgcagaacatatgatcttatttatagtaagccctaaaaactctatgaaaaaatacttcaggaaaattgcaggatacamaataaatgtacaaaaaccagtcctgtttgtactattaacaacaagttatctaaaaagaaaatttgaaaaacaatcacatttacaataacaccaaaaaaattaaatacctgggaataagcttaactacggaagcaaaaggcttgtatactaaaaactacaaaacattggtgaaggaggtgaaacagggcacaaacaaatgaaaagacatcacattttatggattggaagacttaatattgttaaaatgtccatactgcccaaagtgacctacagattcaatgaaatctcatttaatattctaatggtattttttacagaaatagaaaaaaaattctaaaattcatatggaaccacaaaaaccacaaatagccaaatcaatcttgaggatggagaacaaagcaggagttagcacactagctgatttcaaactgtattgcaaagctatagtaatcaaaacagtagagcactggcataaagacagacaaatagacaaatggaacagaatagagagcccagaaacaaatccacaaatatatgtttgaca

SEQ ID NO: 663611 - DNA, 458 bp, Homo sapiens
ttcttgctcatgacagcagattatatgcatttctttccaactacaaaacttggatattggccatcatctgattatgcatgctatgaaaattggtaaatactataaatcaagtcttttttttttttttccagagagctggtttaccagcacatcctggacccccttcccccaaaattaaaaaagataattacaggaattacaacaactttatattaataaacttgacaactgaactggcatattcagattcctagaaaaacaaaactaagatgtaaaaatgtttattcctaaatatttgactagtcttatatttattataaaaagtaaatctaaaattgccagtcattgcacaargcaatctgtaagcccagatggcttctcctgagttatttaaaacaattaaagagaaagtaacactgattttacataaactttaagatagcagaaaagaatatatc

SEQ ID NO: 663612 - DNA, 556 bp, Homo sapiens
acttattctgtgtttaacgctactaatctcctctttctaatttttttcaccaaggcttgctttctcctcttggaagatacgtcaaacttgatttccaccaaccctaattctccatttcaccaaacaactctactctccagtctttttgaattttatctgacagccattatttcaagaaagtgttttctctctttttttttttttttttttgagacatagtttagctctgtcacccaggctggagtgcagtggcgcaacctcggctcgctgaaactctgcctccaggttcaagcgattcccatgcttcagcctcccaagtagctgggattataggtgcatgccatcacactgggataatttttatatttttagtagagacgggatttcaccatattgaccaggctggtctggaactcctggcctcaagtgatctgcctgccttggcctcccaaagtgctgggattacaggcatgagccaytgcaccagcctcaatatgaagagatttcaacctaaaagctcttacttctgatccatcctctaaaagtgtattcttcc

SEQ ID NO: 663613 - DNA, 619 bp, Homo sapiens
gcagtcttatagaagtctggctaccttgaagctgccatgagaagaaatcatgtaaagagacaagaatgagagagagacaaagagaagagacagacagccctgaggagtccagctgtaggagcttcttagtccaggcactagttatttgaataaagaagcattgaagattactgcagacctagccaccctctagctgcaattatatgggataccctgaattttttagctgagcctctcaactcccagatttgtgaacaaaacaaatgattattattgttataagctactcttttgggatggtttgttacatagcaatgaataatcagaacaatgtgacctttcagacaagttggtcacatcacacaaattatttaatgattgagtatggacatggaattttctaattttgcttaacatcatttaatacttacttaggttatcraagagtcatatccagaaaagaaatctaatatgagctgatgaacttaaaaaagagattctctcactaaacacatgtttattgagcatctactatatgctgggtaatattctaggctccaagactacatcactaaataagacaataaacagacaaattctttacccctatagtcctatt

SEQ ID NO: 663614 - DNA, 466 bp, Homo sapiens
cctcatattattgtagtggtttttctccccacagtttaatctaggatcctttaaaaccaaggctacttctaaattcagtaagattatatacaaacttgattttatgaattatgtgaatgccactgctgagaagtctcactggcaatataatatgattatgcaaatgtacacatcagayaaattaaaggcataaaaagaaatcataaaattgaagaaataaatttttaaggctttgtttatttcaggtctttcatgtcaaagttggaaactttcttttgtaaggatacaggtgaaaactgttaggtagggtagagaggagaaaatcataccctaggcacatatttgttgttcactgggttagtcccttacaaagggtgcataagcaacacagatattttatattggacattttgccagttgtacatggattcaatatagttgcaaatgatcccattatgaaaattaa

SEQ ID NO: 663615 - DNA, 492 bp, Homo sapiens
tgttgggcacttgtctggttgtttttctttagcttaacatgccagcaatgattccttttgggtttctgacacaagacagtggttttcatccaccccatccctaagccactcagatggaatgaaaaaggaggaaaaggccagtactgtgactgcctaagcttcccccagcatggccacgctatgagacacagggcagctgaaagtcagaaactgctcaagggcaccaggccccatctgtctgtgctcactcaccttcctttggtacttgcatgggcctgtcactgactttatgtgctgctatagctctttggtgagctggccctggtcatgggacaggaactgtggagtcaggacattagggggcttcaccacctgcagaatgggaacagaggcacataatgagtgccagcctattagataattttattttttttcccctttttttattataycttaagttttagggtacatgtgcacaacgtgcaggtttgt

SEQ ID NO: 663616 - DNA, 618 bp, Homo sapiens
ccaaccacacacacacacacacacacaaacacacaccccttacagagtactattttctagtattctattgtcattttgtttttatgcctatctgactaacattattattattactgctttgtattatcaatggtcacttagattttcacactgtaccaatttctgagcatcattccttcacacatttcactccttccttcttggttcactttccttcttacatcttttagtagttgtttcagtaagaatctattagaagccttcttattttcctgatataatatctatttatccttcattcttgaaggatagcttagctggtagagaattccaagtagatagttcttttttcttatcattttaaagactttttttttcaattatcttctggcttctatygtgctgttgagaagtgtattgtctgtcttcagagtgtcttttcccttggtttttctgaaaatattttctttgtcttgactgttttgacaagttatacctactcatgtacattatgacatgagcaggtaaaactttagtttatttataatactttcagggctcattgtgcttcctgaatcagaaaattaaatatttccatcaactctagaattgataaaa

SEQ ID NO: 663617 - DNA, 634 bp, Homo sapiens
aagataacatccttccctaagtatacgtaagtgtataattcacaaagatcttcaattgtttcataaagatgttactttgagtggaagcaacagaattacaagcataaatgtacactgattaataacagaaaaggcaagaaatagtccaagataaatgaagacacaattgattactaaatagcacggtaaaccgcatgaagttgcttcaagaaaccaacacacagaaaatttaaattcaatactccacatttcttgaacattgacagaccacattgaccagatgtcagaatgcttgtgctaaaagtggaaaaattcagcccatacaatatatgatgatacatacatagacttactagaaacataagaaattgattttttaattaaaaaacctctgagtcaagcctttcagaagattattgccaattactattatatagtaatcacaattaaagtcaagaaaagggaggcactcgaagtcattctggcagtttmaaactaattattgcctaatacaaatgccaagaaagaggtgtttttgacaatagcattgtgaagttgtttttccatatgacagcacggaatgtatgatgcaatatttatggccgtcatctataaaagcagacaggttcagtta

SEQ ID NO: 663618 - DNA, 662 bp, Homo sapiens
ttataactcatagaacatcatgagagtactgataaggatagtggtatacagcagcagcagtgaagaactacgtgccctacaaaaattgctgctctgatcaatacctaacaaagcttaaatgttagcctcagaaggataaagatatttgtaagttatgtaactatgtcacagaatacagcttaagaatattttatatgaatataaaaatatccatcacccaagaaagtcaaattaacaatgtcaagaatacaataaaaaattaccaggcatgctaagaaacaacaacaacaaaagaaacacacgaatgaggagaaaaatccattaacagaaaataaaacaaaaatgacacagataacagaactaacagacaaggacattaaaacagttatgatacctatattcaatatggtcaagaaggtagaagaaagattgggcatgttgagtagaggcactgaataaaatatttgaagaaacaatggctgatatttttccaaatctaatgaaaactataaatccagagattcaagaagctcaccaaacccaagcaccagaaatatgaagaaaactctaccaaggcatagcatcatcaaattgcttaaccatagtggcaaagacaacagaggaaaaaagacataycacatacagacaaaaaagataagaat

SEQ ID NO: 663619 - DNA, 611 bp, Homo sapiens
ttgtataatttagtacagccagaaaaaaaatcattgtcttagtctgttttgtgctgctataacagagtaacacggattggtaatttacaaacaacagaactttatttggcttatggttctagaggttgggaagtctgagtttgagggtctgcatctggtgaagcccttcttgctgcatcatgacatggcagaaggcatcacatggtgtaagagcatgagagcaagagtgttgaccttgcttttataacaaacccactcccatgaaagtgatatttattcaggagggcagagccctcataatctacttacctattaaaggtcctacctctcaacactattgcactggcaactaagttttcaacacataaatgttgggggacatattcagactgtagaaataatttttaaaagataattatccaaaatcactgatatttatttgcctaatttgttttagcatcaaaagtcttcttttaaaagacatcttgaaaagaactctaatatataaatttgakaacaattattgtgtcctgggaagtattttattttctagaactccacaaaaacgactgggccagagggtttctaaagttcttaaaacgggctgtaag

SEQ ID NO: 663620 - DNA, 572 bp, Homo sapiens
gtattttatactttttgtagctattgtaacaggattgccttcttgatttctttttcaaattgtttgctgttgacatatataaatgctattgatttttgtatgttgactttgtattctgcaacttaactgaattcatttattagctcttaacagttttttggggaaactttgggtttttctaagcataggatcacagtgtctgcaaacaaggcttattttgctcctaccttttcaatttggatgccctttmtttctttctcttgtctaattgctccagacattacttccactactatattgaaaaacagcagtaaaagtgggcattcttgtcttgttccagtctttaaagcaaaggccttcaatttttccctattcattatgctgctagtcataggtttgtcacagttggcctttattatcttgaggtatgttccttctatacccattttgatgagttttcattaaggatactgaattttatcaaatgcctttttggcatctattgaaataatcatatggtttttgttcttgattctgttaatattgtataacatgtttattgatctgcatat

SEQ ID NO: 663621 - DNA, 465 bp, Homo sapiens
cttttgggtatcttagaagtggaactgctggatcatatggtaattctatgtttaactttttgaggagccatcatattgttttccacaacagctacaccactttacattctcatcagcaatgcataaaggttgtatgctattcaggacttttatatattaaaatattttattaaccattgttaaatagtacatgatatttcaaaaacacaatgagatgatcatctggaacacctccatgcgaatacaactrtcattttgtaaaattctaagttttctcatttgtatattttcacagaattttaagtttatatatttttgattttcttcatattatatatctaagcattttccatggcattacaaagctattataattatcatcctaatgtttatgttatagtcaaccaaggggaaatactataattttcttaatcattgaacattcaagttgcttccaattttcca

SEQ ID NO: 663622 - DNA, 557 bp, Homo sapiens
tgccaaaaatagaatgtctttgacatggtttaactgttaacaccaagctttctttatccattgaaaggaagccttgtgttttaacatcagttaaaaaaaatctatcataagttttaatgttgcgatttttagatcattctaatagctgtatgtatttttctctccaatagaattgaagcaatttatcatattgaagtaaaacaaaagaagaaaagtcatggcttattgatcccacttttgttaattgagttagagactgtgggaaatttccattttgaagaaggcactcgatctgatgactggtaaatctgttagaaatttagtatagctttaaaaataacttaagtacttaggatcatcaaccagaatatcaacttataaaatcttaaaatgtcccatttttgaaacatttctcatgcagaatattcatctattgaaaattggcaggcatctattgaaaactgaaamttacctactttccgcctatacatttctgtttatgccattaccgtgagccaaccttgaagacatcctaatggtttatcattgctctttac

SEQ ID NO: 663623 - DNA, 630 bp, Homo sapiens
tcctttttgttccccattttgcttctaaacatgggaataccacaggttaaagtctcctgatcttcccttttttcttcacacaccatcaattactgtcattgttaagatcctagaaatggaagaaacatcagtgtgtagcatgtaaaagatcagatgagctacatttctgtgctatgatgtgtacataatgrgtcaggataaatatttatgttccgcattgtttaagagatgggctctgatttaaaagacagccgtgtaagcagtttagaagagaggtttggctaaggttggcagtatctacaggcagagggctggccatagtggggaagaagaaactatttgactagcaaacatatctaaggttaagtccacttttctagttggaagaggaaggatctctttctatcaattcaggatgaagtgttcagtagtaagggtgggagagtacgtaagtaaatctgctcacatagcttgagttcattccctaccgaatattgtttgtaatcaaggacttggtcaataaacgcaaagagtatcacgtattcacttatggtttctccaaaatgtacatcttcagttaggctatctcttcctctctgctctgccacctacagctgccattcctgcatg

SEQ ID NO: 663624 - DNA, 630 bp, Homo sapiens
gtaaatactatttaaatagttgttatactgcattgtttgctatttgtattattttgtattgcatttttttcctgaatattttcaatccatggttggttgaatcctcagatgtgggaactgtggatgtggagggctgactgtatttattttttcagaatgtctttggattgcagatttcaattaaaaaaataagtaatttggcatttacagataagacataattctaaataatttggctattaatgttaaacaaatagtaatttcaaacctttgagattgtgacaaggacaaatagacctgagttcaaatcrtgactttgccaattactagttctgtccttggacagatcatataatctcttttagctctagttttcttactactaaaatctaaaaatagagatttttggtttttagagctgttttcacggcaagcaagtaatgtgaacattaccgatagaatactttcaagaaataaagttagtcacaatacaaactaggatttccatgggttaacacatgaaaagtgttttgtttctagaaaacaatgtagattattagccccaaaaattatagtataaacaagaatcttcactgatataatacctcattccattagattttctttttg

SEQ ID NO: 663625 - DNA, 630 bp, Homo sapiens
gtaaatactatttaaatagttgttatactgcattgtttgctatttgtattattttgtattgcatttttttcctgaatattttcaatccatggttggttgaatcctcagatgtgggaactgtggatgtggagggctgactgtatttattttttcagaatgtctttggattgcagatttcaattaaaaaaataagtaatttggcatttacagataagacataattctaaataatttggctattaatgttaaacaaatagtaatttcaaacctttgagattgtgacaaggacaaatagacctgagttcaaatcgtgactttgccaattactagttctgtccttggacagatcrtataatctcttttagctctagttttcttactactaaaatctaaaaatagagatttttggtttttagagctgttttcacggcaagcaagtaatgtgaacattaccgatagaatactttcaagaaataaagttagtcacaatacaaactaggatttccatgggttaacacatgaaaagtgttttgtttctagaaaacaatgtagattattagccccaaaaattatagtataaacaagaatcttcactgatataatacctcattccattagattttctttttg

SEQ ID NO: 663626 - DNA, 586 bp, Homo sapiens
tttgtttttatatagcctagaatgaaatggacaagaaaagtctgggccaaattctgatgtaggtgttgtcttaaacaatctcccacctcctcctttgaccttctgtcctcctacttcagcaccctcagcttttcttctttggttcggtgccctcatacattttcctgccatctctcttgtgtgaggtaccctacctgataccccaaatctttagggtctccattgttcactggttagccttagaaacagatctaccctaataagtatcttaacacatgtatttattttctaaaaagaatttcacgccaattgctgacaaacttagaccaagtragaaatcatattaatcaagaaccaggtctagtgatactattacaaattatttatcttttaacatcatagattagattttttttcttattgactgtttcttaatgctatttaaaataactgctttcttattttgtagtatattggctcaaataattgttctaaacattttacatatccacacttcagtttgatgtagaatgtaacctgtattattttttaatgtatattttattttgcttcagagtctgaatct

SEQ ID NO: 663627 - DNA, 432 bp, Homo sapiens
tttttgtaattacggcttcatatctaccatttacaagattatacagcctaaatcagcctaaatacatatactgtattatgttactttctctaaaacaggtcttaggttgaacttttgttagcagaccaaatccgtaccagtggtcatatctcatttctatctactttaaaatgaatatattaaaataacttctcaaatttgcttttaaaatgtactttggtgtaatttccatttttttctactcttgttttcccactcttctttctytctttctcatgaatccctatttctttttcattttgtagtttaccacttcacatcttaagatggtcagttcctcccatctgctcatccaggttattatttctttctttctgtcttgtcctttgacctgaatatcacatgcatagatcttgttgaatttgtgtttgc

SEQ ID NO: 663628 - DNA, 587 bp, Homo sapiens
gcccacagggtgcttgtaatctattcataatattctagctcttaaactggtttcatgggtggattctatgtgtgttcatattatagtaatcattttacagtcttataaatattatcttgtaatggttccacatttgctaaaacaagaaacaatgtaattaaaatgtatctagatattgaaaacaatttaaggcaaaggaaatgttacattttataattatttattgggccactcatcttccctggaaacaataattttaactatatatcaactaacctctgtatactgtttccttttttcaytgtattttttaaattttattagttatctctcttacggcattctagtactaaagaggagagaccacggatacttagtatatggccttctgccaaaattctgacgcaggtttcaaagttaggacctcatttacatctgagtggaaactgctacttgaaggtaaaggctaattctattaaacctaatataaagcttaatttaaatctatttttaagtcagtgttggtctgtgtatcataaagagggcacagataggtaagggacagaaagctggaagagattaattaa

SEQ ID NO: 663629 - DNA, 576 bp, Homo sapiens
cttaatttaaatctatttttaagtcagtgttggtctgtgtatcataaagagggcacagataggtaagggacagaaagctggaagagattaattaaaatagggaagaaacacttaagatctaccctcttggcaaatttcaagtatacaataccgtatcgttaactttagtcattaactttagtcgttaaagttatcgttaactttgatgttgtacattagggtctctagaaagtattcgtcttgcataactgaaaccttgtacctcttgaccaacatctgcccacttcccattgcccctagcccctggcaaccactattctactctctcctatgagtttgactattttagagttcatatataattgagattatacagtttttaatttacaatgtatgcttatatcaagttatacatctttaatatatgcaattttaaattgtcaattacacttcaacagagttggamaaaataaaaataagaaagacattgttattattagtaaaaagtaatacatttgtcatattccaaaaaataaaaaacagggaggtcaagtcatgaatggctacgtcagatgg

SEQ ID NO: 663630 - DNA, 605 bp, Homo sapiens
ttaattttgtcatctggtcaattcttaattgtctgaattgtggtggaaagggagggctgtgctgcttacaatagaacccacagaattcagtgcctaaaaggtaaagaacacaattttatgggacaggatagaaaattatgcactggggatttascatcctcctaagcctaaaagcagctttctattttcagtgcaaatatagttgctaatattaataattaagaaaaatatatttgaaccaacatgtggtatgtcaacattactaagtaagctgtaaagaaaaatagacacagaccctaggactgaatgtgaaagcaacatttggatactggattctataacaagcaaattcatagggctcctgttttccacatagcagggtaaatgcatgacaaatgtgtaaagagtaaaaggtttatggtgtaatgttgcctagctcctgtcagaaaagaaaacacatcaaattttctagaaaattgaaagatagttcatgatcatttagtattctgaggtactccaagaagattactaatcctagcccttctgttttctggcccatcctcagaatgggtcactaaaactttctcactccaacacatacaaat

SEQ ID NO: 663631 - DNA, 364 bp, Homo sapiens
cgtggaagcaggaaaaacttgccttctttgtgttggaagcaagtaaaacatcaaaaaaaaaaaaaaaaaggagttgtacagcaaaataaactttaaatctcatccagattttgggaaatcagaaattctcttgaggggtgcttccaggcctcagcaaattgtcctgttggtttgagccawaaagatagctcaagctggtacaagcaccagtaggagattgtcaaaggttaggggcaccttcactcagaatcctttcgtggttaccagaatgtgaaccccgaatatctgagactggtgtcagttaatttagaaagtttattttgccaaggttgaagacgtgcgcctgtcacacagcctcaacagg

SEQ ID NO: 663632 - DNA, 594 bp, Homo sapiens
catcttcaaaattgtcagaccacggctgcagtgttatcttctgtctaggtgtttaacagaggaccgtggcactctggggcactgttacggactaaattatgtctcccacaaytcactggttgaagcccctgacctcagtgtgactttattcagagatagggcctttaaggatgtaattaaggttaaattaggtcttaagagtggcccctagtccaataggactgtgagaggaggtgaagacatgagggatgctcatgctcagaggaaaggccctctaaggacacagtgagaaggtggctgtccacaagccaaggagagaggcctccagagaaggcaaacctgccaacaccttcctcttgggcttccaaaactgtgagaaaatacattgctgctgttaagctgcccagtctgtggtattttgttatggcagcctgagctaactaagataggtttttctttcaaaagaaagaaagaagaagaaggtgaggggactcaagaccacatctgaagggcagtccgttgaagagcctggaataaaaggctctggagagacaatcactgtctagtctaatttctccaaggtgtagcatccag

SEQ ID NO: 663633 - DNA, 509 bp, Homo sapiens
aaatatttgtaaaaataggaaaatagaacaaaacgaatgctcaaaccaaaatccaagtccagttactatatgcagcctctaaaatgccttctgctgtttcaactgaccactttttcatttcctgcagttttatcttctaaaaagattaagagggagctagtgttttacatttaaaacacsgcaataacactctgaaacactttaaacttggcactagtcattactaactaattggtttaaaagctaatttttcccacttctatttcattcccatagttgcaaatcaaaggaagatgatcttttagaggacccaataaatagaaggtatataatcctgtcactaatattgctaaaccttgtttctgtgcttgtaaatgctgcttgtttcaccaaacaaaagtggttgctttcattgaagaagagaatttaaaagacttttcttactataataaaagcaaaagtctacttataattacaaatactttaaacttggagtctgaaatgaaatt

SEQ ID NO: 663634 - DNA, 530 bp, Homo sapiens
ttatagtaagaaaattaagcttcttgactcagaaacaaatatagaaacaagccatgactcatttttaccatcattctattccagaaacttaaaagcatagcctgcatagtgaagatccacataaaaatgcaggcacatttgctgcagtgctaagagcagaagatatcaattaattagagaagtgtgaaaataaagacaggacgaatgagggggactggtagggagacaggaagaaggagtgacaaacaacagcaaaaatatcttaaataaataattcagaatggatgctaaatacaaaagtgggagccaagccagactaaagttcagatgcatctagggttactttgtgcaacacatttattcactaaagcgccaaagcagctattagaggaaacaataaagaggccctctcccctggaaatttgagtcctgctttggaatttttatgacatttcttccttaacaaacaagaaggtctcaccaccttcycctggcttcaaagcctcactatggcggtggcctgagattaa

SEQ ID NO: 663635 - DNA, 243 bp, Homo sapiens
gaagtagtaaatacaaaaggagtacactcccagtgcataaaatttggaaataaaaacagaaccaaaccaaacaaagaatcactcctagtcccactrctagatacaacattataaccacttaggtttccaatatttttcagttattctttgtatttaagcctgtttaaagatgagaaaattttcacatgtgtaatgagagtcaaagctaggactaaaactcatgaacactttccctcatactag

SEQ ID NO: 663636 - DNA, 494 bp, Homo sapiens
tgtggttactgtcaagtagggaaccctgtttctttatgcatgagactgaagagtagagacatgggggaaggatgacagaaaaaaagaaagtatgcataacacactgtaaagtgggaagtgatacataactaaacaaatgataaaatcatatcaaacaatattaagtctttttcctatagcttcagaaagaatatttcaactaattgggtcactggaaaacaataattttatatagcattctgataaataggtccacaggctaaacaatttttttttaaagttayttatcaatgtattcaagctgtgtgtttgatccgcaaagagatagggtttcagtttatacttgctgtttgttgaagcagcctcaggcaggaaagggatatgaaaaaagaagacaaccctgattactgcaaaatgaagagggcagcatggtcaccagctcaacgttagaaaaagggcattataaaagcagtgctgagagaccaggtattctg

SEQ ID NO: 663637 - DNA, 540 bp, Homo sapiens
tttcttttttgttctgtcaggctctaaagttacaaatawgagacaatgatgacagatcaagtaagtcagaaattcttcaagaaaaagagaacctcttctataaatacatgactcgatcaggctgagaacctgtctacccgtttacacagaaaatcaagactttggccacttgatgggttatggaggaggagcctgaaacccctggccagcagggccttccctttcagggactcctggtaaaaacttacttttttctacccaaaggccaaaaccaagacaggaacattttacttctggaaaccctggtctaaaactcagtgaagttatcattcccaatacatttttttcatcaacattttatgttcagaaatgagaataaaaagttgtatagcctttccaaaaggcaacttgctaattataatcatgaaaaaatagattcagcctaaatgtccaacatctagaatggttatagaattcatattacagttgtgaaataaacaattctgctgccattaaaattcctttgacaaaaaagttttt

SEQ ID NO: 663638 - DNA, 540 bp, Homo sapiens
tttcttttttgttctgtcaggctctaaagttacaaatatgagacaatgatgacagatcaagtaagtcagaaattcttcaagaaaaagagaacctcttctataaatacatgactcgatcaggctgagaacctgtctacccgtttacacagaaaatcaagactttggccacttgatgggttatggaggaggagcctgaaacccctggccagcagggcyttccctttcagggactcctggtaaaaacttacttttttctacccaaaggccaaaaccaagacaggaacattttacttctggaaaccctggtctaaaactcagtgaagttatcattcccaatacatttttttcatcaacattttatgttcagaaatgagaataaaaagttgtatagcctttccaaaaggcaacttgctaattataatcatgaaaaaatagattcagcctaaatgtccaacatctagaatggttatagaattcatattacagttgtgaaataaacaattctgctgccattaaaattcctttgacaaaaaagttttt

SEQ ID NO: 663639 - DNA, 540 bp, Homo sapiens
tttcttttttgttctgtcaggctctaaagttacaaatatgagacaatgatgacagatcaagtaagtcagaaattcttcaagaaaaagagaacctcttctataaatacatgactcgatcaggctgagaacctgtctacccgtttacacagaaaatcaagactttggccacttgatgggttatggaggaggagcctgaaacccctggccagcagggccttccctttcagggactcctggtaaaaacttacttttttctacccaaaggccaaaaccaagacakgaacattttacttctggaaaccctggtctaaaactcagtgaagttatcattcccaatacatttttttcatcaacattttatgttcagaaatgagaataaaaagttgtatagcctttccaaaaggcaacttgctaattataatcatgaaaaaatagattcagcctaaatgtccaacatctagaatggttatagaattcatattacagttgtgaaataaacaattctgctgccattaaaattcctttgacaaaaaagttttt

SEQ ID NO: 663640 - DNA, 540 bp, Homo sapiens
tttcttttttgttctgtcaggctctaaagttacaaatatgagacaatgatgacagatcaagtaagtcagaaattcttcaagaaaaagagaacctcttctataaatacatgactcgatcaggctgagaacctgtctacccgtttacacagaaaatcaagactttggccacttgatgggttatggaggaggagcctgaaacccctggccagcagggccttccctttcagggactcctggtaaaaacttacttttttctacccaaaggccaaaaccaagacaggaacattttacttctggaaaccctggtctaaaactcagtgaagttatcattcccaatacatttttttcatcaacattttatgttcagaaatgagaataaaaagttgtatagcctttccaaaaggcaacttgctaattataatcatgaaaaaatagattcagcctaaatgtccaacatctagaatggttatagaattcatrttacagttgtgaaataaacaattctgctgccattaaaattcctttgacaaaaaagttttt

SEQ ID NO: 663641 - DNA, 611 bp, Homo sapiens
cttttcttacactctcttccctactacgttagtttagcctactaaccaggtaagtattctcaaattatttaaaattgaagacacttttgaagatgaaacttgattcacagctaaaaatatttaattgaaaatttggtacagataacaaaataactctttctgaaagccaaaccatcaatttttttactatactctgggtctaattaaaagagaaaaagagttaaatttggcaaataattcttaaaggaaagactagtaaatataatgaaaaaaatttactccaaagatttactatgctgaactgtaaaaataataattagtattttgtacctattggttacagcaccttttatgcttcggactatgagaactttatactttcattagttttcacaacatgcctgtcaggttggctagtggactaggacttttttcttcatgtatagctggagaaactaaaaaaaaaaaaaaaaaagagcagaaataatgtacctggtcttccagtaggccattaaaatgaagctgaaaacagaayacagatctcaacttttggtttacactctctcccctatactatcatcaccatcattttcataacaatcattggtagg

SEQ ID NO: 663642 - DNA, 604 bp, Homo sapiens
gtggcttgggatgggagaagaaaaaaaaaggctgtgtgaagggtgtggtgagaatagtctgccacragctaggtctccctgaatgtggcctattattcattttatgggataaatcagggcaaaagctctttctctttccatagtctcaataatagccagctgtggcttgagcaatgtcttctaggattatcacagcagagatcacagcttcctaaacactcagatgaatagtttaaaaatttatattagaaggggattcttctccaatgatttctgactttgaaaataatactaatggccacgagctacccaatgcctgactcctatggttttctgacaaactacatataaataaacaaacaaaccaaataaataaaaacaaataggtttaagtcatatttcttaaaaaaataatagtttgttattgccattattattgtttttattcaggatgtagagctcatctggattgctgcttctgaaataagacagaaaacagaattacaatataatagaaaggacagtgaactggtagttaagcaacctaggttcttctatctgcactaaccagctctgctggacaaggctgatatactgcaggaca

SEQ ID NO: 663643 - DNA, 604 bp, Homo sapiens
gtggcttgggatgggagaagaaaaaaaaaggctgtgtgaagggtgtggtgagaatagtctgccacaagctaggtctccctgaatgtggcctattattcattttatgggataaatcagggcaaaagctctttctctttccatagtctcaataatagccagctgtggcttgagcaatgtcttctaggattatcacagcagagatcacagcttcctaaacactcaratgaatagtttaaaaatttatattagaaggggattcttctccaatgatttctgactttgaaaataatactaatggccacgagctacccaatgcctgactcctatggttttctgacaaactacatataaataaacaaacaaaccaaataaataaaaacaaataggtttaagtcatatttcttaaaaaaataatagtttgttattgccattattattgtttttattcaggatgtagagctcatctggattgctgcttctgaaataagacagaaaacagaattacaatataatagaaaggacagtgaactggtagttaagcaacctaggttcttctatctgcactaaccagctctgctggacaaggctgatatactgcaggaca

SEQ ID NO: 663644 - DNA, 604 bp, Homo sapiens
gtggcttgggatgggagaagaaaaaaaaaggctgtgtgaagggtgtggtgagaatagtctgccacaagctaggtctccctgaatgtggcctattattcattttatgggataaatcagggcaaaagctctttctctttccatagtctcaataatagccagctgtggcttgagcaatgtcttctaggattatcacagcagagatcacagcttcctaaacactcagawgaatagtttaaaaatttatattagaaggggattcttctccaatgatttctgactttgaaaataatactaatggccacgagctacccaatgcctgactcctatggttttctgacaaactacatataaataaacaaacaaaccaaataaataaaaacaaataggtttaagtcatatttcttaaaaaaataatagtttgttattgccattattattgtttttattcaggatgtagagctcatctggattgctgcttctgaaataagacagaaaacagaattacaatataatagaaaggacagtgaactggtagttaagcaacctaggttcttctatctgcactaaccagctctgctggacaaggctgatatactgcaggaca

SEQ ID NO: 663645 - DNA, 609 bp, Homo sapiens
gggggttttatctgtaagtctctgactggggctgctgcctttttttcagagatgccctgcccagagaggaggctgtctggccgcagtggccttgctgagctgcagtgggctctgcccagttctaacttcccacggctttgtttacaccgtgagggtgaacccacctactgaagccccagcaatggyggatgcccctccccccaccaagcttgagtgttccaggtcgagctcagactgctgtgctggtgggagaatttcaagccagtggatcttaacttcctgagctctgtgggggtaggtcccgccaagccagactacttggctccctggcttcagccccctttccaggggagtgaatggttctgtctcgctggcattacaggtgccactggggcatgaaaaataacttctgccactagctgggtgtctgcccaaacagccaccccattttgtgctggaaacccagggccctggtggtagaggcaccggaaggaatctcctagtcagtggattgcgaagaacatgggaatagtgcagtatctgggccagagtgcacagtacagtccctaatggcttcggttggctaggagagggagttccctgacccct

SEQ ID NO: 663646 - DNA, 576 bp, Homo sapiens
agcaattaattataaattagggacctgtccattctgtatgaaggcataattaagggtataattcctgagttcttttcttcattttggcttctttgattttggcccaaattggaacacaagtacaaatgctaaaagaagttctttcaccatgaaaatacargatatcattataaaatatgaaacctgttcccaaagttatacacaaaactcagaattgtgattcacagtcaagggagctacaaaacagatccctatcccttttacaaaagaagtcagattcagctgaccttaatttcatgacagtaaaagctgagattcaccaggtaacagttgctctatcattttaacaaaaagtctctgaaactctttctatcatcccagagtcctacttttcattttcttcctagatgaaaatttctcctaaatagtctggattcctcatggatgcttccttgaatactgggtgcatcttgcaattccactatcctgcccaatcccatcaaatatagaatgaactcagcactctctaccatctggtcctaactcattaattcagtctaagcttttcacccatgc

SEQ ID NO: 663647 - DNA, 569 bp, Homo sapiens
tggccaatggtgtaataaatcatttatgtaataaagctttcataaaactccaaaaagtctgggttcagagaaccactagattactgaccatgtggaggtttctggagagtgatctgcctggagaaggcatggaagctttgccctcattctcccatacctcaccctatacatctcttccatattgctgytcatctgtatccttgaaatattcttttagtaagccagtaaatgtaagtaaaatgttgccctgagttctgtgagccactctagccaattaattgaacccaagaagggggtcatgggaacccctatttattgccagtcagtcagaagcataggccacaacctgtgcttacaactggcatctgaatgggggcagtcttatgggactgagccctcaacctgtggtatctgattctatctctaggtagatagtgtcagaactgaattttgttagaggactaccagttggtgttactggagaatctgcatcattgggagaaacctcacacattttggtgacctgaggtgaagtattcagtattgtgttgagtgtgaaagcaaaatga

SEQ ID NO: 663648 - DNA, 569 bp, Homo sapiens
tggccaatggtgtaataaatcatttatgtaataaagctttcataaaactccaaaaagtctgggttcagagaaccactagattactgaccatgtggaggtttctggagagtgatctgcctggagaaggcatggaagctttgccctcattctcccatacctcaccctatacatctcttccatattgctgctcatctgtatccttgaaatattcttttagtaagccagtaaatgtaagtaaaatgttgccctgagttctgtgagccactstagccaattaattgaacccaagaagggggtcatgggaacccctatttattgccagtcagtcagaagcataggccacaacctgtgcttacaactggcatctgaatgggggcagtcttatgggactgagccctcaacctgtggtatctgattctatctctaggtagatagtgtcagaactgaattttgttagaggactaccagttggtgttactggagaatctgcatcattgggagaaacctcacacattttggtgacctgaggtgaagtattcagtattgtgttgagtgtgaaagcaaaatga

SEQ ID NO: 663649 - DNA, 569 bp, Homo sapiens
tggccaatggtgtaataaatcatttatgtaataaagctttcataaaactccaaaaagtctgggttcagagaaccactagattactgaccatgtggaggtttctggagagtgatctgcctggagaaggcatggaagctttgccctcattctcccatacctcaccctatacatctcttccatattgctgctcatctgtatccttgaaatattcttttagtaagccagtaaatgtaagtaaaatgttgccctgagttctgtgagccactctagccaattaattgaacccaagaagggggtcatgggaacccctatttattgccagtcagtcagaagcataggccacaacctgtgcttacaactggcatctgaatgggggcagtcttatgggactgagccctcaacctgtggtatctgattctatctctaggtagatagtgtcagaactgaatttygttagaggactaccagttggtgttactggagaatctgcatcattgggagaaacctcacacattttggtgacctgaggtgaagtattcagtattgtgttgagtgtgaaagcaaaatga

SEQ ID NO: 663650 - DNA, 557 bp, Homo sapiens
caatgacagtcactggtgtcaacactccattccaaaatatcaggcccgtctttggcatttggccagtggcttaagtctagagttgggtggggcattcccagccttccccagcaggcagggcggtgttcaggctttgagactgggggttccatctggaccatggctccagaagccctggtgttgccatggtgaggaaggaaggttggggagatggtgagtgacaggctgacgagcctcccacatccttccagcctcctgctgagagttcttggctgatgtttagacagttgcctccctccccagtctttgtacttttagggagtgccaaatccagcacttccgtgtccaataggtcaatcacatctgaaatggtttaagtkgaaataatgacttttttctataaaatgggaagaattactgtctcaccttggacagctttattttcagtctatcatttcgattagaccttgaaacttccctaacttgcttcagtttttttttccagctagatttgcttattgcttcctgctaaatttaggaaacaaacagcaaagaag

SEQ ID NO: 663651 - DNA, 581 bp, Homo sapiens
ataattaatgcccttccaaaacagaaagcaccaggcccagaggggctcagtgatraattatatcaaacatttaagaaactataccaattatctacaatctttttttctcaagatagaagccaagggaatatttcctaatccattcaatgaggctagaattaccttaccaaaacctaatagagacattataagaaaactacagactggccagtcacagtggatcatacctataatcctagcactttgggaggccgaggcaggcagatcacttgaggccaggagtttgagaccagcctgaccaacatggtgaaaccatgtctctaataaaaaatacaaaacttagccaggtatggtggcgcacacctgtaatcccagctacttgggagactaaggcacgaggatcccttgaacctggcaggaggaggttgcagtgagctgagatggtgccactgcactccagcctgggtgacagagcaagactctgtctcaaaaaaagaaaaaaaagaaaaggagaaaaagaaaactacagaccagtatctttcatgaacacagatgcaaaaattttcaacaaaatattaaca

SEQ ID NO: 663652 - DNA, 521 bp, Homo sapiens
gcagccacagctctatagagaaaccttgtctttcttgacagaggaccaggaaaatggggtctgtttgcaaaacaatgtggaaggaacactggagaggaaagagctgagrgaggggttctttaatcctatgtataaacggcacaagtcccaggctcacccctgaactcagtatacacaggacatagccaaagcagcattgtaaaggctttgaaaactcagctaaaatgagaaccatcatccaaaaaacaaaaaacaaaaacaaaacagaacttttaggctgaatctaaataggttaacttcctgctaaaacaaaagaaataaacattctccagagattttgacgggactcagattctcaagttatcatattcaaaatgtccagcatacaaccaaaagttatttgacatacaaagaaacaggaaattttgaccaattaccgagggaaaagacaatcaacccaacccacagatcactcagatactggaacattcaaagacttacttaaagcagctactctaact

SEQ ID NO: 663653 - DNA, 552 bp, Homo sapiens
ttgttttgtatgctagctagaaagagtgagacccagccgggaagtaggaaatgttagagtacgtaaaccctttactttctgcctgyctgaagcccatagttgtcaattctaaaattcttctacagtaatgctttttcatcttttaaaataacattgttcattttgttttactatacttgggattaatgacctaatgtctcttaacattttttaaaaggaatgcactttattttctcatcagaccttataacttgaatgaaagtcatatcaaattctttataacagagatgtgtgacttctgttttgattctttacttttctccctaatataggattctagtataattgacttctatcctgaagattttgctattgatttgaatgggaagaaatatgcatggcaaggtaaaatttagacgttcttttctggtaaaactgtgaacaaacataatttttgaaatgaaataattctgtaaaagataaatattttagcctgggcaacatggtgaaatctcatttctacaaaaaatacaaaaattagcctggcgtggt

SEQ ID NO: 663654 - DNA, 605 bp, Homo sapiens
tgccatatccatactgtcccttccttgaaagacatacagagcatcccattaaatctattggcagtagaggggagtggtcagaagcatgagctctggagtygagctgacctggatttgaatcagggctctgccacttaccagaattgtggccatagataagtcacttagcatccctgagccttagtttcattgtctgtacaatggagataagacccgctctgtagcagagcctgaggatggcatgagatcctgtcttgtagagtgcctggcagaatcagtaaactgtagttcttattattattaagggctagaatttgctttggcataatactccttcctcaatataaccctttccactccctgcagctgccctagcttcttcctttaactccctatcttccttgaactcaaagaacaagtgcctgcaacaaatattttcaagccctttccaccctggcctgcaggcactgggtcccaggaatgaaagggaagaagagttgaggagattagagtttgtctgcaatgctgcctgattttcttaggactctccagttcttagatcttcctgcccagacccttttctacaacccactgctgaccacagc

SEQ ID NO: 663655 - DNA, 329 bp, Homo sapiens
ttccttttggagatgtggaagagctttatctagataaagctatatctagatatgctagataaatagcattagttcaacaaagcaaccatatctgataattgtctgattatttatttttcaattgtaatgatagtaattttgctattaattttgggacrattgaagaatagtcttaaccaccaattttctctattagaagattcttctgggtcttctctattttcagctggcttactgataactctctaaggaacgcatgaattcaataccattgtttgcttaggagtcaacatttttggtcaacgtagtaactgaaaattgaaagaaaa

SEQ ID NO: 663656 - DNA, 570 bp, Homo sapiens
ccagaatccaccactgtttcttttagtggattcatcctttgcaaggcttccactttgattcctaagggtgtgactccagagctttttattctgtcatctactttcttctgggctcaggcctgtgtaactcactctttggatctgtctttggtatctcttccggtctaatccacctgacacactgctattagatggaatcatcctgaagtacatctctgatattgttacttttctgctcaaaaactcaaggtcgctttatcacctacagaagagattctaactctgtaaaaaaggattcaggatgcttcacaatttgtctcatactttttttccctctgatcttattattatttgatatatttatatactttcatatccttgtccagtgctgtccagtagaaatagaatatgagccagatacataagtttaaattatttaatagycacattaaagtaaaagttaaaattaggaaataaaaatacttactaatctattatatttatattatttatatatttaaatgtatatgtaatttattctattcatattatatatttatatttgtgctt

SEQ ID NO: 663657 - DNA, 644 bp, Homo sapiens
cagaatttcctctgggctgttctacaagactttccatcaagcaaaactgtcttcttagacaattccccttggccactcaaactcagaatcatttgcaaaccaatgagaaaaggcagctgtgctttcattacctgtggacaggatcagcttgtactcttccaacgacaggccactgaagctggtgtctctggggcgagggtactggtcaccggggcagaaaggaagtgaagggaggggagagatcagcacacaagccctgctctctaactgcatttcacctaggccctgggcaaccagaggccaggaggcctagcaaggagaagagcagcgccacctcgaggtcaagacttggcctcgcaagaaccagtacagtctccaggaggcagctccaactataatgtacccgtgagtcctccctggaaaacgcaggtatgggtggggcccctgattctgcatttctaaccagttcccaggtgatgcccatgctgctgctcatggatcacatgttagcagggaggatttagaaaamatcaattttccacataggcatatggccacaaatgtttgtggagttaatgagcatatttttcaagtatgggaaaaaccactctaaatggaatttgacagtaatcatgttgggccca

SEQ ID NO: 663658 - DNA, 542 bp, Homo sapiens
taaatattcaattgttgaaattgaaagagcccacttggtaccaggcgaaatgaaaggagaaacatgactaaacacatctcatgaacatttgtttctatttcaaaacttgttcaccttgttaatcacacgtatgaagctataaaaacctgataacaatcacaaaatgcatagtttgcctttggaaacaaattacagagcaatgatcttgtttatgttaaaaaaaaaaactatgtgcatgtgtttgtgcatgcacgcacgcgcacatgagcaagcacacgtgtaaataaacagaatggaactggaaggacacatacatgcagtaaagattggttacctgaaggaggtagtcaaaacttcatggcgactcaaactattgagctgaagaatatttccagyctcatctaggacaatagacagacacccaatgctcggcgatcaagcaacataattaatgtgcaagtgaaaactgcaagcaccagcattcaaaccagggtaactgtctgaggcagtttcactgcatagatcaattaagtggaaagcat

SEQ ID NO: 663659 - DNA, 507 bp, Homo sapiens
actattggtgatgccaatcatttccatcatttctgaggccctcctggaactgctgcagatgcagtcatgggtctgtgctgtagctcatggcccgaggagtaggccaggggaaagtaacatcgaaacagaaaaaggttactgaggtcccagggctacctttgaagagatcaagatgtctttttaatggtggaggttcaatctgagtgtgtctgaaatccaaaagcacaaaaakcaaggacctcgcattaacctctgcatcataccacccatttttctgtcatgggctgtatcattttccgtgaaaatcttattagaattttgcttgacaaggctactataacataagatttatgctttcacaggaagtactattttcagtcatttataactcaggtggatacacttgctgttaggtaaacttattttgagaacgatttagttccttctttctgtaaccccacctttacacttccctgtccctagtttaaatgttaattagtttttcta

SEQ ID NO: 663660 - DNA, 581 bp, Homo sapiens
acgtctttccttctaggggttaaaatacaaacatattgagaacaaacatgatatcttataaatttggtactgtacatttttcttagaattgtcttgttcatttttgaaattagattctcacaatattcattgttgtgagattctgactccttttaaaaataagaaaacaatgaatgtaaatgagttcccagaacaaatcaatgtatacattgaggatctatggcatgcacccactatctgacaaataaacaatgctcatatgaatggccatatctctgatagttctgacctactgtacctttgttttttgaagcttttaggttaaaatctacttgagggccaaatcctcactctctaactttttgtcttttctcatttagaatcatagtatagactattttcaaacgccagcacagtgccagcaaattgcstgtagaaagtcaataaatacatataggacagatttttttgcagggctatttaaggataaccaggtctccagaactattttgaaatactctgtgattctagccttagcacactacaatattatgttttcaactgctaacaatgtacaaaga

SEQ ID NO: 663661 - DNA, 493 bp, Homo sapiens
tggtatttactatgttttcccctttttttctcatcaggtcctggctatggaggagggttccattcttacctgttgctctacaatgtacagctgatgttttacaataaaaacatggagtcatgctaactcccacatgccctaccattcactctccccaagccagtaacaaagcaggcaacgcagctaatataatatttagactaaccgtgaagaaaaagatctttctcccttctgtactctgaataaataaattagtctgaccaaatgaagaaatgtggtgtaacatgatttatttgggccagagctgacactggtaagacaaagctttcttatctgcttacagaaacttaagcagaggtcaacagccacatcctctgatttgtaagccattgcatgaacattgtggggaagaacktgaacccagttttcaacaggattccaaacatatactaatatgtcttatagactaacgggggtgaaaacagaggctaga

SEQ ID NO: 663662 - DNA, 584 bp, Homo sapiens
taatgaggctgttaatggtggggtcttaaaccagtgtgactggtgtccttataagaagagaaagagacgctagggatgcatgtgctcagaggaaaggccatgtgaagacacagcaagaaggtggccatctgcaggccaaggagagaggcctcaggagaaatcaaacccaccaacatcttgatcttggacatctatcctctagaactgtgaaaaaataaatctctgttgtttaagacagatatattgtcatggcagccctagcgaactaaaacaatcctcaaagactgcaatggcatttctctggttattcttatcttagcacctctcttcagctgggaaagattcactgcttttaaagtctcctatgattatactgggcccacccaaataatccaggatatctttgcatctcaaaatatttacctctaatgacatcctcaaagtccctttgccatgtaaagcaacrtattcataggttcttgtgattaggagataggacacggacatctttggagatgagggacattattctactgaccagagacatagaaggtaacattgagattatataattcatagttcaa

SEQ ID NO: 663663 - DNA, 516 bp, Homo sapiens
aatttaggagtaatctgacttgttcattactgtgttcaaagcacctaagcagtagttggaacataacagatgcaaaacgctggttgaatgaatgagtgagtggtgaatgagcagcaactaggtcaggggattgctagctcagtgggttgatggcaggctgtgacaggaagatgctacatcctactgggtggcatggaagagctgccatggaccgtgttgcctagtggagtgatggtggccactgtcaggaaaggtgggccagataagtagcaggtgaggcaataatgccatgattgtatccaatggrgaagtgatagaacattaaatctactggtagatgggttcatgaatacgtgtaaaatatccactaagatacataggcatacctgggtgggtagagagagaatgctttacattggtagggacaacagtccagtgaaatttgaattattgttgcttttcaggggtcatctgtgcccacaggctggtagtaagtgaacatttgggatataacct

SEQ ID NO: 663664 - DNA, 547 bp, Homo sapiens
cctaatctgattttgaggtttacatgggcatttgagycagccatgtctctcatataatcctactccctgggatgccagcatatcgccactgtccagaaggtattgcatttaccctctggtcaccagcctgggcatcagggaggctccactggaagataatggccttctctccaccactttgtgacaaacccataggcattggagtcaagcacaattaggtccaaaactcaaatctgccactttgtgattttggataagtcaccatatctctaaacctatatttaaccagctattaaaaaaatgggtgaatgggagccctgaagtgatagtatatgtttcagaattcaatgagaaaatatacataaagcctccagaaggataattagtccatttagtaagcattcaataaatattagccaccagaattattatcagaacaactattgatgtcagtggagttattgtaaacaattattgatgtcatcccagatgactatttcctcttctgttctatactactgagttctcagtcctagacccaggtttc

SEQ ID NO: 663665 - DNA, 586 bp, Homo sapiens
agcagttccccactctcctggtaccaattttatgtattagttcattttcacatcgctataaataactacatgagactgggtaatttataaaaaagaggtttaatggatttacagttcttcagggctgggaaagccttaggaaacttacaatcatggcagaaggcaatggggaaacaaggcatgtcttacagggtagcaggagagagagaagggggaagtgccacattttaaaccattgaatctcgtgagaactcactcactgtcatgagaacaggacgggggaaatctccctgtgatccagtcacctcccaccaggttgctcccctgacacatggggattaaaattccacatgagatttagatggggagacagagccaaaccatatcaagtatatactctcactaaaaagtgcttctagaatatctcaacwttatttacacttaagtttcactggtcagaacttagtcacatagccacatttcacttcagataagtctggtaaaagcagtttttagctgtgcagcaatgttctcaactacaaatacagattgcaccacaaaaagggaatcactatccgataatgtg

SEQ ID NO: 663666 - DNA, 552 bp, Homo sapiens
agctagcgacagagaaagtgtctgtctctgctactttgaatctttaacttcagggaaggtgtggacccgcttttaaagggatcacctaattatgtcaggcccattcagaataatctccttttttattaactcaaaattgactgattgtgcacctaatggcttcttcaaagtcccttcactcttgtcagattggttagaagcaagtcacaggttccatcaacactcaagggcatgggattatacatagagtgactcaytggggaccaccctggggtgtttactttagggatatgattggcaatatttaccccacacaatatatgatagttctttttaagctacaatcatccattaaagaatgatgtgtcagatccaaaaaaagagttgcctgagaaattatctgatggatttatgcaagatatttaagctactcaatgctgcctaagcaaaatttagctgctactggttaagctgatggatgccatctattcaaggtagttgtttgtcttataatttcaacatatgcttgtgatatggcttggctatgtcccc

SEQ ID NO: 663667 - DNA, 627 bp, Homo sapiens
accatctgctgttttgctttggtgtttaaccrgcagcgactttgtgcaagatgtactgccagagcatctggatacagcattctaggcctgacggttataaaggtgtgttgacctgccttgggcccaatttaatcatgggcagaaggaccctacactcctaaatttatgagaaactgctgcattgtaaagtccttttgatagcagaaaaaggggtgccaccttcatctgaaagagatgtgttggccatgtccatcaaaacccattgaggtgacacagtctgtgcagtggcatgaggaataatgtgaatgaccctactagggaatcactttgcagtatttgagccctgctctcagaatagaatgttttctattgaattcattgcaacaccagtagcccaaagtccaaggtgtgtatattcaaggcctagactggggcctttgttacaatctccatggattctgggtcagggaggaacaagttattgagcttgggcagtgcacaaatctcagctgtgattccagtgagctaagaaaaagtcaagcctaaaataaattattgaatcttatatccttaagcacaattctattccaacaataagaaataacctactacatgaagcaaaacctt

SEQ ID NO: 663668 - DNA, 516 bp, Homo sapiens
tcatacatataatacacaaatatgtgttaattgactgtttatgttatcactgaggcgcctggtcaacagtaggcttttagtaaagtttttggggattgaaaagttataattggattttcaactgtgcaggggtttggcatccttaactcccgtgttgttcaagcgtcagctgtattactgaataaaatacagataaaataaaaccaaattaagccttttaaattaagaatgtaatcactaagagactgtggtcaacaatggaggtcatgacaataaaattctgcttttgttatttatccaagttacattttttcattcatctcctcagtcagcaacaaatacttcttcagtactttgtgtcagttctgcagtctactaggcactgatcctctcccaaaaatacaatggaayggtttctttgtagctggcatcctttacaatgtttaaattcttgggacatcctggactgtaagggaaacaaatatttccaataggatgaagataaaactatattta

SEQ ID NO: 663669 - DNA, 586 bp, Homo sapiens
atgtgtgacagccacattgcaatgcaagtcagaatttatgcaagcactcagaaaatattttgctttcaatgaacatatgttttacattactgaccaaaaatatttaaccaagaaaagttatcccaaagacattcagtttgagttaaatgttgaatgaggcraggactttagttccagaaatatatgaagaaaatgatagaacagaaaaatgttgtatatgagattcttacaaaaatcagcagaaatttaactttactagtatcttggaggtatatccttagttgtctgctgcaaagtgagctttaggtaaagttaaaatagaagcccattttaagcagttgtttccatataccgtgttgggtatattgagacacagaaaggtcaggagttgtggaaatggctttgtggaacttgtcctccagagcaaccatgtgtttacctcatgcccacccctttctgagtggttctttatatatgggtcacacttcttggcaccatatgaacctggcatctgtgccatagctaatcagaatgaggacaagtacactgggtgaccagagtaggcaagggtcacatttttgcaagt

SEQ ID NO: 663670 - DNA, 401 bp, Homo sapiens
gactgcctcagatctcagggggccgggaccatgaacacctgagcagtatctactgttgttttgtgtttgtttgtttttatacagagtgaccagatttcaatccccctcatgaaaaagttgaagatacctcataatttcttagaatttaacatgacattataaatccaaactttagtggctgagagccagccatgggagctgccttaggaggasttggtactttccgttgatggcacatactcatgaactataggctgcagcattatcctaggacaattggagggagctctttcagtccttcctggtagtttggcatattaaactttgtctggtctgtgtcatcctaaataacaaacagagagaggttctgtaaaagaaaacatgcttatttgacaatagag

SEQ ID NO: 663671 - DNA, 570 bp, Homo sapiens
tgtatgttagtaaccatatactccattaaaacaaattttagaaagcttgaaatagcatttttaactcaccttagtggcacaggagatacaaataagtttctcaagtttttttaaaaaataatttattctttttactgtctattgactgcaaggtaactctacactgtgggaaaatctcctaggatagatgatatatgaaatttcctgttttcttccctggcattgggacttttgctcttcagttagttctgctacatattataacctctgctttgtaactaaattgaatgtgctctctacagagagtttaccagatagaattttgcaatttaatatagtaggtaaaagagaatcccmgttgttcatctttaggtaaatgctgagaagatgtgtgggaaagcaaactcactttgtacatataaatgtgctctccagtgctttaccaaaccctgagacagggcctcttcactatttgggctgctggaacctgagagagagaaggcctttttggggttggagtgcccgtagggggctgcttgctccacagcaggttctggagactgggcacac

SEQ ID NO: 663672 - DNA, 573 bp, Homo sapiens
catatataagccagagttctaagccactgctttgagttacctttcattgagatgcacactgcacacattaataaactaacttgttttattcttgttaatctatctttcatgacaggagtctgtcccarctgctaacttatgatgtctggtaattccctcgcttaaagcactttagtaagaagctcttgcccttagaataaaatccaaaccctaccctatggtttgcagtgtgttttcttcttcccctctgacaccatgtttaacattctgctaatttactacccattggtactttgtttatttcctgttccagatcagttaagtcaatatggcttcttcctcggggaattcacacttctgtcatccttcacatggagtgtctgcgtgatttcacattgactttctttttcatttaagtggttttatttttttgatattatgtttgggtcttgtcatcatggtttttccacgcaagtgtaatttatgtgatctgctaggcactaatctaactcctttatctaaataggctcatgtaatccttattacaatctcatgaggtaggttataatattg

SEQ ID NO: 663673 - DNA, 596 bp, Homo sapiens
atactaaagagtacatctatctcagtcctaggcctggagagtggacattcccaacacctcatgtaacagtttgtgtgtcagtgatactttctacactagttattgtctattgacactcagtcttcacccccaccccctgatattatcctagtctcaccctactgcaaggactgaagggctaaaatctacatttgcagattctctttccactaaggtttgggatgttatttaggttgttcaaagaaataagcccaaggtggaaaggcaaagggaggcaaatgctgtttttcccaggctgcatgtctggtgttctcttgtgcgacagataggctctatgtttcaatgtgtaagaaccagctttactggtgtagggcatctgtgaaattaggaaagktttcctgcagtgtcatgaggggtttcaacagctgcttgttcacttccagattgcagcaattgctgcattgtcatgaacttgaaacctagtgagagaacgctggcttcaaacctaaatcttgcaacaattataatctgtttgaaaagctatagtagtttttgtttcctgcattaaaacttgcatcagcatcttcagaatgcaa

SEQ ID NO: 663674 - DNA, 566 bp, Homo sapiens
agccaatttaaaaaagagcctagatggcaaataattattctcgttgcactttgtgcaaataattaggccaggtataacagaattaaaacttattttgcaaattggtcctactatgattttgtgtttagcaaaattggggaattagagaaaaattatgtttcaaaagaaactatgtacacttgttattagattctagtcttgcccatttgtattcagtttttattattttctacaatttggactgaaccctgaatttttttcctgggtacaagtctccaaactaatgttttcgatttcttttctctcccatttttctgacttgaaagacctagaaattaaaactgcttctcttaaagttctgcaaatgtaagctagataaactttgggagaaaataacagaacttatatataaacaacctttttgcctgtctgctsatgtatgggcttctcagaaagtgcacttgaaggcctggtttgaactacagtccagaagaatctgtcagattgccgctgcaatctgaagaagcctcagagactctagaaaaactagtgtagagactgctcca

SEQ ID NO: 663675 - DNA, 637 bp, Homo sapiens
cattgctcaaacaacagcaacattcattttagaattgtctttcaaaaaaccccttacagtgcttcagtggctttaagtggtagatgtctttattgtctttctttatagatctgatctcctaaatttgaaagacagaagtcagtcaaacattttccataataatattgaagtgagcaaggaaacarcccagtatctttattaatatttctcttttagtctcaggtttctgatatttatttaaaggcattagttctttactgatgatttctgcatgcatagtctgctaatgtgtgactaatacactaagtgctttttcccagtggagagaacaagatcatttggaagagattcaattccagacctccttttatcaggtttgctttattagctttggtgtctggatgtacacagtatacctttgtccttttgcaagtgaaattgtttgctagaggaggaaaaaattatttgcccttaagaaaccttcaaagtgagtgaaaattgctgtgatgcaaactctcagaagcaatttgtaaatctttggaccacgggcattgctatttcacatcttagtgtctgtccttcctatttcattacattttttgtatctgccttgttatgtgagaagacttatttcatt

SEQ ID NO: 663676 - DNA, 493 bp, Homo sapiens
tttcccttcctatttccttcagtcatttctctagcaacctgttggatattgtgccttttacttctacacttcaagtaccaccatcccacactctcttcttcaaatgcatgggtgatttatgggtaatggtctggatctgtcacctaatattgagtatatatttaatgagtggaactgactggaaaaatccctaaggatctctgggcagagactatttagccttggaattcccagtaartttcttaatacaatgttctgtccaaactattcacctctgggtgaagtttttttattttattgatgcagaggggaggtaaatagctaatgcatttatttaaagcaagtaaatatttaactttataaattattctaagatataaagcaaagtagcagatttcaagagagaaaaatatgaaaagtcagaaacatctttcaaaatataataagaagggagagaaagttggttactgctacagtctgaatgtttgtgtct

SEQ ID NO: 663677 - DNA, 610 bp, Homo sapiens
tgttttttataaattacctagtctcaggaattgtggtataacagcataaaatgaaccaagacacccttcctccacctttttgttctatttggatctacaacagattagatgatgtctacccacattggtgagggtggatcttactcagtcatctttgatctactgattcaaatgctaatcccttctggaaagacctcacatacgcattcagaaataatgttttacccgctatctggctattccttaacctagtcatgttgacatgtaaaagtaatcatcacagccaccattcagtgccctcactaagttcactaatattytgtattggaccttttgcatattaataataattattaaaccaagcttatataagagaacagagccatggcagtaaatacttcttaaatcatcatacagggttgatggttgaactcgaaatactgcattagaatacattcttttaaagacactgaaaaaaggttttcatgtgacactggtgaatgtgctataattactgctcaatggttcagttattttgtgagtttgaaatcctcacatttcaagaagaattgtaatatttgaaatgggtttttaatataaaagctgtaga

SEQ ID NO: 663678 - DNA, 561 bp, Homo sapiens
ccattttggatcataaactaatccttgtgggaatgggggatgcaatgtgaagtgccataaaatgggctttccatgaaaaagaaaggctgtgtaacaagaagagaatgagaagcatggtgaacagacaaaaagcatggttatcacagtcyactaccattcattacttggctacttaacaacaagcttacttcttgtatgcattatttcaaagtgccactgcctgacaatggaaatattagacagtgaaactatgagacaaccaatagtgcactctttctcaaagtaaagcgaggcaagtcaatgtctcatccaggtacttccttcacctctcaggtcctcatctttattgattcaatccctttcacatttaaattatgttacttgtcacacatcaattcctgttattcttgtatcagagatatcctgtttaaaagtgacagaaaaatagtggaaaccatttgaactccaaagaaatttattatctccaataaatgaaaagtttgccgttagctgtcaggcatgatggattcaggagtaaaaagtgatgctgtgaagacatca

SEQ ID NO: 663679 - DNA, 456 bp, Homo sapiens
tttctgtgtatttaaagctattgattagaagatatcctggaatggaaatgattaagcacttgtcctctatctccaaacactggaatggttctaggcacttacagctttggctagtttcaggcagagtttgaggtggaatagggaagtcaatattataagacccatgctgaagctattgtgtttagaaatacctggacattctttttagtgtctagaaatgactgtcaacattgtcgaaactaatcctgtggtatctgaaaaattaagatgaggagatttttgttagtataacatacagattctaaaattctcttagctcgtagcacactagtcaatatgttaataatgttactaaygttgaaggaggcatggaatggggacagacgttgatcaaagggtgcaaagcttcagttagaacgaacacattctgcatatctattgtgtaacatggctatt

SEQ ID NO: 663680 - DNA, 581 bp, Homo sapiens
agactgattaggagaattactaaagtctctcaaacaaggctataaagatatttgtaattatggcttgacagataatactactctactgaattgttatcttaggcaggttggctccccttggagtcatctcctgtttatagctctggaccagagtgcatttggctatgtctctaatctctttactatgccatccaagagtggatggctacacatttaaaataaatacacccatacccacatatgatacacaccagaaaaactgagggtaatrtatctatcagaatacagtgtgatttaactttcttttgatatggatggtgattataggtatattctatgtttttgccaattgagagaggataaacaataaatattttcattttatattttatatctgaattgaaaatatatctagttcagcacaggaaggcaatgtgactaagggatattgagtttgatcatcataattaagaaatctgccagagtcacatttggaaaatttgttccacttctctgagctttagtttgtgttttctaaaatagaaataccagaactctttctataattagacattttgaga

SEQ ID NO: 663681 - DNA, 581 bp, Homo sapiens
agactgattaggagaattactaaagtctctcaaacaaggctataaagatatttgtaattatggcttgacagataatactactctactgaattgttatcttaggcaggttggctccccttggagtcatctcctgtttatagctctggaccagagtgcatttggctatgtctctaatctctttactatgccatccaagagtggatggctacacatttaaaataaatacacccatacccacatatgatacacaccagaaaaactgagggtaatatatctatcagaatacagtgtgatttaaytttcttttgatatggatggtgattataggtatattctatgtttttgccaattgagagaggataaacaataaatattttcattttatattttatatctgaattgaaaatatatctagttcagcacaggaaggcaatgtgactaagggatattgagtttgatcatcataattaagaaatctgccagagtcacatttggaaaatttgttccacttctctgagctttagtttgtgttttctaaaatagaaataccagaactctttctataattagacattttgaga

SEQ ID NO: 663682 - DNA, 580 bp, Homo sapiens
agaattactaaagtctctcaaacaaggctataaagatatttgtaattatggcttgacagataatactactctactgaattgttatcttaggcaggttggctccccttggagtcatctcctgtttatagctctggaccagagtgcatttggctatgtctctaatctctttactatgccatccaagagtggatggctacacatttaaaataaatacacccatacccacatatgatacacaccagaaaaactgagggtaatatatctatcagaatacagtgtgatttaactttcttttgatatrgatggtgattataggtatattctatgtttttgccaattgagagaggataaacaataaatattttcattttatattttatatctgaattgaaaatatatctagttcagcacaggaaggcaatgtgactaagggatattgagtttgatcatcataattaagaaatctgccagagtcacatttggaaaatttgttccacttctctgagctttagtttgtgttttctaaaatagaaataccagaactctttctataattagacattttgagactaataaggaa

SEQ ID NO: 663683 - DNA, 580 bp, Homo sapiens
agaattactaaagtctctcaaacaaggctataaagatatttgtaattatggcttgacagataatactactctactgaattgttatcttaggcaggttggctccccttggagtcatctcctgtttatagctctggaccagagtgcatttggctatgtctctaatctctttactatgccatccaagagtggatggctacacatttaaaataaatacacccatacccacatatgatacacaccagaaaaactgagggtaatatatctatcagaatacagtgtgatttaactttcttttgatatggatggtgattataggtatattctatgtttttgccaattgagagaggataaacaataaatattttcattttatattttatatctgaattgaaaatrtatctagttcagcacaggaaggcaatgtgactaagggatattgagtttgatcatcataattaagaaatctgccagagtcacatttggaaaatttgttccacttctctgagctttagtttgtgttttctaaaatagaaataccagaactctttctataattagacattttgagactaataaggaa

SEQ ID NO: 663684 - DNA, 475 bp, Homo sapiens
tgccttattttattaattttgcttctgaatttcatcaaattctctgatcataactctatattcytgtaaggaatgctcagaattatactatttcactccaaattttattattattgagacgaaactgggtatagaaagttgtgggaccagtttgtaatttattgctttaaaatttggtcaagccactcaaattctctagctgtacctatgaaatagctttaatatttcaatcccctgcattttctttgaataatatggagtttgaattgaagtggtcctgaatttgagtgctgcatatgctacttttgagatatgtgatcttgagcaagttgcttaatcacattaaacctcaattctctcatctttaaaatagaaaaaataatagctactttacagtgttgagaaaagaataagatgaaacagtttattaaaaacatagaagagtgcttaagacataataaagtctacataaatt

SEQ ID NO: 663685 - DNA, 475 bp, Homo sapiens
tgccttattttattaattttgcttctgaatttcatcaaattctctgatcataactctatattcttgtaaggaatgctcagaattatactatttcactccaaattttatkattattgagacgaaactgggtatagaaagttgtgggaccagtttgtaatttattgctttaaaatttggtcaagccactcaaattctctagctgtacctatgaaatagctttaatatttcaatcccctgcattttctttgaataatatggagtttgaattgaagtggtcctgaatttgagtgctgcatatgctacttttgagatatgtgatcttgagcaagttgcttaatcacattaaacctcaattctctcatctttaaaatagaaaaaataatagctactttacagtgttgagaaaagaataagatgaaacagtttattaaaaacatagaagagtgcttaagacataataaagtctacataaatt

SEQ ID NO: 663686 - DNA, 475 bp, Homo sapiens
tgccttattttattaattttgcttctgaatttcatcaaattctctgatcataactctatattcttgtaaggaatgctcagaattatactatttcactccaaattttattattattgagacgaaactgggtatagaaagttgtgggaccagtttgtaatttattgctttaaaatttggtcaagccactcaaattctctagctgtacctatgaaatagctttaatatttyaatcccctgcattttctttgaataatatggagtttgaattgaagtggtcctgaatttgagtgctgcatatgctacttttgagatatgtgatcttgagcaagttgcttaatcacattaaacctcaattctctcatctttaaaatagaaaaaataatagctactttacagtgttgagaaaagaataagatgaaacagtttattaaaaacatagaagagtgcttaagacataataaagtctacataaatt

SEQ ID NO: 663687 - DNA, 576 bp, Homo sapiens
tttgcatatttcttccacaagatgtatgtggtcccatctgataatagggaattggytggtaactggaatcttcttggaaacctcttaaatcacagatcttgcacttgtactgggataatctggagtgtgtgctcctctgagtttgttgaccaaatcacctacaggtgaactctccatatatgtattttcctagtcaattcctacactgacctcaagcaaacactgatcagctttctgtcataatagatgcgatttacttttttagaatttaataaaactcaaattatactgtatgcatccttttgtgtctggattgcttttttttctctgccttacattgttgaatatattctaggtatgttttactaattgcttggttgtatattaatgcatactgcattttgtttatccattcaactattgatggaaattggagttgttttcagtttctggttataaataaaacagctatgaacatttacataccaagtctttgtgtggatatgtgtcatttctcttttattttgtttctcaaggtcaccttattttctgcgaccatgccaaacacccttacta

SEQ ID NO: 663688 - DNA, 576 bp, Homo sapiens
tttgcatatttcttccacaagatgtatgtggtcccatctgataatagggaattggttggtaactggaatcttcttggaaacctcttaaatcacagatcttgcacttgtactgggataatctggagtgtgtgctcckctgagtttgttgaccaaatcacctacaggtgaactctccatatatgtattttcctagtcaattcctacactgacctcaagcaaacactgatcagctttctgtcataatagatgcgatttacttttttagaatttaataaaactcaaattatactgtatgcatccttttgtgtctggattgcttttttttctctgccttacattgttgaatatattctaggtatgttttactaattgcttggttgtatattaatgcatactgcattttgtttatccattcaactattgatggaaattggagttgttttcagtttctggttataaataaaacagctatgaacatttacataccaagtctttgtgtggatatgtgtcatttctcttttattttgtttctcaaggtcaccttattttctgcgaccatgccaaacacccttacta

SEQ ID NO: 663689 - DNA, 576 bp, Homo sapiens
tttgcatatttcttccacaagatgtatgtggtcccatctgataatagggaattggttggtaactggaatcttcttggaaacctcttaaatcacagatcttgcacttgtactgggataatctggagtgtgtgctcctctgagtttgttgaccaaatcacctacaggtgaactctccatatatgtattttcctagtcaattcctacactgacctcaagcaaacactgatcagctttctgtcataatagatgcgatttacttttttagaatttaataaaamtcaaattatactgtatgcatccttttgtgtctggattgcttttttttctctgccttacattgttgaatatattctaggtatgttttactaattgcttggttgtatattaatgcatactgcattttgtttatccattcaactattgatggaaattggagttgttttcagtttctggttataaataaaacagctatgaacatttacataccaagtctttgtgtggatatgtgtcatttctcttttattttgtttctcaaggtcaccttattttctgcgaccatgccaaacacccttacta

SEQ ID NO: 663690 - DNA, 576 bp, Homo sapiens
tttgcatatttcttccacaagatgtatgtggtcccatctgataatagggaattggttggtaactggaatcttcttggaaacctcttaaatcacagatcttgcacttgtactgggataatctggagtgtgtgctcctctgagtttgttgaccaaatcacctacaggtgaactctccatatatgtattttcctagtcaattcctacactgacctcaagcaaacactgatcagctttctgtcataatagatgcgatttacttttttagaatttaataaaactmaaattatactgtatgcatccttttgtgtctggattgcttttttttctctgccttacattgttgaatatattctaggtatgttttactaattgcttggttgtatattaatgcatactgcattttgtttatccattcaactattgatggaaattggagttgttttcagtttctggttataaataaaacagctatgaacatttacataccaagtctttgtgtggatatgtgtcatttctcttttattttgtttctcaaggtcaccttattttctgcgaccatgccaaacacccttacta

SEQ ID NO: 663691 - DNA, 576 bp, Homo sapiens
cagttgtaataaagtgttatcctttttatatattattgcgttaggtgtgttagtattttgttaagaacttttgcatatatattgaagaatgttgttctatagttttcttttttgtaatgtctttttctgcctttggtttttagatgttggattcataaaattatttaggagtgttttcccctgctttttctcatggaattaggatagtatyctattattcttatttaaatgctgactaggatgcagcatgtaaaccaatagactgcagttgccttttgaggaaggctttaaagttcaaaataagttttcttagtacataagagctgttctaaatgagaaaataaataattttctcatttattagtttcggtaattccgatgttccatgaaattttcccatatcacttaggtttttgaatatatggccataggtttattcataaatttccgttattgttcttttaatattggcagcatcttttgtgatgtccattttatctaagttgttgaatttattggtacaaagttgttcataatatttctttatcatcttttgtctgtatgttctatagtgat

SEQ ID NO: 663692 - DNA, 576 bp, Homo sapiens
cagttgtaataaagtgttatcctttttatatattattgcgttaggtgtgttagtattttgttaagaacttttgcatatatattgaagaatgttgttctatagttttcttttttgtaatgtctttttctgcctttggtttttagatgttggattcataaaattatttaggagtgttttcccctgctttttctcatggaattaggatagtatcctattattcttatttaaatgctgactaggatgcagcatgtaaaccaatagactgcagttgccttttgaggaaggctttaaagttcaaaataagttttcttagtacataagagctgttctaaatgagaaaataaataattttctcatttattagtttcggtaatwccgatgttccatgaaattttcccatatcacttaggtttttgaatatatggccataggtttattcataaatttccgttattgttcttttaatattggcagcatcttttgtgatgtccattttatctaagttgttgaatttattggtacaaagttgttcataatatttctttatcatcttttgtctgtatgttctatagtgat

SEQ ID NO: 663693 - DNA, 576 bp, Homo sapiens
cagttgtaataaagtgttatcctttttatatattattgcgttaggtgtgttagtattttgttaagaacttttgcatatatattgaagaatgttgttctatagttttcttttttgtaatgtctttttctgcctttggtttttagatgttggattcataaaattatttaggagtgttttcccctgctttttctcatggaattaggatagtatcctattattcttatttaaatgctgactaggatgcagcatgtaaaccaatagactgcagttgccttttgaggaaggctttaaagttcaaaataagttttcttagtacataagagctgttctaaatgagaaaataaataattttctcatttattagtttcggtaattcygatgttccatgaaattttcccatatcacttaggtttttgaatatatggccataggtttattcataaatttccgttattgttcttttaatattggcagcatcttttgtgatgtccattttatctaagttgttgaatttattggtacaaagttgttcataatatttctttatcatcttttgtctgtatgttctatagtgat

SEQ ID NO: 663694 - DNA, 560 bp, Homo sapiens
gtagttatgtcccagaaattctggtgtgttgtatttgttgtcattagtttcaaataatttctttatttctgccttaatttcattctctactcaaagataattcaggagtagattgtttaatttccatgtaattgtatgggttcaaaatatcttcttgggattgatttctatttttgttgtgctgtagtctgagagtgtggttgrtatgattttattttatttgaatttgctaaaattgctttatagccaagcatgtggtcaatcttacagtatgtgccatgtgccaatgagaagaatacattttctgttgttgtatggagtgttccatagatttctgttagttccattttgtcaagtgttgagttcagctatttggaaggctgaggtgggaggattgtttgagcccaggtgattgaggtggaagtgaaccatgattatgccactacaccctagatcgagtgacagagtgagatcctgtcccctaaaaaacataaaataaagtaaaataaaatccttaggagcaaatttagcaaagcatgtgaaaaatatgtacactgaaa

SEQ ID NO: 663695 - DNA, 560 bp, Homo sapiens
gtagttatgtcccagaaattctggtgtgttgtatttgttgtcattagtttcaaataatttctttatttctgccttaatttcattctctactcaaagataattcaggagtagattgtttaatttccatgtaattgtatgggttcaaaatatcttcttgggattgatttctatttttgttgtgctgtagtctgagagtgtggttggtatgattttattttatttgaatttgctaaaattgctttatagccaagcatgtggtcaatcttacagtatgtgccatgtgcyaatgagaagaatacattttctgttgttgtatggagtgttccatagatttctgttagttccattttgtcaagtgttgagttcagctatttggaaggctgaggtgggaggattgtttgagcccaggtgattgaggtggaagtgaaccatgattatgccactacaccctagatcgagtgacagagtgagatcctgtcccctaaaaaacataaaataaagtaaaataaaatccttaggagcaaatttagcaaagcatgtgaaaaatatgtacactgaaa

SEQ ID NO: 663696 - DNA, 560 bp, Homo sapiens
gtagttatgtcccagaaattctggtgtgttgtatttgttgtcattagtttcaaataatttctttatttctgccttaatttcattctctactcaaagataattcaggagtagattgtttaatttccatgtaattgtatgggttcaaaatatcttcttgggattgatttctatttttgttgtgctgtagtctgagagtgtggttggtatgattttattttatttgaatttgctaaaattgctttatagccaagcatgtggtcaatcttacagtatgtgccatgtgccaatgagaagaatacattttctgttgttgtrtggagtgttccatagatttctgttagttccattttgtcaagtgttgagttcagctatttggaaggctgaggtgggaggattgtttgagcccaggtgattgaggtggaagtgaaccatgattatgccactacaccctagatcgagtgacagagtgagatcctgtcccctaaaaaacataaaataaagtaaaataaaatccttaggagcaaatttagcaaagcatgtgaaaaatatgtacactgaaa

SEQ ID NO: 663697 - DNA, 509 bp, Homo sapiens
cagtggattgttaggtctaagttttcccatggtgccaagcattgaagaaacattttttgttattttgtaaccaatactttaaaactcctgctctcagtgtaaggcactgttgtagagaatgtagaagattcaaaagtgtttgaggtaattattctgcccttaggaaaaaaaggagtacaaaataggaattgttgacatatttaagaatatttatcaaaaaattaaacacaatcaatgacttataatgagaattaaaatatactatagttttagcttcaagaaatattttattctaactgcatagctgattactcttctgcgatcttgtatgaaaaytcccccccgacccccaactgccgccataactcgccctgtattgtgtgtatcctggggatcccagcaccattgaagagcatagaacaattgtgagctcaggctcggaatgaggaacttgggttagaatacttccctcagtacttgtgatttgaacagatcccataatccccctc

SEQ ID NO: 663698 - DNA, 477 bp, Homo sapiens
gcaaaaacaaacattggcatcaggactgcagctagaagtgacgcatctattgcaaggcatcaagcagtgagaatcaggcaccagggatgcttaagacgcaaatgcttaagactcaaactccctaatgcagcagttcccagctttcttagcaccagggacgggttttgcagaagacaatttctccayggactgaggagtgggggatggttttgggatgattcaagaacattatatttattgtgcgctttatatctattattactacattgtcatatataatgaaatagttatacaactcaccataatgtagaatcagtgggggccctgagcttgttttcctgaaactagacggtcccatctgagggtgatgggagacagtgacacctgaagtgtgttgcttatgtccagtctactctgttatctcattgtggtttctgtcactgcagaaaactctgcttcaaaaagaaagaatgttgg

SEQ ID NO: 663699 - DNA, 585 bp, Homo sapiens
caatgaacccataatttaagtaggacttggtgttttcttttaaatgcagctttctttttgttggcagtcttagagtcttctgctgtctcatcattgggtgtttaccccttttcaaagaagctctccagtgatgtttggttcttactcattttggccagasttagcttgtgggaaccaaaactgtgactaaggcaagtgcacagtgtgggaaagaggcacagatgaaagtggtaaataaaataatgggtggaccatgtcgagacaaaaatgagtatcaggttctgacttaaatcctgccaccagatgcagctgtgaaattgaagtacaccaactcacttgccactataaagctgccacgagatgcagtttaaatgccacttgctactcactgatagggttttgatctgtgtctccaagcaattgatttattatggtttctgtgcagttaaaaatctctgctaatgttaatctgtatttgcagccactccccagtgctgcatcaccaccttgggtccaccttagatcatctggcattagattctcataagaagagtccaacctagatcccttgcattcgcagttcac

SEQ ID NO: 663700 - DNA, 585 bp, Homo sapiens
caatgaacccataatttaagtaggacttggtgttttcttttaaatgcagctttctttttgttggcagtcttagagtcttctgctgtctcatcattgggtgtttaccccttttcaaagaagctctccagtgatgtttggttcttactcattttggccagagttagcttgtgggaaccaaaactgtgactaaggcaagtgcacagtgtgggaaagagrcacagatgaaagtggtaaataaaataatgggtggaccatgtcgagacaaaaatgagtatcaggttctgacttaaatcctgccaccagatgcagctgtgaaattgaagtacaccaactcacttgccactataaagctgccacgagatgcagtttaaatgccacttgctactcactgatagggttttgatctgtgtctccaagcaattgatttattatggtttctgtgcagttaaaaatctctgctaatgttaatctgtatttgcagccactccccagtgctgcatcaccaccttgggtccaccttagatcatctggcattagattctcataagaagagtccaacctagatcccttgcattcgcagttcac

SEQ ID NO: 663701 - DNA, 585 bp, Homo sapiens
caatgaacccataatttaagtaggacttggtgttttcttttaaatgcagctttctttttgttggcagtcttagagtcttctgctgtctcatcattgggtgtttaccccttttcaaagaagctctccagtgatgtttggttcttactcattttggccagagttagcttgtgggaaccaaaactgtgactaaggcaagtgcacagtgtgggaaagaggcacagatgaaagtggtaaataaaataatgggtggaccatgtcgagacaaaaatgagtatcaggttctgacttaaatcctgccaccagatgcagctgtgaaattgaagtacaccaactcacttgccactayaaagctgccacgagatgcagtttaaatgccacttgctactcactgatagggttttgatctgtgtctccaagcaattgatttattatggtttctgtgcagttaaaaatctctgctaatgttaatctgtatttgcagccactccccagtgctgcatcaccaccttgggtccaccttagatcatctggcattagattctcataagaagagtccaacctagatcccttgcattcgcagttcac

SEQ ID NO: 663702 - DNA, 585 bp, Homo sapiens
caatgaacccataatttaagtaggacttggtgttttcttttaaatgcagctttctttttgttggcagtcttagagtcttctgctgtctcatcattgggtgtttaccccttttcaaagaagctctccagtgatgtttggttcttactcattttggccagagttagcttgtgggaaccaaaactgtgactaaggcaagtgcacagtgtgggaaagaggcacagatgaaagtggtaaataaaataatgggtggaccatgtcgagacaaaaatgagtatcaggttctgacttaaatcctgccaccagatgcagctgtgaaattgaagtacaccaactcacttgccactataaagctgccackagatgcagtttaaatgccacttgctactcactgatagggttttgatctgtgtctccaagcaattgatttattatggtttctgtgcagttaaaaatctctgctaatgttaatctgtatttgcagccactccccagtgctgcatcaccaccttgggtccaccttagatcatctggcattagattctcataagaagagtccaacctagatcccttgcattcgcagttcac

SEQ ID NO: 663703 - DNA, 552 bp, Homo sapiens
gtggtaatgaaagtgatgggcagtggttgtaagaacagatgaaactttactagcttacccatctttaacctcctgttgtgtggctcatttctaatgagccacagaccagtattagtctgtggtctgagggttgtggtcccttcmctaatggctcattgataaggggtttcagaggcagagatgtagaggttataggcaaagtcataattcaatatatggcagctataaattattttgaactaaaaaggtggcatatcttgaagcagaaaggagacctacagattataggtggagtcaaagattttctgattttgctaaccatggaaaagattcgagttactggtggcatatctatacagatctgcagcaacctcaattcttgtctcctcagaagaaagaatttaagtgagaggcataagagagaagaagataccaaggcaagtttcacagcagaagtggaagtttattaaaaagctttagagtgtaaggaataaaagaagaaaagaaggaaagtacagcttggaagatggccaagtggacaatttgagaaac

SEQ ID NO: 663704 - DNA, 552 bp, Homo sapiens
gtggtaatgaaagtgatgggcagtggttgtaagaacagatgaaactttactagcttacccatctttaacctcctgttgtgtggctcatttctaatgagccacagaccagtattagtctgtggtctgagggttgtggtcccttccctaatggctcattgataaggggtttcagaggcagagatgyagaggttataggcaaagtcataattcaatatatggcagctataaattattttgaactaaaaaggtggcatatcttgaagcagaaaggagacctacagattataggtggagtcaaagattttctgattttgctaaccatggaaaagattcgagttactggtggcatatctatacagatctgcagcaacctcaattcttgtctcctcagaagaaagaatttaagtgagaggcataagagagaagaagataccaaggcaagtttcacagcagaagtggaagtttattaaaaagctttagagtgtaaggaataaaagaagaaaagaaggaaagtacagcttggaagatggccaagtggacaatttgagaaac

SEQ ID NO: 663705 - DNA, 552 bp, Homo sapiens
gtggtaatgaaagtgatgggcagtggttgtaagaacagatgaaactttactagcttacccatctttaacctcctgttgtgtggctcatttctaatgagccacagaccagtattagtctgtggtctgagggttgtggtcccttccctaatggctcattgataaggggtttcagaggcagagatgtagaggttataggcaaagtcataattcaatatatggcagctataaattattttgaactaaaaaggtggcatatcttgaagcagaaaggagacctacagattataggtggagtcaaagattttctgmttttgctaaccatggaaaagattcgagttactggtggcatatctatacagatctgcagcaacctcaattcttgtctcctcagaagaaagaatttaagtgagaggcataagagagaagaagataccaaggcaagtttcacagcagaagtggaagtttattaaaaagctttagagtgtaaggaataaaagaagaaaagaaggaaagtacagcttggaagatggccaagtggacaatttgagaaac

SEQ ID NO: 663706 - DNA, 556 bp, Homo sapiens
caagtcccttccacctaggagcctgtaaaatcaaaagcaggttagttacttcctagatacaatgaggttacaggcattgggtaaacacagctatcctaaatgggagaaattggsaaaataaaggggctacatgccccatgcaagtccaaaatccagcagggcagtcaaatcttaaacttccaaaatgatcttctctgactccatgtctcatattcaggtcatgctggtgcaaatggtgggttcccatggccttggaaagctccacaccagtggctttgcaggatacagcctcccttccagctcctttcgtggactggcattgagtgtctgaggtttttccaggtgcacagtgcaagctgtcagtggatctatcattctggggtctagagaacggtggtcctcttcttaccacttcttaccactaggtggtaccctagtagggactctgtgtgaggggtccaaccctacatttcgcttctgcactgctctagcagaggttctccatgagagccccacccctgtggtaaacttctgcctggacatccaggcatttcta

SEQ ID NO: 663707 - DNA, 556 bp, Homo sapiens
caagtcccttccacctaggagcctgtaaaatcaaaagcaggttagttacttcctagatacaatgaggttacaggcattgggtaaacacagctatcctaaatgggagaaattgggaaaataaaggggctacatgccccatgcaagtccaaaatccagcagggcagtcaaatcttaaacttccaaaatgatcttctctgactccatgtctcayattcaggtcatgctggtgcaaatggtgggttcccatggccttggaaagctccacaccagtggctttgcaggatacagcctcccttccagctcctttcgtggactggcattgagtgtctgaggtttttccaggtgcacagtgcaagctgtcagtggatctatcattctggggtctagagaacggtggtcctcttcttaccacttcttaccactaggtggtaccctagtagggactctgtgtgaggggtccaaccctacatttcgcttctgcactgctctagcagaggttctccatgagagccccacccctgtggtaaacttctgcctggacatccaggcatttcta

SEQ ID NO: 663708 - DNA, 556 bp, Homo sapiens
caagtcccttccacctaggagcctgtaaaatcaaaagcaggttagttacttcctagatacaatgaggttacaggcattgggtaaacacagctatcctaaatgggagaaattgggaaaataaaggggctacatgccccatgcaagtccaaaatccagcagggcagtcaaatcttaaacttccaaaatgatcttctctgactccatgtctcatattcaggtcatgctggtgcaaatggtgggttcccatggccttggaaagctccacaccagtggctttgcaggatacagcctcccttccagctcctttcgtggactggcattgagtgtctgagrtttttccaggtgcacagtgcaagctgtcagtggatctatcattctggggtctagagaacggtggtcctcttcttaccacttcttaccactaggtggtaccctagtagggactctgtgtgaggggtccaaccctacatttcgcttctgcactgctctagcagaggttctccatgagagccccacccctgtggtaaacttctgcctggacatccaggcatttcta

SEQ ID NO: 663709 - DNA, 556 bp, Homo sapiens
caagtcccttccacctaggagcctgtaaaatcaaaagcaggttagttacttcctagatacaatgaggttacaggcattgggtaaacacagctatcctaaatgggagaaattgggaaaataaaggggctacatgccccatgcaagtccaaaatccagcagggcagtcaaatcttaaacttccaaaatgatcttctctgactccatgtctcatattcaggtcatgctggtgcaaatggtgggttcccatggccttggaaagctccacaccagtggctttgcaggatacagcctcccttccagctcctttcgtggactggcattgagtgtctgaggtttttccaggtgcacagtgcaagctgtcagtggatctatcattctggggtctagagaacggtggtcctcttcttaccacttcttaccactaggtggtaccctagtagggactctgtgtgagggstccaaccctacatttcgcttctgcactgctctagcagaggttctccatgagagccccacccctgtggtaaacttctgcctggacatccaggcatttcta

SEQ ID NO: 663710 - DNA, 521 bp, Homo sapiens
ccccactctactggtaccaatttacatattagtccattttcatgctgccgataaagacatacctgagactgggcaatttasaaaagaaagaggtttaattgaacttacagttccatgtggctggggaagcttcacaatcatggtggaagacaaggaggagcaagtcacgtcttacatggatggcaacaggcaaagcaaaagaactggtgcagggaaactcctctttttaaaactatcagatctcataaggtctgattcactaccatgaaaacagcaggagaaagacttgcccccatgattaaattacctcccactgggtccataacacgtgggaattcaagatagatttgggtagggatacagccaaaccatatcaaacagggtcagagttcagtggttgtttccttcttatctgaggtgatgtgttagaggatcactaggtggggatccaggtttctgaaaacaattcaggtatatatgttcagatgttacctttaatttctgtaggggaagcaaacatt

SEQ ID NO: 663711 - DNA, 521 bp, Homo sapiens
ccccactctactggtaccaatttacatattagtccattttcatgctgccgataaagacatacctgagactgggcaatttagaaaagaaagaggtttaattgaacttacagttccatgtggctggggaagcttcacaatcatggtggaagacaaggaggagcaagtcacgtcttacatggatggcaacaggcaaagcaaaagaactggtgcagggaaactcctctttttaaaactatcagatctcataaggtctgattcactaccatgaaaacagcakgagaaagacttgcccccatgattaaattacctcccactgggtccataacacgtgggaattcaagatagatttgggtagggatacagccaaaccatatcaaacagggtcagagttcagtggttgtttccttcttatctgaggtgatgtgttagaggatcactaggtggggatccaggtttctgaaaacaattcaggtatatatgttcagatgttacctttaatttctgtaggggaagcaaacatt

SEQ ID NO: 663712 - DNA, 538 bp, Homo sapiens
aataatgcattttaaaaatatcctctggtagttggtgcaatataaaatgattttaaaattttcctaaataatgtcagaagaattggattaaaatattaaaaaccaccaatggtggttagctgacttaaaatagaagaaaatataactccttacttttcaggttcccaaatgtaaaccaaaaataaaattctaagcccctcaactgactaaacgaccatctcttagccaaggggacccccagaataatcttgaaaactgagttcttagttgcgatgggatggggtgtcagacactcttgttatacccccacccttgctaatcatgattagcctttcttccctaagggcttaacaaaaaccaggcctttcaagagactccaccactgataycaaccaacagcctgacactacccttccttttttgcctgatatggtaccactgaccaacgtgttgttctgcccaatctatagagaatgtgcagtaagggattttgcatcttttgcttcaccttttgacatcatcagggtgaaaactccac

SEQ ID NO: 663713 - DNA, 538 bp, Homo sapiens
aataatgcattttaaaaatatcctctggtagttggtgcaatataaaatgattttaaaattttcctaaataatgtcagaagaattggattaaaatattaaaaaccaccaatggtggttagctgacttaaaatagaagaaaatataactccttacttttcaggttcccaaatgtaaaccaaaaataaaattctaagcccctcaactgactaaacgaccatctcttagccaaggggacccccagaataatcttgaaaactgagttcttagttgcgatgggatggggtgtcagacactcttgttatacccccacccttgctaatcatgattagcctttcttccctaagggcttaacaaaaaccaggcctttcaagagactccaccactgataccaaccaacagcctgacactacccttccttttttgcctgatatggtaccactraccaacgtgttgttctgcccaatctatagagaatgtgcagtaagggattttgcatcttttgcttcaccttttgacatcatcagggtgaaaactccac

SEQ ID NO: 663714 - DNA, 609 bp, Homo sapiens
gttatacccccacccttgctaatcatgattagcctttcttccctaagggcttaacaaaaaccaggcctttcaagagactccaccactgataccaaccaacagcctgacactacccttccttttttgcctgatatggtaccactgaccaacgtgttgttctgcccaatctatagagaatgtgcagtaagggattttgcatcttttgcttcaccttttgacatcatcagggtgaaaactccacccttggatcatgctaatgccactrtttttttatacatgggacccatgaagaggcatgaagctcagttgtgcatgttcacatttcttcttcataaatattcatggttcctcctatagcttattaaatatgtatattcagctatcctgctcagcatatttgttccctttgcctcttcctcaaagtatctgtttttgacttctgaccaaaggctatgcttcccagtctgccagaatggccattctgccagctgcaatcctttatgagaaataaaattttcttttccaaatttatgaatgtcataatttttcagtcaatacatatttctctaatggagtctttacaactgacttttgagctttttacattaa

SEQ ID NO: 663715 - DNA, 601 bp, Homo sapiens
gttcacatttcttcttcataaatattcatggttcctcctatagcttattaaatatgtatattcagctatcctgctcagcatatttgttccctttgcctcttcctcaaagtatctgtttttgacttctgaccaaaggctatgcttcccagtctgccagaatggccattctgccagctgcaatcctttatgagaaataaaattttcttttccaaatttatgaatgtcataatttttcagtcaatacatatttctctaatggagtctttacaactgacttttgagctttttacattaaattagccactctgcactaaagaatgaatrggaaggatgtttaaaaggtgtgaaagtgtcaactaaatgagaaaaatcaagccattaaaaagttaaagttagttttattcagaaatcttactgaggactatagactgaggcctacaggctgggagtttttttagactgcttctgcatggtacttcagcccactccttataagcaggtggtggggtctcagtatttgcaaaatcacatcagagttgctcagaagttgcattaaagcagaattgcatcaacgtttggatgtaagagtatgtcctgttat

SEQ ID NO: 663716 - DNA, 565 bp, Homo sapiens
ctttacaactgacttttgagctttttacattaaattagccactctgcactaaagaatgaatgggaaggatgtttaaaaggtgtgaaagtgtcaactaaatgagaaaaatcaagccattaaaaagttaaagttagttttattcagaaatcttactgaggactatagactgaggcctacaggctgggagtttttttagactgcttctgcatggtacttcagcccactccttataagcaggtggtggggtctcagtatttgcaaaatcacatcagagttgctcagaagttgcattaaagcagaattgcatcaasgtttggatgtaagagtatgtcctgttatagattacagaagaacaatcactaaccccgttagacatcatgttatatgtagaaaaaggcaaggaccagggtaatttatcttttaagtaaattagtgactcaggcaaaaaatgtggaagaccacatgttctatcctgctttgtcttcaaagcatcttccagaagagctgcaggtcctcacagagtcaggggctttgtgaaattatgcccttatgctggcaagtggaa

SEQ ID NO: 663717 - DNA, 565 bp, Homo sapiens
ctttacaactgacttttgagctttttacattaaattagccactctgcactaaagaatgaatgggaaggatgtttaaaaggtgtgaaagtgtcaactaaatgagaaaaatcaagccattaaaaagttaaagttagttttattcagaaatcttactgaggactatagactgaggcctacaggctgggagtttttttagactgcttctgcatggtacttcagcccactccttataagcaggtggtggggtctcagtatttgcaaaatcacatcagagttgctcagaagttgcattaaagcagaattgcatcaacgtttggatgtaagrgtatgtcctgttatagattacagaagaacaatcactaaccccgttagacatcatgttatatgtagaaaaaggcaaggaccagggtaatttatcttttaagtaaattagtgactcaggcaaaaaatgtggaagaccacatgttctatcctgctttgtcttcaaagcatcttccagaagagctgcaggtcctcacagagtcaggggctttgtgaaattatgcccttatgctggcaagtggaa

SEQ ID NO: 663718 - DNA, 637 bp, Homo sapiens
ttcttttatccctctactttcttaacaaacttgccatcactttactctatggactcgccctgaattcttacttgtgcgagatcaaagaaccctctcttggggtctggatccagacccctttccggtaacagttttgtttgtctaacactttcctaaaatgaaaccagcttggctatttcatgaatattctccactaactaagagagaaaacagtgtcaaaattggagtagatatattgcaatgtgagatgtgcctaggaaatacatgaatggttggaaagatgatttagtagaaagaagcagtttgcataataccatataattacagatttggagatttgctaaggactaggcatatttttacaacattacacaaaacctattgtttggaggctattctttttcccttgttaatattaaatgctgartgatttagataagtatttttgtattttaatttttaagcatatttactgttatatcatgagggtagctattaaaagtaggaaactcttactcctaattttcttgttacttattttatttatgtaacttctcctttgaagtataggaaaatgaaaaaaattatttcaaacatttagattgtgtttacgttttagtcaatattcagaacatct

SEQ ID NO: 663719 - DNA, 539 bp, Homo sapiens
ttgtattttaatttttaagcatatttactgttatatcatgagggtagctattaaaagtaggaaactcttactcctaattttcttgttacttattttatttatgtaacttctcctttgaagtataggaaaatgaaaaaaattatttcaaacatttagattgtgtttacgttttagtcaatattcagaacrtctccatttctttttccggccacatcaccagtagcatttgcagcaacagactgtactgacagtttaggaagaaaaactcaaggaaaaaagcatatattgagtccttactagactgcatctcagtgtacttttaaaattgccttctagtagcttgccatcttgctagagagggagaatttatgttcgtccgacagttagtaaaaagatctaagaatgatcagttaaatataaccaagcaccaaaatgtatgacaaatacaacaaaagccctttgttcagggaaggtttaagggaggaagtgaacttgaggatagatcttgaaggcctagttcttttctagaactcgataaa

SEQ ID NO: 663720 - DNA, 539 bp, Homo sapiens
ttgtattttaatttttaagcatatttactgttatatcatgagggtagctattaaaagtaggaaactcttactcctaattttcttgttacttattttatttatgtaacttctcctttgaagtataggaaaatgaaaaaaattatttcaaacatttagattgtgtttacgttttagtcaatattcagaacatctccatttctttttccggccacatcaccagtagcatttgcagcaacagactgtactgacagtttaggaagaaaaactcaaggaaaaaagcatatattgagtccttactagactgcatctcagtgtacttttaaaattgccttctagtagcttgccatcttgytagagagggagaatttatgttcgtccgacagttagtaaaaagatctaagaatgatcagttaaatataaccaagcaccaaaatgtatgacaaatacaacaaaagccctttgttcagggaaggtttaagggaggaagtgaacttgaggatagatcttgaaggcctagttcttttctagaactcgataaa

SEQ ID NO: 663721 - DNA, 588 bp, Homo sapiens
aaactgtaaggacaggaagaagtgtggtttttgtaaaaaaactaaggaagtcagccaggctttagagaaaggttcaggagagggaattttcaacatggggcttgatgatttctgacctgccatgtatatccttgtttatatcaattagcctatggtaagattggtttcattatatagtgaattttgcttgaaatcacagtttccaagawcatattcaggatgttaggtgagaacttcctgtataagattttttttttttttttggcattgcctggttaacttataaagaccttggtaattgtctgtatttaatttatgaaatacttattttggggaatcacaaggaaggagctctctgaagacagtaatattaaataacagaactatgaataggtagtatgatatttactcagaaaaaaataaatctaggacataagttaagaagaatagttatcaactgacaagattatataaagactagggaagtgttttagaggacaaaatctttgtccttactccctacagagaatcccttatgttctaaaatatctgtgtgacagaaagtcatttgaatattgctttataaaa

SEQ ID NO: 663722 - DNA, 588 bp, Homo sapiens
aaactgtaaggacaggaagaagtgtggtttttgtaaaaaaactaaggaagtcagccaggctttagagaaaggttcaggagagggaattttcaacatggggcttgatgatttctgacctgccatgtatatccttgtttatatcaattagcctatggtaagattggtttcattatatagtgaattttgcttgaaatcacagtttccaagatcatattcaggatgttaggtgagaacttcctgtataagattttttttttttttttggcattgcctggttaacttataaaraccttggtaattgtctgtatttaatttatgaaatacttattttggggaatcacaaggaaggagctctctgaagacagtaatattaaataacagaactatgaataggtagtatgatatttactcagaaaaaaataaatctaggacataagttaagaagaatagttatcaactgacaagattatataaagactagggaagtgttttagaggacaaaatctttgtccttactccctacagagaatcccttatgttctaaaatatctgtgtgacagaaagtcatttgaatattgctttataaaa

SEQ ID NO: 663723 - DNA, 588 bp, Homo sapiens
aaactgtaaggacaggaagaagtgtggtttttgtaaaaaaactaaggaagtcagccaggctttagagaaaggttcaggagagggaattttcaacatggggcttgatgatttctgacctgccatgtatatccttgtttatatcaattagcctatggtaagattggtttcattatatagtgaattttgcttgaaatcacagtttccaagatcatattcaggatgttaggtgagaacttcctgtataagattttttttttttttttggcattgcctggttaacttataaagaccttggtaattgtctgtatttaatttatgaaatacttattttggggaatcacaaggaaggagctctctgaagacagtaatattaaataacagaactmtgaataggtagtatgatatttactcagaaaaaaataaatctaggacataagttaagaagaatagttatcaactgacaagattatataaagactagggaagtgttttagaggacaaaatctttgtccttactccctacagagaatcccttatgttctaaaatatctgtgtgacagaaagtcatttgaatattgctttataaaa

SEQ ID NO: 663724 - DNA, 569 bp, Homo sapiens
tatatacattgctctgaatgcaccttaagaacttttactctttcagaagaacttcaggtgaaaggttcacagcacaacttttcacggttaattagcagttagcatcacttcaagaaatcaaataggaagcagcagatggactcacagctcaccttggggcagtaatawgtgtgtcccagccattaggcttggctgttaacaacattatctcaaagttacgtgatcttatatttttgcttattttccatttggttgctaagtaatttaactctcttaactaatttctgtaaaaaagaaaaattaaataaaatgtttatatcagagctgtttaatttgtaacttgttaccgtcataatctcctggcgttggtgcaatgccataaaacatacctggttgctttaagtgcccagacaacactgatatgctctggtgagtgaagaattcctgcttgcaaattgcaaataacacatgatattttactggcatcccaataaaataaattacagaggagtaaaagatttgcatttggatttaaaaaattcttttattttagaatttattactcaaat

SEQ ID NO: 663725 - DNA, 569 bp, Homo sapiens
tatatacattgctctgaatgcaccttaagaacttttactctttcagaagaacttcaggtgaaaggttcacagcacaacttttcacggttaattagcagttagcatcacttcaagaaatcaaataggaagcagcagatggactcacagctcaccttggggcagtaatatgtgtgtcccagccattaggcttggctgttaacaacattatctcaaagttaygtgatcttatatttttgcttattttccatttggttgctaagtaatttaactctcttaactaatttctgtaaaaaagaaaaattaaataaaatgtttatatcagagctgtttaatttgtaacttgttaccgtcataatctcctggcgttggtgcaatgccataaaacatacctggttgctttaagtgcccagacaacactgatatgctctggtgagtgaagaattcctgcttgcaaattgcaaataacacatgatattttactggcatcccaataaaataaattacagaggagtaaaagatttgcatttggatttaaaaaattcttttattttagaatttattactcaaat

SEQ ID NO: 663726 - DNA, 569 bp, Homo sapiens
tatatacattgctctgaatgcaccttaagaacttttactctttcagaagaacttcaggtgaaaggttcacagcacaacttttcacggttaattagcagttagcatcacttcaagaaatcaaataggaagcagcagatggactcacagctcaccttggggcagtaatatgtgtgtcccagccattaggcttggctgttaacaacattatctcaaagttacgtgatcttatatttttgcttattttccatttggttgctaagtaatttaactctcttaactaatttctgtaaaaaagaaaaattaaataaaatgtttatatcagagctgtttaatttgtaacttgttaccgtcataatctcctggcgttggtgcaatgccataaaacatacctggttgctttaagtgcccagacaacactgmtatgctctggtgagtgaagaattcctgcttgcaaattgcaaataacacatgatattttactggcatcccaataaaataaattacagaggagtaaaagatttgcatttggatttaaaaaattcttttattttagaatttattactcaaat

SEQ ID NO: 663727 - DNA, 589 bp, Homo sapiens
aattgcaaataacacatgatattttactggcatcccaataaaataaattacagaggagtaaaagatttgcatttggatttaaaaaattcttttattttagaatttattactcaaatggtcctgtttttgaacaaacctgattgtagtattttagaaagcctgtattattttctttttgttgtgagagcagttagttttgctacattttaaaaataagtcattactcctcaaacatttatagcactctgaaaaggttttaaatctcatttagtagttccataacttttraaattgagatgtagaagtgggatctgctataaactctttctcattttgtcaaatttgtgtgtaagtgacaatatcagcctacgagagagaagtgattcttgtcatctttctccacatggatatatgtgttctttttgaaaagaaggcattacttaaatttaacttattattttcccagttggagtaagagtgaatgctgagtgacttttgtgaaattaattactgtcttggtgaaaactttcctccatctcaagcagagaaattacctaccgagctaagaattatggtaaagacaatgctt

SEQ ID NO: 663728 - DNA, 502 bp, Homo sapiens
acagctaatcttgaaagacaagcttactcaggtggcccctgacatcagaagcaagcttcagaatcaggctataggaccagatggcacgttagaaaacctcctaagggtagccacttcagtcttttataataggaaccaggaggaggccctggaaagggagaggaaacacataaaaaaggcagaaagagggataccttggaatggaatgcaggtctggaactccatgtaagccctcacttcaagayagcctggtaaagttgtcagtaacaacctttgctgcaggcctccgtcttgttttacatacttgagtgtgacctgtaaccatgtcacagtactttttttagcctttgccattttacaatggcgcacgggttcaatcctggcttggggaatgaatactttcaaattaatagctatgtgacttttaccatttgctaattctcttccccctccatgaacaactgctaacttcctttcttaaatctttctttctctaagttgc

SEQ ID NO: 663729 - DNA, 615 bp, Homo sapiens
ggtgttaatttcctgttgctgccataacaaattatctcacatgtagtggcctaaaacaatacagatttactatcttacatttaaggtgtcggcagggctgtattccttttcttgagatgctgggcgagactcctctttcctgtcttctagcttgcagagcctatccaaattccttgccttaagaccccctttttccattttcaagccattagtgtagcatttttctgatcctctttctgttgttgaatttctttgtgaaagtatacctaatgtagattatgggttgatgggtacagcaaaccaccatggcacgtgtatacctatgtaacaaacctgcttgttctgcacatgtaccccagaacttaaagtataattttaaaaaaaataaaaaataagcaaaaacaacaacaacaaaaagaaactaaaggttctccttcctctcttayggattttgcatagattccccccactggataatctaggctaatttctccatctcaaggaccttaatcttaattacatctaaaaagtccccttcgctatgcaaagtaatatattgtaaagtctgggtaatagagtgtgaatatctttagggggccattattctccctatca

SEQ ID NO: 663730 - DNA, 630 bp, Homo sapiens
aatgaggaatggacagagcagtaaaagatctagagatgataattctgtaaaagaagtcttcttggctgggcatggtagctcacttctgtaatctcaacacttcgggaggccaaggagggaggattgcttgaggccaggagtttgagaccagcctgggcatcatagtgagaccatgtctctacaaaaaataaacaaaattagctgggcacagtggtgtgtgcctgtaatcccagctactcgagaggctgaggtgggaggatcacttgagcctgggaggtcaaagctgcagtgagctgagatagtgcccactgcactctgwaccgtgtctcaaaaaaagtcttcactacttggtgctgagagatttcctgtacaacttctctgctttggagataaagaaatgggaccaaagagaaaaaatgggttgtttacatcacatggttgagtcagtagcagagcaaaaactgcaactgaggctcagagcctcatcctggctttcataagttatgtctcacccccacggttgctgctgccccaatatggaagataaactttatctgtttatggattctgttcagcacttttcttcgttgccctacaatgtaggtctccagctcccaagatctacaccag

SEQ ID NO: 663731 - DNA, 472 bp, Homo sapiens
atatatatatatttgcgatggagtctcgctctgtcacccaggctggagtgcagtcttgtgatctcggcttactgcaggctcactgcaatctccacctcccgggttcaagtgattctcctgcctcagcctccctagttgctgggagtgcaggtacttgccaccatgctcagctaatttttttgtatatttagtagagacagagtttcaccatgttggcaaggctggtctcaaactcctggcctcaagtaatccacccacttcagcctcccaaagtgctgggattacaggcgtgagccactgagcccagcttaagaaaagaagtttaattgactcatggttctgcaggctgtacaggaaccatgatgacttctgcctctggggaggcctcaggaaacttacaatcgtggcggaaggtgaagaggaagcaggcacatcttatgtggccrgagcaggaccagagagaagggaaagg

SEQ ID NO: 663732 - DNA, 566 bp, Homo sapiens
attctaattgagccatatactccccagaagcaaattaggcaactagagctattaaaatctgtcaggtcactaagacatcatttgggcaattacttcaaattccagaaaattttctgagctctatttctgcatacagtgtaatacccaagcggtatctaattcagggatttctaaactgtgcttccatcaaacattgatttccacaacatgggctaagatttaacactgctggaaatgaacaatggcagatttcttccattaaaaagatgttctcacttttacatttaattgcctctactttacaaaatagtacttcagtatagacaacaaaatactagttgacttcagtcctcccccagaagacaattagttaacatttgaagtatcctcttcagaaatctacatttcaggggaggttacttagcctgttacatttcctaacgagagaccataccacaggcatgcttaaaggcaaagctttagaatattgctctctayacttgccccagaagtttaataattagcataaattgtgcttcgagataatttttacttaaggaaatgga

SEQ ID NO: 663733 - DNA, 585 bp, Homo sapiens
gtttggactagtgggggagaatgcaggaagcagtggtgggaaatgaaataagacaggatagatcttgaaggtagaacaaaaagaatgtgctaatgaattggatctggcatgcaagagacagcgaagcatcgagatatgttttggtacaattaaacagtgtatgagaaagcaatttacgaactgtgaagcaccaaacaggagtatgagcaccaagcaaagggcctcatacacagtaaaygctcagggaaatttcactgaaagatcagtagtgtcccctaagtcactaggcttgggagctgatgtttcaaacctgtgcaggagttttctgaacaacttgtgatgctgttgtctcaaccataatgatgcccatgttttacagaaagaatatggaggtccagaagttgaaagctaacccaagtagcagagccaggatttaaccctttttgccaaaagaaggatggataatgtgatcagtttaaggtggtgcaacaggaaacagggacagtttcttttcatattaaaaactaaatcatttgtaaagaaatatttttttctcccttctctataacctctttccttcctctt

SEQ ID NO: 663734 - DNA, 620 bp, Homo sapiens
ctgtgtgtggtatataagaatacttaacactctaaaaaacggtacatgatatattaagtaggaatagtggattacaaagcaggaagtacaatatggtccaaatattctttaaaacattcttatttttatataagcacagaagaaaatcaatatagccctccacacctgaaggagtggtaagtgaatggtgggactataagtggtttttattttcttcatgctttactgattctcaaatattctactgtcagcatgtatttttttggaattagaaaaacacccctccagtaataatgtgtagttcttaacattgttcatcagatgtttctgactcccccacttctgtctaattacatcacaggttggcacttcctggccccttgtggttgtgtagagtcacatgaccagttctggccaatgaagtggaagtgccacctatyacttcctgattggatcatttggtgatcagtgttaggctctagaacttttcccctccaggacagcaaccaagttgtattgaagttgatttcttctgccaactgtacacccctcagtggtcaccagagctagagcccctgtacagacttgtgctagactcagagcacaaatgagaaataaaa

SEQ ID NO: 663735 - DNA, 566 bp, Homo sapiens
catctttcagtcctttcctcagcttttcttttctatctccagtccataacacagagtttatgttgccattttgaatatgaggtatggctttggggaccttgcttaccgttactctttctttcacttagttatatcctcaatatctttgactctgccatgawcccttcctaagatgttcctgagatgctcatcttggtacctgatggtgtttatgcctatggtgatgctaagatatagtagagactgcaggcaggtgggattagatgggcctcactcaaatccaggctctgtctgttaccattgggggatgaagagctcagaagtgccctctgagctccccacctgtggaattagtgtcagaaggctgccccttttgggggttccccagaaggttagcttctagatgcaaatacctaggagatctcagaaccttggagaatgagtaattaacagacaaagaaaccggtaaaggcatttctggtggaggaagaagcatgagcaagagtttcaagtgcttaaagaaatgtaagacagaataagccacatgaacaaatgtaagaggaaag

SEQ ID NO: 663736 - DNA, 420 bp, Homo sapiens
gacactccccaataccagcctggaatccagtagccccattggatggctagacccagaagaatagaaacagtcactacagtttggctctcaggaaaccccattgctagggaaagggggagaacaccacatcaagggagcaccccgtgggacaaaacaatctgaatagcagcccttgaatcycagatcttccctctgacatagtctacacaaaagagaaggaaccagaaaaataattctggtaacatgacaaaacaaggttctttaacaccccccaaagatcataccagctcaccagcaatggatccaaaccaaggtgaaatctctgaattgccagaaaaagaattcagaaagtctattattcagctaatcaagagacaccagagaaaggagaagtccaacttaaagaaaacaaaaacatga

SEQ ID NO: 663737 - DNA, 583 bp, Homo sapiens
aaaaacgaacgaagcctccaagaagtttgggactatgttaaacatccaaacctaagaataactggtacttccatggaagaagagaaatctgaaagtttggaaaacatatttgagggggtaatcaaggaaaacttccccagccttgttagagatctagacatccaaatacaagaagctcaaataacacctgggaaattcatcacaaaaaattattgcctaggcacatagtcatcaggttatgtaaagtcaagacaaaggaaagaatcttaagagctgcgaggcaaaagcatccggtaacctataaaagaaaacctaccagattaacagcagatttctcagcagaaaccctaaaagctggaagggattggggtcctatttttagcctccttaagcaaaacaattatcagccaagaattttgtatccagcaaaactaagcttcataaatgaaggaaagayacaatcttttccacacaaatgctgagagaattcaccactaccaaacctacaagaactgctaaaatgagctctaaatcttgaaacgaattcttgaaatgcatcagaatagaatctcctaaagcatac

SEQ ID NO: 663738 - DNA, 553 bp, Homo sapiens
caaacctacaagaactgctaaaatgagctctaaatcttgaaacgaattcttgaaatgcatcaraatagaatctcctaaagcatacatctcacaggacctatataacaataacacaatttaaaaaaaggtatccaggctacaaatcacacaatgaatagaatagttcctcacatctcaatactaacactgaatgtaaatggcctaaatgctccacttaaaagatacagaatgacagagtggataagaattcaccaatcaagtttctggtgttttcaggagactcacctaacacatcaggactcacctaaacttaaggtaaaggggtggaaaaagatattccatgcaaatggacaccaaaagcaagcaggagtagctattcttacatcagacaaaacaaactttaaagcaacagcagtttaaaaagacaaagagggacattatataatgataaaaggactagtccaacaggaaaatatcacaattctaaatatatatgcactcaacactggagctcccaaatttataaaacaattactactagacctaagaaatg

SEQ ID NO: 663739 - DNA, 517 bp, Homo sapiens
atcaactcaaaaaagaaccctcaaaaccatgcaaatacatggaaattaaataacctgctcctgaatgatcattgagtcaacaatgataccaagatgaaaattaaaatttctttgaactgaatgacaatagtgacacaacctatcaaaaccttggggatacagcaaaagcagtgctaagagaaaagttcataacattaaatagttacacaaaaagtctaaaaagcacaaatagacaatctaagatcatacctcatgcacctggagaaacaargacaaaccaaacccaaacccagcaaaagaaaagaaataacaaagatcagagcagaactaaatgaaattgaaacaaaaaaaaaatacaaaagataaatgaaacaaaaacctggttctttgaaaagatacgtaaaattgatagacaattagctgagagaagatccaaataagctcatttagaaataaaatgggagatgttagaactgttaccacagaaacacaaaagattattcaaggctactatgaa

SEQ ID NO: 663740 - DNA, 579 bp, Homo sapiens
tcagcatacaagtgatataccttaaggtaataaaagccatctatgacaaacccacagccaacattatactgaacagggaaaatttgaaaggattaccactgagaactggaacaagacaaggatgcccactttcaccacttctattcaacttagtactgaaagtcctagccatagcaagcagacaagagaaagaaataaagggcatctgaattggtaaagaggaagtcaaactgttgctgtttcctgacgatacgattatatacctagaaaatcctaaagactcattcagaaagctcctagaattaaatgaattcagcaaagtttcagaatacaaattaattaatgtacacaaatcratagctttgctatacaccaacagcaactaagctgagaatcaaatcaagaactcaatccctttcacaatagctgcaaaaaaaaaaaaaaaaaaacttagaaatatccctaactaaggaggtgaaagacttgtacaaggaaaactacaaaacactgctgaaagaaaacatagacaacacaaacaaatggaaacacatctcatgctcatggatgggtagaatcaat

SEQ ID NO: 663741 - DNA, 537 bp, Homo sapiens
atgttctcactcatatgtgggagctaagctatgaggacacaaaagcataagaataatacactggactttggggattcgggtgaaagggttgggggtgacaagggttaaaagactacacattaggttcagggtacactgctcggtgatgggtgcaccaaaatctccgaaatcaccactaaagaacttactcrtgtaaccaaataccacccgttccccaaaaacctattgaaataaaattaaaaattaaaaatagaaaaaatacaattaaaaagatatcatcttattctcctgagactccactcccttaagcaggctccaagctcaagacctcaccctctttattaaaaagtgaaacttaacaagtgctagaaaagtgatagagacctactggcaccatgtagatcttttctctttaataaaatcaaaaaagtggggaaaacattgacaaagaaatagcacatccctactgacggtgttcacatcctggtgcaactggcaatgatctcagacagatatatgccactgttcaggggaaaa

SEQ ID NO: 663742 - DNA, 586 bp, Homo sapiens
ctttttgaattagaatgaatatcatgccaatgccaacttttctacagctccttcactgcattcacacagggccacttcctatacccttgcaaagccctgtgcattgatcatgccattcacttctcctggggtgtgtctatccatctttacttggtaaaaccacattcaccagtgaaggtcctactcaaggtcacacccctatggcacctcctctcattctacaaggtagaattcaagccttctccttagaggcttccttcactctttgactctaccatgactagtttagcttctagtagatattatcacatttatttatttctatatctgcttccttagcctgactgaagaaatctacaagaacaaagactgtgactatttsttggtatttgcagcatctaattgtagggtccaggactcagtaaataattacataaatcaatatttgatgaattagtattcaatttagggcataataaacaaaccattatttcactgagaggcccttgtgatatgagacctaccaccactccaatcttttattccggggactggaaggccttaccctggcattgcccgttttcca

SEQ ID NO: 663743 - DNA, 610 bp, Homo sapiens
aagcatttcggattttggattttcagattagaggtgctcaacatgtagtataactgtctttctgttccacattaatctccaaataatttggccattcttagcgcctgagaaagaatcacagatatgttcccataccttgcaaacaatctttatgtcagcatgccccaaacaaattctgcctgatcataatgaaatcactgggtttttctcctcccccatttctgactatgctaagagaaggcgtgagtcattgagaagtgaagaccctcaggggacttccacataaacaccaaatttattttttattttatttattttttttgaggtggagtcttgctctgtctcccggactggagtgcactggcacgctcctggctcactgcagtctctacctccggggttcaagygattctcctacctcagcctcccgagtggctgggattacaagcacgtgccaccatacccagctaatttttgtatttttagcagagatagggtttcgccatgttggtcaggctggtcttgaactcctgacctcagggaacaccaaacttaaaaagggaatatgtgtgtgggtgtgatgagtgaaggaggtgaactgtgtgtgtgt

SEQ ID NO: 663744 - DNA, 657 bp, Homo sapiens
caaaactggatacattttcaaaaaataaacaatcttgtcctggacaattcactctgtttctgaatggtctaaaagatggttaaaaataattcacttgttctaatagtttccaaatgaggggttccatgactagcmctctcttcagaaggtttgctacgtcgatattacttttcagtaatatcaagagttttccctatctacatagggtttaaagacatttatccatgtgcgattttcaactgacaaattacctatgcttaagaaggttccatcctccctgcctcctcaccctcatttttgctggtgctgaggggtccccatggtgggaagggagagagcggctggatgacaagaagagttcaggttctacaatcaggcaggttgagatttcaatcatgattttgctatttagcaaccatgggatatggggcaagttactgaggcttgctgagtcttgatttcctcctctctaaaatgcttgttcatagggttgttaggtgaattcaaggataccacatgtgagcatactccacacattcctgccttgacatccaaccctctctccccctgcaggaaaagaactcttgagaaacagggaccttcctggaagacaggctcctactgactcactttccagtgctgcttttacttatagag

SEQ ID NO: 663745 - DNA, 641 bp, Homo sapiens
agagccacacacaccaacagcatgatgcctgtgacttccttctctccttctggctttgcatcatggcattaactgaaatggtctggtcttayagcagttccaggggagtgggatggagttgcctactgacttataaaaggcatgtgaggaaactgtacgctattaaattttttcaatgataaagagagatataaattgacaaaattgctttattatatgattcaaatgttaaatttcaactctagtatacagtattttattttatgaacaagtaataagagttaaaaatgaaggtatagaatgtcattccataagcctgaggttcatttacacagtgcatattgatcacctactatgatcagagactcagttggtgttaaggaaatgattaggaataaaaagagatatggttcctgccttcatggagattacaggcttttggattgggattacagcaaatgaaattcaactagaaacacagcactgattatggcatatacatgactatccatgctgaaaatgtcaaaatatggatgtcactgggttgaaagagaaatgcttcccacagtgaaataactaattgcaaatagaaggtattctataagaatacagataatctttacacatgaaactgaatttgt

SEQ ID NO: 663746 - DNA, 435 bp, Homo sapiens
ttcattttacatgagctttagagatagtaaaaactattccaactattttagagtcaaaaatgacacatttcaccataaaaaagaggcaaaaggaaaacatttttgaaaatayaaagattacagaagacactgactaaataacattgtgtgtgtgtgtgtttagaaagaaataaggcagaaagataactgcaggttatgacagaatcagctgacaaaatatgccttggaagagaaatctgtgaattgtaaagaagcttgtattatagtaatttctttttataatctgacctgcctaccctctcagagcacattctatctcttttgcaatcagcagtggttccatcaaagtttgccttgtataaatattaactcatcttcaaagaagcatgcaagtcttaaattcaaatctattttgcttttctaggcaggtaatag

SEQ ID NO: 663747 - DNA, 435 bp, Homo sapiens
ttcattttacatgagctttagagatagtaaaaactattccaactattttagagtcaaaaatgacacatttcaccataaaaaagaggcaaaaggaaaacatttttgaaaatacaaagattacagaagacactgactaaataacattgtgtgtgtgtgtgtttagaaagaaataaggcagaaagataactgcaggttatgacagaatcagctgacaaaatatgccttggaagagaaatctgtgaattrtaaagaagcttgtattatagtaatttctttttataatctgacctgcctaccctctcagagcacattctatctcttttgcaatcagcagtggttccatcaaagtttgccttgtataaatattaactcatcttcaaagaagcatgcaagtcttaaattcaaatctattttgcttttctaggcaggtaatag

SEQ ID NO: 663748 - DNA, 555 bp, Homo sapiens
atttccccacaccatcctctccctcccctgctgccttcctcatattggctttgggaccctggtttattgcttttgggtcgcaaattggttgtgaaagctgcaaaagtcacaccagctcacacatggtctgaaagtgaaagaatggagaacaggcattggtctgtttctgtgatcctctgccttttaatcatggggaaaatatttctgagaagctcacaggagatgtgccttacatcttattgcccaaaattaagtcacatacccacctccagctggaaggaaaattatagatgtttatgttcccagggacagggatattggaattgttttggggcaacactaagccactggaagtgaggcacaaggtcagggcaaggatctagcatgagcttgacttcatcccagagcagtgaaattgactgtggactcttttttttatttttwtttttaatctagagacagattctaggctaaaatcaaacccagagaagaggctagatttctttgagtgaggagtaaagatgacagggcccattctgagaacctttgaatgct

SEQ ID NO: 663749 - DNA, 587 bp, Homo sapiens
tgctgtgtggcccatcccctacagtctccacgttctcttaggcctcatcctgtacagtgcagcctctgtgctttgtgttttaagatatayaagagatccggtgaggcagaatccttccaaaaatgaagggttagctcaaaaaatgcatggtacaaagacaagtgagggaagcctgcatgacatccttggaagaataaacttgtccttgatatgccaataacaagtcatacttgcatatacacagactggcttcataaaatattaaccatcattaagtaaatgaacatcagttgctgcttctcctggcatcctattggagttgcccacgtgagaagcaatcacatcgcgaattagcacctgcaggctggagaaggggccaccaggcttgatgggctgatctgctatttgatgtcttcatctatacaccatcatatgtatggcaagcctctctcaatggggctgtcatggtgttgctggatatcttctctactgcatgacttcttatctcactgaggtgtcctctaaggcctccccaagggaattttgtagcccatagtttcagtcagtcaatcccaggcaaactctct

SEQ ID NO: 663750 - DNA, 589 bp, Homo sapiens
attctacatggcacctgctgctttcagtcactagcttctgattgcaagtcttgggcaggggcagctgattgactgagcccaggtcatatgtctatgctcaagtggaaagggaggctggaataaaaagagtctggcttctatagagggaggcagactcataagccaaggagttcccctaagaaaaataaatgtctgttacacctgccttgtaggaaagaaggctaatgtgttaaaggtactagtcctcctgggtgatgggcagagctatagaattgaaaacatgggggcagattaaatgcaggcatatgaggcactaygtgctaccatggggaaattgaaatatgtcaaaaaattgtaagagggtatgttagcaaaagggagttttgtgagagaaaataaaatagctgccacgatgagagactgtgtgaagtgtgacattccattttgctactttttcatgtcactccaataaaaacttattactttttaagactttttttggagttacatgtgtgtgttgcataattggaattattgtacacattgtacatattcttgcttttttatgtactctttaatgcaacacgga

SEQ ID NO: 663751 - DNA, 579 bp, Homo sapiens
actcttatcctaatttctgccaaaagaagagcaagtccatctttgacaatgatctctacactcacatgctcctttcttctgtagggatactccccaaactttacatttagaacatggtaaaaagcctctgaaacagcatgagtgagaatggtaatcccagggactaataacaacaattgccatttattgaatattgttcattcagaaaggcacggtgtgaaatactttttgtttttcrcctaacgttatttatagtctaatggaagaaatagaaaagcacataagcagttactatccaggagtactatgaaaatgagcatccaggaggaacatgtaaaccaatctcagagttgtgaaacaattccccaaaaagaagacattagagtaagtcctgaaaattgggtaaaataaaatataaaataacatcataaccttcccaattaccaggaggcatttgtttattcgttatttgattattatttattcaggacatttagtgtgagaaagggaaaggcaaaagcatgaagaagttaagtcagtagctaaagacacaaactcagagtgaacactgaaatgctt

SEQ ID NO: 663752 - DNA, 615 bp, Homo sapiens
ctgttgaaatcagcaaatgttaaatattgatacttctcctgtcactggagaatctttgataaacatttactagcagagcaggggatgggaatgtgaattgtggttctcctcttcctgtctctctattatatgttgagtatgtaggggtcaacttagtcactttatttcattaggctttcatattgaaagatatcacatccaagacatcttatctgtaattaaacctcatttaaatgatgagatcctgctcttgaagycacatcagataagaaaatgagatttttggaggtctgcgagaagagggagtatattttacatgtgaaagaaatataagtaatgtatggccacagagcaaaatctaggtatctaaaagatgtccacagcttctttgcatttctccctaaagttgaaatgtttattcctcatcttgttgaatctggttcatcctgtggctaactgctcaagtaatacactctgatagaagtgacacagtgccagttccaagcctacactttaaaaggaatgagagcagtcatttattccctgttggaacacttatatttgagaagtcaaaccataagaataggctgtatataactgctctggttaacagcc

SEQ ID NO: 663753 - DNA, 520 bp, Homo sapiens
gagttgaagaccagcctggccaacatggtgaaaccccatctctactaacaatacaaaaattagctgggcatgatggtgcatgcctgtaatcccagctactcaggaggctgaggcaggaggatcaattgagtctgggtggcggaggttgcagtgagccaagatcgcaccactgcacttcagcctcggcaatagagtgagactatgtctcaaaagaaaaaagaaaaaaaaattcattttaaagaagctcagtgagatacaagagaaggctgaaaaataatacaaagaaatcagaaaaataattcaggatatgaatgagaaatttkccaaggagaaagatatttagaaaagaaaagaaccaaatagaaattctgaaattgaagaactcatggaaggaaatacaaaatacatttgaaaatttcaacaatagacttgatcaggaagaagaatctcagaacttgaagacaggtcttttgaaataatccagtcagacaaaaataaataaaaaagaattgaaaagtat

SEQ ID NO: 663754 - DNA, 524 bp, Homo sapiens
acgacaaagcttagtttaaaaatgtttcataaattaaaaacatggaaaactgaaagcttatcaacccttttacttattttattaacctcagatgttatgaaaagaactaaagmagtttatttgatttggctgaacacatatgaattacttaaaaatgaagcatagccatccaaatagcatgctttaaatgcctgtccagtgatttacagctaattgccaaatattattccgttgctaaatctttacatttgctttactaaggtttgctaaattagttaaaataaactcaagcatagcatatttccagaatatttttgataaaagatgtcacaaacatacatttcctacatattttaaaaatatttaataggaaactatcttatgtcatatttcccaggaaaaagatagagaaacagatttgtgtatgggaagtttattgtgcaatggtctcaagataaaaactgtgagacgttaaggaaccagggttgagcaaaaagagtcgaattgtgatgtaattgcaaaaa

SEQ ID NO: 663755 - DNA, 591 bp, Homo sapiens
gtcatcgtctttctctaccctgaatgcttagtattgtgctcttcatggtattcagccaaattttctcatcttcatcaactctcattgatgatcccaggggcataaatcatctcttaccctacrtcacttgtttccttgactgctttgactttcccccatttgttgctgtgacttctgaactgcatatatctgatttgccttttccatgcctctgccatggctgtaggatttctttgtgaacagtaactccaagcaggtaagtgagctactacctaaagcttgcttaatataactccttggctcactgtaagcttgaaatctcttcgttatccagggttttgtttttgtttttgtttttttacatagtgtaatctaatgcctaggtaactccactttggatttcaactcttaaatgagtatctagaggttcgcctgaaattttagcatgagacagttgacatttgatcacctagtgcctcacagtataaattccatattgcctttgttttctaaactgttacacagttctagagttctttggtttctttactttttttttaatgctaccgttattggtacaataatttatat

SEQ ID NO: 663756 - DNA, 623 bp, Homo sapiens
gtattcaaagaataatgatacagaaaaagatttctacatgaaatctttttctgttttgttttttaaggtgtgttaatacatatagaaaataatagtggtgtgataaacctttaaaaagttcacagtagtagaattaaagatgtttcccccaccttccttttatctgaattatccaaattgtctacaatgtgtatgtattagttggcttttaataacagtaactattgtgtatcaggtttcaggcttccacagtagacacaagctaagcctttgatataaggaaaatggcytgatgaccatttgctttagttatttggggtctatgtaatagtgataccttttttttaattttcattagcagaaacacaaattgcctcaattgctcttattttaactagaatatcatgcagtttacctagaatctaggtggtgagggtctaaccacaagggagtggttgttttttgttgtccattgctcctgcaatggagaccccatgttccaattccccctttcttgtgatatccaaagggggttataggatgagcatagcttggtgtctggagcattaccatatttcaaggaattgacctctactgcaaacaaaatgcaacattttgacatg

SEQ ID NO: 663757 - DNA, 620 bp, Homo sapiens
acagggtttcgccatgttagccaggctagtctcaaactcctgacctcaggtgatccacctgccttggcctcccaaagtgctgggattacagacgtgagccaccacacctgaccctttttccttcctgtcttcctgtcttcctgtctcccttccctcccctcgccttttttctttttctttctttctttctctctctctttctttctttctttctttcctctctctctctttcttctttctttctttctttctttcatgcgtctttgtttgattttggtgtcagggtaatactaaatttgaaaatatctcacctcctgtatttttcagaatagtttgactagaattggtattaattattctttaaatgtttggtwaaattcagcagtgaagccatcaggtcctggactttgcctttctgggagactttttattatgacttcaatctccttacttgttattggtctgtttatgttttgtatttcttcatcttggtaggttgcatgtgtctagaaacttatccatttattctatgttttccaatttattggcatatagttgctcataatagcctctaaactcagtgattctttgaatttctgcagcatcagttttaatgtctc

SEQ ID NO: 663758 - DNA, 595 bp, Homo sapiens
ggtgtaatctactatacacctaggttatatggtataatctattgttcctaggctacaaacctgtacagcatgttaccatattgagtattggaagcaactgtaacacaatggtaagtatctgtgtatctaaacayagaaaaggcatagtaaaaaatatgatatacaagataactggggccaggcacagtggctcatatctataatcccagtgctttgttgggctgattcaggaaaattgcttgaggccaagtgttctagatcagcctgggaaacatagtaagaccatgaattgagcttgcaggacaggaaattgctctgggcaagtcagtgaataagtggtgagtgaatgtgaaggcctcagacactactgtacactactgtagagtttataaacactgtatatctaggctacattacatttataaaaaataaagtaactgcactactatgttacaacagctataatatcactacgtaatagcagtttttcagcttcattataaacttatgagaccaccattgtatatgcattgattgaaatgtcattatgcggcacatgattgtactttcaaagtcaaaactgcatgaaaaggta

SEQ ID NO: 663759 - DNA, 619 bp, Homo sapiens
agaaggaaaggggtggggggagagagagagagagagagagaaagagagagagagaaagttactgggcttagaggatttatctttatgatgtgttgatatagcaatcaaaggttcccatttcatcaatcaatagtccccatttactttagagtaaaagccaaaggctttgcaatgaacaagaccctacgtgagctagccgcctgctccatgcctctctcaagtcatccctgagtcatttctgcycattgatgccagccacgtgggcttcttgcttgctttttcttttttttttttttttttttttttttttgagactgaatagctgggattactggtgcctcccaacacgcccagctaaattttgtaattttagtagagacagggtttcaccatgttggccaggctggtcttaaactcctgacctcaagtgatccgcccaccttggcctcccaaagtgctggaattacaggtgtgagacactgagcccagccttccttgctttcttttgtaggtgtgtacctcagagcctttgcactgcatctccctcggactagaatgcttttcccctcattttccgtgggactctctttcttgcttccatcaggtcttcattcaaaag

SEQ ID NO: 663760 - DNA, 502 bp, Homo sapiens
gggttactacgctaggaattatcctatttcttcataacatgagttgttaactttcttrttaccattgaaatagaatgccactaaggcagctaccagcatttgtcacaaacatgaaactagctcctaaaattttaggccttaaatatggagataaatttagaagacattgtagtatctccccaacatcaatttcaatctctccttttgtataggttgcattgggtggggttgacttcactcccaactccaggggtgcccccaggttgctttgaactcaatatgccacaaagattgattagggatggacatatgacttaatgctgaccatcaaagcaggattcaggacattttttccatggctttgaggggaaaagctacctccttcccctggctgctatctcacccacctattaatccagaggaaaaccagtttgaagataaactctacacatgagagagaccagaatttacacaaaacataagtaaacaaaaacaccacact

SEQ ID NO: 663761 - DNA, 621 bp, Homo sapiens
aaatctacagcaatctaaactaaacctttctaagaaatctagcagtcagtattgtaatgcaatatatcaaaatctgtacactgtcaataaaataaatgagcacaagttgtctttccctaaatagagcttctattcacgttttaatagacacacacatatttgtatttttgaaagaattctatacactggaataacagccatttkaagccatttctatttgcatattaagaaaaaataaacttcaaaaaggataagggtcgcagctttttaatgacaatggtcggtaatagatggaaacagagcagaattctcatcactttccttggctagcatgagtggctccagaatgacccagtcttacctcagcagcttcctagggtgggacctgtaggtggccccacattggaaggacccagcttggttgtcgccaccttagaaaccctcaaagatttttttaaaaggagcccccaccttttccttttgcagtgggctctgcaaattacatagctggtcctgctcatcagaaagaaggtctgtgtcactagctcttacgtcatgggaaattgaggttcgggagtagaggttttggttaattccttcattctgcaaaacattcctgag

SEQ ID NO: 663762 - DNA, 586 bp, Homo sapiens
gccattgacctgaaatgaactgcttcaacgtgttctgaaggacctttaaataagagatggtaataaatccagctgctacagaatgacaagaagaacagtcatgattgtagtcaattttaaaaatagacatcctttcccttcttgctccctcccataaatactaaatggaagaagacacaaatagaaagagaagaaagtatttttaawctattaagaaaatgaagaaaacaacctaatcaatgtgggaaaccatacaaaaaaaaaaaaaaaaaacagaaaatattacataaccaggccttttaaataaggatggaattcaataaaaaacttaaaatgcttacatcttctgaaataacccatgattagctccaagttttagaaagttcttgaacaaaaggtacacatcaaagtagtgaggtagcagcccccactttcccaaaaagttttcaggaaaaggctgcacaagcacctgttggtgaggtcaccaggaaggaatctgcttccggcaggaaattgcactgggtgagctctaaggctcctaaactctaagattctcgtatgtgctgaaaacactgctatgacgaca

SEQ ID NO: 663763 - DNA, 593 bp, Homo sapiens
ggggaaaaaaagggaacccctgtgaaggtaaaagtactgaagctttcctagcagttatgacttacagcagaagacaactttccattggcaactgcagccccaagttgttttaagggaacaaagctcttaaaacctttatatctaagtctattggcagggtggagaagttcatgggaaaaaaattctgagggctctgtttawatcaaactagctaggcggtctgagagtcacaattctaataaatcttttgaagaagttagtactacatcctaatacgaaacaattgactggaaattcctgaagaccatcagtaatctaaactatccccattgcttttactggttctgtgtctaagatttaaaattctgaacacaaagtcccaatgcaagcagacttgacgcattctgagtctttgctcttcagtcccattcaatgtcatttggatatatactggacacttacacgcatggagaagcacagctctacagctttgccctggcttcctcctcctgcagcctgtcttcactctccttagcctaggcttggataatgctgcagttacaccttgtagttgtcaccttgcaacctatgtc

SEQ ID NO: 663764 - DNA, 508 bp, Homo sapiens
tagtatattgtgtttaatactttaataaaaaagaaaaaaattaaaaaattaaattcaccatttttaccttcatatcttgccctattgtgcatcctttggttgtttggacagtgatcccactaatctcccaattacaaagactgcaaaactcagacacaatgactgttctgtaattcgcccctgccaccagcttcctgcttcagtaatgactctctataattcagttttcaactagcactcaggctaatttttccaaaaacacaaatatgaaaatgctgctcctttgtgataaattcattctatcatcttaggataaaatccaagttccttaagttgtaaggaactccgtgcctacttaatctctccaaactcatctctcackactttctcagtgtgaactccagctttcctaagtttcctaccgagatatgtatttacctatgacctaaaatgcagaataatacttcagagatttattgaatggcagtttagttcaattctagctagt

SEQ ID NO: 663765 - DNA, 510 bp, Homo sapiens
aaaacaattgtctgtggatggcaaagagtcttaggacagccactattaaagtcacaattgacaaggaaattttggttacatctatggcacacaataatttaacataacaactataattattagacaaatctattcaatcttaatcagttcaactgtaaggcaagattcttataaaccctttataatcccttaacaattttcagtaaagagcagatcagtgctctgagaaaatcctgttgtgcttttattttagtgttcaactattattcagaaaaactgaataataccccctttaactctagataatatgttcacacaaagaatctttttaacaattaattttttaataaactttccacaacttgttcaaacctttaatatttttctatctcactttaaaagaatccttttaccctttaaacayaggcaagaaatccacattcccaggccttcttataatcttttaccaaaagtatattctactttccttacactccttgcatattgtag

SEQ ID NO: 663766 - DNA, 561 bp, Homo sapiens
gttgtaccattatttcattatatattacaacataataataatacaaataacacaataaatgtaacatgcttgaatcatcctgaaaccactcctccgaccagtctgtgaaacatctgtcttccacaaaactggtccctggtgccaaaaggttgggaaccgctggtttagagcatggactaaggtttgaagcccaaacctgcagtcactagygatattacattgggcaaggtgcctaacttctgccaccttacaagttcaaagtgaaataagttaacaatataaattgttactgaaaaagagtgtccctcccccagcacaaagaccattttcaaggtaacacagagagaatactgccccctcccactgatgcagttcatgattccttgcagatcttacaggaatttcaggttaagaacacatggtgtagaatgttcccttttccctgcacacttgcagcacacactcagcggtgaagtaccagaacagcatttcactcagatcagcaatgaagctctctttgaaataaaaagttagaggaacatggaaaagaagaaaattgcc

SEQ ID NO: 663767 - DNA, 579 bp, Homo sapiens
gggccgaatcgtccagatgctcagggcggccagcctcagcctaagggaagcccagcatctcttttagttcaacagacagcagcttttcttcttctttggatggctgcactctcaagagttttgtttgaattttttttttttccccatgacaaattaagtcaagattttgtaaggggaaacttcttactcctccccatggtccctaccctccctgcaagaatccagaagcactgttgactgttacagattcccttttgtaaatgctacaatgcaatgaaacaacatggtaggggcaaagtccaatttaaccaaaagaacaacagtctgtttcagatttttatttaaaaaatttgattagttcctcactgttccagaataaagatgaaaaacagagtatggaagcacctccaccatctggccccaaacaaccttcatctcccgctactctccccattcctatggtcctcaagacttccataaaacccacacctataccttaactctttcctactaaaygcatttaccctttttggccgccaaactctttttctgtttttttcttacatggcataatataaa

SEQ ID NO: 663768 - DNA, 635 bp, Homo sapiens
ttgcctgtacagctcttacagcaattgcttccaatttgtttgatttacctaagagctaaaattgtaaatggcagctcaaatgatttttctgtacattcagaaaatgagtttgaatatttgttggagagtaactgcttaagacatgaaaaagggggagattatagcttttaactcttttttatggcagagcattaaggaaaaaaaagtgcagataaatgagatcaaatggcaagtgtctgaacctgctggacacaagtcccggtagccattgatagacagtgtttatatgacttctgggccatcaatagatagataaggtacatcagcggccaatgttccaggaagtttgagaagataaatggaagttgcacagcagcctaaragcttccttaggagggctgtgctcctccagagcgccatctgtctgtgtcttcctgttcttcttcttcacattaaatgcttttccttttctcatttttatgatggttatcctaaagatatgctagcctggactttgacaaggacatctggagataagaaagattctgaattatttttccctttgggcaattgtagcaattttaaaactatgttagatggctagagattcttgagaatatttcttttcttggaaa

SEQ ID NO: 663769 - DNA, 635 bp, Homo sapiens
ttgcctgtacagctcttacagcaattgcttccaatttgtttgatttacctaagagctaaaattgtaaatggcagctcaaatgatttttctgtacattcagaaaatgagtttgaatatttgttggagagtaactgcttaagacatgaaaaagggggagattatagcttttaactcttttttatggcagagcattaaggaaaaaaaagtgcagataaatgagatcaaatggcaagtgtctgaacctgctggacacaagtcccggtagccattgatagacagtgtttatatgacttctgggccatcaatagatagataaggtacatcagcggccaatgttccaggaagtttgagaagataaatggaagttgcacagcagcctaagagcttccttaggagggctgtgctcctccagagcgccatctgyctgtgtcttcctgttcttcttcttcacattaaatgcttttccttttctcatttttatgatggttatcctaaagatatgctagcctggactttgacaaggacatctggagataagaaagattctgaattatttttccctttgggcaattgtagcaattttaaaactatgttagatggctagagattcttgagaatatttcttttcttggaaa

SEQ ID NO: 663770 - DNA, 585 bp, Homo sapiens
acttagaaaaaagagagaattggagttgtgaatattcctgtctccctcaccccagcccccttgaagtgagtcaggacaaacttggggcccaaatggagctgtaagtaactgagtcacatgcagagatgaaaccttcacagacccactgatatggaggttgaagattaaattcccctttgagaataactgggtaacactcatacagagactactttcaagaaggccagatcctccctctaatgtatagtgcaacgttcctaaccctcagcccactccgtcatacccccactcacatgaatacacacataagcagtaatataaagcacttcccaccatagggcagcaaagaaggagggaaatctttattatggaagagtggaaggaaggaagggaagggaagggaagggaagggtaagaggaagaattctcagggtgagcagaggaatgacatgtttggggcataatgaagataattgaagtgcagaktttgtatggaaaaatttgaaaatatcaggtggcaggccaggcatggtagctcatgcctgtaatcccagcactttgggaggccaaagcaggcggatcacc

SEQ ID NO: 663771 - DNA, 350 bp, Homo sapiens
ttgcatgctttgacttttttctaggtacccttttgtcagactgaagtcagcattttccttccgtctttcagagttctttagatgtgcagagagtttaggcaactttcctaaggtgggacaagactcttctattatctcaaatttcttctactacggaaactcctatttaacccaaacacctggccagatctgtgtagacatatggtctggtgcaatgttgatmgatctgttaaattcttaagtggcgtgatttcatcaggtataaatttgaaatgcactgcctttggttacttgggacatgtcaaacttgtgcatttttgtgtcaccttagaagaacagggtagcagaat

SEQ ID NO: 663772 - DNA, 576 bp, Homo sapiens
gattcaaacacacttgagaagacccagtascaaacagaatattgagcattccatctaaatcatttgaatgaggttaagggtgttccacctgctccctccactccattccctcacccctgcctccagaagataaaatacactctctacctcctttaggagtgaaaaaaaaaaagctgacaattttttaaagattcaacaagaatcttaaaggtctggctttaaataatcacacctatatattaatatagattgtaaatataaatacatgcagttttaacaaaatagattctactctcaatgatatcttaaaatctgctcttttcactacagtactaatatattttaatatcagtgcatttacttctgcagtgtttttttggtggttttttgttattcagcggtatgaatgtgatcaattccctgtacctggacatttgaattgtttcctgattcactcactaagagaacaacgatgtgataaacatccttgtgaattacatttatttaccctggaaatttttcctagatgttattctcctaagttcttctcacttttgaaaatagtttatttgtagg

SEQ ID NO: 663773 - DNA, 576 bp, Homo sapiens
gattcaaacacacttgagaagacccagtaccaaacagaatattgagcattccatctaaatcatttgaatgaggttaagggtgttccacctgctccctccactccattccctcacccctgcctccagaagataaaatacactctctacctcctttaggastgaaaaaaaaaaagctgacaattttttaaagattcaacaagaatcttaaaggtctggctttaaataatcacacctatatattaatatagattgtaaatataaatacatgcagttttaacaaaatagattctactctcaatgatatcttaaaatctgctcttttcactacagtactaatatattttaatatcagtgcatttacttctgcagtgtttttttggtggttttttgttattcagcggtatgaatgtgatcaattccctgtacctggacatttgaattgtttcctgattcactcactaagagaacaacgatgtgataaacatccttgtgaattacatttatttaccctggaaatttttcctagatgttattctcctaagttcttctcacttttgaaaatagtttatttgtagg

SEQ ID NO: 663774 - DNA, 568 bp, Homo sapiens
gtattttttaaagctctttctttgtggtatgactgtatgctccagggtcatcttgtgtatttcttgccccagtcctagattcagcaattcatccaaggagcccttgtccttttattgaagaatagtattagaaaccaagatttgggcactaagtgggcttattgctactaaatgtcagtgtttctaggttctttcagttgacagagcaaggaaatatatgtgtatatactaacccctgatcatatgcataactataaataataaatatgtaaccatctgtatctgcattaagctaaatttgagttcatgctgatgtctttaatctattgcttcatggatcattttagtttmcacctctggtttatttgtaaccttatactttaacagtgagaaacctgattctcatcattcactatgtatttatttaatttcttcaattccaatatatatatatatgccaggtcagacctgcagaccctgaaccagcgacagatgaaagacgtgcactgacacagatattttgcctgtcagtgtggctacgggtctctgctgcctgcatccgcagctt

SEQ ID NO: 663775 - DNA, 568 bp, Homo sapiens
gtattttttaaagctctttctttgtggtatgactgtatgctccagggtcatcttgtgtatttcttgccccagtcctagattcagcaattcatccaaggagcccttgtccttttattgaagaatagtattagaaaccaagatttgggcactaagtgggcttattgctactaaatgtcagtgtttctaggttctttcagttgacagagcaaggaaatatatgtgtatatactaacccctgatcatatgcataactataaataataaatatgtaaccatctgtatctgcattaagctaaatttgagttcatgctgatgtctttaatctattgcttcatggatcattttagtttacacctctggtttatttgtaaccttatactttaacagtgagaaacctgattctcatcattcactatgtatttatttaatttcttcaattccaatatatatatatatgccaggtcagacctgcagaccctgaaccagygacagatgaaagacgtgcactgacacagatattttgcctgtcagtgtggctacgggtctctgctgcctgcatccgcagctt

SEQ ID NO: 663776 - DNA, 584 bp, Homo sapiens
gtgttatattctatagatgtaccatagtttatccactcacttattgaaggacatcttagttgcttccaggtttggtgatcataaattcccagtggtttttaaaaaatcattgtgaatcattggaaagaacaaaaatatttaacattgagctatttaacacaatattacacscataacatgatgtattaagagagtttttaatggcaatggaaaaacaaatgtaggacataaaacttgtatatttaatatgttctcaattacataaaacatgaatatgtatctatatctggaaggatatacagcacaatgttcatggaagttatctttggggatttaaataatgggtaatagttactccttaaattgttttccacagttttcacacaggggaattatgactttcacaatgaggaaaaaacaagcccaaattatttctaaatcatgaatcatgctctaggtttggtagggaattgcagttacacatattcagggaaatctttggaattttcctacacttctctccatgtcttgcaggttgtttttctgcatcagttcttctatgctccaggttaatttttattctt

SEQ ID NO: 663777 - DNA, 576 bp, Homo sapiens
ttaattttaacttgccagcctaaccaccttggaacttctacaatcgatgaaaatagatacatacagatgctstcaacacctgggctctgctctcagcagattcattttgaaagaaccactttgaaatggagagagagggcaggctcagtggctcatgcctgtaatcccaccactttgggaggccgaggtgggcggatcgcctgaggttaggagtttgagaccagcctggtcaacatggtgaaatgctgtctctactaaaaataccaaaaaaaaaaaaaaaaaaaaatcagccgggcatggtgtcacatctctgtaatctcagctactcgggaggctggggcacgagaatcacttgaatgcaggagacgagattgctgtgagctgagatcacgccactgcactcccagcctgggctacagagcaagactccttcataaaaaaaaaaaaagagagagagaaagaaatggagagagaaccacatgccaatagggcataaaatgattcttgccaatttctgactcagcagtgattttccacaaagcctaattcttctggaaaccatgatttcaagccaat

SEQ ID NO: 663778 - DNA, 576 bp, Homo sapiens
ttaattttaacttgccagcctaaccaccttggaacttctacaatcgatgaaaatagatacatacagatgctctcaacacctgggctctgctctcagcagattcattttgaaagaaccactttgaaatggagagagagggcaggctcagtggctcatgcctgtaatcccaccactttgggaggccgaggtgggcggatygcctgaggttaggagtttgagaccagcctggtcaacatggtgaaatgctgtctctactaaaaataccaaaaaaaaaaaaaaaaaaaaatcagccgggcatggtgtcacatctctgtaatctcagctactcgggaggctggggcacgagaatcacttgaatgcaggagacgagattgctgtgagctgagatcacgccactgcactcccagcctgggctacagagcaagactccttcataaaaaaaaaaaaagagagagagaaagaaatggagagagaaccacatgccaatagggcataaaatgattcttgccaatttctgactcagcagtgattttccacaaagcctaattcttctggaaaccatgatttcaagccaat

SEQ ID NO: 663779 - DNA, 541 bp, Homo sapiens
gttttgttatgcaaatttaaacatagcataaaagtataaagaatattatttacaaaagctattctgtttaagtaaatcataacattttgccatatttgcttcaggtttaaaaaagctgattaaacataataagaaagagttgtcttggcaagaaacaagcttccttactgctcatgacatattcaaaagcaaccttttattgctaagttcctccaaactttgaaattggcttaagtgagctctcatgatttggttctgcattacctctctactttcatcattttccasctctgcttcttgtcaaccccaaatatactacactccaaccatattgcatttctttcagtttctggaaggcacatctttctcacttcctcactttctctctctgcctggacattctctctgcctggaatgtcttctcatttgcctcccctcctgagcaatttctatcgagatcttagtcagtatatcttctgaaagtttcatctgacatctaagtcaggtgacttcctaaggttcttcctccaacggaatgttt

SEQ ID NO: 663780 - DNA, 541 bp, Homo sapiens
gttttgttatgcaaatttaaacatagcataaaagtataaagaatattatttacaaaagctattctgtttaagtaaatcataacattttgccatatttgcttcaggtttaaaaaagctgattaaacataataagaaagagttgtcttggcaagaaacaagcttccttactgctcatgacatattcaaaagcaaccttttattgctaagttcctccaaactttgaaattggcttaagtgagctctcatgatttggttctgcattacctctctactttcatcattttccagctctgcttcttgtcaaccccaaatatactacactccarccatattgcatttctttcagtttctggaaggcacatctttctcacttcctcactttctctctctgcctggacattctctctgcctggaatgtcttctcatttgcctcccctcctgagcaatttctatcgagatcttagtcagtatatcttctgaaagtttcatctgacatctaagtcaggtgacttcctaaggttcttcctccaacggaatgttt

SEQ ID NO: 663781 - DNA, 581 bp, Homo sapiens
gatttactctttctccactgcaattcccctgtcttgataaattggctctgtttaggcagcgggcatggtgaatccattgggcagttacatatgtatgtttatattgtgaggggcaaggctgttggcctcctggaggtttgctgaaaatcacttacatgagagattgattaataggagaaaaagcatacaaatttatttaatgtgtatacatgggaggcttctgaataaagaactaaccccttaatggggtacaaaagctcatatactaccttgaggttacagaaaaaattcaggctcagagcatggccaaaaccaggttatagtggcaagacaggtaatgggagggagaaaggamgggtcttggctagcgaaggtggtcttgttaggtagatgaagcctcataggcaatagccctcagagagaatagatggtaaatgtttcttttcagacctttaaaggggtcagactctgttaagctcttctagatctgggaaaagcctagaaagggaaggccttgctgcgttaatggaaattctatacagatgcaaatttatcctacaaaagatagctttgcaggccca

SEQ ID NO: 663782 - DNA, 508 bp, Homo sapiens
tgctggcattttgcctctgtcctaaagatctgtggtactttgaacttgcaaaagatgatttagggtatctggcagaataaatttctaagcagcaaaacattcaagttgtgacctggctttttctgaaagtgtacagttatatgcattcacaaagagatgatctgaaattggaacttacgttcaaaagggaagcagaacatagargtttgaaaaatctgtagcttgaccatgcagtagaaaagaacaactccttttctaggaataaattcaagcctgctgcagaaatttgcttaagtaatgaagagctgaaggttaatagccaagataatggggaaaatgtttctaggcatttcagagatcttcatagcatccccttccatcactggcctggaggcctagtagggaaaaatggtttcctaggacccaggtgctctgtgcaccctcgggacatggtgccctgtgtcccagccattccagctttagccatggctaacaggagccaagatac

SEQ ID NO: 663783 - DNA, 525 bp, Homo sapiens
taatttagctaaaaagtgtatgagaagttgtgcactgatttaaagaagaaaattgtacttatgttcttcaccccagtaagtttctgaggtcgacatggcaggaggcacgtcaggctgggaagcagatacaaaatacatttttaagtggaccatttttttttatgttcagttgtcatttgcctctatttctgagcctgctgctgactgggggtaacctgacaaagcttgcagcatcygtcaatgtagtcaacctgatgaaagcttcttttggagtctatggtcatcaagcctggagccagaaaatgtgctgtcctaggggtgacagttaatgttcctggtggggaaaggaaagaaatagaggattgcaccaacttacagtaggatagcactaggccacatctccttccttccatctcttccttcccaactccattgcataatacacatcatatctccatgcatttctcttaaattatgtatagacataataaatacttctcctacacacggacacagggaggggaa

SEQ ID NO: 663784 - DNA, 454 bp, Homo sapiens
actgtccttttctgtctgcatctttagcatttagaataatgtctgatacaagatgatacttaagtgatatttggtgaaagaaagartcagataatctggatcatcttcaaaactagtcctgtaaaaattggaaattttcatattctttatgagtctcagttttcccaaaatgatgggattggaatattaaggaatttatactgatactttacacttttattttttattccaatgagcttttccttttaactgattttgctagacattagaatatataatattgggatcaggagttagtgctctgcatctttctctgtggctgtgtcctcacaatgccaacataaccaattaattctatcaattctgttatttgacatcaaaaaaacctgtttattttcaggttgtgtaaacacaattcaaaggaatagttaggattacactagaatagttgatc

SEQ ID NO: 663785 - DNA, 587 bp, Homo sapiens
ccttgcttacttttttgatcttcttctctcttctaacttgtggaacccagcttccatctgtctacaaatgtgctcagggtttttcttattaaaataatccacttctcaaggcccctggtctcattttctgtttaccacccactgattgatatttgagcttggactcartgtggggaagggcacctcagagagatggaaggtcaaggacagaacctggaggcaagatttaaaagatcccttttgtcagaattgagtgcaatggtaggactttctgttttaaagaaaatcgaaagcaaagcaaaagtctgacttgctacacagagaaaactgagcaggcaggatgaccctgtcctttctctgacatctcccatcccaagatttattcattgtccaaatgatgattagaaaactcacctttagactccatgaatgtgcgcactggtttcaacaacccttgggtggctcccttttaggtggacccttggtttatctacagacacaagtcaccaactgcaaacccctctggtttattgattttactgtatacttcttgttaatagctttactttgcctaacagatatggttg

SEQ ID NO: 663786 - DNA, 594 bp, Homo sapiens
acatttgcagggctggtgtcaccgtgcactgagggttatgagcctgggtatgaggctctcttcctggtgctcaggactttcttcccctttctcatggaagaagttgtaaactgacatagcaaaacactcctgtaaccaactctccagcactctctttcctagggtttcttccatgtagcagggctgacgggggctaaactttagttttgagcttaaggggagataaggagtttttaaaggaggatcggttttaatagtcaaactgcctgggtccataccccaattctgtcccttaatagctatgcgagcttgggaaagctggttatcccctgattttttggtgaatttcctaatctgtagagtgatcaataattgttgctagattttcaaatgttttataggggtaaaaattagatcatgcctatgaagcattcagcacagtgtctggcatctagaaagtgcttcttccttatacctacttggctcacaccttcaccaaataattatttctttagatcttcccttctcagtgaagctttccctgagtatyctacttaatacctcaaacccttcccacctcatgatccaattggc

SEQ ID NO: 663787 - DNA, 559 bp, Homo sapiens
aaaacaatccttatcactgcagacagaatgtcagcatcaaaatgagtctgcacagacaaactttataaaaatcactcttatattttattgttttctcttacatgtttcttcccaccatttattgcccttaaatgttcaacctcttctcttttgacttgtcacttcttcacaaatttatcatcctttgttaaaatggcatagatgcccctgtgtytactcattctttgggtctctacttcatttctatgaagacttccatgcatgtaaaaattagaatgttattatcaaataaaattgttatacctttctcttgttaattttttgtcagtctaattctcaggttctagcccgagaacttaaaagggtagaggaaaggttttttttttccctctcttacatataaccatctcaaattcccccctctcgttttctccatgggcttctaacttgcctgagctattcgttaccttgtattttttgatcctgtgctcttatccttttatcaatgaggacacacttccaatacatgtttgtttatatgttaacattatacttgtag

SEQ ID NO: 663788 - DNA, 612 bp, Homo sapiens
gtcttagccttattttacctaccccctattcaagatggagttgttctagttaaaatgcctctgacaatgggatatacttawagtaaaaaatttattcattgttaatatgaaattcagatttcacaaatgtattcaacttcatcttgctaccctacattcaaatcacatcttaaataatatgaagcagctgaccatgggaagacctggagaaaatgctgtatgggcaggagattggtgtgtgtaaaatgccctaagtgagaaacaaggaggaaaagatgtttgtagatagggttgggagtttgtccagatcagactgcatagggccttgcaaaccatgatgtggattgtgaatattattttaagtgtgtggaaagccactgaagaagcatttgggaaaaaagtgtcatgatctgctttttgttttaaaaatagcacttcgggtttcaggatcgagaacatcctggaaataagagcggaagcagaaaagccagcagagcaggccatcacaatagacgtggcgtgagatggtgagtgctgaagggggatgggagttgcagatgtgatgagaagtacttcaatttggtatatatttgaaaaatagagccaaaaagt

SEQ ID NO: 663789 - DNA, 612 bp, Homo sapiens
gtcttagccttattttacctaccccctattcaagatggagttgttctagttaaaatgcctctgacaatgggatatacttatagtaaaaaatttattcattgttaatatgaaattcagatttcacaaatgtattcaacttcatcttgctaccctacattcaaatcacatcttaaataatatgaagcagctgaccatgggaagacctggagaaaatgctgtatgggcaggagattggtgtgtgtaaaatgccctaagtgagaaacaaggaggaaaagatgtttgtagatagggttgggagtttgtccagatcagactgcatagggccttgcaaaccatgatgtggattgtgaatattattttaagtgtgtggaaagccactgargaagcatttgggaaaaaagtgtcatgatctgctttttgttttaaaaatagcacttcgggtttcaggatcgagaacatcctggaaataagagcggaagcagaaaagccagcagagcaggccatcacaatagacgtggcgtgagatggtgagtgctgaagggggatgggagttgcagatgtgatgagaagtacttcaatttggtatatatttgaaaaatagagccaaaaagt

SEQ ID NO: 663790 - DNA, 612 bp, Homo sapiens
gtcttagccttattttacctaccccctattcaagatggagttgttctagttaaaatgcctctgacaatgggatatacttatagtaaaaaatttattcattgttaatatgaaattcagatttcacaaatgtattcaacttcatcttgctaccctacattcaaatcacatcttaaataatatgaagcagctgaccatgggaagacctggagaaaatgctgtatgggcaggagattggtgtgtgtaaaatgccctaagtgagaaacaaggaggaaaagatgtttgtagatagggttgggagtttgtccagatcagactgcatagggccttgcaaaccatgatgtggattgtgaatattattttaagtgtgtggaaagccactgaagaagcatttgggaaaaaagtgtcatgatctgctttttgttttaaaaatagcacttcgggtttcaggatcgagaacatcctggaartaagagcggaagcagaaaagccagcagagcaggccatcacaatagacgtggcgtgagatggtgagtgctgaagggggatgggagttgcagatgtgatgagaagtacttcaatttggtatatatttgaaaaatagagccaaaaagt

SEQ ID NO: 663791 - DNA, 525 bp, Homo sapiens
cagtaactatgtatcagaatactatggtttggatttgcaaagaagttcagagtgctttctagccctgttgcaggtagcaaattgaacaaaatgagtattatttatattcacctggcataatttgttattcgactttttctgatggcagtcatggaactggagcagttaaacctcattctccagggtactggtgctactgccaagagcggaaractttcatcttccaaaacctcaatcagccagtttctcatctgcatcccataaatcatcaagaaagaacaagctcattatctcagcaccagggacaaaagtcttttacatgacactgaacttctgactactgcaaaacatggcagcttgccatcatatgtttaacaggtgtgttggtccctttaacagactgggccagaagtttgaggatatggtctgaaatttcaattttgttacgtgttgtgacttgcactgggcccaaatccagaggtaattgggcctagtggtctgaagagttacttgggtgttctgtaa

SEQ ID NO: 663792 - DNA, 542 bp, Homo sapiens
taggcacagataagtctgcatattttaggtgttgttgcaaaaacatgtgcccccttttgctgttttccccaggacctggagcayacagtccccgagtatagagctttcctggaggtcccctccttgcgtcaccagtcttgtccccttccctttacctttccttcctccctctttgtgtttctctcttggtttttgctttctttccttctttcattgaatcacctttcttttatgtctaagattgttgggcgcgtgttttcgggtttataggcctcttttattttattttaaatagtatttaatttaaaaattcataatcataacaacagtgtaaataccagctgccttttattgaccatatttctaagggctttctgtatatttaatcaccaccacagaactactgatcactgctctttcctccatttgacagatgaggaaatgaaagttagggagttgaataactgatttacagttttttgttttgttttgtttttgagatagagtcttgctgtgtcacccaggctgaagtacagtggtgc

SEQ ID NO: 663793 - DNA, 542 bp, Homo sapiens
taggcacagataagtctgcatattttaggtgttgttgcaaaaacatgtgcccccttttgctgttttccccaggacctggagcatacagtcccygagtatagagctttcctggaggtcccctccttgcgtcaccagtcttgtccccttccctttacctttccttcctccctctttgtgtttctctcttggtttttgctttctttccttctttcattgaatcacctttcttttatgtctaagattgttgggcgcgtgttttcgggtttataggcctcttttattttattttaaatagtatttaatttaaaaattcataatcataacaacagtgtaaataccagctgccttttattgaccatatttctaagggctttctgtatatttaatcaccaccacagaactactgatcactgctctttcctccatttgacagatgaggaaatgaaagttagggagttgaataactgatttacagttttttgttttgttttgtttttgagatagagtcttgctgtgtcacccaggctgaagtacagtggtgc

SEQ ID NO: 663794 - DNA, 542 bp, Homo sapiens
taggcacagataagtctgcatattttaggtgttgttgcaaaaacatgtgcccccttttgctgttttccccaggacctggagcatacagtccccgagtatagagctttcctggaggtcccctccttgcgtcaccagtcttgtccccttccctttacctttccttcctccctctttgtgtttctctcttggtttttgctttctttccttctttcattgaatcacctttcttttatgtctaagattgttgggcgcgtgttttcgggtttataggcctcttttattttattttaaatagtatttaatttaaaaattcataatcataacaacartgtaaataccagctgccttttattgaccatatttctaagggctttctgtatatttaatcaccaccacagaactactgatcactgctctttcctccatttgacagatgaggaaatgaaagttagggagttgaataactgatttacagttttttgttttgttttgtttttgagatagagtcttgctgtgtcacccaggctgaagtacagtggtgc

SEQ ID NO: 663795 - DNA, 542 bp, Homo sapiens
taggcacagataagtctgcatattttaggtgttgttgcaaaaacatgtgcccccttttgctgttttccccaggacctggagcatacagtccccgagtatagagctttcctggaggtcccctccttgcgtcaccagtcttgtccccttccctttacctttccttcctccctctttgtgtttctctcttggtttttgctttctttccttctttcattgaatcacctttcttttatgtctaagattgttgggcgcgtgttttcgggtttataggcctcttttattttattttaaatagtatttaatttaaaaattcataatcataacaacagtgtaaataccagctgccttttattgaccatatttctaagggctttctgtatatttaatcaccaccacagaactactgatcactgctctttcctccatttgacagatgaggaaatgaaagttagggagttgaataactkatttacagttttttgttttgttttgtttttgagatagagtcttgctgtgtcacccaggctgaagtacagtggtgc

SEQ ID NO: 663796 - DNA, 586 bp, Homo sapiens
gtaagcaaatgaacatatccatcaccttccatatatctttattttagtaagaacacctaaaatctgctctcctagcaaatttcaatttacaacgtactattgactacagtcctcatgttgtacattagatctctagacctagtcatcctatgtaactgcaagtttgtaccctttgacctacatctcccaattttctctccctcctcacctctggtgaccactattctattgtttctatgtgtttaacttttttttttgattccacatataagtgagatcatgcgatatttttctttctgtgtttggcttatttcacttagtgtatgctcgccacgttcattgatgttgttgcaaatggcaagatcttcttatgtctcaaggctaaattgtgttccatgtataagtaaaaaaaaaatayatgtatacacacaaatatatatacacatgtatacaaatatatataaatatatctatacaaacatagtttatcttccttagttctatgccgttattttaaattttcttttttgctttttttcttataataacatttatcatattttcatttgttgttctttaaattaat

SEQ ID NO: 663797 - DNA, 586 bp, Homo sapiens
gtaagcaaatgaacatatccatcaccttccatatatctttattttagtaagaacacctaaaatctgctctcctagcaaatttcaatttacaacgtactattgactacagtcctcatgttgtacattagatctctagacctagtcatcctatgtaactgcaagtttgtaccctttgacctacatctcccaattttctctccctcctcacctctggtgaccactattctattgtttctatgtgtttaacttttttttttgattccacatataagtgagatcatgcgatatttttctttctgtgtttggcttatttcacttagtgtatgctcgccacgttcattgatgttgttgcaaatggcaagatcttcttatgtctcaaggctaaattgtgttccatgtataagtaaaaaaaaaatatatgtatacacacaaatatatatacacatrtatacaaatatatataaatatatctatacaaacatagtttatcttccttagttctatgccgttattttaaattttcttttttgctttttttcttataataacatttatcatattttcatttgttgttctttaaattaat

SEQ ID NO: 663798 - DNA, 460 bp, Homo sapiens
tctttttacatcattaaccaataaaacttattcttctgttttctagtatctaaagttacagatggaaaattagtgttagtttctgtattagttttgtagggctgccatagtaaagtaccacagactgggtggcttatgtaatgaaaatttatcttttcacagtcctggaggctgtagaagtctgagatcaaggtgtaggcagggttggtttctcctgagtcctctctccttggtttgcagatggccctcttctgcragaggtcttcacatgcttttccctctgtgtgtgtctgtgtccttagttactgatacggttaggctttgtgtccccacccaaatcttatcttgaattacaatccccacaatccccatgtgtcaagggagagagaccaggtgaaggtaactggatcatggggttggtttcccccatgctcttctcatgatagtgagttctcacaag

SEQ ID NO: 663799 - DNA, 317 bp, Homo sapiens
attttaaaatggagtgtcaaggggtcctggatcaacagstctgacaggagctcagtcttctatttattttcagaaaaggaataaaacacattaggctaaggaattaaatctccgtcccacccccaccttctctcccctcttttcctttctccctgccctgaccctccatctgaatgtctttgtcctggctatgcagagagcatgagagagacttgaaagcagtgtggtcaagtgttgtgttcagcacaagctctgcttggttggcaaagcgcttcttttctccttgtcaatatttctgtaagtgaagagacaggcac

SEQ ID NO: 663800 - DNA, 546 bp, Homo sapiens
ttgtagtatagtttgaagtcagggagtgtgatgcctgcatctttgttcttttctgccatggaattttcttaaactcaagcttggagagagaaacacttttgtctttgagtcaggtaactgttagaatgtgagcccattgatccaggcagccatatttacyacagtgtggaggaaatctgtttacagtaaaagaaaatcaaagctagtattcagaaagaagcacagacaagagatctggcagcgctttgagtgtctggtctggtcatcccagccacacctttgtctgtgcaggacatatgagcccataatttgtatttgtctgaggtaatttgtgtagggacttctgacaagcaatcaaggagtcttgctaacacaaacgccaattcacaccaaagagtcagtaggaacaaggttgccatatactgcctatgaaatcagcatagagcattgacactttgattaggatagagaaagtgaaacacaagcccaaagttaaagacagacaaaactatgggcattttacaaaaataacaaaggcctggaaat

SEQ ID NO: 663801 - DNA, 546 bp, Homo sapiens
ttgtagtatagtttgaagtcagggagtgtgatgcctgcatctttgttcttttctgccatggaattttcttaaactcaagcttggagagagaaacacttttgtctttgagtcaggtaactgttagaatgtgagcccattgatccaggcagccatatttaccacagtgtggaggaaatctgtttacagtaaaagaaaatcaaagctagtattcagaaagaagcacagacaagagatctggcagcrctttgagtgtctggtctggtcatcccagccacacctttgtctgtgcaggacatatgagcccataatttgtatttgtctgaggtaatttgtgtagggacttctgacaagcaatcaaggagtcttgctaacacaaacgccaattcacaccaaagagtcagtaggaacaaggttgccatatactgcctatgaaatcagcatagagcattgacactttgattaggatagagaaagtgaaacacaagcccaaagttaaagacagacaaaactatgggcattttacaaaaataacaaaggcctggaaat

SEQ ID NO: 663802 - DNA, 550 bp, Homo sapiens
ccctaactgaatgcagcaaacctaaagctcctggagagctgtgtaggacttcttagggggaagagatacattrcagttttttttttttccctctgtagcctgaggcactttggagcatacaaacttcccgcactgggtcccgctctgacatatgactttaggtgtgtgaagcgggtatacctcagtctgaatgaaacagctcactatgctcaagataggtcctctcaacagtaacctcctaggagttagctacactcttctaaggactttcacgctgtcactcagttacttactcttccagttgccgtttattaagctcttactacataccaaccaaacactaaactgtaatcacaatgaagccattgatggtgcccccaaggagctcactttctagagaggctgacacccttgattaatgacacattagagagagagagagagagagagaaaacacactgtgggatggtaaaatatagctattatttattgagaggttcaggcaaccttggaaatgcatttcttagaccttccttcaaaaaagacccca

SEQ ID NO: 663803 - DNA, 550 bp, Homo sapiens
ccctaactgaatgcagcaaacctaaagctcctggagagctgtgtaggacttcttagggggaagagatacattacagttttttttttttccctctgtagcctgaggcactttggagcatacaaacttcccgcactgggtccmgctctgacatatgactttaggtgtgtgaagcgggtatacctcagtctgaatgaaacagctcactatgctcaagataggtcctctcaacagtaacctcctaggagttagctacactcttctaaggactttcacgctgtcactcagttacttactcttccagttgccgtttattaagctcttactacataccaaccaaacactaaactgtaatcacaatgaagccattgatggtgcccccaaggagctcactttctagagaggctgacacccttgattaatgacacattagagagagagagagagagagagaaaacacactgtgggatggtaaaatatagctattatttattgagaggttcaggcaaccttggaaatgcatttcttagaccttccttcaaaaaagacccca

SEQ ID NO: 663804 - DNA, 641 bp, Homo sapiens
ctaagtgccagagggttgttggtggatgacaggtctctaaatctagaccatccacaccctaatctgtccagagtattttgaagcttctgtgaaatgtctgagacatgggaarcaggactgagatttatgccaactccattataccaagtgccttcctttactgttatgtgttcatttgtgaataggaagatagcttttgagtgactcttctctccacagctccctattctgggggcaggatgagagtatctgtttggctttcacttctttaagtaaaacagcctaagtggcaaaaaaaaaaaaaaaaaaaaaaagaaattgttgaacaagttcggggatttttttttttttggtcttttttgattgtatttaatagttttgaagagtgctacaaaataacgtggctgttgaaagaaatgctttttgcccaatttctttctggccacggttttgagaaaagaaaactataaatagctgacaataaaagaaaattgctgctgtgatctgagaagaaagaaagggaaatacaaaaggaccgccctgagaggttttcaaataaaaattatggttcccctccctgggcctaagattgctacttcttggaagacagaaagggtggggatgtgctggatgttttgtct

SEQ ID NO: 663805 - DNA, 562 bp, Homo sapiens
gagtgactcttctctccacagctccctattctgggggcaggatgagagtatctgtttggctttcacttctttaagtaaaacagcctaagtggcaaaaaaaaaaaaaaaaaaaaaaagaaattgttgaacaagttcggggatttttttttttttggkcttttttgattgtatttaatagttttgaagagtgctacaaaataacgtggctgttgaaagaaatgctttttgcccaatttctttctggccacggttttgagaaaagaaaactataaatagctgacaataaaagaaaattgctgctgtgatctgagaagaaagaaagggaaatacaaaaggaccgccctgagaggttttcaaataaaaattatggttcccctccctgggcctaagattgctacttcttggaagacagaaagggtggggatgtgctggatgttttgtctctcttgtttattttcaaaaatgttttgacttagttgctttattctacaaacctcagagctcttcacatctattaaacattttaaatgagctgaattttctctaaacataggtaatttac

SEQ ID NO: 663806 - DNA, 562 bp, Homo sapiens
gagtgactcttctctccacagctccctattctgggggcaggatgagagtatctgtttggctttcacttctttaagtaaaacagcctaagtggcaaaaaaaaaaaaaaaaaaaaaaagaaattgttgaacaagttcggggatttttttttttttggtcttttttgattgtatttaatagttttgaagagtgctacaaaataaygtggctgttgaaagaaatgctttttgcccaatttctttctggccacggttttgagaaaagaaaactataaatagctgacaataaaagaaaattgctgctgtgatctgagaagaaagaaagggaaatacaaaaggaccgccctgagaggttttcaaataaaaattatggttcccctccctgggcctaagattgctacttcttggaagacagaaagggtggggatgtgctggatgttttgtctctcttgtttattttcaaaaatgttttgacttagttgctttattctacaaacctcagagctcttcacatctattaaacattttaaatgagctgaattttctctaaacataggtaatttac

SEQ ID NO: 663807 - DNA, 608 bp, Homo sapiens
gttttctattttgctattgtaaccaattaccacagatgtagtgttttaaaacaacacagatgtattcttgtgtagttctggaggtcagaagtccccaaatcaaggttatcagagggctgtactcctccaggcggctctagggagaatccatttcctgccttttctggcttctgaaggctgcctgctttccttgactcgtggtttccttcctctatcttcaaagccagcggtgtagcatcttccagtctttctgtgtctctgacccacccgccttcctcttataaggacccttgggattacattgggtccacctgataatatatgagaattgccccatctcasgattcttaatgaaatcatatctgcaaagtttcttttgccatataaggtaatatattcatcagtttggggcattagggcatggacatcttggggcggggggggggtgcatttttcagctaccacagtacccaagtgttctcctgagagctggcttctgcttccgctctcctctccctaatttctcaattacactatctggatctatccacagaaaatgtggaatggaagcatagctcagtgggttctggattcaactgctagtgcaa

SEQ ID NO: 663808 - DNA, 640 bp, Homo sapiens
ttagggcatggacatcttggggcggggggggggygcatttttcagctaccacagtacccaagtgttctcctgagagctggcttctgcttccgctctcctctccctaatttctcaattacactatctggatctatccacagaaaatgtggaatggaagcatagctcagtgggttctggattcaactgctagtgcaacaatggacaactgaaactttcagagcctcagcttccttatctgtaaggtagaaataataaaggtgattattcataggactgtggtgaggagcgaatgaggtgccatatatagtatatatttttttggttcaggagtcttgcaatgtagaatgtgttcaattaatgttggttattatttttgttataattattaggaagcagggaaaggatatagacagagaagaggaaggtctccccaaaacctaaactgtacttagaactcagctttatcttggtttggtttcataaaagccaattcgcactaactccttccctcatcatcctaggtatagaaagtcaacttcttcaggttgtcatcaccccatccctgcactcccagtccagcttcggggacctacaaaagaaagggtctctttaaggctttcagtgttatgggaattttaat

SEQ ID NO: 663809 - DNA, 629 bp, Homo sapiens
acagttttatctgtagcagagaattttgatgccctcttttacgtggatatctgagaatgccttaaaaatattaactgatagttctcctagcggtctaagatgatagtaaaagttatcattgggctgggtgtggtggctcatacctgtaatgccagcacttttggaggctgaggtgggcagattgcttgatcccaggagttccagaccagcctgggaaacctggtgaaaccccatctctacaaaaagtacaaaagattagccaagtatagtggcatgtgcctgtagccccagctacgtgggaggctgagacagaaggattacctgggctggggatgttaaggctgcagtgagccctgattgtgccactgcagtccagcttaggcgacaaagtgagaccctgtctcaaaaaacaaaaaacaaaaaacaaaacaaaacaaaaacacacacaaaaaaacaaacaaaaaaattggttgagcatctatggccaagtkcttttaatgcattttctctactcctccgccaagctttataagaggtggattaggactcttacagctaaggaaagcagcattcaagatggttaaataatttgtccaaagtcacatgatactaagctatagaactgggat

SEQ ID NO: 663810 - DNA, 495 bp, Homo sapiens
cagaacactgaggtatgtatggcgacgttttcaaagcttttccaatttgtttttctttcagagcaatgtataaagccacactatgaattcagacagagctaaacatatagtctagcctctcttgcttcctcactccttatccttcatgtttcaacttgccattttcactttctggtgccatgctcattctcaatccattttcttttgtgtttgagtgtcaaataccaacattgctgctacttctgggtctttcctcagatgcattttatcacccttagggcaatttcagatgccccataacattagccaatattcatattttattstgttttaaacatagaaaataattcatgttattagataaccatttaattactcttcagcagaacacaggctgaacaataatgaaaatgatttaacagcttctctctcttctgtgattttaaaaccccattattttacccttttctttctgttatttccccttcaagtttc

SEQ ID NO: 663811 - DNA, 592 bp, Homo sapiens
ccttgtggaaaatttccatggaacaaactctcaacttcattgaaataatagaattcgtggtcctatctgctgtgcctttaaaatcaggtgtccccaccagctggtagacaaagaagaacctcactgagaatgaaaaatttcataaagctttcagaagttgctgacccttgatttaatcacgaatatcaagcgtttagggagaatagagagaaaagatctttgaactagtgcgaggtattgagttaaaactccaggaaaaagtggtgaacactttgattaacagaacctggagcctcattctctaattgagatgtaccttttggaatgggagaaaagcactgaaccacaaatgtgatgaatgtggtaggcctaattctctagttctttcttttgctctcttttcctttttgcctttctactttttccttcttgttccaattttctccttattatttcccacaactttttagacttgtgttcatctctcattcatatgyatatgaattctttgagaatgaggttggaagaagacttctgcatcaaaaagcaaagtttttgtcggccagtttaagtagtttgtacgactagcagc

SEQ ID NO: 663812 - DNA, 576 bp, Homo sapiens
tatgtgagctccatggattatgctgccctcttaaggaagataaagtgacaggttatacagtacttatctatatcacctgtcagagactctgtatctgggggcagagagaagatcaggagttttagctggttatttgtgattctctttcacarctacctgtgaaactaccttgtgtatctctgacattggcaaaatatagttttagttctcctaaagaaagtgctggaagtttattccctatgaacttctagactctatcagatcaatattctgagtgggaagtctatcctagcaacttcttttctgcaatgtgacaatatcttgttagaattttttttttttaacagccagtgtaggagcctgtatagtgtgatgtccaactggtggcagataatttgtcccacatagagtgtgaccactcttctttgttttccaagtatgtggcagagtttttaaaatttcactgagtcagtagtcagaattacaatagactttgtgaatgtagaagaggcaaagccacagatctgggggggcttgtaagcgaggcggtattcttcaaaacttaccaaggtggaa

SEQ ID NO: 663813 - DNA, 570 bp, Homo sapiens
ggtcaaaaagtgagaagttgtaaagccaacacttgaattcaggtgttctgactcttcccctagtagctgctttaagatgaatccatttgggaaagaaatttagctgggagaactaaaaatgtatcataaataaacatgatgtcatgatacatgaaggttcagatctggaaatgtttcttagtctgcagattaaaaaatgcttttgatgagtcgacaacattcagtgctgtgaactgttcttactccatcaagccataggtacagagatcatcattctgtatttagtttggaatgatgccccagaatcagagttgctaagtagcactaatgatttcacagatttcaggaagaataggggacattgaccatgacacataacgattcttattacatggttgcagaatagaatacttgttattaccaattaaaaagtggggtgaacaaaatctaaattcatgracatgtagggttggagcagagtctccttagccctaatggtagctttatgtgaatcagaaaatgtgcttttcttccaggtggacacaaccttaagccagggtacacaggtta

SEQ ID NO: 663814 - DNA, 585 bp, Homo sapiens
tgctctttggtgtggccagagggagaggaatttaattgctttggcttatgatgggccatcttctctttgctcttgatgttttgccagaggygctcagttgatcttccatgatctcgtctctgtacacagttggtcctccaactcctacttctcttcatagtatatctttgtgtttccatcatttagcacataataattatttgctgtacttcgaggtcattgaaggtaggaagtatatatatatattgctatatatattcatatatatgtacacacacatatattagtctagatgctatgggctatgctgggcattggagatagtttcaaggcactcaaaatgtatttcctgaatgaatgcaccagtgaagggattaatgggttctactcagttgctgttgaataaagaggacctagcaatatacatttccatgttataggatattggaagataaaggattgaatagatatttatatatgtgcacttctttgaaacatggccagaagtcaatatcttctcaggccaaatggcaatacttaagaactggataactttcaaatttgtaggtgctggaagatactaag

SEQ ID NO: 663815 - DNA, 566 bp, Homo sapiens
gggtggagcaggctctgggaaattagctgaagtttcatggaggacatgctatctgcagatggtgaagctgcaaaagtggaattgtacattatttctctaaccttgagatgacctttgattgcataagggcttagtaatgaatctttctccttctctgtgctctctctgttcagcaaacaattacaattagctgaaatgaatcaaagtaaattgtgtagggttaaaagtaaatgctaccctttgtcaacataggttggctcctggaagctgcagagagcactccattttatagtttttgtgattaaagttttctccagcagtccctttactggaaataggtaarcaaagcaagtgggctagcatgcaacatcacagatcctagtatttcattcttccctgcttctggcggacttagcaagatgtcatctgcccagcgcacaaggaaaataaaattgcttgtatgaggccctggttacagtgaagaagagaggaagaaggaggaattcaatctttggcttagaaaaatctaattctctcaaggtatattgaagtttgcaaggcagtta

SEQ ID NO: 663816 - DNA, 578 bp, Homo sapiens
tcactgacatcatcccagaaatgttgttagaaacgttgacccctgagcccaccgaagacttaactgaatcagaacctgaattttaaaatttgaaaaaaacagttctaatgggcaccttccaattaatgaagcctagacagaatttttgactttgttctccatccagttccccaccgggtgtcctcccttccttttccccatctcccgctgtcccagccccatttctttctttccttcactcctctcatacaatctrttgaaaagtcttatgatatctacctgcaacgtacattgcaaatgcatccatttgtatcattcttcatgataaccactttctatcactgtatggtattcactatatatggtcactcatcatgaattaaagttatatttctacaattgtctttcgtcttcagtgcctcccttcctctcgtcccaactaaaacgtaaaatccttcagagcaggatcttgtctgccttgttcacctctgtatctctagtaaatagaatgataaatggtgtggagaaaatggccaaaaaacattaattgaattactaaatgaattgtgagggttttc

SEQ ID NO: 663817 - DNA, 578 bp, Homo sapiens
tcactgacatcatcccagaaatgttgttagaaacgttgacccctgagcccaccgaagacttaactgaatcagaacctgaattttaaaatttgaaaaaaacagttctaatgggcaccttccaattaatgaagcctagacagaatttttgactttgttctccatccagttccccaccgggtgtcctcccttccttttccccatctcccgctgtcccagccccatttctttctttccttcactcctctcatacaatctattgaaaagtcttatgatatctacctgcaaygtacattgcaaatgcatccatttgtatcattcttcatgataaccactttctatcactgtatggtattcactatatatggtcactcatcatgaattaaagttatatttctacaattgtctttcgtcttcagtgcctcccttcctctcgtcccaactaaaacgtaaaatccttcagagcaggatcttgtctgccttgttcacctctgtatctctagtaaatagaatgataaatggtgtggagaaaatggccaaaaaacattaattgaattactaaatgaattgtgagggttttc

SEQ ID NO: 663818 - DNA, 569 bp, Homo sapiens
taagtttgggtttcagtttcctcatctataaaaggaagacattgcactacatgcaggctgtttaccatgtgtcatcctgaccaaaggtattctatggtaaatgttttacctacccatctcccccatttttcaaaacttttctgacatacgtcaatgagtaggtcatttgtgctcatgtgttattgctatcaggggtcatgttagcagctttgaatcaattataatttttaattgaagctgaatgtatttaattatataattttgagctgtccagttttaattccaccaaaattacctcaagaaactgggacactatgaaagatgactgacaaagagaaaaaatagcatgactaaagcttttatatgcacgaactcatatgttatgtcctatttttgttatgtgtgctaggggtgagattatttattaatcttatcaacaaaataagcttagtgtagcccacrtacacaaagattactgatcatctagcctacagtttaaaaaacaataaattttgaagcctttagactgaagattctctaggatctctcttttgaaacacataaacatg

SEQ ID NO: 663819 - DNA, 561 bp, Homo sapiens
tcttttggtgcttaaccatgagagccttgtggagttcctggaatgtgggatcctggagtgttggacctctaagaatgtagcccctaggaatttcccactctcattctagtctaaactcagactccgggaattcatcaataatagcatttaaatgttctgcaaatttgtagcttcagcagcttctcttctaggtaagctcatctgtgactctcttaatttacctgtctctcgagatttcaggatggaatttgctttatcaattttcagatgggtccaaatgttgattttcatgttgttttgattttcttgttgtaaggatggaagtaatggcttccagggtctttacatgttgatttgcaatcagaagttgattgaatctattctgatttaatcatggattgaatctmctaaggtcataaaatttttagatatttgtgataaatataatgatttatttcatcttttctaaactctttagaatttcaaaaatgatacatgctaattttaaaagggtaatacagaaatatttagaacaaaatagtgaaaattgcttttaccctc

SEQ ID NO: 663820 - DNA, 537 bp, Homo sapiens
  misc_feature 232, 233, 234, 235, 236, 237, 238, 239, 240, 241, 242, 243,244, 245, 246, 247, 248, 249, 250, 251, 252, 253, 254, 255,256: n = A,T,C or G
gtaaaataaaatattagagagagaccacattcacataacttctatytcactacgttgttataattattctattttgttattattgtcattagtctcttactgtgactaatttataaattaagctttataataggtatgtatgtatgtataaggaaaaaaacatagtatacactatatagggtttggtacaatctgtagttttaggcatccaccagaggtcttaaaacatatnnnnnnnnnnnnnnnnnnnnnnnnngtagttgttaaacaaaacaaaacaaacaaaaaaccttgaccatagttaaagttacacagttaattattgattcaattcaaacatttaacatgttagcttttctcttctaattatggcaggttctgtgtctgcgaagagcttagaatacacagccatggcaatcaaagtaatctgatcttggcaatgcttagaagagtctggaaataagcttacaaagatgtgaaaaagtcattttggcataatacaggcaggaagcactgtgatggataacgaaaatgaga

SEQ ID NO: 663821 - DNA, 537 bp, Homo sapiens
  misc_feature 232, 233, 234, 235, 236, 237, 238, 239, 240, 241, 242, 243,244, 245, 246, 247, 248, 249, 250, 251, 252, 253, 254, 255,256: n = A,T,C or G
gtaaaataaaatattagagagagaccacattcacataacttctatttcactacgttgttataattattctattttgttattattgtcattagtctcttactgtgactaatttataaattaagctttataataggtatgtatgtatgtataaggaaaaaaacatagtatacactatatagggtttggtacaatctgtagttttaggcatccaccagaggtcttaaaacatatnnnnnnnnnnnnnnnnnnnnnnnnngtagttgttaaacaaaacaaaacaaacaaaaaaccttgaccatagttaaagttacacagttaattattgattcaattcaaacatttaacatgttagcttttctcttctaattatggcaggttctgtgtctgcgaagagcttagaatacacagccatggcartcaaagtaatctgatcttggcaatgcttagaagagtctggaaataagcttacaaagatgtgaaaaagtcattttggcataatacaggcaggaagcactgtgatggataacgaaaatgaga

SEQ ID NO: 663822 - DNA, 477 bp, Homo sapiens
ggcctggctttgtaccatcattttcctcagccatgggccaaagccaccctgaaaaggtatgacctcagctcaaaagctgagaaagacgtgaaggaggtaacagctagataccataggctagctacactgctcacaggtgggcagcsagtcctcccttgaagggattccctgtgcttgttaggactgagcaaagcatcacactggagaccaggggccagggtcaggactggagaaaggccttgtgtgtctcgctgagggagtttagatcttattccataggaagtggaggccatggttttaagtaaggacctaaaaggagcaaatctgcattctaagtgtcttctccagcattcaaatgaagcctgaatgcagctattggtgaggggctgttacagtaatccaatgaaaacatgaacagagaaaatggcataggaatggggagcacgagttcattggagccactctaggaaggctggc

SEQ ID NO: 663823 - DNA, 477 bp, Homo sapiens
ggcctggctttgtaccatcattttcctcagccatgggccaaagccaccctgaaaaggtatgacctcagctcaaaagctgagaaagacgtgaaggaggtaacagctagataccataggctagctacactgctcacaggtgggcagcgagtcctcccttgaagggattccctgtgcttgttaggactgagcaaagcatcacactggagaccaggggccagggtcaggactggagaaaggccttgtgtstctcgctgagggagtttagatcttattccataggaagtggaggccatggttttaagtaaggacctaaaaggagcaaatctgcattctaagtgtcttctccagcattcaaatgaagcctgaatgcagctattggtgaggggctgttacagtaatccaatgaaaacatgaacagagaaaatggcataggaatggggagcacgagttcattggagccactctaggaaggctggc

SEQ ID NO: 663824 - DNA, 591 bp, Homo sapiens
tggtagtcaaggagttgtttgagggaagaaatatccttyatttaaaataattgcaaacttctcaagggctgaaaaaaatattagtgggaagaatcaaagctgaagcaatactagctcactgatattgaaaacactgatttcactatttcacattcactttaatgcccttggggagcttctatataaaagagcctaagtcaaagtgctctttaaaataagaccaaaacttgagaaacaccgtaagattcaatttttcctaattttttaaaggcagaattagagaaaaaaaattttcataaacactagagaagagtgccaaagttttatggtgtagttttcttaaaaagcgtttaagttgcctaaggcttatataaagattatcaaaactctattcaagtttgtttctctgcataatagtgctgagatgcttctctggtaataaacttgctttaagatccttgggatcaatacatagttgaaatgttgggaatatttcaaagcatgataatcaaaagaaagacactgactagaagaaacattaaataaattaattgaatgtatgcagaaaaagtaactgagaagagattatag

SEQ ID NO: 663825 - DNA, 414 bp, Homo sapiens
agaagtgatccagggtaagagaggaagctaatgtactggtgcattactgacttagccaccactgtgtatcatcagttctgaatactgctgggacctgttgaggagccttgagaaaagtatctcagaattatgccccctagcggtaagaaagggaaacatttatttgtcaccctccctcatagataaaggattgttccatcggacattaacattttggtacttcctagttgcatgtgtgaaagacctgaagttcctacatgaatatgaagttcttacattataatgtcagagaaaaaccagggcaagaagaaagaggtgcggagtatgtgcttagcatgagaaactcttargttctactcactcaaaactagttgccacatctctgctagtaatgagatgaggccaagaagattt

SEQ ID NO: 663826 - DNA, 627 bp, Homo sapiens
atataaggaattgattaggtatccttctacaatcattcgataaattgggctcattccctgaagattcttatcagaataaggtttcttgaaaccatctgtgaggcttgcttctaggcttagcttgctgcagaactggtcatatacaaaatctgtttgttcatcttgtctagataacatttctgttctatgatctctccctgaaataattacaacaatagtagttgaatgtaaatttgtccataatcagcgctaatctggctgtactttgtttcctaaattgagtgattattagatgcttttccccaaatttctactttcctgagccactcaaatacagataaatggaaaatagtttgtatacacacacatgcacacacamacacacaaaaaataataatttaaaaatgtaaaatacaacttttattatcattttactgtcatatgtgcatgagatacaaacttctacacctattttaaagtctgttgaatatttggtaatattaggggttaggtctaaatttctgaagctcagtccattgaaatatttatgtagctgtcagctctacatgtttttaactagaactaagtggatccttttgtatatgttttcttaagaaatgttaggtt

SEQ ID NO: 663827 - DNA, 594 bp, Homo sapiens
tacatcaattcaagacaacaaacttcaaatacaccttaagtgtttcctggtttctattaattttctctgtttaacacactcttgagtttccagtgttgatgttcactcttttcaaacttccatgtttcactcattctgattctgttttcatcagaagacagcatcctttttgaaaagagaagctcttaaaagagaactttctgatcatcaccaacatatcaatcttagaatcaatcatagctccatcttccccttcccttcctttttcttacaactcagatcttcttcttcctcttacaacccaaatcctcttcttcttttcatctaaggacaatgcttccaccgtttcttgaggttccgtcctttcctcctcatccaaaagcaggtttttattcatccatcctctcctttcaaactctctcaactgactttctaaaaactcytaaataatttttgtaaagtattgaaacaaatcttttgtcatttttttttgtttggttggctgcctttagcttattaatttgtagttattttcattttcttcatatatgttagatatttgtataatatttttaaaactgtcagaaaattcca

SEQ ID NO: 663828 - DNA, 537 bp, Homo sapiens
gcatctataaaaccccttgcatttcactgtggatgtggcaacccatttctctgggactcctctatgcatttgacctacacctctacatttcctccccytcatgccatggtaaccactgtttcattctctacctctacgtacttgagctattttttaaaaaaatagttcacgtattaattgagatcatgaaacatttatctttctatgtctggcttacttcacttagcataatattctccaggtccaaccacgttgtggcaaatggcagatttttttaacctaaataatattccattatgtataatttatattttatagtcttactaattatgtagaagtaattcagattacttataaataaaataagaggaccatggcaaacgggaggcaggacaagattgcagcttcaactcggacagacagaatagtgtgtggagacccacatcatgaattttagctccagaatgactgcaggaataaatcagaaaacccaagaggacccacagaccctctgaaggaagtggattgctcctgcag

SEQ ID NO: 663829 - DNA, 537 bp, Homo sapiens
gcatctataaaaccccttgcatttcactgtggatgtggcaacccatttctctgggactcctctatgcatttgacctacacctctacatttcctccccctcatgccatggtaaccactgtttcattctctacctctacgtacttgagctattttttaaaaaaatagttcacgtattaattgagatcatgaaacatttatctttctatgtctggcttacttcacttagcataatattctccaggtccaaccacrttgtggcaaatggcagatttttttaacctaaataatattccattatgtataatttatattttatagtcttactaattatgtagaagtaattcagattacttataaataaaataagaggaccatggcaaacgggaggcaggacaagattgcagcttcaactcggacagacagaatagtgtgtggagacccacatcatgaattttagctccagaatgactgcaggaataaatcagaaaacccaagaggacccacagaccctctgaaggaagtggattgctcctgcag

SEQ ID NO: 663830 - DNA, 419 bp, Homo sapiens
gaagggagaaatattcaattacatagatagcataaatataaaacaattgaaacttcaagaaacatcagacacacttatagcaatgcaaaatgctctggaaagtctcagcaatagaaatcgaacaagtagaagaaacaaattcacagcttgaagacaagatcatttaattaacccaatccaamaaagacaaagaaaaaaagtaagaaaatataaacaaagcctccaagaagtctgggattatgttaaatgaccaagcctaagaataatttgtattcctgaggaagaaagaaatccaaaaatttgggaaacatattgtgtccagaatttattccttccggtgggttcgtggtctcgctgacttcaagagtgaagccgcagaccttcacagtgagtgttacagctcttaaaggtggtgtgtc

SEQ ID NO: 663831 - DNA, 419 bp, Homo sapiens
gaagggagaaatattcaattacatagatagcataaatataaaacaattgaaacttcaagaaacatcagacacacttatagcaatgcaaaatgctctggaaagtctcagcaatagaaatcgaacaagtagaagaaacaaattcacagcttgaagacaagatcatttaattaacccaatccaacaaagacaaagaaaaaaagtaagaaaatataaacaaagcctccaagaagtctgggattatgttaaatgaccaagcctaagaataatttgtattcctgaggaagaaagaaatcyaaaaatttgggaaacatattgtgtccagaatttattccttccggtgggttcgtggtctcgctgacttcaagagtgaagccgcagaccttcacagtgagtgttacagctcttaaaggtggtgtgtc

SEQ ID NO: 663832 - DNA, 457 bp, Homo sapiens
actcacagccaacataatattgattggggaaaagttgaaagcattctctctgagaactggaacaagacaaggatgcccactctcaccactcctcttcatcatagtagcgaaagtcctagccagagcaatcagacaagagaaagaaataaagggcgtccaaatcagcaaagaagtcaaactgtcactgtttgttgatgatatgattatttacctcaaaatccaaagactcctccagaamgctcctagaactgatagaagaattcagcaaattttccagatacaaaattaatgtatgcaaattagtagatcttctgtacaccaacagcgatcaagtggagaatcaaatcaagaactcaactgcttttacgatacctgtaaaaaaataaaatatttaggaatctacctaaccaaggaggtgaaagacctctacaaggaaaactacaaaacactgcagaaa

SEQ ID NO: 663833 - DNA, 606 bp, Homo sapiens
gatggagatgagatggggaagtcctggtacaaagcccaagagcccraagcaaaatgaagagagaactgatgcttgttctgaccctaatgaattggagttgattaggttgaagaaggcaatcgtgtagtgtgtggcatttggggtaggtacagctcactcaccctgggatggcagaacccaagaatatgaggaaagtaattgtgaaagaaaccatatggcccaagaagcttataatacttattatctgattctttattttaaaagtgtgttaatctctgacctgagaataaagtctccaatgacttgaccatagtctataacttccttcaatgaaacatacttttgaactttgtactagtctttaaatagagtattcatggttttccaaaagctatttcttatgacaataatatgctttcctacctagttcacctgataaactcttgttttctcagaccaagcttagttatcatttattttgtaaagcatttttttttttttacctttggccctcagtagagaaatgtcctacttttcttatgttatttttattttttattcttctataatacaacttatattgtcatttgatatatatacacacat

SEQ ID NO: 663834 - DNA, 606 bp, Homo sapiens
gatggagatgagatggggaagtcctggtacaaagcccaagagcccgaagcaaaatgaagagagaactgatgcttgttctgaccctaatgaattggagttgattaggttgaagaaggcaatcgtgtagtgtgtggcatttggggtaggtacagctcactcaccctgggatggcagaacccaagaatatgaggaaagtaattgtgaaagaaaccatatggcccaagaagcttataatacttattatctgattctttattttaaaagtgtgttaatctctgacctgagaataaagtctccaatgacttgaccatagtctataacttccttcaatgaaacatacttttgaactttgtactagtctttaaatagagtattcatggttttccaaaagctatttcttatgacaataatatgctttcctacctagttcacctgataaactcttgttttctcagaccaagcttagttatsatttattttgtaaagcatttttttttttttacctttggccctcagtagagaaatgtcctacttttcttatgttatttttattttttattcttctataatacaacttatattgtcatttgatatatatacacacat

SEQ ID NO: 663835 - DNA, 630 bp, Homo sapiens
ataaatgtctccttatattttactcatttttctagtcattgtttctgaaaatttattatatctttttcttcataagctgacctggtcataatttaaactgtactttataactcagcagtcagtcttgttaataatcttaatctttttaaagtatggatatattatcccaagacagcttatttttttctttgttctatctcaggactatcaggcagctaatcctttatctatccctaatactcttatggtagttttcyagaatctatagaagattctatttcaatctgctataggctaatggcaagcaaccaagtttgagttatatattaaatgatagttagtaaggctctaaataagaaataagtatattggatatattacctgaataaactttatggcaaagttttatgtattctaaggcattctattgtttgctaagtttatactgttactaataattgaaattttattgctgaacatctaaatttgagacactactatatgtgtatattttgtgttcaattcaaggcttaagagttttaaaagattgtatttatttttgggggctttaaaattcattgaaaagcgatatttcaaataatttgtgatttttgcagatgtcgaatttga

SEQ ID NO: 663836 - DNA, 639 bp, Homo sapiens
atgtcatgtctttcagctgttcaacttccagctgccaaaaataaatgagtttacactgctggttctattttatttttctaaatcaaattccactgccaattggaaacttaatcaatgatacattgtatatatgatattactgttgataataataacaaatacatttattttatcaggtgcatgaattctgtaaaattatattttttcactttaaacttttcaaataggttaaaataaagtgaaaaaaggttgttttaatcaataagaaatatcaatcgtgtatacttactatacatgtatataatatatgatagatacaatatataatctttgtatctataatctctgttacatacattttggatccttgtctcatttagtatgttttatggaagtaaaacaaagttcaaagttcattgctgtacaaacaaaagtagaaacaactgatataaataactggtattatttgtcactacaaactcatatttgtatatcatcaatataaactcaaakttttgtaatttttgacattttcttacaatttagctaaggcttcattatgtagagaagtggaaattatatcaaactctgtgattaaaagtgttcacagtagtgcagaatttgaaaatttctgctgta

SEQ ID NO: 663837 - DNA, 548 bp, Homo sapiens
acatacagagtgtgagaaaatatttataaactgtgcatccaacaaaggatgaagatccataatctatgaggaactcaactcaagaaataaaaaaaaaaaaattaaaaagtgggcataggtcatgaacagacatgtcttcagaagaagacaaacaagaggctaaccaacaaaaatatttttaaaatgcttgacatcactaattatcagggaaatgcaaattaaaatcacattgagataccatcttacaccagtcagaatagcattagtagtagtagtagtagtagtagtagtatttattattatcaacttaactttaattttaagttcaggggtacatgtacaggtttgttgtataggtaaacttgtgtcatgggggtttgttrtacagattattttgtcacccaggtactaagcctactatctattttatttttcctgatcctttccttcctcccacccttcaccctccaatatgtttcagggtctgttgtttccttctatgtgcccatgtattctcattatttagctcccacttataagtgagaaca

SEQ ID NO: 663838 - DNA, 540 bp, Homo sapiens
tcattcttttttatggctgcatagtattccatggtgtatatataccacattttctttatccactccatcatcaatgggtatttacgttaatttcatgcctttgctattatgaataatgcttcaatgaacatacacatgcctgtgtctttatagcagaacaatttatattcctttaggtatgtatccagtaatgggattgctgggtggaatggttttaggcctctgaggaatttccaaactgctttgcacactggctgaactagtttactmtcccaccaacggtatataaacattcccttttctccataaccttgccagcatctgttttttaatagtaaccattctgactggtgtgagatggcatcttattgtggttttgatgtgtatttttctaatgatcagtgatgttgagctttttttcatatgattgttggccacatgtgtgtcctcctttgaaaagtacctgttcatgtcctttgcctactttttaatgttttttttagttgtaaagttgtttaagttacttatagatgctgaata

SEQ ID NO: 663839 - DNA, 540 bp, Homo sapiens
tcattcttttttatggctgcatagtattccatggtgtatatataccacattttctttatccactccatcatcaatgggtatttacgttaatttcatgcctttgctattatgaataatgcttcaatgaacatacacatgcctgtgtctttatagcagaacaatttatattcctttaggtatgtatccagtaatgggattgctgggtggaatggttttaggcctctgaggaatttccaaactgctttgcacactggctgaactagtttactatcccaccaacggtatataaacattcccttttctccataaccttgccagcatctgttttttaatagtaaccattctgactggtgtkagatggcatcttattgtggttttgatgtgtatttttctaatgatcagtgatgttgagctttttttcatatgattgttggccacatgtgtgtcctcctttgaaaagtacctgttcatgtcctttgcctactttttaatgttttttttagttgtaaagttgtttaagttacttatagatgctgaata

SEQ ID NO: 663840 - DNA, 540 bp, Homo sapiens
tcattcttttttatggctgcatagtattccatggtgtatatataccacattttctttatccactccatcatcaatgggtatttacgttaatttcatgcctttgctattatgaataatgcttcaatgaacatacacatgcctgtgtctttatagcagaacaatttatattcctttaggtatgtatccagtaatgggattgctgggtggaatggttttaggcctctgaggaatttccaaactgctttgcacactggctgaactagtttactatcccaccaacggtatataaacattcccttttctccataaccttgccagcatctgttttttaatagtaaccattctgactggtgtgagatggcatcttattgtggttttgatgtgtatttttctaatgatcagtgatgttgagctttttttcatatgattgttggccacatgtgtgtcctcctttgaaaagtacctgttcatgtcctttgcctactttttaatgytttttttagttgtaaagttgtttaagttacttatagatgctgaata

SEQ ID NO: 663841 - DNA, 510 bp, Homo sapiens
atgttcactattggagtgatgggtacactgaaagctcagacttcaccactaagtaatgtatccagataacttcacttgttacccctgaatctgttttttcaaaaaatcaaggcattttttaaatttcagtttttcaaaaatggtctaatcattctcctttttgtttcacaccaacagcattgtataattattatattaattcaatatatctttcaaggtaatgtctacataaatagcaattttatttaagatgttgcaacacagagctaagsaagttaaattgacatattaagaattcataaaatatattttgacttcctttttaaaaggaagctttttcctatgcacagttctgtttttcatctataagccttggcttttgcattattactgcttgtgatgatattaagtgacagtctcttgaatatagtatctgcatagttacgtatctccagaaactgatcacataattgcctatcactagctcactccaataggtcaaaaatgtga

SEQ ID NO: 663842 - DNA, 507 bp, Homo sapiens
gtagggtggagacacctacctgcttttaaaaatgttctactttcagagggcctataaatgaaatattttacattatatttagaatttatataaaaattaggcagaaagaaagcaaatgttaatatttctaaagcaggggaggatatttccaatgtagtaaattcatcaaagcaagaaaatgattatctagctaaaatacattttgcagactaattctacttccttatacaaagaggcttataaaatggaaaaaaycctaatacacagctgcacaaaactaaaattatccagatataacatactcattttgtataaaaaatatatttaatacatttacaataaattaattaaatttcattaatgaaaacaatgctttctaaaattattttaaaagttcaagtcaggatggcagagtgaagggaagcaatcattaacggttgaatttaaatgaaaaaactacagtgctcatcacttattaggtaagtttcctttttggggggtcaaaca

SEQ ID NO: 663843 - DNA, 521 bp, Homo sapiens
ttcaaaaaaaagaaaacaaaaaacaaaaaaaaaagaatccagagaaaagaaaattactttcaaaagagtcctaatatactaacagctgactttccactagtaaaaatgggaaagaagagacagtggaatattattttcaatgtgctgaaacaaaacagttaccataaaataatgacatttgagatatactagaggagacatattttgccactatcaaatctacaatgaaggaaattttaaagcatgtatttcaggtaggaggagaatgatctcacatgaaaagtcttagatacaaggaattaagagcaaagaaaatggaaaatgtktaagtaaatccagtgtttaagtgtataaaacaataataatagtcttgtggactttcaaaaatacaaaattaaaatacacaacaatagcatacaaatcaggaaagaatatatggagttcaagtgttctgacttccttatattattaaattttgacaaattaaaaatgtgtaatataattttaaaagtaatcaataa

SEQ ID NO: 663844 - DNA, 573 bp, Homo sapiens
gggattaagtttaggagaggaaatcaagagtttggttttagatttgtgagagactgtttgactttcaagttcctagggacaatgrgcctgtagtagctgcagctggtgttaaccttttacagggacatgtctaagtggaggtgagggggcagagaaacagaagaaataaagttccttctgagtaatctcccagatattcaagtgataaaaagcaggttagtcatctgagcctgtcttatacacactgatttcagggcaagaagaagtctcctctctcttcaaaaaatgttccgatttctattgtctcaaaatttctgaatttaaattaaatgtatcccgcaattagagaaagcagaaaatgtaaatagcttgagagataatccagtgcgtatgagtttttaccaaagtataactgagagcagatgaaggtcctgaatgtttaatctttttgtgaagagaaaggaggtagatattaaataaaacaaagattttataatcttgctttggcaatgccctatttatcgtaatttttaagtgagaaactacagaaagagtgtttgtatcttgaaggat

SEQ ID NO: 663845 - DNA, 595 bp, Homo sapiens
aactatcggatctggtagaaaatatctgacagcaattcttacaaagtactatgcccctggggaagagtcctttctctctctggaaaaggggttatcttaaagtattaaaattattacatcagattttccacaccacacaatatgtatggatcatgaggaggaaaggagaattgagaatttgagttagaagtcacatataagctgacatgtcagaaatgaccaatttgggaaactaagtttaccaacactgctaaaggactcaaatattttaaacagtggttcagatattgtgattatgcagtatcaggtttatttaattttgtatcatttcatgctatttaatgagacaatataatgagtgtttttcaaactgtgggtcctaatccatttgtaaattatgaaatcaatgtattttctatgactgctatttttaagaaacaaaatacaatasaatgaaaaatatgagaatgcactgcaaacatttcaatgtatgatttcataatttacaaatagattaggacccacagtattattttgtgagacttttgtttcagttacatgtgtgtatatactatagaacacatttattattgtg

SEQ ID NO: 663846 - DNA, 541 bp, Homo sapiens
ccccacccgagaggaaccaggaaaggggttgacggcggaggcggcccgggaacagtcggggtcgccatgtcgggcggctggggtgagcccggggacgggcgggcgggaaggcgcggagtggcgggcgggtggcagggaaggtcccgggcccagccccagccccagccccagtccagcgaagccggcaggcgcagagctgcgtcgggcgttcctggagcgctgcctcagctcgcccgtctccgccgagtctttccccgggggcgccgccgccgtggccgctttctcctgctccgtggcgccagcagccgcaccgaccccgggggagcagtttctgctgccgcttcgggcgccgttcccagagcccgcgcttcagccggaccctgcgcccctctcggccgcccttcagagtctgaagcgggcggccggcggcgagcgccgcggcaaggcacccacggrctgcgcgtctggacccgcggccgcgggaatcaagaagccaaaggccatgaggaagttgagctttgccgatgaggtgaccacatcc

SEQ ID NO: 663847 - DNA, 499 bp, Homo sapiens
tgtggccaccaccactaggactgcgctgggtcagacctgaagccagcacagcactgggtcttgcccaaggcctgctgtaactactccctagctaccagtatgtttgctcaaggccctggggctacacaatcaacaagtagcaaagccaactaggcttgtgtcctttcccctcagggaaggtgagttccccccaggcaggtccatatgtgccatctgggagccaggtgctagagtaaaaaaccttaacagtttacctggtcttttactgtattgtggctgaactggcacccaggccacaatacacagtcctcactctggcagargagccttacctcatggacaccaccaccacagccctgtggggagtactgccagactactgtggatattcctttaaggcctaccgactcttcagtcagactgctgtgaatgctgcctggcctaggactcacccttaaggtcagtgggctcccttctggcacaaggcacgttcagaaat

SEQ ID NO: 663848 - DNA, 624 bp, Homo sapiens
ctaatggcacctcttgattaaaccacatttaacacattatgacctaataaaatattctggctagtgagaccgcttcattacatgtcacagaaattaaagcacagcttctaatataaatgtgctgtccttaatgtgctggcagaaaactttgctgacagggtcagcagaatacagaacatgcctgatctacaatatctgcagggcagcttagacattctgagtcttgtttaggttgcagagaggggcattatatttgcttyctgtctcatgaagttggagtacagactcaggaggaagatagaatatagttttaggaattatttttcataaggagcagaaattctttcaagcttacttaacagtggatgcatttatttttattgttcagagaaatctcacaatattatagaatacaactaaggaaatagccaggtctcatgagactagaaattcatcaggtagtttttctttctgtcttgctgcatgatctttacctatcatctcagggtcttctaaaatggtccatgatgaccttctaagatggtccataatgaccaaacactcctggtattcatgtacttatataatcatcttgctttcagtgttgactggacttactgaccc

SEQ ID NO: 663849 - DNA, 559 bp, Homo sapiens
ggtttaacaacaacaaatacttatttctcacagttctggagactgggaaatccaagatcaaggcactggatgattctgtgtctgctgagggcacccttgctggtttatagattcctgtcttatcactgtattctcacatgacagaaagggcaagggagctctcttggggtctcttttataaaggcattaatcctattcatgagttctctgctctcatgacttaatcacctcccaaaggccttgcttccraataccgtcatattagggattaggtttcaacatacaaattttagagggacacacacattcagtttgtagcagactaattaatcctgtattgggtattgtgggaaagaaggacctgtgccccaattttgaactttcgtgggccttgggaagttgtcgttttgtttctctgcttcaccaccttgattcaccttagtttttgtgtcttttgctatgtaaactaagaacctaattttatggagtaaaatcatttacatcagctccacaaaggttagaagagtattgcaaagcataaccttgacagctttgccca

SEQ ID NO: 663850 - DNA, 556 bp, Homo sapiens
catatgctatattaagttcaagatacttttgtaagtgacgataccagccatttagagcatccctaaagaactgagtcctaggaatttaaccacgtcaatgcagtctttttacattattaactgaaggaaaatgcattccatttaagactttttaggattatgaaacaaaaagacattagaaagagtcaaatcaagactataaggtgaatgcctagtgatttcccatcaaaactcttccaaaattaccctgcttgatgagaaggatgagcaggaatattgtcatggtggagaagaactctctggtgaagatttcttggctgtttttctgctaaagctttggctaactttctataacattcttatactattggctaactttctataacattcttatactaagcagatattatcattcwttggccctccagaaagtcaacaacaaaataccttaagcaaccttaaaaattgttgccataacctttgctcttggcttgtttgtttctgctttggctggatcacttctacctctttgtagccattgcttagattatgtttt

SEQ ID NO: 663851 - DNA, 566 bp, Homo sapiens
atgctcagtatggccttcagatttgatcatttaaaaaattatatatttttcatttttatagatttaggtggtacaagttcagatttattatatggatatattgcttaatggcgaagtctaggcttttagtataaccatcacccaaattatgtacactrtatccatttggtaatttcttatccctcactttcctcctcccccaaccttttcaaatctccagagtctattattccactttctatgtccatgggtacacattatttagctcccacttgtaagtgagaacatgggtttcaagattgtagagggctgtgcacttggaaacccaaatgtgtactttatagagttcttttttgagaacgtgtcttgctctgtcacccaggctggagtgcagtggtgcaatctcggctcactgcagcctctgcctcctgggttcaagtaattctcctgcctcagcctccttggtagctgggattacaggcaccaaccaccacgcctggctaatttttgtatttttagacagacggggtttcaccatgttggccaggctggcctttaactcccga

SEQ ID NO: 663852 - DNA, 566 bp, Homo sapiens
atgctcagtatggccttcagatttgatcatttaaaaaattatatatttttcatttttatagatttaggtggtacaagttcagatttattatatggatatattgcttaatggcgaagtctaggcttttagtataaccatcacccaaattatgtacactatatccatttggtaatttcttatccctcactttcctcctcccccaaccttttcaaatctccagagtctattattycactttctatgtccatgggtacacattatttagctcccacttgtaagtgagaacatgggtttcaagattgtagagggctgtgcacttggaaacccaaatgtgtactttatagagttcttttttgagaacgtgtcttgctctgtcacccaggctggagtgcagtggtgcaatctcggctcactgcagcctctgcctcctgggttcaagtaattctcctgcctcagcctccttggtagctgggattacaggcaccaaccaccacgcctggctaatttttgtatttttagacagacggggtttcaccatgttggccaggctggcctttaactcccga

SEQ ID NO: 663853 - DNA, 566 bp, Homo sapiens
atgctcagtatggccttcagatttgatcatttaaaaaattatatatttttcatttttatagatttaggtggtacaagttcagatttattatatggatatattgcttaatggcgaagtctaggcttttagtataaccatcacccaaattatgtacactatatccatttggtaatttcttatccctcactttcctcctcccccaaccttttcaaatctccagagtctattattccactttctatgtccatgggtacacattatttagctcccacttgtaagtgagaacatgggtttcaagattgtagagggctgtgcacttggaaacccaaatgtgtactttatagagttcttttttgagaacgtgtcttgctctgtcacccaggctggagtgcagtggtgcaatctcggctcactgcagcctctgcctcctgggttcaagtaattctcctgcctcagcctccttggtagctgggattacaggcaccraccaccacgcctggctaatttttgtatttttagacagacggggtttcaccatgttggccaggctggcctttaactcccga

SEQ ID NO: 663854 - DNA, 500 bp, Homo sapiens
ttaggtatttctctaatgctatctctcccctagcccttcaccccctgacaggccccggtgtgtgatgttcccctccctgtgtccatgtgttctcactgaagaacaagagttttaatggcaatccatattgtaggggaaagaaacatgcaagaaaatagtgtaagattaaagttagccaagagaagcaagcaggtctttaatgttcgtttagaraggaaagggattatcttgaaagcaggaggatgaaatagcaaggtaagcataggaacattctgatggacatgaactataagtagaaacctaataaccaaatgaacttggactcagtgctttcattccctgttgtgtaataaccaccttaacaagctggaagccccatcagacaagatactggattcaatcaacaatgatttcctaattattttggctctcagtatgtctccagtgttttcagattgttaaaaatccagtagtcccccccgaggctgcacacatgagta

SEQ ID NO: 663855 - DNA, 500 bp, Homo sapiens
ttaggtatttctctaatgctatctctcccctagcccttcaccccctgacaggccccggtgtgtgatgttcccctccctgtgtccatgtgttctcactgaagaacaagagttttaatggcaatccatattgtaggggaaagaaacatgcaagaaaatagtgtaagattaaagttagccaagagaagcaagcaggtctttaatgttcgtttagagaggaaagggattatcttgaaagcaggaggatgaaatagcaaggtaarcataggaacattctgatggacatgaactataagtagaaacctaataaccaaatgaacttggactcagtgctttcattccctgttgtgtaataaccaccttaacaagctggaagccccatcagacaagatactggattcaatcaacaatgatttcctaattattttggctctcagtatgtctccagtgttttcagattgttaaaaatccagtagtcccccccgaggctgcacacatgagta

SEQ ID NO: 663856 - DNA, 593 bp, Homo sapiens
gaaacaacataacttgaatcatgttagtttgttttttttctmccctgcttaggaaggttggatggtcagggaagctgcattaaatcctgttttcacaggtgctggatgtgcatacagctaacctggtaactccaaactggatgagctcattccttgagactggaattacaaaattggaacagctcactaataattgaagatgatttgggaaaaccattatccttcctcaggttttacaaggtttttatgactcatttataaggtcctacagctaaaaaaaatcatgctgtatttcagagaagtttaacttgaaaatatttttttcactaattaaaaattcccattataccttatagttgcaattgtatccttattgctgaaagatatccatactacctaccacttctttaaaatttaaaaaattctataaataaaaaatataacaattgcaaatatgtaaataacttccaacataaaacaaaatttatagtaattataagaagttcttttatactaaaaattaagttgtaattatgatagaaataatctgtaaaaggtatttttagcaaaatttattaatacgggtagcaata

SEQ ID NO: 663857 - DNA, 593 bp, Homo sapiens
gaaacaacataacttgaatcatgttagtttgttttttttctaccctgcttaggaaggttggatggtcagggaagctgcattaaatcctgttttcacaggtgctggatgtgcatacagctaacctggtaactccaaactggatgagctcattccttgagactggaattacaaaattggaacagctcactaataattgaagatgatttggraaaaccattatccttcctcaggttttacaaggtttttatgactcatttataaggtcctacagctaaaaaaaatcatgctgtatttcagagaagtttaacttgaaaatatttttttcactaattaaaaattcccattataccttatagttgcaattgtatccttattgctgaaagatatccatactacctaccacttctttaaaatttaaaaaattctataaataaaaaatataacaattgcaaatatgtaaataacttccaacataaaacaaaatttatagtaattataagaagttcttttatactaaaaattaagttgtaattatgatagaaataatctgtaaaaggtatttttagcaaaatttattaatacgggtagcaata

SEQ ID NO: 663858 - DNA, 593 bp, Homo sapiens
gaaacaacataacttgaatcatgttagtttgttttttttctaccctgcttaggaaggttggatggtcagggaagctgcattaaatcctgttttcacaggtgctggatgtgcatacagctaacctggtaactccaaactggatgagctcattccttgagactggaattacaaaattggaacagctcactaataattgaagatgatttgggaaaaccattatccttcctcaggttttacaaggtttttatgactcatttataaggtcctacagctaaaaaaaatcatgctgtatttcagagaagtttaacttgaaaatatttttttcactaattaaaaattcccattataccttatagttgcaattgtatccttattgctgaaagatatccatactacctaccacttctttaaaatttaaaaaattctrtaaataaaaaatataacaattgcaaatatgtaaataacttccaacataaaacaaaatttatagtaattataagaagttcttttatactaaaaattaagttgtaattatgatagaaataatctgtaaaaggtatttttagcaaaatttattaatacgggtagcaata

SEQ ID NO: 663859 - DNA, 392 bp, Homo sapiens
tcttttatactaaaaattaagttgtaattatgatagaaataatctgtaaaaggtatttttagcaaaatttattaatacgggtagcaataataatacccaattatatatgcatattgtttgtattttagaacctgtgacaaatgaaaatggttttcctagataagaacgaaactgtgttgggtggctracaagattgaaactcatctgactttgagaaataaatcaatttggtttgtttatttacaatcgttatttttccttttaccaatacctaagttatttcactgtaaaactttcatagaagaatttcaggaaaggcttgtatttacgtgttatagatgaggtacaccacagtgatttagatcagcagtccccaaccgttttggcaccag

SEQ ID NO: 663860 - DNA, 536 bp, Homo sapiens
tataataatccaatcaaaaaatgggcaaaatatttgaatagacatttctcaaaagaggacaaacaaatggctaacagacatatgaaaaggtgctcaacatcactgatcatcagagaaatgcaaatcaaaattgccatatcatctcaccccaataaaaatggcttttataaaaaayacagataataataaatgccggagaggatgtggagaaaaggggaaaggggacctttatgcactgttgggggggatgtaaattagtacaaccactgtagagaacagtttggaggttcctcaaaaaactaaaaatagagctaccatatggtccagcaatcccactgctgagtgtatacccaaaagaaagaaaataggtatactgaagagctatctgcactcccatgtttgttgcagtactgttcataatagccaagatttggaagtaacctaagtgtccatcaacagatgaatgaataaagaaaatgtggaacatatacacaatggagtgctattcagccataaaaacaatgagatcttttcat

SEQ ID NO: 663861 - DNA, 536 bp, Homo sapiens
tataataatccaatcaaaaaatgggcaaaatatttgaatagacatttctcaaaagaggacaaacaaatggctaacagacatatgaaaaggtgctcaacatcactgatcatcagagaaatgcaaatcaaaattgccatatcatctcaccccaataaaaatggcttttataaaaaatacagataataataaatgccggagaggatgtggagaaaaggggaaaggggacctttatgcactgttgggggggatgtaaattagyacaaccactgtagagaacagtttggaggttcctcaaaaaactaaaaatagagctaccatatggtccagcaatcccactgctgagtgtatacccaaaagaaagaaaataggtatactgaagagctatctgcactcccatgtttgttgcagtactgttcataatagccaagatttggaagtaacctaagtgtccatcaacagatgaatgaataaagaaaatgtggaacatatacacaatggagtgctattcagccataaaaacaatgagatcttttcat

SEQ ID NO: 663862 - DNA, 536 bp, Homo sapiens
tataataatccaatcaaaaaatgggcaaaatatttgaatagacatttctcaaaagaggacaaacaaatggctaacagacatatgaaaaggtgctcaacatcactgatcatcagagaaatgcaaatcaaaattgccatatcatctcaccccaataaaaatggcttttataaaaaatacagataataataaatgccggagaggatgtggagaaaaggggaaaggggacctttatgcactgttgggggggatgtaaattagtacaaccactgtagagaacagtttggaggttcctcaaaaaactaaaaatagagctaccatatggtccagcaatcccactgctgagtgtayacccaaaagaaagaaaataggtatactgaagagctatctgcactcccatgtttgttgcagtactgttcataatagccaagatttggaagtaacctaagtgtccatcaacagatgaatgaataaagaaaatgtggaacatatacacaatggagtgctattcagccataaaaacaatgagatcttttcat

SEQ ID NO: 663863 - DNA, 615 bp, Homo sapiens
cctacctaccatgtgattttcttagatgtgtatttctctattatataaaatttgcatactctgaagaatttgcattagtggagaagagattaaatcagagacaacataatggttttacttgatattagacaaatccctgtctaggaaacatgccatctacatgatgaaaacctttagcctttgtgttcaagcagcaatgttagatagatagattatacatagatacatacatagatrgatgcctagagcttaagtgagtcatatttttctaaaagatcaccttaacaaaaacttggaataaaggaaatctggcttctatagcacaatttctgagtagacaacacagtaataaaggcattggctttggagagagacaaaactagattcaaatcccaattccactattaactggcttcaagtatctggtctaattactcaacctaaatgaacctacactgagcttgcagaattgttataaggattaagttagggagtatatataaaatacctgacactgtcttaaatgttagctcaataaatgtattagcttccatccttcctccacatccctttcaatctaatacagctacaatttaatacagtttctaagcacct

SEQ ID NO: 663864 - DNA, 679 bp, Homo sapiens
ccaggcgcggtggctcacacctgtaatcccagcactttgggaggcccaggcgggcggatcatgaggtctggagatcgagaccatcctggctaacacggtcaaaccctgtctctactaaaaatacaaaaaattagccaggcgtggtggcgggtgcctatggttccagctactcgtgaggctgaggcaagagaatgctgtgaacctgggaggcggagcttgcagtgagccgagatggcgccactgcactccagcctgggtgacagagygagactccatctcaaaaaaaaaaaaaaaaaaattatccaggcgtggtggtatgcagctgtagttctagtgattcaggaagctgaggcagaagaatcacctaagcccggcagtttgagtctgcagtgagctatgatcatgccactgcactccagtctgggtgactggagagagtgagattctgtctcttaaaaaaaaaagttgtctaactggattaccgacgtattaaaacgttgcttagaatactaatctgtacttaagatagaacttttagaacgaatggtaatccgcttgtgctctaaaatacaccaaaaaaaaagtaaatttaccaaaaaaaggtaaatccatcttgatggtatcattctgagacagatataatttatttttaaaattgcaaaatattttagagggggca

SEQ ID NO: 663865 - DNA, 679 bp, Homo sapiens
ccaggcgcggtggctcacacctgtaatcccagcactttgggaggcccaggcgggcggatcatgaggtctggagatcgagaccatcctggctaacacggtcaaaccctgtctctactaaaaatacaaaaaattagccaggcgtggtggcgggtgcctatggttccagctactcgtgaggctgaggcaagagaatgctgtgaacctgggaggcggagcttgcagtgagccgagatggcgccactgcactccagcctgggtgacagagtgagactccatctcaaaaaaaaaaaaaaaaaaattatccaggcgtggtggtatgcagctgtagttctagtgattcaggaagctgaggcagaagaatcacctaagcccggcagtttgagtctgcagtgagctatgatcatgccactgcactccagtctgggtgactggagagagtgagattctgtctcttaaaaaaaaaagttgtctaactggattaccracgtattaaaacgttgcttagaatactaatctgtacttaagatagaacttttagaacgaatggtaatccgcttgtgctctaaaatacaccaaaaaaaaagtaaatttaccaaaaaaaggtaaatccatcttgatggtatcattctgagacagatataatttatttttaaaattgcaaaatattttagagggggca

SEQ ID NO: 663866 - DNA, 584 bp, Homo sapiens
ttacttacagctatttttaaaacagaattaggttttcagcacttgggggaagttcagcaattcttaaaggattactcagccctaaacaaacggatgtgctacggggaaaaaataagtttgcctttctgtctcagagagattcaattttatttcaaacatgtttttagtcatggatactaactggtttattctattcaatgtgtctcattaatctggtggtcccacaaaatatctaaatgccactgaagttctatatgcactcaaatagtacagaacacatgcataaatgaaaatcaaaatatatgggggaaaatgctcccccatgaccctagaaaaaaatgtatatctttgtcttatcattttcaggatcttaaatttgawtaaaaaatgaccaaaatatctactgttctgaaaattttataattttcaatagaaattactatgaaaaatattttcaaaaccttaaaaaagatacactaccagtaaatgttgtcaaatgaagtgcttgtgaaaaagactctccaaatttcctgtacctctcctattctaaggcagtgctttctagaatttctagacaagtctca

SEQ ID NO: 663867 - DNA, 567 bp, Homo sapiens
gcactcaaatagtacagaacacatgcataaatgaaaatcaaaatatatgggggaaaatgctcccccatgaccctagaaaaaaatgtatatctttgtcttatcattttcaggatcttaaatttgattaaaaaatgaccaaaatatctactgttctgaaaattttataattttcaatagaaattactatgaaaaatattttcaaaaccttaaaaaagatacactaccagtaaatgttgtcaaatgaagtgcttgtgaaaaagactctccaaatttcstgtacctctcctattctaaggcagtgctttctagaatttctagacaagtctcaagaaagctgcagtttcaccacagataaactgaccagcagatggcgatgtatctgcgcgcccaatcctagtttcccaagagacaatacaaactagtatatctgaaacactcttagtactttactagcctaccaaaaagtaaataaataaaatgcatgaatgaatatacaggaagaaagcaaatccaagtagtttctagcatctaatattgtgaatttttcaaatactgagaatttgagat

SEQ ID NO: 663868 - DNA, 562 bp, Homo sapiens
tgaattaagcattacatacattcctctctggatgagaactgggtgtatggattcttgggttcatgattgaaattcttgtataccaagtacttggtagcccacgaatagccagaaaatcttcatgcctacctttctttggctataaaatggggtcaacacattggcttcgaaggccragctactcattctagccttgcttgaattttcctgatagcttgttgggatggttgacaaagatgtgtcctctcctaagtagaagctaacctgagctggaatgtcagtcaagtcccggcaggagcagatggcacacttggaagagagtttttgaatagatgatttacggatgtgtgggtaaacctacgagaaatgaggaagtgtcctggggctaacgacagcactgtggccttcccatccccaggcctgaaaggacaggaagagaaactggttttaggaatctggtgagacttgtcatcgtaggagctgtggtcttcagtagagatgcagcccctgccaacccaccacccagcagggagggcttggggagtaaataccccaaactcac

SEQ ID NO: 663869 - DNA, 485 bp, Homo sapiens
atggttgttgttattggaattagaaacctagccattagatgtcagggactaagcaaatagaacaatgtagcaactgtcagcccccgaggctgttgtcasgctccctccgcctccgtgctttggtgcctgtgccccatctgtgaccaggtggccccactggaaattccaacagcataagctacagtcattctgcctgctcagtgttgattttcctctctcctcagctcctgcagggtggaatgtcagctaagtggcagggagcctgctcaccaaggggctggctgattgcttaggaaacccatccctctactggaatttaataaaaaccacccaccagacacagggtgggggcattggctctttaaatgatgcttttctttaagggggaaaaaaatctatctgtgccagtaaaagaaagaagagaaagaatctagttattcaaagatggaagaaaaaaatgtttttaatttgtaactttgctaatt

SEQ ID NO: 663870 - DNA, 455 bp, Homo sapiens
cgcccagtctggtcttgaacgcttggcctcaagcaatcctcccaccttggtttcccagagtgctgggattacagtcatgaaccactgtgcctggccaaaatataaaccttttaaaaaatacaaaaccctcttaaactttttaaaaatataaaaccttttaaaaacacaaaagaaasattctcagtttgagggccatataaaaaacagaccttggccccagattcagacggtgggtcacagttcatagctcatggccctgtggaggtcagtgagctcctgaagcaacccttccctcctgtcctttcacagtgggctacttggacttcactgcgtccttcctcccatcaagtctggtatctgcatctcagccctttcttaatccttggctcctagaagttgatatagtctttccaggccgggcagtggctcacacctgtaatccctgcactttggga

SEQ ID NO: 663871 - DNA, 521 bp, Homo sapiens
ctaggaactgtctgcctcctcagctgctggcttatctgtgggagcctattatctggtcctctgcagtgctgttcctcccgatgggctgtccaccttttctccaggaaagaaggaggcaggaggacccgcttctttttgccactttaccccctcagtcaccacaatatcatcacacaaactgcaaagacacaggcagatttctttactggtgggttggtatactttcagaaagaaactgtagcacaggagggacaaaggctgaaactgaaataaatttgtacttaatgggtccagaacccattcccagagagaaaatgacatcccctcctctgggaaaactccacacctacctgtactcatgggaagagatcttactcctggaatgcttacygaaagctgcagtttaaggaatccctcccctgcaatctttagcagggtgaacatgagtgtttattgacacttttagcttgggagacaatgagaacatgaaggagtgtctgtaatttcatggatgagggtgg

SEQ ID NO: 663872 - DNA, 539 bp, Homo sapiens
tctatctggtccctttagcttgctggtaaagacatatattttgagattctcctccaatactgataatgtttgaatgctggatagtcagaaagcaagaatgataactccataaatacacacacaaacacaaacacacacacaaacacacacacatggaaaactggacattcataacatgtcatgattaagaattcacatattaattaggtcgggttttttggtgatggtttgggatttttttttttttttacataaacaatcctattgtcagtgagtagggactattwcatttttttcatttccaatctgtatgttctatatttctttttattgccttattgcactggctaggcctttcagtaaaatgttgaacaggagtggtatgagaggatattcttatctcctaatattaggagaaaacattcagtctttcagcattaggtataatattagctgtagggttgttttttgttttcatttttttagatgccctttatcagcttgaggaaatttccaattcctattttgctgagaataac

SEQ ID NO: 663873 - DNA, 585 bp, Homo sapiens
agataactagcccttgaaggcctaaagtgcttctttttagcttttggaagacgatggcactagtccaatgcagagaggcaattaatctttctctaccacttctacttgatgtaaagtccaagctcagcctgggtccagcattctctacatcaggatcctacccttcagctttacttctcaaattgctattacatctgtgctcctggcaaaatttttacttgtcatctccaaagtataccttgtattttcctgtacatattgttagtattttctttccaaacaggagtatcttcctttcattctcatttctactttggttatccttcaattttacttcagttgttgctttcttcacaaagtcttccccactcacccagaaggcagtgaaccccacctctatgagcttatccagcagagcttttaatgttcatattactcaccaagatatgtcattctttcaacaagcacrcacagatggcctcatgtgcatgtggcacatgcaatagccacaccctgcgcttcagggtattaccgtcccaggtattgtatagaggtcacctccattggattgtaagttccagtagt

SEQ ID NO: 663874 - DNA, 571 bp, Homo sapiens
gtgtgcacagctgtggactgggtttttaccaagctggcagtctctgtttaggtatggctccaagtggacaacccagaggtggtggtgtgtgggagatagactcatcaaaggttgtgattcttaaactgaggctcagtattgtcaaggagggggtcatgcatgcagcatgtttttgagatgcacaacrtctaaaaacctctagaaggtagtaatgtcatctataggttacttgccctctctacctgcaggtctttttttctgacattttataggtattttggtgcttattggaagacaggtgatgtggaggttgttaggtagtcatagttaaatatttttatttttgaagactttcaaggatagtaatatcaggatacctgggctcatttcttaaagcactcaattaatccgggatagaaacttagaattgacatagaccttcaagatcatttactgcaactttctaattttgcaaatggggaatctgtaggccagagaaattaaccaacttgctcaatatcaaacagatagttggtaatagagcttatctcttatgggctaccagaggatc

SEQ ID NO: 663875 - DNA, 589 bp, Homo sapiens
caatagaataaaccaactggactgaaaaaacatatatggaacactatactcaactacaagaaaatacactacacattcctctaaagtgcacatggaacattttccaggacaggccatattttaggccataatttaagtgttaataaatttttaaaaaattgrtatcatacaaagtatcttccccaatcataacaggatgaggttagcaaccaataatggaagaaaaactagaaaattcacaaatttgtagaaatcgtacaatacactattaaataaccaatgtttcaaaaaaaatcgcaaggaaaattagaaaatagttggaaatgaataaaaacaagaacaagccataccaaaacgtatgggacacagcaaaagagtactaagaggaaaatttatagctatgagtgctaacattaaaaaacaagaaaaatctgaccaagcacagtgtctcacacctgtaatcccagcactttgggaggccaaggtgggcagatcacttgaagtcaggagttcgagaccagcctggccaacgtggtaaaacccggtctctactaaaactacaaaaaattagccaggaatggtggtgcac

SEQ ID NO: 663876 - DNA, 589 bp, Homo sapiens
caatagaataaaccaactggactgaaaaaacatatatggaacactatactcaactacaagaaaatacactacacattcctctaaagtgcacatggaacattttccaggacaggccatattttaggccataatttaagtgttaataaatttttaaaaaattggtatcatacaaagtatcttccccaatcataacaggatgaggttagcaaccaataatggaagaaaaactagaaaattcacaaatttgtagaaatcgtacaatacactattaaataaccaatgtttcaaaaaaaatcgcaaggaaaattagaaaatagttggaaatgaataaaaacaagaacaagccataccaaaacktatgggacacagcaaaagagtactaagaggaaaatttatagctatgagtgctaacattaaaaaacaagaaaaatctgaccaagcacagtgtctcacacctgtaatcccagcactttgggaggccaaggtgggcagatcacttgaagtcaggagttcgagaccagcctggccaacgtggtaaaacccggtctctactaaaactacaaaaaattagccaggaatggtggtgcac

SEQ ID NO: 663877 - DNA, 589 bp, Homo sapiens
ctggcagtcctagctagagcaatcagacaggagaaagaaataaaggacatccaaagcagaaaggagtaagtcaaattatttttgtttacagatgatatgatcttatatttggaaaaacctaaagacttcacaaaaaaactattagaactgataaacaaattgagtaaagttgcagaatacaaaatcagcacacaaaaatcagcagcatttctatatgccaagagtgaacaatctaaaaaagaaatcaagaaagtaatcccatttacaatagctagaataaaatacctaggaattaaccaaataagtgaaagatctctactatgaaaactataaaatactgaygcaaaaaattgaagaggacacacacacacaaaagatattccatgttcatggattggaagaatcaataatgttaaaatggccatagtacccaaagcaatctacagattaaatgcaatctctatcaaaataccaatgacattcttcacagaaattaaaaaattcctaaaatttatatggaatcacaaaagacccagaatagccaaagctatctttaaagaaactttaaagatataaaacttcaggaatt

SEQ ID NO: 663878 - DNA, 608 bp, Homo sapiens
tttacttatgcaatctcattgtcttctctttttcccttcctccctctacttccagtgatattgacctccttatcataccttcatcttattaaggtgtacttaagatttatttaggctgtattttctagcatctattaaacgcacacactctccaaaccaaactaaattaaaataatgtagttaacacacctctaatgatgcaatttgaaaaatgtgcaaacaatgtaatgattgaggtcctctcaccaacagtgtgaaagaaaaaacttagataatttcctattcatttttaggaagacaccagcaggacaagcttctatacagctatccccagtgaactgccccagtcattgaagaaattttctctctgtggtccagttaatacttgttaataaataaaattgagaggtaaaagtacaaatgtcattaaactgacatcaggaacttcacaaaataacactttagcatcaccaaaaatgatggttgctatgactgggtgagcacacattcagcagtatatatctgcatgtaagaccctggtgcataaattatgatttttcaaagagaatcaaaaaamaagtcctctgactatgtcttgcttaaggtgt

SEQ ID NO: 663879 - DNA, 600 bp, Homo sapiens
ggtatgtgtcactaatagaatatctctgaagctggattgatacggggaaaacatctttcccttctagttttgagagacttcctcttggctcccaggaggagggatttcctgactttgacacacatggccaccttggcacaaaagccttgtggtatggaaaaacaaattcgtttttatgtcttcttttccctttccatctttcagcatagacttaatccccttaagcccagacatctgttgggacctgacccccggtcattggttaccagtgtgtctggcaatctggactttccagtgatgccactgagatggcacctgtcaaaagagcagtggttccatttctagattatggatcttcggataaattctgccattttcatttcacttcctgaaagtcagggttggcttgtgaaaagttgttaaacaacatgctaaatgtgaaatgttaaccctctaaactttccctgttcagagcatcagatgaggacttcattgggttttatagyggctgatttttggtagtccattgaagaagagagtttgaaagttgtatactgttaatgactgtctgcccatgtcctgcctgaaataccatgattg

SEQ ID NO: 663880 - DNA, 575 bp, Homo sapiens
tggctgaagtcttggactcagctcgttttagtgctacttaacaatgctttgagttctcagctaggggcagagggcagggcttgtcactcaagaccaagaggcaagcactcttcctgtccagtcataatatgtttgtgacaatccttaaagcacactggcttggaattaatattgaaatgaaatgtaaagttcatattagtttcctccacctcaaattaccgggccctatggagagttaaaaacttggattggttcaaactaagaaaggtagtgaactctagagactaagactttctttttacaaggtggcccgtttttttagtcttcatttaaagccatcatgcattaaacagaccatttccaaacagatctgtgtcctagcccacaaaattcaaatctaactgccattaagagagatcagccagctgatctcagctatcaagacccacagctcttgtaggaagttcagccaaagctataaagatttacattaacaacytgaagcctacctcagtgagatttaaaaacaaccagagcaacagtgcgctcacacaactatcactaaaaagcaaaac

SEQ ID NO: 663881 - DNA, 488 bp, Homo sapiens
aatgggggctcaagaaaaatgtcagcaggtgaataatgcgattgggcttgaattttagaaatttacctttgtagaaaagatagattggagaaagagagggtaaaaaaggaagcaaagagaaaagattatgagggcctctatggggctacagctctacaggccttaactgtccaattacatgacatagcagcaagaagaaatctttccacctgtcatcgcaggtctggagcctggaagatttgctgaggtaggaagtttcactaaaacaatagttagaagttaacaatgaaggtaagttccatttggagcataaagaactgagtgaagtactggtcagacacaggtagaatgacagaagtgtccaggatccatttggaaatctgattttcaaactaactaaaaaataaatctaggcttgcaattttacataatttttatttttcagatagagtctcrctttgttgccgaggctggagtgcagtggcaca

SEQ ID NO: 663882 - DNA, 553 bp, Homo sapiens
ctgggattacaggcatgagccactgtgcccagccacagattatatttaataaaatgctgatatccagaatatataaagaattataagatatatatatatggcaagtgctttgtaaaatgacattctttttttaactattaatttttttatttaaaaaatcacataatcaaaaaataactttttgtaactttataataaaacaaatgacccaactttaaaatgagtaaaagatctgaacagacatcataccaaagaagatatatggatgggtaataaacacataaaaagaagctcaatatcattaaccatgagggaaagacaaattaatgagataccaatttttactcgcaacaatggttataatcaaaatgacaataataaacattgctgaggatgtggaaaatggaaaccctcatgccagtaggaatgtaaaatgtacagccactttataaaacagtttggcagyttctgaaaagttaaatacaaatttgttacatgatccagcattcattcctaagtatatatccaagatatatgaaaacatacatgcaaa

SEQ ID NO: 663883 - DNA, 559 bp, Homo sapiens
ttgcaggccttatagacccagtgagagaactgcctcccagggcttgctaattcctaaagataataacaacttgcctacaagcacatctttcattgcaaaccaacaaatcctaagtctayagccccaaccacctccgtatctaattcacataccaagctaagccaccctcctgccctaaatcatcccaggccaggtaccaggcaactagagacaacccctatgcctcaaagccctctggaattattcaaatagccaatcctaaagtgcttactctgcccttcttgcttttcccatggaaacttcaacaaaggctgtggcctaggccttcccctcactcttgcttctgcctgtccaaacctggtatttcccctgtggtcttggtggtgtgacatgtctccttcttttaggaaatatacataataaattcttctttcagtggcatcaatttcttcctgtgccatcaatcggtcacctccattaaatagaatcccttgggtatagttttaatatgcatgggtgcagccttacctcctccagcgatgggatgagtgttcctgtg

SEQ ID NO: 663884 - DNA, 559 bp, Homo sapiens
ttgcaggccttatagacccagtgagagaactgcctcccagggcttgctaattcctaaagataataacaacttgcctacaagcacatctttcattgcaaaccaacaaatcctaagtctatagccccaaccacctcygtatctaattcacataccaagctaagccaccctcctgccctaaatcatcccaggccaggtaccaggcaactagagacaacccctatgcctcaaagccctctggaattattcaaatagccaatcctaaagtgcttactctgcccttcttgcttttcccatggaaacttcaacaaaggctgtggcctaggccttcccctcactcttgcttctgcctgtccaaacctggtatttcccctgtggtcttggtggtgtgacatgtctccttcttttaggaaatatacataataaattcttctttcagtggcatcaatttcttcctgtgccatcaatcggtcacctccattaaatagaatcccttgggtatagttttaatatgcatgggtgcagccttacctcctccagcgatgggatgagtgttcctgtg

SEQ ID NO: 663885 - DNA, 559 bp, Homo sapiens
ttgcaggccttatagacccagtgagagaactgcctcccagggcttgctaattcctaaagataataacaacttgcctacaagcacatctttcattgcaaaccaacaaatcctaagtctatagccccaaccacctccgtatctaattcacataccaagctaagccaccctcctgccctaaatcatcccaggccaggtaccaggcaactagagacaacccctatgcctcaaagccctctggaattattcaaatagccaatcctaaastgcttactctgcccttcttgcttttcccatggaaacttcaacaaaggctgtggcctaggccttcccctcactcttgcttctgcctgtccaaacctggtatttcccctgtggtcttggtggtgtgacatgtctccttcttttaggaaatatacataataaattcttctttcagtggcatcaatttcttcctgtgccatcaatcggtcacctccattaaatagaatcccttgggtatagttttaatatgcatgggtgcagccttacctcctccagcgatgggatgagtgttcctgtg

SEQ ID NO: 663886 - DNA, 557 bp, Homo sapiens
agcattaaattggttgagattaaagctttgatatgaaactggaccaaattcgttaataaccagaaagtgagactattcactaataactggaattgaccagaaaagctatcagatctacccacaatttcatgaaagcatagaaagtggagattcaaagtagcacgaaagaaagttagtgttgtgagcaaataatgtgttttttctctactgcttgcacctcacaaacaccagtatgttcaataaaccagttagaatagatagatmccaacttcctccctcaccaataaggtgtatatcatccatttgcagaagaggcttttgatgttcacaaagaggacttgtctattctttgacattctatggagcaaaatagagagaaaaataatgttactcctgaatgtctccgatcaatcaatacagacttcttgacatcatgtactgttttaaatgcttgtgtgtcttcccaaattccagtctccacatatcaaacatatcaagttaggtagactgttttacattccagataggaacataaaggaaggatataagaaaagatt

SEQ ID NO: 663887 - DNA, 556 bp, Homo sapiens
tccatctaatgaacaagactgataagtaaaaacatatttcaacatgatgtgtatgtgctataatagaggtaaatgtaaagtgtgaatataagacataggaaaggctgccaacccaaactggagtgggctggagaattaatcctgggctgcatctagaaagataaataagagttagcaagataaataaasatgtattttcaaagcacaggggcatagatgcaaatatatctggtaggagaaagcatggcacatttgaggactccaaatatttggtaaggcaaaagtataaaaagatatttgaagtggtaagagattaaggcggaaaggtagggcaagcaatggaatttgtaggacaaatgtgatatgctctcatttgcatttaggagaaatcttttgccacatttggagaaaggattgaagagaaatgagagcctggatgtgaagaaaacattaggaagctgcagcagtaacctatgtgagaaattaagagaacctaaatcagatccgttggccatcaagatttcactcattttgagacctagagattggtgctcct

SEQ ID NO: 663888 - DNA, 567 bp, Homo sapiens
gactgaacctctctagcagcccacttcctgctgacatagtttatgagaggtgggggcctatgactgccctcgaggctgaggaaacataagttaccattttgtttaggcttggaatttcactgataaccaactccaataaaactctaataggcattagaacctttgggttcacagacctgtactctgtcttgtctctayagcctcagaactttgcctgtagccctaggcctaaatttaatcatttccttcttggaaagtaataaggtgaaggcaataaacctctggtgaaacactaggtgaggcagaatgatgtgcacctgtgaccagcctgcagcccattggctaaccctaacaaataggaagaaagattccttgaatcagatagtttgagaaaggaggtatgtgggaagagcccagggactccagcttccttcatttctctggcctctcaggtatcccaattttatctccctgctgtgtttcacacctccttgccttttatgctaattttaaaacagggcggaaattttggttttggcaattctataagaagcatagttaaccgag

SEQ ID NO: 663889 - DNA, 567 bp, Homo sapiens
gactgaacctctctagcagcccacttcctgctgacatagtttatgagaggtgggggcctatgactgccctcgaggctgaggaaacataagttaccattttgtttaggcttggaatttcactgataaccaactccaataaaactctaataggcattagaacctttgggttcacagacctgtactctgtcttgtctctatagcctcagaactttgcctgtagccctaggcctaaatttaatcatttccttcttggaaagtaataaggtgaaggcaataaacctctggtgaaacactaggtgaggcagaatgatgtgcacctgtgaccagcctgcagcccattggctaaccctaacaaataggaagaaagattccttgaatcagatagtttgagaaaggaggtatgtgggaagagcccagggactccagcttccttcatttctctggcctctcaggtatcccaattttatctccctgctgtgtttcmcacctccttgccttttatgctaattttaaaacagggcggaaattttggttttggcaattctataagaagcatagttaaccgag

SEQ ID NO: 663890 - DNA, 567 bp, Homo sapiens
gactgaacctctctagcagcccacttcctgctgacatagtttatgagaggtgggggcctatgactgccctcgaggctgaggaaacataagttaccattttgtttaggcttggaatttcactgataaccaactccaataaaactctaataggcattagaacctttgggttcacagacctgtactctgtcttgtctctatagcctcagaactttgcctgtagccctaggcctaaatttaatcatttccttcttggaaagtaataaggtgaaggcaataaacctctggtgaaacactaggtgaggcagaatgatgtgcacctgtgaccagcctgcagcccattggctaaccctaacaaataggaagaaagattccttgaatcagatagtttgagaaaggaggtatgtgggaagagcccagggactccagcttccttcatttctctggcctctcaggtatcccaattttatctccctgctgtgtttcacacctccttgccttttatgctaattttaaaacagggyggaaattttggttttggcaattctataagaagcatagttaaccgag

SEQ ID NO: 663891 - DNA, 567 bp, Homo sapiens
gactgaacctctctagcagcccacttcctgctgacatagtttatgagaggtgggggcctatgactgccctcgaggctgaggaaacataagttaccattttgtttaggcttggaatttcactgataaccaactccaataaaactctaataggcattagaacctttgggttcacagacctgtactctgtcttgtctctatagcctcagaactttgcctgtagccctaggcctaaatttaatcatttccttcttggaaagtaataaggtgaaggcaataaacctctggtgaaacactaggtgaggcagaatgatgtgcacctgtgaccagcctgcagcccattggctaaccctaacaaataggaagaaagattccttgaatcagatagtttgagaaaggaggtatgtgggaagagcccagggactccagcttccttcatttctctggcctctcaggtatcccaattttatctccctgctgtgtttcacacctccttgccttttatgctaattttaaaacagggcggaaattttggttttggcaattctwtaagaagcatagttaaccgag

SEQ ID NO: 663892 - DNA, 436 bp, Homo sapiens
ccagctttgttcttttggtttaggattgtcttggaaatgcaggctcttttttggttccattggaagcccatttagcctggatgatagaacaagactccatcaaaaaaaaaaaatctgtagtaaaacagaccagcagcagaccaccaaacagtgaccatgctttttttgtgtgcaagtttggctttggaaagtactttggaacttcttcttggtccaggcactgagctggtcatcacttgttgtcatataaaatccacttttcatcacacgtcacaatccaatcgagaaatggttcatgttgttgcatrgaataagagaggatgacacttcaaaatgaagttttttggatttttggtcagctcatgaggcacccacttatctagctttttcaactttccaatttgcttcaaatgcaaaatgactgtagaaatgtcaa

SEQ ID NO: 663893 - DNA, 647 bp, Homo sapiens
attcagacatggtggcatgcacctgtggtcccasctacttgggaggtcgaggcaagaggattacctgagcttgggaagttgaggctgcagtgagctgtgatcacgccactgcactccagcctgggtgatagagcgagaccttgtctctttaaaaaaaaaaaaatccatttctggtttgtaaaagacatctataaaaccatctcatcctagtgtttttattgagaggggacagagagacagagtttacctattgatttaattttttaatgattttaaattttctccagttttcttgatgccggtctgtttattctcccactgataaagctgctcacaagtttgctcttttaagaagggagggtgacaaggggaagaggaccctgtggtggaatgcacatccccactgtgggcacagcaaggcccagccttctctccatgggatgatgggagactcagtcttctcttgatgactcagccatgtaagtgtcccatttcccaataaaacctactcctttgcctgttctctatgacatggcattcatccacaaccctgacacacaataggcaaccatggagaatgaacatgccttaccagacattatttgtgtattttctcttttccttgatcaggttttcacagaggtttg

SEQ ID NO: 663894 - DNA, 512 bp, Homo sapiens
tataatttgagcacacatttgtgaaggtgtgtaagccagccttttatgcctttattttcctccgttttagataacaaattttcaactgaccatttgaattctctatcaaaccctaactctaaggatgagactatgttgtttggtctgaagaaatgtgtcttggttcatattggtataatattcttttctcagtctttttatagtatttttaatatttcatctaccactggttatgcaaaacccaatccagagtcagtgtctattcctgtcaggacccattaattgctcccaagtctacccacactgagccaatgaractgacttgccagctgtgttaagggcttttcccctcaggaaatctgtcccagagccatctgcagtctgtctttctcactggcacacagaacagatcttgttggcattttctgcaagaagaatatgtctagattcagcccatctctgcattgctgaagtaccacatctactcatttcatggacccaggtggccatct

SEQ ID NO: 663895 - DNA, 574 bp, Homo sapiens
tctgtgtccacccagtaacatgtttctcccatttccactttattatggaactcttctggatgctgtcttccttattagattgtttctctgacataacacaagacaatctcagtatttcaggtttcaggagcattttatgtccttcactcacaggggcttttaccattaatgtccaatagtaaggtagtagctgtttctcaaattgtgtgtatcttactataccatttaggaatattctgatacagaatcccagtggtcacctatgagtggaactcacaggcttttgcagtaatctccagtctacatataataggcatgtgtkacagacacttccaagatcatatatggtatggaaggacaaaataagcattgagagaggaactactttttgcaattcagccatggcttgcttttttggtccctcattcaaatacagcactctttgggtagttttatggatagcagtgtgtaacatttctagatgtggaatatgcatcctccaaaatctaaatagaccaatgaaacattgggcttctttgtttatttcaaggagtagtaatgagatcagtttatt

SEQ ID NO: 663896 - DNA, 565 bp, Homo sapiens
cctgctgtactttttgtggcattgaagcaatatyaagactactagtgctatgggtggcaccagtttattcaagcctcaatattccactattagtccagatgagccatctgcttttttcacaagccatacagagctttgtatagagaaattcatgtataccagcacttcagctactaacatatcattgatttctttttgtgcactggatgtcctataatgtttcaaactaaaacctatgagggcttgagcagctctagttgttcccaattagcatgtcccatcaagactggcagacttgactgagggcagacttagatgctttctgttttacaacagtagatagggaaagtgttccatagtcagactaatacccataccaataacacatttagataaaggagacatgaaatccttccaaacattccgattctttttttttttctactggacaatttcaacaacacaaatgtaaaacattctaacttatattcgacctttcaccttaatcccatgagccactgcatgtctgtgccctcccaatctaattgtagctcccattaagact

SEQ ID NO: 663897 - DNA, 565 bp, Homo sapiens
cctgctgtactttttgtggcattgaagcaatatcaagactactagtgctatgggtggcaccagtttattcaagcctcaatattccactattagtccagatgagccatctgcttttttcacaagccatacagagctttgtatagagaaattcatgtataccagcacttcagctactaacatatcattgatttctttttgtgcacyggatgtcctataatgtttcaaactaaaacctatgagggcttgagcagctctagttgttcccaattagcatgtcccatcaagactggcagacttgactgagggcagacttagatgctttctgttttacaacagtagatagggaaagtgttccatagtcagactaatacccataccaataacacatttagataaaggagacatgaaatccttccaaacattccgattctttttttttttctactggacaatttcaacaacacaaatgtaaaacattctaacttatattcgacctttcaccttaatcccatgagccactgcatgtctgtgccctcccaatctaattgtagctcccattaagact

SEQ ID NO: 663898 - DNA, 589 bp, Homo sapiens
taggatgcccagttggtgtccagagagtaggagaattggttggtatcaggaaaactcccacacatttggtcacagaagtgctgaaagtgttgcatgtcatagagaaatgctttcctttcctctttacagtaaactggggagagaacagaagcaaaaaagttgcttctttaaaagccatggaaaggaaaggaattttaagaaaaataaaactcttaaatatagcaaatgggatgacagctgctgtatacaaaatgacaaaattaacaaagtaatatacccattatgcgtacagcaatttgcagttatcaaaaaattttcatatataatgcatgtgtgtgcatatatatgtatagactatgtagactatataaatgtgtatgtgtatataaattctcttcctgwagatagaatcaactggttctttcctggggcaagaacactgagttatagcttcaagacctgagtcatattactatttgctctgaatttaaaagttaaaaagtcaaacaaatttgcaagactaggttctaatgacaattactttgtcaaggatgcaaaccacttttcatttcaaaagcatatgcggact

SEQ ID NO: 663899 - DNA, 550 bp, Homo sapiens
tctgactggctgacatgacatcattaacccttcagttgataaatttatgggaatagaatgtcctgacacaaatctgtttcaataaggttataagctggaggcattttccagtggtctgatcactcatgaataagatgacagtgaagatatgaacatgccaagctaaaggaaaacttcagactggtggttaccctactaaagtgagatactccaggaatcccagccccaacgagaatctgggccccaagtatttatggcttctcccttggagatactttatttcattatgttgtacttatgaagaggaaaaaagcctggacaacccgctgtgaatctcagggctcccctttccacatcaccattgctgacactgtggaagcctcaggcccawtcttcatgagttctgtcctgaggttgggactgaagattaggacagcagggttcgcaaggttgtgagttttcatccaggggcctgaaccactaatttgggcatggggtggaagcaggaaacacaaaaggtctctgctccagtaaaagctaggacaggatg

SEQ ID NO: 663900 - DNA, 571 bp, Homo sapiens
tgagatcatgtcctctgcaggaacatggatggagatggaggccattatccctagcaaactaatgcaggaatagaaaagcaaatactgcatgttctcacttataagtgggagctaaatgaagagaacacatgaatacataatgrggaataacagagactggggcctatcagagggtggaaggtaggaggagggagaggatcaggaaaaataacgagtgggtactaggtttaatacctgggtgataaaataatctgcacaacaaatccccatgaaacaagtttacctatgtaacaaacctgtacatttacccctgaacttaaaataagagttaaaaaaagtaaagaaaataaatattaactacagtataaattatcacataagtagtataaataacatttaataataatttaattggtttcaatatttacaataaacgttattaatattattactactactactactattagttgtgagatctgagcaagtaaaagattgctttctccaaccttgtggataaggcaggactttatgaaggaagctccacttaagttgtttctatttattctta

SEQ ID NO: 663901 - DNA, 546 bp, Homo sapiens
tctcaaaaaaaaaaaaaaaaagacttggaagtcaaaattactcctaatccatgggccacagaatggatgttgtgttagcaggcatgaaaacaccattattctctccatgtacatgtctatcagagatcttgggtgaccaggtgcattgtcratgagcagtcatgtttcttttttttttttggcatgtgaagaaaagaatgtaaaattccattttatttgctttcaataatattaacatgaatgataacaaaagatgttgtctttctgaaacaaagaagacatatggcgatggcctacagataattaccttagaggaggggatgggcaatggagatccctgtatattgggttatttcttttttttatatatatactttaagttctagggtacatgtgcacaatgtgcaggcttgttacatgggtatacatgtgccatgctggcccactgcacccatcaacccatcatttacattaggtatttctcccaatgttatccctctgcccgtgccccatttcatgacaggccacggtttgtgatgttcccta

SEQ ID NO: 663902 - DNA, 585 bp, Homo sapiens
tgtcacttccttgtggctccacagtttctgatgagaaatctacagtcatttgagttgtcccctctaggtaatatgctgttttcttctggtggcttttgagattttttgtcttcagattacagcaattggcttatgatgcctcaatgtagcttgttttatttgtttgtctttctgttgaggattctcttactctcttgaatttgtaggtttatgtctttggtcaaatttgggaagttattagacattctttctttttttcttttttttttaagtcccatctygttctgggactatcttcagattcaattactgttctgttattgagtctatccagtgaggtgttttttgtttgtttgttcgttttgttttgttttttcatgagacaggatctcactctgtcacccaggctggagtgcagtggcacaataatagcttgctgcagcttcaacctcctggtctcaaacgatcctcctacttccatgtcagcctcttgagtagctgggactacagacatgtaccaccatacctggctaattttttttaaatcagttatcataggttttagttctaaaagttccatttgat

SEQ ID NO: 663903 - DNA, 539 bp, Homo sapiens
agttggtatatatttagatttcataacatttatagttgaaaaaaatagattcacagstccaagctgtttcaacacagaagttttcccataactgaactgggcatcaattttaaattaaaattaaatttcattaaaatttaaaatatagtttcttcgtcgcattgtccacatttcaagttttcagtagtcacatatggcaagtggctactgtactggacagcacagttttagacagagtcctaatttctgcctgtttggaagagagtttggaacttccatatgagtgtgcttttttgcattaggaggcaaatattcactaatggaagaacatgatacaataataatttggaatactgtattagttgctagggctgctataacaaacaccaccgactgggtggcttaatcaacatttatttccttacagttctggaggctagaagcccaagatcaaagtgctggcaggtttggtttcactgtgaggcctctctccttggtctttcttctatgcatgtctgtatcctaatctcttttataaa

SEQ ID NO: 663904 - DNA, 539 bp, Homo sapiens
agttggtatatatttagatttcataacatttatagttgaaaaaaatagattcacagctccaagctgtttcaacacagaagttttcccataactgaactgggcatcaattttaaattaaaattaaatttcattaaaatttaaaatatagtttcttcgtygcattgtccacatttcaagttttcagtagtcacatatggcaagtggctactgtactggacagcacagttttagacagagtcctaatttctgcctgtttggaagagagtttggaacttccatatgagtgtgcttttttgcattaggaggcaaatattcactaatggaagaacatgatacaataataatttggaatactgtattagttgctagggctgctataacaaacaccaccgactgggtggcttaatcaacatttatttccttacagttctggaggctagaagcccaagatcaaagtgctggcaggtttggtttcactgtgaggcctctctccttggtctttcttctatgcatgtctgtatcctaatctcttttataaa

SEQ ID NO: 663905 - DNA, 640 bp, Homo sapiens
gaatcttctgtctgtctaggtatttatatgtattatgtgtgtaatgtttatatattaaaaagctttaattaattggtttaataataataagagcctaaatcaaatattttgtcagaaaagtaaaagtgtaatgccttttakttcgtgtgacttaagtaaactttgggaaataagatagttttaaagatcattggtaaaataaaaatatctttaaaaatgtaaacatttggtctaaattatgcaggtcagatattaagtttgctaaatgctttaagttcataaactgcttctttgacttttgaaaattgttcaattttcctaccttgtagacattagattctggataaggcctgggaacatgtggagttagccacgcctcctagctacgctggagagtcagcctttatctgcacttctgccaggtgtgtcctaggccaggctccacacctggtacataatataaattacttacttaccaaggttttcaccaaaagtaaaagtcgctaagagttagcactgtaacatgtaattgagactactgaaaaaatagttctacatgcaaggcatgtaaggaaagtagaatgtactattggtgaaagattataaaaactcatgggaatgtggattcttgcctaagttt

SEQ ID NO: 663906 - DNA, 558 bp, Homo sapiens
ttttagataggcaagttaaaccagtaatttcaaaagcaattttattgcttttgagtgtaaccacccaacgggttctccttgcccactgcctagactgagccaatttatcaagacaagggaattgcaatagagaaagttaaattcaagcatagctggtggtatgggagaccagagttttattattactcaaattagtctccccccaaatttggggattggggttggtaagaataacttggtggccatcctggacaacatggtgaaaccctgtctctactaaaaatmcaaaaaaaaaaaaaaaaaaaattagccaggtgtggtggcacatgcctgtagtcccagctgctcagaaggctgaagcaagagaatcgcttgaacccaggaggcggagtttgcagtgagccaagatcatgccactgcactccagcctgggcgacagaggaagaatctgtctcaaaaaaaaaaaaagaaaagaaaagaaaaaaaaaaaagaataacttggtgtgggtatgggattgggaagtgaggaatgctgattggtggggtcagagattaaat

SEQ ID NO: 663907 - DNA, 630 bp, Homo sapiens
gaacatgattttgtttctttatttgaatatttaacctcgaagaaatgtattccactgtatattgtaagataaaactctttgttttctaataattaaccaactgtaccacatgattttttaattcatccttttagatgtcacatatatatacacacacacagacatatacactcttctgggctttgtattctgttccattgctcttcttgactcatattttgcacgattacatgtgtcttatgcctttctggagatagaactttgacccttttcccaatacacccagtatactcttcctcttctgagttcagtttctaaatttgtatttctgtaaaattatccatttcatgaagatttgtaaatgtattagcacagagattatcaaaattttctcttttagcttaaaacaaaacaaaaacaaacccctcaaaccayctatttcttgtagctctgtgtagtgggataatgtttcaaagtgttcaagggttgctttatcaccctgtccttagcttttctgtgctcttggaattccttgacttatatcccaagagtcttcataccacctattccctaccattaactagtactaccagaaatgagctcccaccctagaagcagtaaacaaaagta

SEQ ID NO: 663908 - DNA, 564 bp, Homo sapiens
ttcagtttctaaatttgtatttctgtaaaattatccatttcatgaagatttgtaaatgtattagcacagagattatcaaaattttctcttttagcttaaaacaaaacaaaaacaaacccctcaaaccatctatttcttgtagctctgtgtagtgggataatgtttcaaagtgttcaagggttgctttatcaccctgtccttagcttttctgtgctcttggaattccttgacttatatcccaagagtcttcataccacctattccctaccattaactagtactaccagaaatgagctcccaccctagaagcagtaaacaaaagtacaaatgtttgtttcaaaaattgctggtctatgtatacggcagaaaggttcagacatacacttactgactgggtttttctgctcttgtaggctacttaaaaatttccatgagttagtgaacaagaaaagaaagcaaaaactgttggcctaaaatgatttgtgaatrccaagtcctgctgtcctcctaatatggctttgctgtgtccccacccaaatctcatattgaattgtagatctcata

SEQ ID NO: 663909 - DNA, 337 bp, Homo sapiens
tttgtgaataccaagtcctgctgtcctcctaatatggctttgctgtgtccccacccaaatctcatattgaattgtagatctcataattcccacatattatgggaggacctggtgggagataattgaatcatggagtcagtttcccccatactgttcttgtggtaatgagtaagtcccacgagatctgatggttttayaaggggaaacccctttttcttggctctcattctgtcttgtctgctgccatttaaggtgttcctttcaccttccaccatgattgtgaggcctcccaagccgcgtggaactgtgagtccattaagcctcttattctttataa

SEQ ID NO: 663910 - DNA, 337 bp, Homo sapiens
tttgtgaataccaagtcctgctgtcctcctaatatggctttgctgtgtccccacccaaatctcatattgaattgtagatctcataattcccacatattatgggaggacctggtgggagataattgaatcatggagtcagtttcccccatactgttcttgtggtaatgagtaagtcccacgagatctgatggttttacaaggggaaacccctttttcttggctctcattctgtcttgtctgctgccatttaagrtgttcctttcaccttccaccatgattgtgaggcctcccaagccgcgtggaactgtgagtccattaagcctcttattctttataa

SEQ ID NO: 663911 - DNA, 470 bp, Homo sapiens
gaatatgatatggtccatctaccattgtccaatcctggataattggtgaacagaactgataactgaggagctatggcctcaagctctgctgctctggattgaggatcttggagtcctgaaaccccaggtatctcatggacctggggtccataaaggggaatggtccttagaagcatcatttttgcccatcaatctccagctccagaagcatcatttttgcccttcgatctccagctccagttggtgctatcctggacttcatggccactagactggaaaatctcagatgatgtcccttcttgagattrtgccttctttcaactcacagtgacaactgaagctttgaaccccatctactgcttactctttagacccaagggcacaggttcctaagaaatggggctgcatagagagcctgttgtaaggttagcaattttggttactgtctcttctcagtcaaaagaaggagg

SEQ ID NO: 663912 - DNA, 597 bp, Homo sapiens
tcatttgagaaaactgcatttggaatgtttagcagattcttgcaattcaaagtgtggtccgcagaccaacagcatcaccataaccttggagcttgttagaaargtagaacatcagccctcatcacagacctactgaatcagaatctgcattttgacaagatcctcaggtgacttgcatgcttaataaagtctgacaagcaccattttctgtggtattatacaattgttaattgtctcaagtgtgaaactgtgtcaaaatgccttaattcttagaaaatgcatgttgatgtggttaggggtaaagtgcaatggatgtctgcaactgacattcaaatagcacagaaaacaaaagtgtatgagatgaagtaaaagtagcaggatgttaacagttgatattaggttagtgcaactaatggcaaaattgcaatttcttttgcaccaaccaaataaattgcagtgagggctatacaagtgcttattgcactatttttcatcttttatgtagattttaaatttccataatttcaaatgtagaagatttttatggactgtctttaaatttaaaaatctattttgaggaaagttgacatgttgaca

SEQ ID NO: 663913 - DNA, 550 bp, Homo sapiens
ggctctgggttgccgtttggcatcccctatccagctaagggaattgcaatgtgggtccttgaaaacatacttcatagaagacaaccatttcccatagtgtttagatggtttatgctgtactcctgtagaaatggaagacagttcaataaagaaggaaagggcaacacagaaaactatgtttcctaagggcatatatatattttttcatcaaatamtgtcatctcttactaataattttgttttcttctgtcttgaaattcttaagggtatgatttttgtagatcctggtgcattccaaatatattgttaacccaaacctctcctctatattttaaatccaaatagccaactatctactgaaaaatttacctcaaaatcaacctgactaaaatggagcttgatattttattgtcaattaacgatttcttatctcaatcagtggcaacagcatccatccatttgcccaaaccaggaactacaatatataaagctccacctccctcaccctcaatatcaaattggttccaagaattgcccaattgtatctacc

SEQ ID NO: 663914 - DNA, 550 bp, Homo sapiens
ggctctgggttgccgtttggcatcccctatccagctaagggaattgcaatgtgggtccttgaaaacatacttcatagaagacaaccatttcccatagtgtttagatggtttatgctgtactcctgtagaaatggaagacagttcaataaagaaggaaagggcaacacagaaaactatgtttcctaagggcatatatatattttttcatcaaataatgtcatctcttactaataattttgttttcttctgtcttgaaattcttaagggtatgatttttgtagatcctggtgcattccaaatatattgttaacccaaacctctcctctatattttaaawccaaatagccaactatctactgaaaaatttacctcaaaatcaacctgactaaaatggagcttgatattttattgtcaattaacgatttcttatctcaatcagtggcaacagcatccatccatttgcccaaaccaggaactacaatatataaagctccacctccctcaccctcaatatcaaattggttccaagaattgcccaattgtatctacc

SEQ ID NO: 663915 - DNA, 550 bp, Homo sapiens
ggctctgggttgccgtttggcatcccctatccagctaagggaattgcaatgtgggtccttgaaaacatacttcatagaagacaaccatttcccatagtgtttagatggtttatgctgtactcctgtagaaatggaagacagttcaataaagaaggaaagggcaacacagaaaactatgtttcctaagggcatatatatattttttcatcaaataatgtcatctcttactaataattttgttttcttctgtcttgaaattcttaagggtatgatttttgtagatcctggtgcattccaaatatattgttaacccaaacctctcctctatattttaaatccaaatagccaactatctactgaaaaatttacctcaaaatcaacctgactaaaatggagcttgatattttattgtcaattaaygatttcttatctcaatcagtggcaacagcatccatccatttgcccaaaccaggaactacaatatataaagctccacctccctcaccctcaatatcaaattggttccaagaattgcccaattgtatctacc

SEQ ID NO: 663916 - DNA, 592 bp, Homo sapiens
cattccataagggtccaaaataaaaagatgcttgtagaacaaagaataaaatattttttttaaaaacagagcattttatcagatatgtgcactcaaaaaacaaaatctgtaaactgtaaactgaggttgaaaactgggcagaattggggcccgtttaaatgaatgattcctctagaaaacatatatatgtttctaccttgtgaaatgaccttcagtgaacatttaagtaaatatcagtgcactaaacctatacattttcagccattttgaaactgagtgggattttgctgagtttcaggggttcagtagactcctattggtcaatatcatgaatgactcctccatgtaacaagatagaagacaccagtagagttcagtcatttctattgaaagtcataacaattttcctttgaataagatcacttttaaacatatcttggtggtgaattatttatatctttcaagtctttgctgctgaggtggagaacttgaaaatggttttctyacagtagaaatttacttcatgttaaacacacacaggaaacaaatttactacttttttaaagaaataaacacagaagcaaatgaaatg

SEQ ID NO: 663917 - DNA, 448 bp, Homo sapiens
cctttgccttcttcaccattctgcaaacacaccttgttctttcttccttccttgtctttgcccttttttttttttttctatcttcctaatctcccctctggccttcgtactcctagaaaaaccctacccacccttcagaacaccagtttaaagatcacctcaaaggcttctacgaacctgttattcctccctcctctacgttcctctactaatgatactcagagggccacaatacactgarcaagtggagctgtcattctgctcaagataaatctgtctgtgggcctgtcagcagaagtgagttttgttttgtatacttccatcacaaaatgtgatacaatgtgttgtgctcaaaaaaatgtttgcggaatccatttaaaaacaaacccccaaaatggtatctttcctttgctctgtgctggcaaagcctggccacctccttggttca

SEQ ID NO: 663918 - DNA, 486 bp, Homo sapiens
ttatgtgatagttcctgttatataggaaatgctcatgaatttagtttctttttcttctgtgttgtgaggtgggccatgtggtcaggcattgttttgcatttcattttctatggtatgtctgtgaatatgtattcgtacgcccacctcataataattgttccacagtatgaaggagattagtatatcatttatttcttgaatgaacagaccacaaacaatgaacttctgttttatgaataattctttgtacctcaacatctctgggagctgtaatgtagccagttgctattgctgggcgggggagaggacttttttctcattgctgccatctaagagaagtgtttctgcttttgtaaattctgtcatggaaaagccagcctttcataaactggcctgtaaaawtaagtacgatgtataatattatttccatgaaaaactgtattttaagtatctactgacataggacaaattttatgcagaaccact

SEQ ID NO: 663919 - DNA, 564 bp, Homo sapiens
attgtagttagtaggttacatgtcccaaagacaacattgctcaaagttgttaacaatgaaaataattaaattatccaattgtaggaaatcgattaacaaattcagagtacacctaaaaaataaaatactatgcagatgctaaaaatggtaatatagatgtataattaatattggacagaaagtcgctcatgatatattgatgtaaataatttcaaaacagcacgtacagcatgcatctgatttttaaagacatatartacagatatttattataggtgcatacatatatgcctggaagattaattcagactgttagcagggattatttctgaatagttggggtaaaggtcattttgtttttatgttttatttattttacttacctgcatttttaaatttttacatgaacaatccattttacatggattaaagaaataatgattatcttaaaagataagaaatcttaaagattaaaatctaataaaataaaagtaagctgagctgggcatggtggctcaaacctgtaatgccagcacttttggaggccaaggcagaaagatgact

SEQ ID NO: 663920 - DNA, 624 bp, Homo sapiens
tccgcatcactaattattatagaaatgcaaatcaaaaccacaatgagataccctttcacaccagtcagaatggctattactaaaaagtcaaaaaataacagatgctggcaaggccckggagaagagagaatgtttacatactgttggtagggaattagttcaaccactgtagaaagtagtttggagattttgcacagaacttagaactaccattcaactagcaatcatattattggacaggtacccaaaggaaaataaattctaccaaaaatacacatgtatgttcatgtgtatgttcatcacaccactattcacaatagcaaagacatggactcaacctgggttcccatcaacagtggattgaataaataaaatgcggtgcatagataccatggaatactctgcaaccataaaataaaatagaataaaatcatggtttttgcagcacatagacagagctggaggccattatcctaaatgaattaacagaggaacagaaaatcaaataccatatgttctcttgtgcaagtgggagctaaacattgggtacacatgggcatacagatgggaataataggcactggtgactatcatagaagaaagagtgggaggagggcagtggct

SEQ ID NO: 663921 - DNA, 576 bp, Homo sapiens
tggctgtgaatccatctggtcctaggcttttttttttattggtaggctatttattactgattcaattttgaagctcattataggtctactcagggattcaatttcttcctggctcagtcttgggagatgtgtgtgcccaggaatttatccatttcttctggattttctagtttgtatgtacagaggtattcatagtattttctgatggttgtttgtatttctgtggggtcagtgggaacatcccctttgtcatttctaattgtgattattttcatctctctcctttattagtctagccagtggtctgttttattattttttttcaaagaaccaattcctaaatttgttgatcttttgtctagttttttgagtctcagtctccttcagttcagctctgagtttggttatttcttgtcttctgccacctttggggttacttttcttttgcttctctagttcttttagttktaatgttaggctgctaaattgagatcttttaaaatttttgatgtgggcatttagtgctataaatttccctcttaacactgccttaggtgtgtcccaaagattctggta

SEQ ID NO: 663922 - DNA, 576 bp, Homo sapiens
tggctgtgaatccatctggtcctaggcttttttttttattggtaggctatttattactgattcaattttgaagctcattataggtctactcagggattcaatttcttcctggctcagtcttgggagatgtgtgtgcccaggaatttatccatttcttctggattttctagtttgtatgtacagaggtattcatagtattttctgatggttgtttgtatttctgtggggtcagtgggaacatcccctttgtcatttctaattgtgattattttcatctctctcctttattagtctagccagtggtctgttttattattttttttcaaagaaccaattcctaaatttgttgatcttttgtctagttttttgagtctcagtctccttcagttcagctctgagtttggttatttcttgtcttctgccacctttggggttacttttcttttgcttctctagttcttttagttgtaatgttaggctgctaaattgagatcttttaaaatttttgatgtgggcayttagtgctataaatttccctcttaacactgccttaggtgtgtcccaaagattctggta

SEQ ID NO: 663923 - DNA, 566 bp, Homo sapiens
gatttttctcttactcccctttttaagcttcttgttgaaaagttatatactgtttctattcttttaatggctagttataatgataatatctatactcaataatgtcccaagttgaacaactttaacctaggaaacacatggagtttggcacactttggtttcaaacacacacacacacacatacacacattattgcctagyagttgagttatggctaacttctttttttcctaaagtatctttatttcttttaatggctagttataatgataatatccatattcaataaagtcccaagttaaacaactttaacctaggaaatacatggactttggaatactttggtttcaaacacacacacacacacacacacacacacacacacacacacaattgcctagtagttgagttatagctgacttctttttttcctagagtatctttattttacctcattcttcaaagatggtttcaacggatgtaaaatttcaactgacagtaaaaactctcagctttttgaggaaattgtccccactgtcttctccctttcactgttgctgttgaga

SEQ ID NO: 663924 - DNA, 547 bp, Homo sapiens
tcctcgaagggctaatgacacctcctcataggtttattataaccctcaaaagaggacaggttagaatcattggcatatactgagtctaggataagyggcaggtggtgttggttattgtcattgtcattgccattattattagatatcagagctcccagggaaagggtccagcttccttctgaggcttacaaagccctcctctgcccagctccatcgctcaacctcttcccgactttccccaccctgctgttcccttctgtataccccagctgcaaggtgtaatagtgtctctccacacccctcgcctgctcacctctgggcctttgcttgtactgcttcctccacctggagcctcctccccactccacaagacgacaaactccttcaagattcacctcctctaggaagccactcccagtgcctgagcatgctcccacaatgatgtgttctgcccattctcatttgcagtacttaccacaatgcattgcaatgtgtatatatatattcccatttaaatgtgtttgtgtataaatgcatatatactcat

SEQ ID NO: 663925 - DNA, 547 bp, Homo sapiens
tcctcgaagggctaatgacacctcctcataggtttattataaccctcaaaagaggacaggttagaatcattggcatatactgagtctaggataagcggcaggtggtgttggttattgtcattgtcattgccattattattagatatcagagctcccagggaaagggtccagcttccttctgaggcttacaaagccctcctctgcccagctccatcgctcaacctcttcccgactttccccaccctgctgttcccttctgtataccccagctgcaaggtgtaatagtgtctctccacacccctcgcctgctcacctctgggcctttgcttgtactgcttcctccacctggagcctcctccccactccacaagacracaaactccttcaagattcacctcctctaggaagccactcccagtgcctgagcatgctcccacaatgatgtgttctgcccattctcatttgcagtacttaccacaatgcattgcaatgtgtatatatatattcccatttaaatgtgtttgtgtataaatgcatatatactcat

SEQ ID NO: 663926 - DNA, 525 bp, Homo sapiens
tttatgccaataatttaagcaaattatgtgaagtgaacagatctcttgaaatatgtgaattatcaaactcaagaaaacagaaaatctgaatgccatatgtcaactagagaaggaaatgctgaaacatgctacaagattaattcactttggaaacattatgctaagtgaaataagtcagatgcgaaaggacaaatgccatatgattacacatgtatgacgcacataaagtagtccarttcacggagacagaaggtagaatagtggtttccagggtctggggggaggggaatggggagttattgtttaactgatacacagtttcagttagggaagatgaaaaagttctggagatggatggtggtgatggatgtacaacaatgtgaatgtctttaatgctgctgaactctacacctaaaaatggtaaattttatgttatgtgcattttatcataatttaaaatttaaaacatacaatgtaaacaaaattaaatttgtaacttaaaaaaaataaaaatttccctcaaat

SEQ ID NO: 663927 - DNA, 615 bp, Homo sapiens
ggagaagggtcagggcgggaggaggaatctagcccacttctggctcctaacacaagaccgtgagcgagagaactccttaagtctcgttggggtccctctctatgacatggggacaacaagccaatagggaaacgggattggaaaaaccgaagatgatggctctaaggcaacatctggcatgaattaggcactcacttggtatatgtagcatttcctcagaggagcattcttttttgaaaattggaaataacctaaaattccaaggaatgggttrtagtgactcagcagaaaatcaagcagccattagaaatggttttttggagggcgatgtttgcaacgtttagacaaaatgggcataaatgaaggaaaaagaaccaagtctgcgtgtgatccaaatacaaccacataaatcctggcgctgcatagataacaatggatgggacctcagggaaatgagaaggaagggatggaagcaggaagtgattatgttttatttgataaaaagtcatgtcaataatttatgtgtgctcttaaacaagaaaaaaaaaagtctggtaaacaaggaaagtgagaagctgacacaaacaggggaaagctaagcagacgcaaccacta

SEQ ID NO: 663928 - DNA, 615 bp, Homo sapiens
ggagaagggtcagggcgggaggaggaatctagcccacttctggctcctaacacaagaccgtgagcgagagaactccttaagtctcgttggggtccctctctatgacatggggacaacaagccaatagggaaacgggattggaaaaaccgaagatgatggctctaaggcaacatctggcatgaattaggcactcacttggtatatgtagcatttcctcagaggagcattcttttttgaaaattggaaataacctaaaattccaaggaatgggttatagygactcagcagaaaatcaagcagccattagaaatggttttttggagggcgatgtttgcaacgtttagacaaaatgggcataaatgaaggaaaaagaaccaagtctgcgtgtgatccaaatacaaccacataaatcctggcgctgcatagataacaatggatgggacctcagggaaatgagaaggaagggatggaagcaggaagtgattatgttttatttgataaaaagtcatgtcaataatttatgtgtgctcttaaacaagaaaaaaaaaagtctggtaaacaaggaaagtgagaagctgacacaaacaggggaaagctaagcagacgcaaccacta

SEQ ID NO: 663929 - DNA, 615 bp, Homo sapiens
ggagaagggtcagggcgggaggaggaatctagcccacttctggctcctaacacaagaccgtgagcgagagaactccttaagtctcgttggggtccctctctatgacatggggacaacaagccaatagggaaacgggattggaaaaaccgaagatgatggctctaaggcaacatctggcatgaattaggcactcacttggtatatgtagcatttcctcagaggagcattcttttttgaaaattggaaataacctaaaattccaaggaatgggttatagtgactcagcagaaaatcaagcrgccattagaaatggttttttggagggcgatgtttgcaacgtttagacaaaatgggcataaatgaaggaaaaagaaccaagtctgcgtgtgatccaaatacaaccacataaatcctggcgctgcatagataacaatggatgggacctcagggaaatgagaaggaagggatggaagcaggaagtgattatgttttatttgataaaaagtcatgtcaataatttatgtgtgctcttaaacaagaaaaaaaaaagtctggtaaacaaggaaagtgagaagctgacacaaacaggggaaagctaagcagacgcaaccacta

SEQ ID NO: 663930 - DNA, 581 bp, Homo sapiens
ctctgatgcatcttcaggagtgagtaggtggaatgaagacctggtaggtgagacttttctctcttgtcagagaaagtttgacttgggggagcctggaaaacagggacaggagatggagtgccccagccaggcwtgccctgcccaggtcagagttcttgtaaagcaccatctgattgtgtgttttctggtggctacaataagctgatttttggagcagggaccaggctggctgtacacccatgtgagtatgaccctgcaagtgaccagtgcaaaaagaactgaccacttgtctatgagaaaacaggtgatgatctatagcaaacttggggatatattgagaagcactcattttccattcctacaagctctcttggtgacttaaaatgttcccatttctcatatgaaacacagaagtgccaagagccaattgcgtaaatgaaaatctgagcagaataatttatagaaacataaaaagagttccaaataatgagtgctttcaagtgaagctgataatatcggcaccagataatctgaacattcaggaaattagctaagtgcccttgggggaaagagatgagtta

SEQ ID NO: 663931 - DNA, 581 bp, Homo sapiens
ctctgatgcatcttcaggagtgagtaggtggaatgaagacctggtaggtgagacttttctctcttgtcagagaaagtttgacttgggggagcctggaaaacagggacaggagatggagtgccccagccaggcatgccctgcccaggtcagagttcttgtaaagcaccatctgattgtgtgttttctggtggctacaataagctgatttttggagcagggaccaggctggctgtacacccatgtgagtatgaccctgcaagtgaccagtgcaaaaagaactgaccacttgtctatgagaaaacaggtgatgatctatagcaaacttggggatatattgagaagcactcattttccattcctacaagctctcttggtgacttaaaatgttcccatttctcatatgaaacacagaagtgccaagagccaattgcgtaaatgaaaatctgagcagaataatttatagaaacataaaaagagttccaaataatgagtgctttcaagygaagctgataatatcggcaccagataatctgaacattcaggaaattagctaagtgcccttgggggaaagagatgagtta

SEQ ID NO: 663932 - DNA, 574 bp, Homo sapiens
gaccagcctgaccaacatggagaaaccccatctttactaaaaataaaaattagccaggtgtggtgcacatgcctgtaatcccagctactggggaggctgaggcaagagaattacttgaaccaaagaggcagaggttgcagtgagccaagatcatgccattgcactccagcctgggcarcaagagcgaaactccatctcaaaaagaaaaaaaaaagatgaagcacacctacaggatctagaaaatagcctcaaatctcagagttattggccccaaagaagaggtagagaaagagatggggtagaaagtttattcaaagggataataacagagaacttcccaaacctagagaaagctatcaatatccaagtacaagaaggttatagaacaccaaacagatttagcccaaagaagactacctccaggcatttaataatcaaattgccaaaggtcaaggacaaagaaagagtcctaaaaggagcaagataaaacaaacaaataacatacaacagagctccaatatatctgacagcagacttctcagtggaaacttcacaggtcaggagagagtggcat

SEQ ID NO: 663933 - DNA, 574 bp, Homo sapiens
gaccagcctgaccaacatggagaaaccccatctttactaaaaataaaaattagccaggtgtggtgcacatgcctgtaatcccagctactggggaggctgaggcaagagaattacttgaaccaaagaggcagaggttgcagtgagccaagatcatgccattgcactccagcctgggcaacaagagcgaaactccatctcaaaaagaaaaaaaaaagatgaagcacacctacaggatctagaaaatagcctcaaatctcagagttattggccccaaagaagaggtagagaaagagatggggtagaaagtttattcaaagggataataacagagaacttcccaaacctagagaaagctatcaatatccaagtacaagaaggttatagaacaccaaacagatttagcccaaagaagactacctccaggcatttaataatcaaattgccaaaggtcaaggacaaagaaagartcctaaaaggagcaagataaaacaaacaaataacatacaacagagctccaatatatctgacagcagacttctcagtggaaacttcacaggtcaggagagagtggcat

SEQ ID NO: 663934 - DNA, 519 bp, Homo sapiens
ctcgatctcctgacctcgtgatccgcccgcctcggcctcccaaagtgctgggataacaagcgtgagccaccgcgcccrgccgtgatattactcttaacatcgcagggggtgtacacttcccctgtgatattgtttctaaatccagaggggaagtggatgatattactcctaatatcgcacggcgtgtacacctttcccaccatgatattgttcctaatatccagggcgggagaggatgatattactcccactatcgcaggggttgcataccccctctgtgatattgtttttaatatccagggggcagaagatgatattactcccaatattgcagagggcgtacaaagccccgccccgtgatattcttcctaatatccaggaggggagaggatgaaattactctttatattgcaggaggcatacacatccgtgtgataatgtttttagtatcagttggggagaagatgatattactttcaaaatcgtgggggtgtacaccccccgttgtgatatcgttta

SEQ ID NO: 663935 - DNA, 565 bp, Homo sapiens
cagggtctagcatctgtccaagaccgtgctgatggtcagtgcacagcagtggaggggccccagccctttactcccaccctgagtttggtggagccacacagctctttgctaagtgaccctcaaacccagtgtgagataagctgagtgttgacagtgcccacctgctaggsaaccaagtactgagttcctgccccagctcaggactgtggcgcaggccatgacctccctgagcctcagttttcatatctctgaagtagacagcatggtctctgtttcctcccatctttcaaaaattctatggaaattattgtgacttttttctctgtaattgtagggtttcacagaggcagggccttgtctgagtcaaggtcattagaaataaaggaatccaagggctttggatgccttggcctaattctaggtggtaaagagggaaggatgaaagcacaaatcacaggaagtgcctaaatcctgcttggatttagtgttgcctcaaacagggatatgcagaaatccaaccccagggtctcccataggaagaagactaggagtgggaagtgccaaa

SEQ ID NO: 663936 - DNA, 576 bp, Homo sapiens
tggtactggaatggatggtacagggatgcgtttctgggcttctggctgcaagaagcctcatcctttcccccagtgtaaagcattgctgggaatcatcccattatgagctactatttactgaatgcctgacacgtaccagtggccattctcttgtcttttatgtaatcctcattcagtgattacacacatcctaataataggtagccgatattttgcccattttacaggtgaggaaacagaggcttgggataagtaamttatccaagattatatagccacgaatgacagagctagagtttaactcaaatctgtttgactctagggccttgttattaaccgtgccaccaccatgcctcctgcattctgtgaaggaagacttcacacctcaaaggccatctgtttggcctttggtttgcccatcctgagccttcttaccatagcgaccatggcatggtgactcagcacttctgaagagatcagcagagtcattgggttgggtggcagaatacaggtatggcagggagggaaggagaaacttagggggactgtttattgcgcatacagttagagagaaag

SEQ ID NO: 663937 - DNA, 532 bp, Homo sapiens
aaattatctatagtgcttaaaagggacagggcattctcaaacatgaagtttcaattgtatctcaaagggtcctgctgaggaagaatgaagcggcttcagcaatcagaaagcggctgcacaggttgttttctgatatgatcaaagtgtgggcagagatgaatgtcaagtctttcacatgagaaaaatgaacctcggccgagtgtggtggctcacgcctgtaatcccagcactttaggggactgaggcaggaggatcgcttgagcccaggagttcaagaccagcctgggcaatatggcaagactccatagctaaaagtaaaaataaaaataaaaaatttaattagctgggcatggtggcatgtgactgtagtcctagctactcgggagrctgaggcagaaggattgcttgagcccagaagttcaaggctgcagtgagctatgaagctatggagtgccactgcaccacagcctgggcaacacagtcagaccatgtctccaaaaaaaaaaaaaaaaaagatagaaaaaaatgaacc

SEQ ID NO: 663938 - DNA, 611 bp, Homo sapiens
acagagtatcttcctattgtccaacgtctagggctttgcactttcttttttaccagatggtagtgctaaaatcattttcaaagtgaatattttagctttaaaaaaataaaacatgagatggcatgtatggaaaattaggccaatttaattttgttcactattttgttaaaatwatttttagaatatttcatcaatctggacattttcacagatatttttatcagttcagcctgttctgtattacttaccagtctggttgctatggcatgacaatgatttttcttatttttttccaaacaaataataacttttctgtaacaatgcacttaggttttaaaaagtgcatacttgctcttcaaggctattttcaattgtatagaccaactgtactttagcttctaactgtctttaatcttcagtgttattagaaaaggattcatgtccttggggacagagggtttttaattgaaacccaaaccccacagcactaataaaatattctgtgatatagcaatatgaaggttatttaaaggaagaaaagagcaataatttggttcattcaaaaaagtgaataaactctggccccaatttagagctaggaaactagatcc

SEQ ID NO: 663939 - DNA, 611 bp, Homo sapiens
acagagtatcttcctattgtccaacgtctagggctttgcactttcttttttaccagatggtagtgctaaaatcattttcaaagtgaatattttagctttaaaaaaataaaacatgagatggcatgtatggaaaattaggccaatttaattttgttcactattttgttaaaataatttttagaatatttcatcaatctggacattttcacagatatttttatcagttcagcctgttctgtattacttaccagtctggttgctatggcatgacaatgatttttcttrtttttttccaaacaaataataacttttctgtaacaatgcacttaggttttaaaaagtgcatacttgctcttcaaggctattttcaattgtatagaccaactgtactttagcttctaactgtctttaatcttcagtgttattagaaaaggattcatgtccttggggacagagggtttttaattgaaacccaaaccccacagcactaataaaatattctgtgatatagcaatatgaaggttatttaaaggaagaaaagagcaataatttggttcattcaaaaaagtgaataaactctggccccaatttagagctaggaaactagatcc

SEQ ID NO: 663940 - DNA, 637 bp, Homo sapiens
cttcatgaagcctacagtcttgtgagaaaaatagatattacactaataactacctaattatgattgtgattatcacaataataaaaagttacattatacattaaaagcattttaaattatattttattctgtctaggggatgaaaaaaggtttttctaggaatgtgatactgaagttgagacttgaaagatctaaaagagtatttggtgtgaaaggagcacgtgtatttgatcgtgcaaatgaaatatcataaccaaaggsgagaatgactcaagagttgacaagagagacagacaggctcttgtcagtcatgctaaaaatcttcacatttttccaagagcaccgagaagctagaggaaaattttagaaacagtgacccaatcagtctggggtttgctggtactttctgaaatcctgatagagtgaagtatgaccccttctccctcactgagcacccatgactccctcttacttccaggcatggccattctcagagaggggagacgttgagattactatgagagatggcattaacttatgcccaagaagggccttcctagacatgtattttattgtgcgctatttgttttcctcactctggccctctctgcacagcatcttgaagacacatgactta

SEQ ID NO: 663941 - DNA, 594 bp, Homo sapiens
tttaaattctttaaaacaaaaaattgtagttttttagaagcttagtaaatagatttaagtagaaacaggcaaagattttataagattgtattatattttcttcactgctttataacaattacatatgcttacatttaaggttgggtaacaagttttacgtacaaattagtaaaaggtgactctasactttatgttttactaaattctaagttttgtggcaacagctatgatttggagaatcagtgcggtagactaccttggactaggtgaaagacctgggttctatttctagctctgacatttcgcaggtgtgtgactagataaagactagataaatcacaacttttctgtttttctatctatataacactgattatctcatcttgctgtagtaaggatctagtgttaatgtaatacaagaatcaaatactggctgtctttagccaggggaactggatggctgggagtatgagtaggaggacgacttttactgtattgccttttatatcatattaagtatacatacagacaagtactatttaccccaaaattattaaataggctagtaagtttcaggacacatttggaaatata

SEQ ID NO: 663942 - DNA, 599 bp, Homo sapiens
ggaaaacatgcctgccacacggaagccaatgagatatgggcatacagagggacacacggaggtctgttttgatgattctgggaggtaaggttctttgagaaacarcgttttaggtgcaaatgttaaaacatttatccttaaactttatatgtgcagtcagctaaaaatgactcatgcggatagaggaataatgttgaaatctaaaatggcacacatatttctttagattattgtttgattcgggccgtcatggtagttgtagtatatcgacaaagttataatcgtacttccagaggagttggaaagatgcgagcttctctccatatattttccccttccctgcatcttacattattaattttgtcagatcactagttactgcctacttgtcaaattcagtggcctgttctgtttggaatgatatccttccatgcctttagtgatgctatttccctttttgcttatttttttttaactttttgacggcttaaaacaattttttcctctgattcctaaactataatattttctacggttattctggtcccttttatctttccaagtcccattcttacgcactactgctcgattgcacggct

SEQ ID NO: 663943 - DNA, 599 bp, Homo sapiens
ggaaaacatgcctgccacacggaagccaatgagatatgggcatacagagggacacacggaggtctgttttgatgattctgggaggtaaggttctttgagaaacaacgttttaggtgcaaatgttaaaacatttatccttaaactttatatgtgcagtcagctraaaatgactcatgcggatagaggaataatgttgaaatctaaaatggcacacatatttctttagattattgtttgattcgggccgtcatggtagttgtagtatatcgacaaagttataatcgtacttccagaggagttggaaagatgcgagcttctctccatatattttccccttccctgcatcttacattattaattttgtcagatcactagttactgcctacttgtcaaattcagtggcctgttctgtttggaatgatatccttccatgcctttagtgatgctatttccctttttgcttatttttttttaactttttgacggcttaaaacaattttttcctctgattcctaaactataatattttctacggttattctggtcccttttatctttccaagtcccattcttacgcactactgctcgattgcacggct

SEQ ID NO: 663944 - DNA, 599 bp, Homo sapiens
ggaaaacatgcctgccacacggaagccaatgagatatgggcatacagagggacacacggaggtctgttttgatgattctgggaggtaaggttctttgagaaacaacgttttaggtgcaaatgttaaaacatttatccttaaactttatatgtgcagtcagctaaaaatgactcatgcggatagaggaataatgttgaaatctaaaatggcacacatatttctttagattattgtttgattcgggccgtcatggtagttgtagtatatcgacaaagttataatcgtacttccaraggagttggaaagatgcgagcttctctccatatattttccccttccctgcatcttacattattaattttgtcagatcactagttactgcctacttgtcaaattcagtggcctgttctgtttggaatgatatccttccatgcctttagtgatgctatttccctttttgcttatttttttttaactttttgacggcttaaaacaattttttcctctgattcctaaactataatattttctacggttattctggtcccttttatctttccaagtcccattcttacgcactactgctcgattgcacggct

SEQ ID NO: 663945 - DNA, 633 bp, Homo sapiens
aagatggacaataacaaatgttagtgaggatctggataaataggaacccttataagttgctggtaggaatgtaaaatggtgccattaccagttcctcaaaaggttaaccagcaattccatagctagctataagcccaaaatcaatgaaactgtgtatccacatgaaaacatacatgaatattcatacaccattttccctgatagctgaaaagtagaaacaacccaaatgtccatcaactgatgaatggataaatgttatttgataacaaaaagaagtgaagtactgatacatgttataacataaataaaccataaaaacactatgataagtgaaagaagcctcacaaagaaccacatgttttatcttatttttccaaaaagaaaaatgaacttattaagagggatattgtattaacaggggtggaggaaaaaagaaacacaaaatactagtaagcaagtaattggggcaatttatagagcggtgttcctagtggaatataaacttctggtccagagaagtgatttttcaataacttaggtgagcactgaaacttgtcagaaaccaggaattcccttcrtagcatttgggttaggactgctagtaattttccaacagagggtgttcatgttcaa

SEQ ID NO: 663946 - DNA, 579 bp, Homo sapiens
ggtaagtttaaggtatttacacataccatgatttgtgatatactttaatacatgttaccattttattgttttctataccacaggctttcttttcatgggttttctcattcttgtgtcttcttacgcaagtcatgttaactttttgttctattactctactttctaatattttagaagctgtgtttttaatctctatttccctaattatccttaaaaatattaacattacggggtcaatgagtgtctgatttttctattcggaactagaccaarggttaacattctttccatgctccccgcctttttccgcttctccatctccaataatgatgctatataaatgtgacattaaaactattattatgtctttataatcactatttaacttgatttaattgatattaataatttataattgtttattttataccatattaatattgattttaatatttaatacttaaatatttattggcatttatcttcatttcgtaattcttctagattaagtatggtaaattttctgataatttaaatgtccaaaagtgtctttattttgacctcacatttaatagtaga

SEQ ID NO: 663947 - DNA, 577 bp, Homo sapiens
tttcctgttgacataactgctaattaatttcctcttcacttatgccagttgtgctagtgagctctttattttgctgctgctgctgctgctgtcgctgtttaattagagaaaatgtgaatcatgagacagacatgattaagccactggaaaaaattatgagacccctataatccaattcaggagaaggacacagagaatttcccaagataacagcagaaaaatttcccaggataatagttgtgcaacatacccaagagaaagtaattcagataggagaattgagattcccaaaggaaaagtttccaagagggaaaaaaaatgaacatttattgttatggattaaattgtgtcccctccccactctcaaagaaaaatatgctgaagtcctaaccctcagcacctcaaaatgtgaccttatttagaaatagagttgttgcatatgtagttaagttgaggtcatactgaagtagggtgggcccttaatccaatatgacaagtgtcattatacgaagaaaagagacacagacacaggagtggcagatttggggsagaatgccctgtgatgaaggaggtaaag

SEQ ID NO: 663948 - DNA, 627 bp, Homo sapiens
catctgttattggacacttaggttgctttcatatcttgactattgtaaatagtgctgcaatacacatggaagtgcagatatatattcaatatactgattttctttattttggctatatacccagaagtgggataactggatcaaatggtagttctatttttagttcactgaggaagcgccatgctgttctccatagtggttatactaatttacattcccaccaacagtgtatgagggttcccttttctccacatcctcaccagcatttgttattgcttatcttttggataaaagccrttttaactggggtgagatggtacctcattgtagtttttatttgaatttctctgatgactagtaatgttgagtatttttttacatacttgttagccatttatatgtcttattttgagaaatatctattcagatattttgcccatttataaagtggattatttgggtttttcttccttattgagttgtttgagcttcttatatattgtggtcattaatctcttgtcagatgggtagtttgcaaatatttcctcccattctgtaagttgtctcattcttttgttgattgttgtatttgccaaaaagcagaaactttttaacttgatgtgatcc

SEQ ID NO: 663949 - DNA, 587 bp, Homo sapiens
gtgagaggcacagacagtggtgaactataattttaagtaaatctgtgtatgaaagaaaactgacactacaacccatatcctttgccctcagaggttacaacatttagaaagcacttgaaatgttcagtgcaacatttatatcagtaagaaatcttaaattgttgaataactcgattttcttattgctgtgggaatttagttaaatgcccattaattctcaagattttgtgtgtgtgtgtgtgtgtgtgtgtgtgtgtgtgtgtgtgtgtgtgctggagtttcactcttgttgmccaggctggagtgcaatggcacgatctctgctcactgcaacctcccccttgcaggttcaagtaattctcctgcctcagcctcccgagtagctgggattacaggcacgcatcaccacgcctggctaactttttgtgtttttagtagagacagggtttcaccctgttacccaggatgatctcgatctcctgacctcaggtgatccacccaccttggcctcccaaagtgctgggattacaggcgtgagccaccatgcccagctgtctgagtttttaaaaagcctcaaacttaaaact

SEQ ID NO: 663950 - DNA, 587 bp, Homo sapiens
gtgagaggcacagacagtggtgaactataattttaagtaaatctgtgtatgaaagaaaactgacactacaacccatatcctttgccctcagaggttacaacatttagaaagcacttgaaatgttcagtgcaacatttatatcagtaagaaatcttaaattgttgaataactcgattttcttattgctgtgggaatttagttaaatgcccattaattctcaagattttgtgtgtgtgtgtgtgtgtgtgtgtgtgtgtgtgtgtgtgtgtgtgctggagtttcactcttgttgaccaggctggagtgcaatggcacgatctctgctcactgcaacctcccccttgcaggttcaagyaattctcctgcctcagcctcccgagtagctgggattacaggcacgcatcaccacgcctggctaactttttgtgtttttagtagagacagggtttcaccctgttacccaggatgatctcgatctcctgacctcaggtgatccacccaccttggcctcccaaagtgctgggattacaggcgtgagccaccatgcccagctgtctgagtttttaaaaagcctcaaacttaaaact

SEQ ID NO: 663951 - DNA, 647 bp, Homo sapiens
aaatcaataatgaaaaccactcattacaaaaataacctctcttattcaagcacacagaaaaacatatttatcctgcttcctcactccagcccacaagcaaataaagcaaacttcttcaggaatataactccagcacatcttcaccaaccaatacatgttaccttctagtatacataytaacttctggttaacttcttccctgacaactgactacatcccaagcccattaagacgatttgccaaaaatgaagaagcatcctgcaccaattgaaacagttccattagctatgactatgtcccagagcagaagtctgccaaacacatatttgcccttgaattagatataataaaacaccagttctagtcatttgttgtaaatggttgtgttggaatgcaatatacctaacaacttgattattttctggaggatggtactaaagaaataaaatagtattcatcaaatatttaagcatgtgccaaacactattctaaggatttcacaatattaagaaaaattctaagcaaaatggaaatgagtatatacagaaccctaaattcaaaaggtatgagaaattagaagtattgtcagcatgccagaagcaagaacaacacaaatagagtaactacagaaaccaacagaaaaacca

SEQ ID NO: 663952 - DNA, 647 bp, Homo sapiens
aaatcaataatgaaaaccactcattacaaaaataacctctcttattcaagcacacagaaaaacatatttatcctgcttcctcactccagcccacaagcaaataaagcaaacttcttcaggaatataactccagcacatcttcaccaaccaatacatgttaccttctagtatacatattaacttctggttaacttcttccctgacawctgactacatcccaagcccattaagacgatttgccaaaaatgaagaagcatcctgcaccaattgaaacagttccattagctatgactatgtcccagagcagaagtctgccaaacacatatttgcccttgaattagatataataaaacaccagttctagtcatttgttgtaaatggttgtgttggaatgcaatatacctaacaacttgattattttctggaggatggtactaaagaaataaaatagtattcatcaaatatttaagcatgtgccaaacactattctaaggatttcacaatattaagaaaaattctaagcaaaatggaaatgagtatatacagaaccctaaattcaaaaggtatgagaaattagaagtattgtcagcatgccagaagcaagaacaacacaaatagagtaactacagaaaccaacagaaaaacca

SEQ ID NO: 663953 - DNA, 647 bp, Homo sapiens
aaatcaataatgaaaaccactcattacaaaaataacctctcttattcaagcacacagaaaaacatatttatcctgcttcctcactccagcccacaagcaaataaagcaaacttcttcaggaatataactccagcacatcttcaccaaccaatacatgttaccttctagtatacatattaacttctggttaacttcttccctgacaactgactacatcccaagcccattaagacgatttgccaaaaatgaagaagcatcctgcaccaattgaaacagttccattagctatgactatgtcccagagcagaagtctgccaaacacatatttgcccttgaattagatataataaaacaccagttctagtcatttgttgtaaatggtygtgttggaatgcaatatacctaacaacttgattattttctggaggatggtactaaagaaataaaatagtattcatcaaatatttaagcatgtgccaaacactattctaaggatttcacaatattaagaaaaattctaagcaaaatggaaatgagtatatacagaaccctaaattcaaaaggtatgagaaattagaagtattgtcagcatgccagaagcaagaacaacacaaatagagtaactacagaaaccaacagaaaaacca

SEQ ID NO: 663954 - DNA, 572 bp, Homo sapiens
gtgctacgccttgtatagactatggactattcgcgatttttttttttttttacttaataaatttcrtaccagcccccttcctcaaagcaccatctctcagagcttaactatgaaacactgttttcagtttgttccacagcactctctgatgctctgttcttgctatgttctttttgtttttgcatctgtttctgttttttaaaagagatagagtctggctccgtttcccaagctggaggacagagtgcagtggtgcagtcctagctcactgcaacctggaacttctggtctgaagcaatcctcgcatcttagccccctgaatacctgggactacagggacatgccaccacaccttgcccagctaattttttaaaagtcccctttctctgtttcattttatattggtcttgttgtcgttttcaattttattaacgtttacttctacgatgtctaatttaccacttatatgtccagcatatattttacttctcccattgtagtttttatctttaaaagttcagtttgggttgcatttatttatttatttaatttagggacagagtctcgctctg

SEQ ID NO: 663955 - DNA, 600 bp, Homo sapiens
tttgtaatgatgaaaattctaatacctgttattaaaaaactagatggaattaatagtagattagactttgcaaaagaaaaaataatgaacttgaagacatggtagtccaagtgaagcacaaattgaaacaatacggaaagaaaattaagacagtagcattagagagttttgagacaaatgcaaatgacctagaaactaaaattggagtccctaatggagaaaaagtaggatggagggacaggagagaaaaagtatatgcatatttttctaatttgaagaaaattataaatttagaaatccccctccaaatctaacaaacctcaagcacgaaaaaaatgaagaaaaaatatatcaaagcacattataatcaaatcactcaaaattggtaatatggagaaaatcctaaggcagcaaaagagaaaaagcacaaattacatacagaaaaccaaaaataaggagaatggcatatttcttttgaaaacattgcaagtgaaaagataatgaagtarcattttaaaagtactgattttttttaaatcctataaacctaaaattctatatccagtgaaaaatctctttcaaaaacaaagatgaactaaa

SEQ ID NO: 663956 - DNA, 535 bp, Homo sapiens
atgttttcaagagtatttgttttcctcatggggcttactcgggaataagatgtttcactctaaacgttgaggtctttaaarcaaaagaaatgatcctttacatgacgactggaaacagaaaataaaataccactacaggaagcaaagtaatagtaggagcaaatggttgtagaatggaaaacaagaaatgaaagtgaatcataggctgtgtggagaaaatgaaagaaacatagaaaaaagattattcagaagaaatggaagtcaagaaaaaatgagtctgaaagaatatgttgctggtgtaagaaagtcttagaaataccggtgataataggacagtgagatatttgtggaagcagcattttagcactttgaaacaagccaaggggaaagactgaagaagataaatcaatccaattcttgagggaaaattaccacattcccaatgaacagcaattagaggccaaaatttactcacccctgagtgcttatgtaattagatttggaatatttgcagtgataaatagtctagtaaaaa

SEQ ID NO: 663957 - DNA, 569 bp, Homo sapiens
ttgagggaaaattaccacattcccaatgaacagcaattagaggccaaaatttactcacccctgagtgcttatgtaattagatttggaatatttgcagtgataaatagtctagtaaaaatattgattggaagaatggtacaaaatgaaaagatcttggaatgtataatatgacaaaaaaaaaaactgtggtttaactttcagcttgagctcttaatagcaatgtgaccctgggcaacttatttcagttctatcaagataatttttttgatatatttattgagataaacctcaatttccttatctgtgaaaagayattttaactgtctcattctgttgtgtgtaaaattattaaatctaatggattgtaataattagaattgccttatctgggcactgcttgggagagaaatacttatttttgagagacaataatagtcctttaaatcaacaccctcatgtccagcactgtatatcttctcttccctcttatttctttaaattaggaaaggttaaatagaaatgatggaagtggctggatctaatatcattaatatcattagagtagttaa

SEQ ID NO: 663958 - DNA, 637 bp, Homo sapiens
tatatcatttgtttaaaatatgccattattttcctgttggcacccagagagtaattgaagaaattaaaggaggtaataatgtgtccagtgcatagcagagtcagttctataaaaagggttagatattataccatattattatcattattattctattatctctggatatttgaagtttttatgacataataacatgtatcatttacatacaactggtaagttcaaagtgcttaatgtaaatcaactaatttaataacacaaccctgctgagtarccactatcattatactttaccagaagaactaaggaatagagatactaagtaacctgccaaagatcctacctgtagtacgtaccagaactggaatttaacctgtcaatcagcctttgcattatttgctcttagcaatctatattgctaccttcatatcttctcttgagccagtaaccctgaagtgcatttttactctgacctgtctttaatatcactctgtttctctcttctgctctcttttatggaaatttatttccataaaatttatcttgttcttgccctcatagttgtgcatgtttgtgctgatataaattttctcaccaactactaatttatcttgcctcctaaaaatcaattgaggta

SEQ ID NO: 663959 - DNA, 637 bp, Homo sapiens
tatatcatttgtttaaaatatgccattattttcctgttggcacccagagagtaattgaagaaattaaaggaggtaataatgtgtccagtgcatagcagagtcagttctataaaaagggttagatattataccatattattatcattattattctattatctctggatatttgaagtttttatgacataataacatgtatcatttacatacaactggtaagttcaaagtgcttaatgtaaatcaactaatttaataacacaaccctgctgagtagccactatcattatactttaccagaagaactaaggaatagagatactaagtaacctgccaaagatcctacctgtagtacgtaccagaactggaatttaacctgtcaatcagcctttgcattatttgctcttagcaatctatattgctaccttcatatcttctcttgagccagtaaccctgaagtgcatttttactctgacctgtctttaatatcactctgtttctctcttctgctctcttttatggaaatttatttccataaaatttatcttgttcttgccctcatagttgtgcatgtttgtgctgatataaattttctcrccaactactaatttatcttgcctcctaaaaatcaattgaggta

SEQ ID NO: 663960 - DNA, 623 bp, Homo sapiens
ttttaactcctgtgttttaaaatatatttatttattttaatcatctttcagtacattcagtaagctctaatttgttcgtgtagggaagccaataattcttaaayacataaagttaaaatcaaaattaatcatttaccaaagaaagaaattaaataaatattttatagattcatgacagtaaaacaaacataaaaatcaaatatatgtaaaatatatttcagaagaaaaagtcatcagtatatttctgccatctatgactaatgattcattactttataatataaaattattttcttcaatacggaaattttccattcaaacagataattgtgcatcaatattaatagtctatctatcacctttctatttatacacatacatgcacagttacatatacttctcagagtttcactttcaaaggaaaaatcccccacaatgttgacaggtgtacagacacagacttttcttaagttgtccaactttaccaaatttttttaaaaatcctcaaaagtattagttttgttcactccagtaataccttttctgaacgtaaatctcagaaaatacatgttgaatagcccatatccaaaatgcttcagaccagaagtgttccagattttggg

SEQ ID NO: 663961 - DNA, 506 bp, Homo sapiens
gactaatacttaccaaagaaatgcttctgcttatgaaggaaattttagacttagcaattcactgaatgatgaacaaagaattagaaagattattactttaccaaatcataatttagagaaatgttatggtgaaaaatggctttctgtgaactacacagatcactgctttaaaaaatactgaaaatgtgcctgatagctccactaattaaaagcatgtggaaataaaatagaaataaatcttaaggtttgtggtaattgtatatgggtatttaaatataagcattgggtgctatttagtatatggtttccactgggccatgtaattcttcattgtcaagacactgtttatatgaatcttaaccaactcacccttgctattcagaraaaaagggtaagtggagctgcatcattagaggaaaactgagaaacaaaagctctcataccagctaatggctaagagagatttttgtcacagataaggtgataagtcagcaattactgccttc

SEQ ID NO: 663962 - DNA, 583 bp, Homo sapiens
gatgtaataaactaaaaaatttacactgtatgtaaaaaatgtgcattaagcaaaaatacttaacggtattaacattttgagaacaataaatttctcaaagcattattaacattgtcttaagtagtatttgtgttagactaatcattttataaatgttctaatgacattgtcattctaataccattaaatttaacatatctatttaattgcactaacccactacttctaatatgtcttcagtattagttccagcttaygtgaggaaagtaacattgatatatgatcatcattacacagccacaaaggctcacagcctacatataaacccagatacgtctattgtcaaatttcatgctgttttcattctgatgcattttctttgtctactaatctcacacatcctttgcagccattcactgtattagatgtctcttatctcctggtttgcatggtatttatatagcaagatgcagggagcaagttagaaattaggtaagaaggaactttttttttaatcacaaagagttagaacaaccaaaatttcttttgtattgggtatgccagtatgagcatggattaaggt

SEQ ID NO: 663963 - DNA, 585 bp, Homo sapiens
aggcatatagaactacttgatattccatggcttcatgacatgtcaggtttatctgttgattagtgatagggaaaagattataacacagaaatttaccttttcaatttagaagtctctccagtgtgccgcagtgttagttttatgtgtattacccacatcatgaactgccttgataatctttctaatgctgtcagttgggtattaaagtcccccactattattgtttgcctgtctaagtcatttcataggtctagtagtacttgctttatgaatctaggttgatatacatatatawtccaatgttaggtgcatatatatttaggatacttaagtcttcttgttgaattaaaccctttatcattatgtaatgttattctttgtccatttttactgttgttggcttaaagtatgttttatctgatataaaaatagcaacccctgctctttttcatattctgtttgagtgatagatcgttctccaactcattactttgagcctatgtgtgtgcttatgtgtgagatgggtgtcttgaagataacaaacagatgggtcttttttttccttcaacttgcctctctgtgctt

SEQ ID NO: 663964 - DNA, 597 bp, Homo sapiens
aattaaaattttgtttacaaaagcctgtatgcaaacatgtatactaagcctgcatggaaacatgtatactttgttcatatttgctaaaaactagaaacagcccaaatatgcttcatttattgaattaataaataaatcgttgtgcatccatacaatagtggaatagcaatatcataatgctactcctcaataaaaagaaacaaattattaatctatgcaataacataaatgaatctcaaatgggttatgccgagtaaaagaagtcacaattaaaawgttatatatgattccagttatacaacattctaaaagagaaaaaactccagtgacagaaagtggaatggagcagaagttgcttgggactgggcatgaatggaagtgttgattgcaaagagggattgtggagtttggggaatgattttgatagacatgactgcaagcatttgccaaaacttgcagaaatcttcactaaaaagagtgagttgtaccaaatatcaattataccttaatatataaaaaaaggaaaagcattgatcccttttctagttttctttacaaaaatctaggatttcagcatttactttagctccaaaatga

SEQ ID NO: 663965 - DNA, 597 bp, Homo sapiens
aattaaaattttgtttacaaaagcctgtatgcaaacatgtatactaagcctgcatggaaacatgtatactttgttcatatttgctaaaaactagaaacagcccaaatatgcttcatttattgaattaataaataaatcgttgtgcatccatacaatagtggaatagcaatatcataatgctactcctcaataaaaagaaacaaattattaatctatgcaataacataaatgaatctcaaatgggttatgccgagtaaaagaagtcacaattaaaatgttatatatgattccagttatacaacattctaaaagagaaaaaactccagtgacagaaagtggaatggagcagaagttgcttgggactgggcatgaatggaagtgttgattgcaaagagggattgtggagtttggggaatgattttgatagacatgactgcaagcatttgccaaaacttgcagaaatcttcactaaaaagagtgagttgtaccaaatatcaattataccttaatatawaaaaaaaggaaaagcattgatcccttttctagttttctttacaaaaatctaggatttcagcatttactttagctccaaaatga

SEQ ID NO: 663966 - DNA, 541 bp, Homo sapiens
tggaggtaaagacaacaggtcaggtggatatgaaaccagaaaggacttacttcctaagcagggaatcccactcagaccaccattgcgaaagggaaagaacctagctactgagctatggcacaggacagtctctatcacacttccctgaaggagtctagagtagttaattttgagcttgtaaaggtttttgactactcaagataatttttagagctaactatgacataaaccctaaaattcctgttccctggwaggtggagaccaaaaatactgtcatgtggttacaaggtcaagctcccaagatcataaaacaagatagagaccccatctagttttttggcttgtttcagagacctgtaggaaagtttgttactgaacagcttgctgggccatcttgactgcaagcttatggggtcctaagcccatgttttatcctaaggtacccctcgaaacagaaaaacaaactcatagcacatcagtttaaggactagcctcacagttctttttctcattaataaaaaatttacagaagagataaaca

SEQ ID NO: 663967 - DNA, 541 bp, Homo sapiens
tggaggtaaagacaacaggtcaggtggatatgaaaccagaaaggacttacttcctaagcagggaatcccactcagaccaccattgcgaaagggaaagaacctagctactgagctatggcacaggacagtctctatcacacttccctgaaggagtctagagtagttaattttgagcttgtaaaggtttttgactactcaagataatttttagagctaactatgacataaaccctaaaattcctgttccctggaaggtggagaccaaaaatactgtcatgtggttacaaggtcaagctcccaagatcataaaacaagatagagaccccatctagttttttggcttgtttcagagacctgtaggaaagtttgttactgaacagcttgctgggccatcttgactgcaagcttatggggtcctaagcccatgttttatcctaaggtaccccycgaaacagaaaaacaaactcatagcacatcagtttaaggactagcctcacagttctttttctcattaataaaaaatttacagaagagataaaca

SEQ ID NO: 663968 - DNA, 553 bp, Homo sapiens
tatttatcttgattccattcatatcattctttcaggacatttcagcctctgccctaagttacattgtgaagttttatgtataaaatagaataactggagaaagttaataaatatatggtagttcygtgataaatgtagttagtgggtagcatgaatgtaaataataagtaatataattaaatttccagaagtcagtactgcttgtgtagtctatagaaggggcagtgcaatgtagggaatgaatcaatgcatttatctgaaattatttttaataactttcaaaatgttatttagatgtaaaattagaaaacataagctaaagtgatctgcaaagtataaaagacagtagttatccaaggtaacagtggtcaaaagctggcagtgaatctgagaactacatatgcaagttgtgatctcactctgaaatattttagatgtcagcaaaacttttacctttaaagtttagcagattttgaggaaaacaaatgtaaaatagcatttagatgatcaataccctaccacagggtcagtctcaaaatttcaaaatttagaa

SEQ ID NO: 663969 - DNA, 627 bp, Homo sapiens
cactcatttgaggaaggaagagagaaatgaaacttggtcatgtttacttgttacagaatcaagtactgtaytgatatcaaatgttcacagagttcatagagtcaaaattaaaaaagaaaactcttttaacattgaatggggacatagtcaccaaaattgtatactaggagtctttatttttagaaacttttagaaatgtattataacatggaaaaattgaaaaaaattgctaaatcagctacaaaattgagaaatgttggtttactcatgatcctttttttaatcgctaatgtttttcttcattatttaactctcacacacccacacatatatatgtatacacgtatatgtgtgtatgtgtatacaatgatacattcattgaatcatttcattatctttattttcagaaataaatataagaatcatcacagaagcaacatggtagaataggaagccctggaccttccttccccatctgtccccctacaaatgtattgattcagcaacaatcactgacaaattccctttgtcaaaaatcaggaactaataaaaagagtcaggtctggtggtcaaggaacaacccacttcaaccctgcactagctgaatgctcactaagtcctggacat

SEQ ID NO: 663970 - DNA, 627 bp, Homo sapiens
cactcatttgaggaaggaagagagaaatgaaacttggtcatgtttacttgttacagaatcaagtactgtactgatatcaaatgttcacagagttcatagagtcaaaattaaaaaagaaaactcttttaacattgaatggggayatagtcaccaaaattgtatactaggagtctttatttttagaaacttttagaaatgtattataacatggaaaaattgaaaaaaattgctaaatcagctacaaaattgagaaatgttggtttactcatgatcctttttttaatcgctaatgtttttcttcattatttaactctcacacacccacacatatatatgtatacacgtatatgtgtgtatgtgtatacaatgatacattcattgaatcatttcattatctttattttcagaaataaatataagaatcatcacagaagcaacatggtagaataggaagccctggaccttccttccccatctgtccccctacaaatgtattgattcagcaacaatcactgacaaattccctttgtcaaaaatcaggaactaataaaaagagtcaggtctggtggtcaaggaacaacccacttcaaccctgcactagctgaatgctcactaagtcctggacat

SEQ ID NO: 663971 - DNA, 627 bp, Homo sapiens
cactcatttgaggaaggaagagagaaatgaaacttggtcatgtttacttgttacagaatcaagtactgtactgatatcaaatgttcacagagttcatagagtcaaaattaaaaaagaaaactcttttaacattgaatggggacatagtcaccaaaattgtatactagragtctttatttttagaaacttttagaaatgtattataacatggaaaaattgaaaaaaattgctaaatcagctacaaaattgagaaatgttggtttactcatgatcctttttttaatcgctaatgtttttcttcattatttaactctcacacacccacacatatatatgtatacacgtatatgtgtgtatgtgtatacaatgatacattcattgaatcatttcattatctttattttcagaaataaatataagaatcatcacagaagcaacatggtagaataggaagccctggaccttccttccccatctgtccccctacaaatgtattgattcagcaacaatcactgacaaattccctttgtcaaaaatcaggaactaataaaaagagtcaggtctggtggtcaaggaacaacccacttcaaccctgcactagctgaatgctcactaagtcctggacat

SEQ ID NO: 663972 - DNA, 597 bp, Homo sapiens
cctgtcctcttcgtgtctaattttcataaaagagttatttgtatttactgtgcccatttaccctctttccactctttcttcaacccattaccatcattcactttttactatatctttaaaatggattttaacaaggtgatcaatgactattatgtggctaactcaaatgggatttttaaatttrtaaaatttttatcttttttgcattctctcttctatctgtgtctctaacacaactctcaattgatcttttctgccttctcccacatctttaccaatttattttcacttatctgatatttagatccagaatcctagttcatgggtcagcaaaccacggcccatgggtcaagtccaatttgcttcctaatatctgctaataaaaatttattggaacataataatgctcattcatttatatattgactgtggccaatttagcactacaatggcaaatgtgtagtagtgacagagaccatttgacctacaaagcctaaaatatttactatctggccctttatagaaaaaaaaaacgtagactccatttatagtattaaatattaggccagtttctcatttttctaaaagtttttaata

SEQ ID NO: 663973 - DNA, 597 bp, Homo sapiens
cctgtcctcttcgtgtctaattttcataaaagagttatttgtatttactgtgcccatttaccctctttccactctttcttcaacccattaccatcattcactttttactatatctttaaaatggattttaacaaggtgatcaatgactattatgtggctaactcaaatgggatttttaaatttgtaaaatttttatcttttttgcattctctcttctatctgtgtctctaacacaactctcaattgatcttttctgccttctcccacatctttaccaatttattttcacttatctgatatttagatccagaatcctagttcatgggtcagcaaaccacggcccatgggtcaagtccaatttgcttcctaatatctgctaataaaaatttattggaacataataatgctcattcatttatatattgactgtggccaatttagcactacaatggcaaatgtgtagtagtgacagagaccatttgacctacaaagcctaaaatatttactatctggccctttatagaaaaaaaaaacgtagactccatttatastattaaatattaggccagtttctcatttttctaaaagtttttaata

SEQ ID NO: 663974 - DNA, 556 bp, Homo sapiens
agcaagacttttgaacattattgtgataaagatcaaataaaaacctgaaatttgtaagggaccactaggcacataaagttagaagtgggtttgagagacatatcaagggaaacacagtrccttggatagtgcccagattatacaatggtgcctggtgccagtagaatgtcaatacataattatcgaatgaatgaatgaataaaagaataaatagaaatgttctggaggacaggataatggagcagtggagaatgatggagccactaacaattgtgttagcaatatagcctagaaaaaagatacatattactattgcaatttaattaattaattgaattggacaagtagctggtcatgacatggccaggttaaataaatcaatccagatttgtgcaaaaatatgtgtaaaataactgttctattctaaggatagaattattcaaaattctaagaatttttgcatatcaaccaaaggacaacgatatcaatgggggtataatgacttttagtagagacattatgacatccacttttcttgtgacaggagtttacagtg

SEQ ID NO: 663975 - DNA, 443 bp, Homo sapiens
taaactctttgttatttaaattctatattactttagtcgattactctgtattattacggcaaagctttgatatgttgccctgaatttaaatgaaaaggctgttcggcctaaaaacaggaatattttattaccaaaaagaattaactaccatatgtcatttacagaaaagagtaaattcttcagggcatagaaaatacacatttccttctgtttgtgtggaaataagcaaaatacctgttataatagattcctcacagaattttgtgaagcttcaggtaaacttgaaagagaaaaawtaaaatgctagagtttcataattacaaattgggatataaaaatagaataattatttgaattttgtatttctctccaggggatcaaaagtaatatataaacttttaataaatattgatatagcttcacgttgactccatatgtgagca

SEQ ID NO: 663976 - DNA, 483 bp, Homo sapiens
tgcccaggctggagtgcactggtatgatcatggctcactgcagactctagtgatccacctgcctcagccacccaagtagctgggattacaggtgcatgccaccatgcttggctaattttgactttttatttttagtagagatgaggtcttgctatgttgcccaggctggtgttgaactcttgagctcaggctattcttacctcagcctcccaaagtgctgagattacaggcatgagccactgctggttgtctaagaattcctgttccaggctacctcacattctgctttagcckctattgactacccttggattacattcctactccaggccattttctgggctaggggcttggggtcttgtgttaagagcaagatgacttatgtggaagagacaccttaaaagaggactctggaagtggtagctaccctgggcgtgttagtcttttttcacgctgctgataaagtcacacccaagactggac

SEQ ID NO: 663977 - DNA, 630 bp, Homo sapiens
ctgagggacaggcaaggtgctctgggcaggcgctgtgagcggggattagggggatcagggaggctttgtggaagagatggtacttgagctggggccttaaaggacggcaggactcgaggatgcaggaggtgatacaggggtgagagattatgctgtcattttaaccctccctgggcacagggcctcctgacagcctttccttagagagcaaatccctctaggacgccacccgccccctgcaccatctccagggtagggggtgggtgtggggcttgttcgctttccctcccccaggataggggggctcccccacaggcgaggagccagccacctagtcagagaaggctcactgtccccaggcggtcccttgtgayccagctcatggtgtggctcatccagtctctctccctccatccttccaacaatccacagtcactaccagaactcagaggctctgaggagtaaaggcacttgtccaaggtcacatggctggaaatgggcagaaccagaagtcaagcccagatctgctaaaaccacagccccagctcttggccacacctcagcttctctgatacaaatttcagaatcgacacttaaaagtggtcacctggaaacaggtcagggcccagt

SEQ ID NO: 663978 - DNA, 585 bp, Homo sapiens
aaatttgaacaatttgatctcagaaagtgaggactcagaaaaatgaaagtgctgaatttctctttaattttctctaattcatcacctttatagacctggtctttaaaaattatttgtacaatgcagtcaccaataccctgaaactatctctcatctttgttctgaagaatggaaaaaaaaaaaaaaacgctctcccctaattctgggcttagcttgtgttataaatctggagctctgagagctaaaatatactctgaacttttcttcagggaamttaaagatcaattttccactttttaaggagatgcatctaacagaaaatatgggtgtttggacaaccctcagtgatttatgatcctctagccagttgcccagactcatctgcataattatctttctcatttttcctggaatagttggggagaaaaatcaaaagaaataattatttaatattctcagatcatatcatttggaagggcttaagataccctaacagctttcaaatgtcacagtccttgaaataataatgtattatgagtatgggttttcagaatacgtagagcttgatggcattgatttttcaat

SEQ ID NO: 663979 - DNA, 585 bp, Homo sapiens
aaatttgaacaatttgatctcagaaagtgaggactcagaaaaatgaaagtgctgaatttctctttaattttctctaattcatcacctttatagacctggtctttaaaaattatttgtacaatgcagtcaccaataccctgaaactatctctcatctttgttctgaagaatggaaaaaaaaaaaaaaacgctctcccctaattctgggcttagcttgtgttataaatctggagctctgagagctaaaatatactctgaacttttcttcagggaacttaaagatcaattttccactttttaaggagatgcatctaacagaaaatatgggtgtttggacaaccctcagtgatttatgatcctctagccagttgcccagactcatctgcataattatctttcycatttttcctggaatagttggggagaaaaatcaaaagaaataattatttaatattctcagatcatatcatttggaagggcttaagataccctaacagctttcaaatgtcacagtccttgaaataataatgtattatgagtatgggttttcagaatacgtagagcttgatggcattgatttttcaat

SEQ ID NO: 663980 - DNA, 582 bp, Homo sapiens
gttaaaacctgtggaaaatatctgggaggagacatggttgataagaatttttcagaaatatatgcagtttccaagaacaaatactattcctatttgtataggctaacctgtaattgtagtaaaaataatcttaaccacaattaagctaaagatgatatcaataacagtttaatagaacttatgaaacacttccaaatatgttatcacaattaacactcgtaacaacacttttaagaagggatttattaacttttgccttcaytgaagaaatatttatgtagtacttgtacatgcctgctatagtttcaacattttaatactgagctcctcttccatacgtagttctgtacattgctatcagaattcatttgctgagtcaagtgaaaattcgaggtgggattttgacagaaattgaatggatcatatcatattattatatagtatagcatattaattatatgatattatattaactaatgtggaataactaataattgctacatccttaaatctagaaacatggcaaatgtctctatttgacagtcctagttttgtaatctttcatttattttatagttttaa

SEQ ID NO: 663981 - DNA, 614 bp, Homo sapiens
ttataggcatgagccactgcacccagccttagtcaacatttctaacaagatgatcaactgttgtagaccgtaaataatgattttgcaacaaggttctctatttgataagaaaaagtccatttgaatgcttgtcaatatttgaccctatcaactggtttgacatttagcagtttaaaaagcacatccacagtctgttggaatgacagtttctcttactgagaaggtatttggttgttgttgttgttattcttgcttactcaaacattcccaactgctccactgtccatccgctagttagacaaactctgagggggtcataaccattctctttgtttgcaggaaccaycctgccacctgccctgaagagcctgcaaaatgcaaaattatatggccaggagaagattgggagaatttaatccttgcacctcaagaaggaacagttctgcttttaagtagaagaggacagtgagtagctgagaatccagggagcgtgaaccatgtagactgctgatttggagagtagtttttagacttctagacatagtcgatgcctagaacttgtaaagaaattctattatcagtaataggtactctcgatttggtttgctgatatg

SEQ ID NO: 663982 - DNA, 614 bp, Homo sapiens
ttataggcatgagccactgcacccagccttagtcaacatttctaacaagatgatcaactgttgtagaccgtaaataatgattttgcaacaaggttctctatttgataagaaaaagtccatttgaatgcttgtcaatatttgaccctatcaactggtttgacatttagcagtttaaaaagcacatccacagtctgttggaatgacagtttctcttactgagaaggtatttggttgttgttgttgttattcttgcttactcaaacattcccaactgctccactgtccatccgctagttagacaaactctgagggggtcataaccattctctttgtttgcaggaaccatcctgccacctgccctgaagagcctgcaaaatgcaaaattatatggccaggagaagattgggagaatttaatccttgcacctcaagaaggaacagttctgcttttaagtagaagaggacagtgagtagctgagaatccagggagcgtgaaccatgtagactgctgatttggagagtagtttttagacttctagacatagtcgatgcctagaacttgtaaagaaattctattatcagtaatakgtactctcgatttggtttgctgatatg

SEQ ID NO: 663983 - DNA, 525 bp, Homo sapiens
gagaaaagagtggatggagttgataggggagtgctagaaagagagatgacagaggtagtttttttgggtttgtttttttttttttagcatattacgctaaatacttctgtattttaaaaatctttttttttgtttttgtttttgttttttgagacggagtctcactctgctcactctatcacccaggttggagtgaagtggtgggatctcagctcggctcactgcaacctccacctcctgggttcaggcgattctcctgcctcaggctcytgaatagctgggattgcaggtgcccgccaccatgcccgactaatttttttgttttttgtttttgagatggagtttttctcttgtcgcccaggctggcgtgcaatggcgcgatcttggctcaatgcaaactctgcctcccatgttcaagcgattctcctgcctcagcctcctgagtagctgggattacaggcgcctgccaccatacccggctaatttttgtatttttggtagggacggggtttcaccatgttgccc

SEQ ID NO: 663984 - DNA, 525 bp, Homo sapiens
gagaaaagagtggatggagttgataggggagtgctagaaagagagatgacagaggtagtttttttgggtttgtttttttttttttagcatattacgctaaatacttctgtattttaaaaatctttttttttgtttttgtttttgttttttgagacggagtctcactctgctcactctatcacccaggttggagtgaagtggtgggatctcagctcggctcactgcaacctccacctcctgggttcaggcgattctcctgcctcaggctcttgaatagctgggattgcaggtgcccgccaccatgcccgactaatttttttgttttttgtttttgagatggagtttttctcttgtcgcccaggctggcgtgcaatggcgcgatcttggctcaatgcaaactctgcctcccrtgttcaagcgattctcctgcctcagcctcctgagtagctgggattacaggcgcctgccaccatacccggctaatttttgtatttttggtagggacggggtttcaccatgttgccc

SEQ ID NO: 663985 - DNA, 594 bp, Homo sapiens
catggctcactgcatccacgacctcccaggctcaagcgatcctcccacctcagccttctgagtagctgggagtacaggcacacgccaccatccctgtctaatttttcatctttcgtagagacagggtttcactaggttgcccagcctggcctcaaaactcctgggctcaagcaatcctcccaccttagcctcccaaagtgctgagattacaggtgtgagccatcgtgcccagcctatttacagtatttttaaagttacagctttgaaagagttgaaaagtgttttcactacytaactctacccatgctcattgtgaacagaagttctgtgttttggatcctctacgtgacagaagataaatactaagtgcatcagcgggggcgggcggggtgggggggtggaagaagtgaattccataaatgctcaccctaatgttttctgcaacagaaaatcatctattctcatcttcttttagctatataaaaagaagaaaggaagactgtttcacagtcgtggatgagtagctgatcacagctttcataaaatatgcatgccagcacttccgcacaattatctcgaagaaccagtctcttg

SEQ ID NO: 663986 - DNA, 594 bp, Homo sapiens
catggctcactgcatccacgacctcccaggctcaagcgatcctcccacctcagccttctgagtagctgggagtacaggcacacgccaccatccctgtctaatttttcatctttcgtagagacagggtttcactaggttgcccagcctggcctcaaaactcctgggctcaagcaatcctcccaccttagcctcccaaagtgctgagattacaggtgtgagccatcgtgcccagcctatttacagtatttttaaagttacagctttgaaagagttgaaaagtgttttcactacctaactctacccatgctcattgtgaacagaagttctgtgttttggatcctctacgtgacagaagataaatactaagtgcatcagcgggggcgggcggggtgggggggtggaagaagtgaattccataaatgctcaccctaatgttttctgcaacagaaaatcatctattctcatcttctttyagctatataaaaagaagaaaggaagactgtttcacagtcgtggatgagtagctgatcacagctttcataaaatatgcatgccagcacttccgcacaattatctcgaagaaccagtctcttg

SEQ ID NO: 663987 - DNA, 594 bp, Homo sapiens
catggctcactgcatccacgacctcccaggctcaagcgatcctcccacctcagccttctgagtagctgggagtacaggcacacgccaccatccctgtctaatttttcatctttcgtagagacagggtttcactaggttgcccagcctggcctcaaaactcctgggctcaagcaatcctcccaccttagcctcccaaagtgctgagattacaggtgtgagccatcgtgcccagcctatttacagtatttttaaagttacagctttgaaagagttgaaaagtgttttcactacctaactctacccatgctcattgtgaacagaagttctgtgttttggatcctctacgtgacagaagataaatactaagtgcatcagcgggggcgggcggggtgggggggtggaagaagtgaattccataaatgctcaccctaatgttttctgcaacagaaaatcatctattctcatcttcttttagytatataaaaagaagaaaggaagactgtttcacagtcgtggatgagtagctgatcacagctttcataaaatatgcatgccagcacttccgcacaattatctcgaagaaccagtctcttg

SEQ ID NO: 663988 - DNA, 457 bp, Homo sapiens
gaataaaccaggccctgtgccccctgtgcccccactaaaaatcaactgattgccaactcaatcctctagactcaggaaatatgaaaataagcactttgattaaagttgaaagatctatgaagaagaaaataaataatgaagagagaaattaaacctatggtgttgcttgttcattacaggtttaaatataatattcctttaagtattgtaattattatttttgcatatgtcttgtctgtttaaagtatctaaagtagtcaaaataatcagtcctattaaactgtgattgcagtttaaattgtttaagagaacttcatgaactgtttcataaacaatgtttataaaagtttaagaaaatttgacttttcaaattatgtttagtagaaatatttaataaactgagcatgaaacaaagtgcaaataaaagygtttcctttccatgcatataatcccatca

SEQ ID NO: 663989 - DNA, 537 bp, Homo sapiens
aaactgtggtcaaaggggcgaatgaaggatttgctcaaggtcacacccgaggtaacagagctggcctagaagccacgtttgctaaattagagctcagtgaggttttcaacttactctaggtcttcaagccttttacttgaatattctctaaaattaaaaaaaatatatggaagctgagggttttaatttccttaaaaccatctgtgctcattttccctttgaaagcactacccttatcttttggagaacttcgccccattgagcatgtacacawgtgccagtttatgatttcaatatacaatactacctagctttggtttcattatcatgaaatctataaatttcaagtttgggtcattattgctttagacattgtcatcaagggcaacagaattcagcagacagctgaactacagcttctctttctgactgtcttgtgctggcatccagatgagcttgagcatcacttattgttttaatttggtgaatgtgaaattgagaacctcacctcatagacagattgggtatttggtgtga

SEQ ID NO: 663990 - DNA, 599 bp, Homo sapiens
tgtggtggggctgtgtgggaaggtctgaggatattcaggaaggcaaaggaagaacaaattagagatctatcagtctgggatttgagtagtggcaattagggtctattaaggaaccaaatatagaattattctctatrtccaatacgtagcacagtgactagcatgtagtaggttcttagttctcatttattgtatgattggataatgaactgtaattgaatgaaggaaagaaaaagcctgttcctagagaagaaatgagacctttaggggaaacagagcagggggactgcctagtgcagtctgttaagggaggaagaggaagagtcagcaaagctatccctaaccttagaatgaaggaggtagctcgtttcccttggaaggacagtgagtgtgtggcccttttgcttccatccacatttccattctgaggaagtgcagtagtttctatggcacttggtctgtttctggccacactgcccaggacggaacatgaagaagtgcaatgcttgaggggagtctttctccaagagcaacagaaatttcaaatccataatgtcacattattttgagaagagactctgtgcttacatgctagccat

SEQ ID NO: 663991 - DNA, 525 bp, Homo sapiens
atgggagaagagctcatataccgccaagattcagaggcagatcctctgtttcaaggtccagtggctgaaagaccactttttccaaaaagccacactgttacacctacactctcattattcacagcataatccctcaactattccaaaaaggaaaaccagtttggcctaggagacaaattatctatttaaaataaatagccttaaaatattattttaaaggagacaatcagtatataccacctgtacatcctcaactatctcatatttgagatagctgaataacatctttttacacatttttctacatttactatacacattgaacttgaattactttataactttatgtggccatttctcaaaaaagtaaaaaagaaaggaaagaagaaaaggggtaaaagaaaaacagattgcacccccaatagctatagttttgatgtttagggtggctaaaaataaaataaatatccttaaaatatgattttaaaggaaacaatcagtayataccacctctacatcctcaac

SEQ ID NO: 663992 - DNA, 606 bp, Homo sapiens
atgcattctgttgtattttcacataattaaatatgcaacaactataatgctataaaatatttagtgacatggaaagatgttcatttagaaaaggaaattatgaaacaatatgtgaatatgtctcataactacaaacacacacatagatatggtgttcctctgagtgtttacttctctgtaaacagagtacttctcaagtatagaaatactgctaaaagcatgtttttttytaaaaaatacactctttattttagaataggtttagatttacaaaaaagtggtaaaggaacatttgtaacaattaatgaatccatagtgatacattactattaaatcaagttcatacttcattcagatttccttagtctctacataatgtcctctatctattctgggatcccaacaagtataccactattactttggtaattaaaatttgtattggtaaaaaattgtatcaaggaaaccacaaaaatttatgacataaaccatggagacagtgctcatgaatggtagaagcctcaaatattaaatctccaactatctagatacggaaaccccttatttcctaaagcacccatgttgaatactttcaaaggcggctat

SEQ ID NO: 663993 - DNA, 606 bp, Homo sapiens
atgcattctgttgtattttcacataattaaatatgcaacaactataatgctataaaatatttagtgacatggaaagatgttcatttagaaaaggaaattatgaaacaatatgtgaatatgtctcataactacaaacacacacatagatatggtgttcctctgagtgtttacttctctgtaaacagagtacttctcaagtatagaaatactgctaaaagcatgttttttttwaaaaaatacactctttattttagaataggtttagatttacaaaaaagtggtaaaggaacatttgtaacaattaatgaatccatagtgatacattactattaaatcaagttcatacttcattcagatttccttagtctctacataatgtcctctatctattctgggatcccaacaagtataccactattactttggtaattaaaatttgtattggtaaaaaattgtatcaaggaaaccacaaaaatttatgacataaaccatggagacagtgctcatgaatggtagaagcctcaaatattaaatctccaactatctagatacggaaaccccttatttcctaaagcacccatgttgaatactttcaaaggcggctat

SEQ ID NO: 663994 - DNA, 606 bp, Homo sapiens
atgcattctgttgtattttcacataattaaatatgcaacaactataatgctataaaatatttagtgacatggaaagatgttcatttagaaaaggaaattatgaaacaatatgtgaatatgtctcataactacaaacacacacatagatatggtgttcctctgagtgtttacttctctgtaaacagagtacttctcaagtatagaaatactgctaaaagcatgtttttttttaaaaaatacactctttattttagaataggtttagatttacaaaaaagtggtaaaggaacatttgtaacaattaatgaatccatagtgatacattactattaaatcaagttcatacttcattcagatttccttagtctctacataatgtcctctatctattctgggatcccaacaagtataccactattactttggtaattaaaatttgtattggtaaaaaattgtatcaaggaaaccacaaaaatttatgacataaaccatggagacagtgctcatgaayggtagaagcctcaaatattaaatctccaactatctagatacggaaaccccttatttcctaaagcacccatgttgaatactttcaaaggcggctat

SEQ ID NO: 663995 - DNA, 389 bp, Homo sapiens
tgttcaatacatacataaaatctcccacaccaaactaaaagataactctaatggaatactgtgttccttctcttctgacatttctataataaaacttcttctaatgtcttgaacatgtaaggcttcttccatmtgattatcctggtgcagaacatttcctcttcctggaatgactttcctgctctttcactttttgttaacccccattaatctttcagaggaaagctcaagagccacataccctggaaagccttcctacaactggaccagatcaggttccctttataaatgttcctggctcttagtacttttctttcctggtaagtatctcagtatataactatatatgtttgaaattattagattacccccaacacatgtacacatta

SEQ ID NO: 663996 - DNA, 558 bp, Homo sapiens
agaactcatgggctggaaatgttgccagggctctcaaaggatccaaagcagaacccactggcaaggcgagagctgccatctatgttcctttgggccacatagctacttacctctgcctgcttctgggtaaaggctcctttcacttttgtctttgctaccacccttttctgttccacttgaactcaggttaagtatggcccctctagccctagctttaaaagttcccagcagagtaataatggcctttaagtatcaattcaaattcttggaaagcagaatctaactgatgttacgtgagtcagatggccaygctttatgctaatttgatcagttatcactgtataaggggttagggatatataggtatgcaggggcctactgtcaggaggtagggagggacacaggacttagagaagggatatttgttggcaatttccaaaaccaaaaatcaattacaggtacatttcatattaccctcctggctcaaaggggaaatgggaataggaaaaaaaaaaaaaagcaggatatggtggtgcatgcctctagtcttagctactc

SEQ ID NO: 663997 - DNA, 393 bp, Homo sapiens
cttactataaaagcggttctttggcttacttgtttcttctacmttgcttcctcttcctttaacccagccttatgatagtcatatttgaagttcctttgggaaggaatgcatattcatttgatgaaattggggaaatggtgtcaattactagagcccctgtaatcacagctgagccttttaatcacagcaatgtccacatggggctctgctcagttaacatcatgaggctcaagttagtatctctttggagtgaaaagctctttctgaatcataactttgtggtcagataagagaaagtttctaggtcttagctcagtaggaaaggtaactgccatcagaattccagaccatctttcataacttctcgaagaggtgacaataactaccatcacc

SEQ ID NO: 663998 - DNA, 623 bp, Homo sapiens
tatttgttgaatggaatataactagtttacttctaagagaaaacatgctattgtagtaagagatatgtaagccatagattagcactgtttgtgctgtaagagatgaaaaattaayttgagaatgaaatatagttgggtttaattctggttccaccacttactaaatgtgaaattctgcgtaatctaaattttctttctaaatctgtgttgttatatctgtaatttggattaatactacatttaatgggttatttatataaatgtgttatgataacctggtatcttattgtctctttggagacagcatttggtaagtgtaattcttgttgccattgctgctattattatcatacaatcatgttgaattactaaattctttcattgtcacgtattaccactataatgaaatttggacttccttaattttgtattactacacatatgtaccacatacaatatatattgtatacatattatcatgtgtatagtggtccatgtcctatgaatgtataaacaagataagaaagatctttatgagaagtgcataggtaatgaataaaaaagtgatagtgaagttaaactcaatgataatcatggcattaaccttcttaacatttcattgg

SEQ ID NO: 663999 - DNA, 589 bp, Homo sapiens
aagcaaaatatcaatggtgggactgggacaccaagggtaatagtaagggataaatgttcttaacctttaaatcactgtgaaaaaggcaagtagtcaaatagaaaaaggagaaagatatattaaagcagaggtcttgaccagatgcagtggctcacgcctgtacacccagaaccttggtaggccaaagctagaggatcatttggcccaggagtttgagaccagacagggcaacaaactcagacccatctctaaagacataagaaattatccaggtgtggcggcacatgcctgtggtctcagctatgtgggaggctgagtcaggagaatcgcttgagccctagagatcaaggctgcagtgarccaacatcatggctctgtaccccagcctgtgcaacaaagcaagagcctgtctcaaaaaaaaaaaaaaaaaaaagagacatccccagaggaaaaataatcaatgaccaaaaatcttaatatgctaaacctaactcataattaaatgcatatatattaggacaatataataccatttagacttgtaagattagcatactttttttaagtgatagtactcaagaatggcaag

SEQ ID NO: 664000 - DNA, 579 bp, Homo sapiens
atatacacatacacacacagtcatgcactgcataaccacgttttagtcaacaatggactgcatacaggaaggtgatcccaaaagactataatggagttagaaaatcatgatgttatgacattgtagctgtcataacatcatagtacaaaacattactcacctgtttgtggcaatgcaggtggaaacaaacctactccactgccagtcattgaaaatgtaaataaataagtaagtaaataaatggataaaagcttatagaatgaaaatataaagaaaaaatattttatactgctgtacatgtgtttgggttttaaaatgttattacaaaggagtcaaaaagctgagaaaaattttaaaagtttataaagtaaaaaagttacagtaagctaaggctaatattttacagcaaaaaacatttgtataaatttagtattgccgaagtgtatagcrtttataaagtcggtgtggtgtacagtaatgtcccacacctttacattcacttatctctctcactcactgactcagccagagcaacgtctagtcttgcaagctccattcatggtaaacgccctataaaag

SEQ ID NO: 664001 - DNA, 574 bp, Homo sapiens
atttgtgaatttatctattagtctttcatattcttttaatttgtttgtcatatgtatttggaaactgcattaatcatgtayatattcatgtatatattcatgactgctgcatcttatgaatttacctcattattcttatatctcattttatctttgcagaaactccttgcagtaaagtgtcgtttatttgatattaatatgtcaactccagctttcttatacttgctgttcacatggtatataattttccacacttttactttcaacctatacccagtattatatttaatacacatctatattgcacagcatatacttaggttttgttatttgatccagtgtagaaatctgtcttttaattgaagtgtttaatccacttacatgtaaaacatttattaactttattgggtttaccatttgctctctctctttctttctttgtttctcccactcactaatttttcctctgttcctcctactgtgtattctgttgagttaaatgctttttcttgagtactccatatttatttcatttactttagctatgcctctttatattatatatatttataat

SEQ ID NO: 664002 - DNA, 574 bp, Homo sapiens
atttgtgaatttatctattagtctttcatattcttttaatttgtttgtcatatgtatttggaaactgcattaatcatgtatatattcatgtatatattcatgactgctgcatcttatgaatttacctcattattcttatatctcattttatctttgcrgaaactccttgcagtaaagtgtcgtttatttgatattaatatgtcaactccagctttcttatacttgctgttcacatggtatataattttccacacttttactttcaacctatacccagtattatatttaatacacatctatattgcacagcatatacttaggttttgttatttgatccagtgtagaaatctgtcttttaattgaagtgtttaatccacttacatgtaaaacatttattaactttattgggtttaccatttgctctctctctttctttctttgtttctcccactcactaatttttcctctgttcctcctactgtgtattctgttgagttaaatgctttttcttgagtactccatatttatttcatttactttagctatgcctctttatattatatatatttataat

SEQ ID NO: 664003 - DNA, 574 bp, Homo sapiens
atttgtgaatttatctattagtctttcatattcttttaatttgtttgtcatatgtatttggaaactgcattaatcatgtatatattcatgtatatattcatgactgctgcatcttatgaatttacctcattattcttatatctcattttatctttgcagaaactccttgcagtaaagtgtcgtttatttgayattaatatgtcaactccagctttcttatacttgctgttcacatggtatataattttccacacttttactttcaacctatacccagtattatatttaatacacatctatattgcacagcatatacttaggttttgttatttgatccagtgtagaaatctgtcttttaattgaagtgtttaatccacttacatgtaaaacatttattaactttattgggtttaccatttgctctctctctttctttctttgtttctcccactcactaatttttcctctgttcctcctactgtgtattctgttgagttaaatgctttttcttgagtactccatatttatttcatttactttagctatgcctctttatattatatatatttataat

SEQ ID NO: 664004 - DNA, 574 bp, Homo sapiens
atttgtgaatttatctattagtctttcatattcttttaatttgtttgtcatatgtatttggaaactgcattaatcatgtatatattcatgtatatattcatgactgctgcatcttatgaatttacctcattattcttatatctcattttatctttgcagaaactccttgcagtaaagtgtcgtttatttgatattaatatgtcaactccagctttcttatacttgctgttcacatggtatataattttccacacttttactttcaacctatacccagyattatatttaatacacatctatattgcacagcatatacttaggttttgttatttgatccagtgtagaaatctgtcttttaattgaagtgtttaatccacttacatgtaaaacatttattaactttattgggtttaccatttgctctctctctttctttctttgtttctcccactcactaatttttcctctgttcctcctactgtgtattctgttgagttaaatgctttttcttgagtactccatatttatttcatttactttagctatgcctctttatattatatatatttataat

SEQ ID NO: 664005 - DNA, 490 bp, Homo sapiens
tcactgcaacctttgagtcctgagttcaagtgtttctcctgcctcagcctcccgagtaggtgggattacaggcacgtgccaccacgccaggctattttttgtatttttagtagagatagggtttcaccatgttggccaggctgaacttgaactcctgacctcaggtcatctgcccaccttggcctcccgaagggctaggatgacagacatgagccactgcacccggccctaaatttttcrtttcagatattgtactggaaaaattctagaatttgaaatttattatacagttttatgttcttgttgaaatgtcccatctgttcattcattatgattatattttttcttaagttcttaaacatatttaaatagctacgttaaagcttttgtctgcaaactacaatatctgactcatctcatgattatttttaatttccttcttttctcttgaatgtgagtcacatgtttttttggtttcttagtatttttt

SEQ ID NO: 664006 - DNA, 594 bp, Homo sapiens
tgtctgctgcctcctgtttaagtcatactgtatcagctcttgtagtatttcacttcttgaagtatatgtgaagaacattgctgttgataattatggtgttgacatttgtgaatagataaattagagtagatttaagattattcatataataacactttcagtcacttgcattcccacatgaatttgtaaattgtaaagaaggaaaaaattacagcttctggcccaagattatccataattcccagactatcttacctgtacagctgtacaagagcacatcccatgtgtgccgtccgtcaattatgtgtcccagcagataagtaaatatttaagaagaaattttctatggtgtgatctttgtacctaggaataaccttatttatttttggatccctagggcttggcatatggtcatttagttattttttttcartgaatggttgtacataaatcaagtaatataaatgcattgagaactgctgactttttattagatggtaattgtttcatgtattttcttgatttatagcctgaaaataatctggatcagaaagaagtattccaaattggcctctgtcttgaaacttaactacc

SEQ ID NO: 664007 - DNA, 594 bp, Homo sapiens
tgtctgctgcctcctgtttaagtcatactgtatcagctcttgtagtatttcacttcttgaagtatatgtgaagaacattgctgttgataattatggtgttgacatttgtgaatagataaattagagtagatttaagattattcatataataacactttcagtcacttgcattcccacatgaatttgtaaattgtaaagaaggaaaaaattacagcttctggcccaagattatccataattcccagactatcttacctgtacagctgtacaagagcacatcccatgtgtgccgtccgtcaattatgtgtcccagcagataagtaaatatttaagaagaaattttctatggtgtgatctttgtacctaggaataaccttatttatttttggatccctagggcttggcatatggtcatttagttattttttttcaatgaatgkttgtacataaatcaagtaatataaatgcattgagaactgctgactttttattagatggtaattgtttcatgtattttcttgatttatagcctgaaaataatctggatcagaaagaagtattccaaattggcctctgtcttgaaacttaactacc

SEQ ID NO: 664008 - DNA, 603 bp, Homo sapiens
aaaagcttctacacagcaaaggaaacagtcaacaaactgaagagacaacccacagaatgggagaaaatatgtgcaaactacacaactggcaaaggattaataaccggaacatataaggagctcaagcaactcactaggaaaaaaatctgataatctgattaaaagatgggcaaaagatctgaatagacacttttcaaaagaagacatacaagtggcaartagatatattacaagatgcataatatcactgatcatcagagaaactcaaataaaaagtgcaatgaggtatcttcttaccccagttaaaatggctttcatccaaaagacaggcaataacaaatgctagcgaggatttggagaaaagagaacccaaatagccttggtgggaatgtaaattattacagccactctggagaacattataagggtttcttcaaaacctagggataaaactatcatataatacgacaattctactacaggatatttatagaaagcaaatgaaaccagcatgtcaaacgtatctctgcacttccatgtttatcgaagcactattcaaaattgccaagatttggaggcaacctgcatgtcaatcaacagatg

SEQ ID NO: 664009 - DNA, 603 bp, Homo sapiens
aaaagcttctacacagcaaaggaaacagtcaacaaactgaagagacaacccacagaatgggagaaaatatgtgcaaactacacaactggcaaaggattaataaccggaacatataaggagctcaagcaactcactaggaaaaaaatctgataatctgattaaaagatgggcaaaagatctgaatagacacttttcaaaagaagacatacaagtggcaaatagatatattacaagatgcataatatcactgatcatcagagaaactcaaataaaaagtgcaatgaggtatcttcttaccccagttaaaatggctttcatccaaaagacaggcaataacaaatgctagcgaggatttggagaaaagagaacccaaayagccttggtgggaatgtaaattattacagccactctggagaacattataagggtttcttcaaaacctagggataaaactatcatataatacgacaattctactacaggatatttatagaaagcaaatgaaaccagcatgtcaaacgtatctctgcacttccatgtttatcgaagcactattcaaaattgccaagatttggaggcaacctgcatgtcaatcaacagatg

SEQ ID NO: 664010 - DNA, 603 bp, Homo sapiens
aaaagcttctacacagcaaaggaaacagtcaacaaactgaagagacaacccacagaatgggagaaaatatgtgcaaactacacaactggcaaaggattaataaccggaacatataaggagctcaagcaactcactaggaaaaaaatctgataatctgattaaaagatgggcaaaagatctgaatagacacttttcaaaagaagacatacaagtggcaaatagatatattacaagatgcataatatcactgatcatcagagaaactcaaataaaaagtgcaatgaggtatcttcttaccccagttaaaatggctttcatccaaaagacaggcaataacaaatgctagcgaggatttggagaaaagagaacccaaatagccttggtgggaatgtaaattattacagccactctggagaacattataagggtttcttcaaaacctagggataaaactatcatataatacgacaattctactacaggatatttatagaaagcaaatgaaaccagcatgtcaaacgtatctctgcacttccrtgtttatcgaagcactattcaaaattgccaagatttggaggcaacctgcatgtcaatcaacagatg

SEQ ID NO: 664011 - DNA, 606 bp, Homo sapiens
gtatcttcttgtccttgatatgtaatggtatgtttctgttaatttctctgtgaagttctaacacatttcacagtgctggtagaaaaataattttctaggtaatcatctaatttttayataaaatatattacaaaatgccatatatttgtctttaaaagtttgaaataaattaacagttttactttgtttaaggattaacttaaatcatttataagatgcttgtttttagtaaaagggcaagataagcagtattcatagcagaaaacattatgttgatacaggtattactttcaaaatttcaattcatgtcaataggcagttcagttgcctatagaaaatattttctcaatcttaagttatattttaattgaatttttcttagtatatactttaatatttgaagttaaattttagttaaattggcacacatttttgattgaattataaatttaaaatgtgtaatgctagggttatatctatcggttgcattaaattctgtgttaaaaaaatggacaaatgtcacacaacaaaatgcaacaaaaaaccaagaagaaacaaaacaagcaaaaacagactaaacatgttttgaattaggagagtaggtgc

SEQ ID NO: 664012 - DNA, 496 bp, Homo sapiens
cataaaacaactctgttcaggtggatactaatattgtctccatcttacgaatgaggacaataaagccaacagaggttaggtacttgcccaagatcacacatccagagagtggcattgctaagtgtgtttgtattttaattactacaggatgctgctgtaatagtgatataaacaaacagctgtgggagccagaaagggctaaaggggacttggcttccaggcagtccagagatgctttacagaggagaccacatttgagctctaccttgaaagaagaaatagaggaaattcactgggtggagaagmgtggaagagcattccaggctgtcaaaaaaagatatgctaaggcacagaggtgtaaaagggcatggcaaggttgaagaaacagttcaggatctgtaagaaatcaatacaccaaaagccagatgtggaagatttgcatgcttcaacaaggagcttggtctttatcttctaggctgcaaaaaactaagcaggt

SEQ ID NO: 664013 - DNA, 598 bp, Homo sapiens
ttcagtatctgctaattagtactaaggaaacagtgtgaatctaagcgaaaacgtgtggcacccaatgacgaaacagtggttttcattacaaaaaatttgtgaaatctatgaagtgggaacgaagcagagtcacccgaggaatgttgtgtgcgaatagatcgttaatacgcattttggaartggaaaaaggtcaccttgtgccttcttcattgaacttttcattctgaaatagacttacggtcttgtctcaccaaacaacacaaactccagagccccagcttgtttggcttttgttcagtagaagaccaactggcatatgaattgttcaataaatccttactaaatctttcctaacctaataaatctctactaaaggaaggaaacattagcgctcatttcttgcgcctactttgtgccattctccatcatcttagacctgagtgcttacaccctttctcttagactgcgagctgcacaaaggaaaggaatgttactaagggctggtattattggaaatcaatgttggcctttgcctatagattcaagagctccaggacccatgtgaatactggccacaagtagcaagcccatctggatc

SEQ ID NO: 664014 - DNA, 587 bp, Homo sapiens
gtaacgtaactaggcgcctcgaagatggaggctgtcgaggaagtgtgcccactgtgcgacaggactggtgggaggcccggacagcatcgtaggtgtctactgggccaagctcgcgagcaggaaaatgcaggccccgagagatcttgaacaacctctaggaacaccaccgtatcttgcccaacgaccttcgttgaaccgcgcaaaatatggaacgcttcacgaatttgcgtgtcatccttgcgcaggggccatgctaatcttctctgtatcgttccaattttagtatatgtgctgccgaagcgagcacgcaaataagyccgtccccaggtcttataaggcacgggagtttctcatttgttttccttacggtaacctaatcgagcgctttcctgtccatcttggagcctttaggagaatttcatgtaacggaactcatcacaaggctcgtaagattggtgctctgaccgccaggccgtatctggccgcgaccgatctgtcaggtttacctgttgggtgggacatgcaaatgagcgcccggggcaccctgggtaagggaccccgcgtgggacccaggccccggggctttg

SEQ ID NO: 664015 - DNA, 587 bp, Homo sapiens
gtaacgtaactaggcgcctcgaagatggaggctgtcgaggaagtgtgcccactgtgcgacaggactggtgggaggcccggacagcatcgtaggtgtctactgggccaagctcgcgagcaggaaaatgcaggccccgagagatcttgaacaacctctaggaacaccaccgtatcttgcccaacgaccttcgttgaaccgcgcaaaatatggaacgcttcacgaatttgcgtgtcatccttgcgcaggggccatgctaatcttctctgtatcgttccaattttagtatatgtgctgccgaagcgagcacgcaaataagtccgtccccaggtcttataaggcacgggagtttctcatttgttttccttacggtaacctaatcgagcgctttcctgtccatcttggagcctttaggagaatttcatgtaacggaactcatcacaaggctcgtaagwttggtgctctgaccgccaggccgtatctggccgcgaccgatctgtcaggtttacctgttgggtgggacatgcaaatgagcgcccggggcaccctgggtaagggaccccgcgtgggacccaggccccggggctttg

SEQ ID NO: 664016 - DNA, 587 bp, Homo sapiens
gtaacgtaactaggcgcctcgaagatggaggctgtcgaggaagtgtgcccactgtgcgacaggactggtgggaggcccggacagcatcgtaggtgtctactgggccaagctcgcgagcaggaaaatgcaggccccgagagatcttgaacaacctctaggaacaccaccgtatcttgcccaacgaccttcgttgaaccgcgcaaaatatggaacgcttcacgaatttgcgtgtcatccttgcgcaggggccatgctaatcttctctgtatcgttccaattttagtatatgtgctgccgaagcgagcacgcaaataagtccgtccccaggtcttataaggcacgggagtttctcatttgttttccttacggtaacctaatcgagcgctttcctgtccatcttggagcctttaggagaatttcatgtaacggaactcatcacaaggctcgtaagattggtgctctgaccgccaggccgtayctggccgcgaccgatctgtcaggtttacctgttgggtgggacatgcaaatgagcgcccggggcaccctgggtaagggaccccgcgtgggacccaggccccggggctttg

SEQ ID NO: 664017 - DNA, 552 bp, Homo sapiens
ttttgtgaggccaaggtgggaagaccccttgagaccaagtgttcaaaaccacctgggaaacttagtgagaccccagcctccctatctctctctatatatagctatatctatatctatctatatagatagatagatagatagaaataaatacaaatatatattatattttatacagatatatttatatatttatatataatctagatatatatatctagattatatatttatatctagatacatattatatatatttatagctagatatatatctagatatttatagctagatatatatctagatatataaatatatattttatatatatctagatataaatatagatatatctataaaatatatatctagacatatctatatttatatctagatatatatatcttcaggtatatacacccagtatatacctctctctmtatatatataaatatacacccagtatatctatatatttgtatagaggtatatactgggtgtatatacctgaagattacctaaagttagtttaattattaacacgatttttaagc

SEQ ID NO: 664018 - DNA, 587 bp, Homo sapiens
aatctgtccctgttcatttcttattagcccctacaaagtagtacattagtcagtcgtgttattttcattatgtgaaatgaaagtattgatttattaaaaccataagaaacttggttttcttggtaaagtcttggtmattggaaatgttattcttgtatgtattatcactgagaaaaagaaattttgacctcattaacaagtaattcaacataagcatggtggcagacactagccattgctgtcatttagatagcaggacatgcccgcctaatagcagccagttacaaacactgtcacactgacaatctgttagctaagtaagatggcatggcaaacaatgaagattcatgttgaaatctcatgacaatatttagttataaggtgaatattcagatgttttagaccctgcctattttaatattttaagatgatcatcccaataaaaaactatttctaaaaatcctctagagaatcctctaacccttaagaatctgtctgaagactccaagaggttctagatcctagtctgaggaacactgtataggctgatacggaaaacttcagttcctggaatttgtgtatcatta

SEQ ID NO: 664019 - DNA, 550 bp, Homo sapiens
catgtcttttttttttttttttaccttttgcccccagagaaagcagtaatgcctaagctttgccttagagtctgttttctaaggaacctagactaagacatctgccctgtatatgtttcactcactgcttctaattctgccatctgkctggctttggaatggtcaacatctttcatatactttcttccttcaaattctacaatgcagctaccaggccttctcttttcttggtcaaacaccctcagcttcttttaatgattcctcaaaatgcagttttagtctctcacctcttgcctcagtttaatatgtcattgtcttaaattgtggctccttgactgctccgttgggtttggtcagtgcagggctgagttcatgatgggaggatgggcttctcatttcctttattgtgggtatcatactattaatacaataaatacagctatcctgacctggacctattcttgtgggaatgctggctatttgggttgtggtgacctgaccggttaaaaatgagcttagggaaattagattgagagtgagcaaggtttag

SEQ ID NO: 664020 - DNA, 550 bp, Homo sapiens
catgtcttttttttttttttttaccttttgcccccagagaaagcagtaatgcctaagctttgccttagagtctgttttctaaggaacctagactaagacatctgccctgtatatgtttcactcactgcttctaattctgccatctgtctggctttggaatggtcaamatctttcatatactttcttccttcaaattctacaatgcagctaccaggccttctcttttcttggtcaaacaccctcagcttcttttaatgattcctcaaaatgcagttttagtctctcacctcttgcctcagtttaatatgtcattgtcttaaattgtggctccttgactgctccgttgggtttggtcagtgcagggctgagttcatgatgggaggatgggcttctcatttcctttattgtgggtatcatactattaatacaataaatacagctatcctgacctggacctattcttgtgggaatgctggctatttgggttgtggtgacctgaccggttaaaaatgagcttagggaaattagattgagagtgagcaaggtttag

SEQ ID NO: 664021 - DNA, 480 bp, Homo sapiens
gctcattttctaattgggtttttccttgttaagtttttagaatagtttatgtattatagatactagtcctttgccagatacatttttgcaaatattttctcttaatctgaagcttgtctcttcatcctttcaacagaaccttttacagagcaaaagtgtgaattttttttttttttttttttttttgagatggagtctyactctgtcgcccaggttggagtgcagtggcgtgacctcggctcactgcaagctctgcctcctgggttcacaccattctcctgcctcagcctccagagtagttgggactataggcatccaccaccatgcccggctaattttttgtaaaaagtatgaaattttgatgaaattcaatttatcaatcttttcttttatggcatgattttggtgtcaaatctaaaaattctttagtcttagattctgaagagtttctcttattacttttttctaaaagttttatag

SEQ ID NO: 664022 - DNA, 607 bp, Homo sapiens
tgaataattgaaatttttattaaggatgaaatttctttactatgttatatttattatatatatgatagtttcaactttctgagtctctcttgtcaaatgcattctttctcattatctcctttataaaatgtttaatttaaatggtcagtcttctgttcttatgcaggagaatgtcagcctgatcctcaaccaattaataccacgtttcaagttgggtttgacttctactaacgtagtagtctgacccctagtggttataagaaacatctgcacggcttgtaagcaaattttgactgaattttctgaaaagtgaatatcggacaatgaatttctccttgaaaataaataaaataaaaatragagaagaattttgagtccatagaaaaaataatagggaagttcaggtaaaatcatgtttctataaaaataatttcaaatcggtatttttactgattttttagtattatgtgatcaggctgcacttatgtaacacatttatggtgaacataacacacttatgttccaggaattcattctatgttatttattggaaacaaagcttgtttgcccccaaaattaatgttttgtcattgtcccagcatgccct

SEQ ID NO: 664023 - DNA, 590 bp, Homo sapiens
caactataaatgcagtatgtgcttactgtaaaaatgtccaaacagaaggatatgaagtaaaaggtaaaaattcctcctttttttccagcctgagttccgccaaaaccatagcctagaactatgtacttagacatgcaaccaccagacatttttttgtgtgcatgcatgtgcgcacgcgcacacacacacacacacacacacacacgcactgtcttatttcacatgggttcatgttatacatattgttctataaattgatttcttcacttaataaaatatcttggacatcttttcaagtcagtatattcttattgtctgcctatctactgttctgatacaagaatgtgggctaatttattaactatccttaagtaatttacatgtagatgtttttaaaaattttctgctatataaccagtgttttaataaacatcctagggcttgtaactacagacttatacaagtatatgtgtgtgtatatatatatatatggagtaaatgccattaaaatraaattttaggtcaaagcttatgcataattacaatcttgacagttaataaaagcatatttttgaaattgatattgtccc

SEQ ID NO: 664024 - DNA, 583 bp, Homo sapiens
ctttgctctgtgtagatgtgctgacacttttttctctccctctctctttatgcctctcagacagctgaggaagaagcacccttctagcctccacctgttcacttttgccacatcccttcttatactttctgagcccttctcccatcaggtatcccttaatgcttctttaatctctccttttttacttcttgtttctacctggttataaaatggtatcctctatcctttaagccatgttttccataggctgtcttctaaacactattttaggaggtactcagtggaaaaaataatcatttcgtcaaataaatttgagtcattcatatactrttaacttccttttgaatatttagaactcacagtagcttgttaaaggtgctgagaagttctgcagtaatgaaaagacatctgcttacctttgcttactctgtatatccctaaattattttaccataaaacctaccctttccctttttaatcttctgtaatgttttttaatatctatagataccttttgggaaatttttcttgtctctgcaactctaaattctaaagctaaggttttttaactctgccaaattcc

SEQ ID NO: 664025 - DNA, 640 bp, Homo sapiens
tgaagatcagaggagtcccatatgaaaggtgaaaccagagtaaatgcagaaaagaaaactgtaaacattgatggtcatgtatggaggtgcaatgcctagattcacattcgataaaactgtccctggcccwgtccctcagatggaagatgagcagctcctgacccctggataggattaaaattgttttgcaaattttaataatttcataaacttctctgagatgacaatcctcatttttgaatcttctctgtttttttgaagccctatgcctggagcatggtgctggcttctgatgggcaggcatctttctcttcattttacatccacaaataagttaagtgccctttggtgcaaaatcatgacagagttgggaatctagtaggttcctgagacctctgggttgggtactcaccattcaaatgtagtggttgggaaacactgcttcctaatgctgcatgtgcagaagttattttctgaaaaagaaatttgaggctgtgctaagaaggagacacataaattcaatttctcttttctcctcagtccctccaccttccctataccagttgcaatcctattaccaattgtctggtggtagggggcatccaacactaagaaaaaatgtcattaaagaaaatagtag

SEQ ID NO: 664026 - DNA, 640 bp, Homo sapiens
tgaagatcagaggagtcccatatgaaaggtgaaaccagagtaaatgcagaaaagaaaactgtaaacattgatggtcatgtatggaggtgcaatgcctagattcacattcgataaaactgtccctggcccagtccctcagatggaagatgagcagctcctgacccctggataggattaaaattgttttgcaaattttaataatttcataaacttctctgagatgacaatcctcatttttgaatcttctctgtttttttgaagccctatgcctggagcatggtgctggcttctgatgggcaggcatctttctcttcattttacatccacaaataagttaagtgccctttggtgcaaaatcatgacagagttgggaatctagtaggttcctgagacctctgggttgggtactcaccattcaaatgtagtggttgggaaacactgcttcctaatgctgyatgtgcagaagttattttctgaaaaagaaatttgaggctgtgctaagaaggagacacataaattcaatttctcttttctcctcagtccctccaccttccctataccagttgcaatcctattaccaattgtctggtggtagggggcatccaacactaagaaaaaatgtcattaaagaaaatagtag

SEQ ID NO: 664027 - DNA, 555 bp, Homo sapiens
gagctgtaaggagttgctttcgtggtgtttggtgaactcttcccttactaatccctcccttggagactgaaaaagtgatttttataagaggtccaatcctgatgagggttaggggccatttaaatggtacatgtgggtacttctggaactttttcaactatttggagagagaaggccctatataaaaaggctgagaccttttgctcctcagttgagaacttaaaacactgagattgaagtaattatatacataactctgctatattccccacatacgcagcctgaatcctaagcatactacagatgattttgctgcacactaaagtgtggtaatcattagctagggttgatcaagcccaacttgatgatctctgagcattgctttctcacttgttacttttcaagaattgttaaaagaacctgctcacctcttatttatagaagcaggggccattagaatagggagcttagagatcatctagtccaataacgttagtttacaggcgayactaccaaggttcatagaactcaatgacctactccaagtttgcatgt

SEQ ID NO: 664028 - DNA, 630 bp, Homo sapiens
tgtacaagggttcccttttcattccttgccagcatttgttattgcctatcttttggatataaatcattttaactggggtgagatgatatctcattatagttttgatttgcatttctctgatgatcaatgatgttaagctcctttcatctgcctgtttgccatttgcatgtctttttctttttgaggcagcctcttgctctgttgcccaggctggagtgcttgcttgcttgacttgctgcagccttgacctcctggcctcaagcaatcctcccacctcagccctacaagtagctgggactacaggcacgtgccaccacacccagctaattttttgtgtgtttatttgtagaggcagtgtttcaccacgttgcccaggctggtctcaaaccgcggctcaagtgagccactcgctatggctcccaaagtgctgggattacaggcatgagccayggcacccagtcctgtatgtcttcttttgagaagtgtttattcaaatcttttgcccattttacattggattaatagatttttctcctatagagttgtttgagctccttatacattctggttattaatcccttgtcagatgagtagtttgcaaatattttctctcattctgtggattgtctc

SEQ ID NO: 664029 - DNA, 630 bp, Homo sapiens
tgtacaagggttcccttttcattccttgccagcatttgttattgcctatcttttggatataaatcattttaactggggtgagatgatatctcattatagttttgatttgcatttctctgatgatcaatgatgttaagctcctttcatctgcctgtttgccatttgcatgtctttttctttttgaggcagcctcttgctctgttgcccaggctggagtgcttgcttgcttgacttgctgcagccttgacctcctggcctcaagcaatcctcccacctcagccctacaagtagctgggactacaggcacgtgccaccacacccagctaattttttgtgtgtttatttgtagaggcagtgtttcaccacgttgcccaggctggtctcaaaccgcggctcaagtgagccactcgctatggctcccaaagtgctgggattacaggcatgagccatrgcacccagtcctgtatgtcttcttttgagaagtgtttattcaaatcttttgcccattttacattggattaatagatttttctcctatagagttgtttgagctccttatacattctggttattaatcccttgtcagatgagtagtttgcaaatattttctctcattctgtggattgtctc

SEQ ID NO: 664030 - DNA, 517 bp, Homo sapiens
ttaaatagtttgaggtctcagatttaagtgtttwatctgttttaattttagttttgtatatgatgagaggtaggggtctagtttcattcttctgcatatggatattcagttttcccagcactgcatattgaaaagactatcttttgtgtagtgtatgctcatggcactgttgtcaaaaatgagtttactgtaggtaagtagattcgtttatgggttctctattctgttccattggtccatacacctgcttttatgccagaaccatggtgttttggttactatagctctatagtttaaagtcaggtaatgtgattcctcccattttgtcctttttgcttaggatttctttagctattctgggttcttttgtggttccatttacattttaggatagttttttctatctatgtgaagaacgccattgctattttgatagggattgcattgaatctgtaaattgctttgggtagtatgagcattttaacaatattgatccttacagttcatgaacatgaag

SEQ ID NO: 664031 - DNA, 517 bp, Homo sapiens
ttaaatagtttgaggtctcagatttaagtgtttaatctgttttaattttagttttgtatatgatgagaggtaggggtctagtttcattcttctgcatatggatattcagttttcccagcactgcatattgaaaagactatcttttgtgtagtgtatgctcatggcactgttgtcaaaaatgagtttactgtaggtaagtagattcgtttrtgggttctctattctgttccattggtccatacacctgcttttatgccagaaccatggtgttttggttactatagctctatagtttaaagtcaggtaatgtgattcctcccattttgtcctttttgcttaggatttctttagctattctgggttcttttgtggttccatttacattttaggatagttttttctatctatgtgaagaacgccattgctattttgatagggattgcattgaatctgtaaattgctttgggtagtatgagcattttaacaatattgatccttacagttcatgaacatgaag

SEQ ID NO: 664032 - DNA, 499 bp, Homo sapiens
tcattgcctatattgacttgggaaaattttggaaaactggaaaatgttctgaaagttgggttctagtagtcctgaatgtgtgggctgtcacatccagatgtcctgatttttctgaattaccttagtcaacttggtttgttggcccaatgcaagccactgtactgtattgcaaaacacacacacacacacacacacacacacacacacwctctctctctctctctctctcaaatatattctttgattttccctgtttttaattttatttaaatagaatcacagttcttatactctcccgtgatttgaatcttttactcaacattatatatctgagatttcctcattatttggtggttgctgtgtttattttcatttgtttttgttgctttacaattttcctttgtagaaatataccatagtttatactttctgtagtttgcacttttgggttttgaaaaatgcaaaaaaaaaaaaaacattcatgaacaaacctttcttc

SEQ ID NO: 664033 - DNA, 661 bp, Homo sapiens
tatattctttgattttccctgtttttaattttatttaaatagaatcacagttcttatactctcccgtgatttgaatcttttactcaacattatatatctgagatttcctcattatttggtggttgctgtgtttattttcatttgtttttgttgctttacaattttcctttgtagaaatataccatagtttatactttctgtagtttgcacttttgggttttgaaaaatgcaaaaaaaaaaaaaacattcatgaacaaacctttcttctgatacagatgtacargaagtttctctaaggtctatttccaggagtgtaattgttagttcaaaggaatgcacataccaaactctttttttctgagcagttgcaagtggatgagcattcctgttgcttcatggcctattgttcagtttataaatttctgccaagctggcagatgagacgttatatcttgctatggctatagcttgcttttcattgattactaatgactttgagcatcttttcttttttgtagtgagcaatcagtgagaaacatggtgacacatttttttcattattatggtgctggaattttctattttcttgtcgttctatcaattttgctttatatgttttgagaccattttattcaatacatataaatataagattgttgta

SEQ ID NO: 664034 - DNA, 493 bp, Homo sapiens
aatcatttgtccatcagcactgtcatcagctgtaaagctgaaacttgacctcaagtctgtctgactctagaactgtgtagtgtatccacattatgtgattcgcacatctagaaatcggccccaaagcagactaccctcaaggaaaaagcaaagagaaaaacaggcagcagaatggtgagcccctaaatcctggcacttgagcagtgtgagggtgtccctttaagaacgtaacacacaaacccaacagccaaggtgttcagccaaaaaagaaaaaaagagaggcatatttctagcctgcataatcatttctggaccgattcccactagcagcctctgagacgaacagcagctcacagcctcggctgaagytcctccacccccagggtggctctgactagggcgcagctctgactagtgtgcaggcaaaaccccaaaactcaaaacaagaagtgaaaaaagtggagccaggaaaaattcgtcggcatcctccaca

SEQ ID NO: 664035 - DNA, 465 bp, Homo sapiens
gtcaagaggactctctccctctgtacaaagtgttctctaactcatgtaccggtcatcacggtagtgtctgcctcaaacacctgggacctaccttagtgtgggaggtgattctccctgcaggtaacctaatttgttgctgcattcatggagaacaaaccactgcttatctatgggaagcattttaagcatgcagacctctcaaagaaaacaaaaacaaaaacaaaaacaaaaaagaccgtggatgtttaaacaagaarccttccagaagtcatgtaaaggaggaagtacctagcccaggatctgtcacataacaagtagttacaaatatttgcagaataaatagcaatttccatcgtcaaagtcttctgcatctgtttcacctcccacagtgcctaggatttttttttttttttaatcacaataatggtaaggtcataaagaagaacaagaagaacaggaactaaa

SEQ ID NO: 664036 - DNA, 637 bp, Homo sapiens
tcacagtatgtcttcaagactagtaaagtctatatttaaaatttttttttctgctacatggtgtagcaagtagcttttcaaattcttcattctgatgatgtaatttcagataagacatttaggaagtcatcagcttattaacttttgggttgaaccatatgaaactgccatttttgttggtcatagtttctaaaatattggaaatttcaaatgttccatcttcattatattcctcaaagttagtccttgttctagagctgtaagaggacttcctttaagttttttagaatatcacattttcctgcaagagctatgtcactaagctagttccaaaaaacctatttaatgtttgtggtttgtaatggtaccagattcacatctggtcctaggaactgagcctattctgttcaacagggtcaagaaaaagaaataartttctcttcctcttttgaggggtatagcaccggcctttctgggccttgaaataggtgaaaataataattattttcctttctgctctttttgcaccttacttctccaatattctcctgaaatcctttttcctgtacctattgtcctcattctgtctggcctttttctatctcaatcagcttgtctttgctctttattcttaaca

SEQ ID NO: 664037 - DNA, 622 bp, Homo sapiens
ctgtgtagctaaatcctcccctttttttgagctgcctgaaatgcctcttctgcggaaatcttcactgatagagtcagccggaggcatctcccactcatttacctgtatatttttcctttggttcttaccatggtttgcttcttacactgtacaagtatctatttatgggtctaatctgtcttgcttgaggccttgctggaaccttctttatactctctacagtgtctagcrgggcagtcccagaaaaacaaacaaacaaacaaacaaaaacttatttatttattgaaaggaaggaaagaagagaggagagaaagagctcaattagtgtagtaaatagctctagaaaattgagttcagccctgggggtggacttgagcctgtttgatacaggaacccaggaaccatgttatatccatcccagaagagcccccattaactgtgggcatggaactatcccagttttgcaggagctactggcctggatcagatccgaattcacctcatcacaacactccccaaccagacctggccaaaatcagcctaccctctctttctggaagtagaataaaacttctgtttgctagggccttgacctctggctttaagcatgctgtggactctc

SEQ ID NO: 664038 - DNA, 611 bp, Homo sapiens
ttctatggataagaaacagttgttttattaaagtggtggttttaaaagtatttttataagtttaaactttaatcatatctgattcatttaatagctcaatttcakcaggatatatttatttgatcaccaaattctttgtgataattattacttttgcatctctttattttcattttatatattagttaactctcttcaatttaggattaaatctttgaaagttttaaacctagccggacatggtggctcatacctgtaatcccagcactttggaaggctgaggcaggaggatcacttgagaagttaggttagagatcagcctgggcaaaaaaaaaaaaacaaaaaaacttaaaaaaaaagttttaaacctgcccagctgtccagcctagtaacacactttctaaatgcacaaagtccctatttttgcaataggcagcatatagaatatacagtttgctacatgtacaagaatttgaataatctataacaaatgatctatttcttttattatttattgaatttcaccaaaagtgctcctttccctaaaaatgataaaaactaccttattcagataaattctgatctcagtttgacagatatgcattaggcaa

SEQ ID NO: 664039 - DNA, 611 bp, Homo sapiens
ttctatggataagaaacagttgttttattaaagtggtggttttaaaagtatttttataagtttaaactttaatcatatctgattcatttaatagctcaatttcatcaggatatatttatttgatcaccaaattctttgtgataattattacttttgcatctctttattttcattttatatattagttaactctcttcaatttaggattaaatctttgaaagttttaaacctagccggacatggtggctcatacctgtaatcccagcactttggaaggctgaggcaggaggatcacttgagaagttaggttagagatcagcctgggcaaaaaaaaaaaaacaaaaaaacttaaaaaaaaagttttaaacctgcccagctgtccagcctagtaacacactttytaaatgcacaaagtccctatttttgcaataggcagcatatagaatatacagtttgctacatgtacaagaatttgaataatctataacaaatgatctatttcttttattatttattgaatttcaccaaaagtgctcctttccctaaaaatgataaaaactaccttattcagataaattctgatctcagtttgacagatatgcattaggcaa

SEQ ID NO: 664040 - DNA, 611 bp, Homo sapiens
ttctatggataagaaacagttgttttattaaagtggtggttttaaaagtatttttataagtttaaactttaatcatatctgattcatttaatagctcaatttcatcaggatatatttatttgatcaccaaattctttgtgataattattacttttgcatctctttattttcattttatatattagttaactctcttcaatttaggattaaatctttgaaagttttaaacctagccggacatggtggctcatacctgtaatcccagcactttggaaggctgaggcaggaggatcacttgagaagttaggttagagatcagcctgggcaaaaaaaaaaaaacaaaaaaacttaaaaaaaaagttttaaacctgcccagctgtccagcctagtaacacactttctaaatgcacaaagtccctatttttgcaataggcagcatatagaatatacagtttgctacatgtacaagaatttgaataatctataacaaatgatctatttcttttattatttattgaatttcaccaaaagtgctcctttccctaaaaatgawaaaaactaccttattcagataaattctgatctcagtttgacagatatgcattaggcaa

SEQ ID NO: 664041 - DNA, 365 bp, Homo sapiens
cagtttaattctcaggcccagcttaaaagtcctatgaaactagaggtaaaattttgcctcccctatactattgttttcctaagcaccctttttctgatatctcagagtcagaatcatttgcaaagcaccacaacggttttctctgcctttccaaccagattctcaaactggctgaactatattaattacaagctgccctagccacygtgtaaggtaatagtttaagctacttgactggtgtgagaaaaatgtctgtggatttctctctgtagtacccccagaaggaggccatggcctggcagataatcaatacctattagagcagaaatcaatttgcccaatcaggtaatgccctgattgtattt

SEQ ID NO: 664042 - DNA, 624 bp, Homo sapiens
agaatcatttgcaaagcaccacaacggttttctctgcctttccaaccagattctcaaactggctgaactatattaattacaagctgccctagccaccgtgtaaggtaatagtttaagctacttgactggtgtgagaaaaatgtctgtggrtttctctctgtagtacccccagaaggaggccatggcctggcagataatcaatacctattagagcagaaatcaatttgcccaatcaggtaatgccctgattgtattttctctacagcagagggaagattttcccagagaagtcactgtatagtggtttccttcatcacaggcgagggcatggctacaggaacagcctgtgaacacctctatccctaggggcctcatggtgtgagtaccactagtcttgctgcccacgctgtcatggatttagattttgaactacatctgacaggtcttaaatttccacttttatgtttgtatgtcattctgaggtcaggcgtaaagtggaatgtggggctgagaaatcaactagataattaaggaggaattgatagtataatttgggcaaattagcagcggcacttacagtattgaattaactgaattatgttgagctgcacagacttcacccaa

SEQ ID NO: 664043 - DNA, 624 bp, Homo sapiens
agaatcatttgcaaagcaccacaacggttttctctgcctttccaaccagattctcaaactggctgaactatattaattacaagctgccctagccaccgtgtaaggtaatagtttaagctacttgactggtgtgagaaaaatgtctgtggatttctctctgtagtacccccagaaggaggccatggcctggcagataatcaatacctattagagcagaaatcaatttgcccaatcaggtaatgccctgattgtattttctctacagcagagggaagattttcccagagaagtcactgtatagtggtttccttcatcacaggcgagggcatggctacaggracagcctgtgaacacctctatccctaggggcctcatggtgtgagtaccactagtcttgctgcccacgctgtcatggatttagattttgaactacatctgacaggtcttaaatttccacttttatgtttgtatgtcattctgaggtcaggcgtaaagtggaatgtggggctgagaaatcaactagataattaaggaggaattgatagtataatttgggcaaattagcagcggcacttacagtattgaattaactgaattatgttgagctgcacagacttcacccaa

SEQ ID NO: 664044 - DNA, 469 bp, Homo sapiens
gggtcaggaaactccctccactagccaagggaggcgtgagggtctgtgctatgaggaatgatgcactccagcccagatactatgcttttcccacagtcttcacaacccgcagaccaggagattccctcgggtgcctacaccactggtgccctgggtttcaagtacaaaactgggtggatgtttgkgcagacaccaagctagctgcaggagtttttttttaatatcccagtagcacctggaatgccaacgagaaagaaccggtcacccccctggaaaggaggctgaagctgggagccaagtggtctagctcagcagatcccaacctcatggagcccagcaagctaagatccacaggcttgaaattctggctgccagcacagctgtctggatttgacctgggacactccagcttattgaggggaggggcatccgccattactgaggcttgagtagaccatttcccctcaca

SEQ ID NO: 664045 - DNA, 469 bp, Homo sapiens
gggtcaggaaactccctccactagccaagggaggcgtgagggtctgtgctatgaggaatgatgcactccagcccagatactatgcttttcccacagtcttcacaacccgcagaccaggagattccctcgggtgcctacaccactggtgccctgggtttcaagtacaaaactgggtggatgtttgtgcagacaccaagctagctgcaggagtttttttttaatatcccagtagcacctggaatgccaacgagaaagaaccggtcacccccctggaaaggaggctgaagctgggagccaagyggtctagctcagcagatcccaacctcatggagcccagcaagctaagatccacaggcttgaaattctggctgccagcacagctgtctggatttgacctgggacactccagcttattgaggggaggggcatccgccattactgaggcttgagtagaccatttcccctcaca

SEQ ID NO: 664046 - DNA, 602 bp, Homo sapiens
aatttcctattttttaaccatgtggaaattttaaataattgtttcatatataagctttcacaacaattaataatagcatctttcttaaaaataataaataataataaatacccatttatacttccactggctggtagaatttcaatataataatttttttttaagctcacaaggaaaatttcactccaggttacatctagagtrctcaccaatatttggaagtaactattcagatattaacaataaatccaaatggcctggcctattcttattagtggtgccctacctgaatagatttgtcactcaatccttcgtgtgaccttgatcacagccaagttaaaggatgccaggaatagtgatgaaataggaatttgactattcagccttccaaaagccaaagctgagatacaagaagataataatttgggccaaataccaaggctggctgaactgtgatgcattcctacttgaaagctgaagaatgggaaaaggagaatgcttaattatgagatatttatgtttctagggctgggagcttggagagaggaggatggtgtccaggggagctttgcccagtcttgtgcagatggacttaaattgtt

SEQ ID NO: 664047 - DNA, 564 bp, Homo sapiens
gtaaagaaagtaaaccaagaactggagctagatgagctggctctcctagaagggagactatctgaggtagactggggaggagacttttctacatgactctggttcccagaagtctccacacactgaagtaaatgagccctagacaccatgaagagggccaacagaatcactgtgaagagaaggatcctcagctccagggatttcctctgcctacaccctgcccttaagatcaggaccctttggccctcttcatagtgtctggggctctgggggataacccttgagctatggcaccaaaaaacataccagtagcaacaacatccagggggccttctcttctccttgggagagcttcaactcatttcatcacatttcttccatgcacctgcacaactgggcttccaaaagtgcttcaaagacttcagagcttcattctaatgtcctccccctacccccaccccaccatgaatgggcaaaaagaagagcagttatagctcttatcaggatgcttacctgtgcaagactccaaaaccagtaagsttgggaacatccacggagccacag

SEQ ID NO: 664048 - DNA, 617 bp, Homo sapiens
ttgggaggaatggatgggtactttgagttgaaggagaagtaaaagggggctttggagaatttctgttaagattacttaagggaagtttttctcctctgcaacctctgtgaatttatgaatccaaagatatgaaaataagttggaggacttaggaccactaacttttgagggtgccctctgtattccctcccatccaaaggatttgattattgcagcaattgatggagacagggctctagtgacatttccaacttcccctcctgagatatttaaattagtccttaggaaggcttactatcccctcacttccatcgtggaagcctcttatakttttcccaccctctgattcagctccattttctggttcatttttcatcactcaaaacctccaccaacgcctgtgactcatgtccagtggattggttatagcagaaaaacattgtggtcattactttctatggttttttcatagaaacttagttgaacttacacatttaaaacataaactaactgtggtgtgaattagtacaaattcctgcttgggtcgtggcatttagcacaagatgaaatttcctatctccatggctttagggctctcccagtagtaatcataacat

SEQ ID NO: 664049 - DNA, 653 bp, Homo sapiens
ctgagctgacgcctgaacttcggggcacctgggctgctgccctgagtgcccgggaaaggcttcgcagcttccaccggacacactttctgcgggagcttcagggctgcgccacccaccccctacgcattggggcctgcttccttcgccacgtgagtgatcccctcaacttcttccaagtgctctcccttctctgttccagcctcatccatctgtccctctttctcagtacccacggccctctcctcccatgtgtggtccatgaccttggggcccagccctgttctgtgggcacttctgcctctactcagcctctgcgccctgctctcaagagctgcctggactatgctctctccacagggagcccttccctccctggtaggctgagtgctccctggtgacccatccctcatttgggctacagagaggatagagagggggaagagagaggcttgtctgcagcggcctcaccggggactccttatctgttctttactggcacagggggaccagttcagcctttatgcacagtacgtgaagcaccgacacaaactggagaatggtctggctgcrctcagtcccttaagcaaggtaactttttctccaaccttcaggagaaaagtagagaggccagaaagacctaaaaacccacccaa

SEQ ID NO: 664050 - DNA, 653 bp, Homo sapiens
ctgagctgacgcctgaacttcggggcacctgggctgctgccctgagtgcccgggaaaggcttcgcagcttccaccggacacactttctgcgggagcttcagggctgcgccacccaccccctacgcattggggcctgcttccttcgccacgtgagtgatcccctcaacttcttccaagtgctctcccttctctgttccagcctcatccatctgtccctctttctcagtacccacggccctctcctcccatgtgtggtccatgaccttggggcccagccctgttctgtgggcacttctgcctctactcagcctctgcgccctgctctcaagagctgcctggactatgctctctccacagggagcccttccctccctggtaggctgagtgctccctggtgacccatccctcatttgggctacagagaggatagagagggggaagagagaggcttgtctgcagcggcctcaccggggactccttatctgttctttactggcacagggggaccagttcagcctttatgcacagtacgtgaagcaccgacacaaactggagaatggtctggctgcgctcagtccctyaagcaaggtaactttttctccaaccttcaggagaaaagtagagaggccagaaagacctaaaaacccacccaa

SEQ ID NO: 664051 - DNA, 615 bp, Homo sapiens
aagcagcacagcaccagcatttgcttggcttctggtgaggacctcctgttgcgtcacaacatggcaaagaagtggaaggggtagcaaacaagctggaaaagggatgaaacaaaagacataacctggctttataacaactctttctcagcccgggtgcagaggctcatgcgtgyaatcccagcactttggaagcccaggagttccagatcagcctggttaacatggtgaaaccccacctctgcccccagaaaaacaaaaattagccaagcatggtggcacatgtctatagtcccagctacttgagaggctgaggtgggaagatcatttgagtctaagaggcagaggttgtagtgcggagggatcgtgccactgcactccagcatggagacagagtgagaccctgtctcaaaacaaacaaacaaacaaacaaacaaaaaaactccttctcatagtaactaatccattactaggaaaactaacccagtcttccaaaaatgcattcattcgtttatgagagtggagctcccatgacccaaatatttcttaaaagatccactacctctctatactgttaaaattgtaattaaatttcaacatgagttttagcaggaataa

SEQ ID NO: 664052 - DNA, 615 bp, Homo sapiens
aagcagcacagcaccagcatttgcttggcttctggtgaggacctcctgttgcgtcacaacatggcaaagaagtggaaggggtagcaaacaagctggaaaagggatgaaacaaaagacataacctggctttataacaactctttctcagcccgggtgcagaggctcatgcgtgtaatcccagcactttggaagcccaggagttccagatcagcctggttaacatggtgaaaccccacctctgcccccagaaaaacaaaaattagccaagcatggtggcacatgtctatagtcccagctacttgagaggctgaggtgggaagatcatttgagtctaagaggcagaggttgtagtgcggagggatcgtgccactgcactccagcatggagacagagtgagaccctgtctcaaaacaaacaaacaaacaaacaaacaaaaaaactcyttctcatagtaactaatccattactaggaaaactaacccagtcttccaaaaatgcattcattcgtttatgagagtggagctcccatgacccaaatatttcttaaaagatccactacctctctatactgttaaaattgtaattaaatttcaacatgagttttagcaggaataa

SEQ ID NO: 664053 - DNA, 549 bp, Homo sapiens
ttagcaggaataaaccacatccaaaccataccaacctctccctctatgtggtctctccagtaacagagcccagtcttcctttacatgctgctcaaggctccaaggcagcttggaatagtccaagcagcagcaaggactatacttaggggtgtacatggtcaccctttactgaagtcaaagtaaccccaaagtctttgggtccgagtaagtcacaaagtcaagccagggtcactgtaacaagggaatcacagaaagggatggatgataggaggcattaatgaytggggccattctgtaataatttgcaacaaactaagtcaacttcatggacgtgtgaacagtgaagtcacatgggacggagcccatgcttgatttaatgtttcaatgtcatcatttgaaatttctaaacactttttgaagaagagaacccacattttcattctgcactaggtccaaccaattgtttagcatgtctgaccacggatatgttattatgcattaccctaggtgcaccccacccctacattatgggtccttctcaacacaggc

SEQ ID NO: 664054 - DNA, 549 bp, Homo sapiens
ttagcaggaataaaccacatccaaaccataccaacctctccctctatgtggtctctccagtaacagagcccagtcttcctttacatgctgctcaaggctccaaggcagcttggaatagtccaagcagcagcaaggactatacttaggggtgtacatggtcaccctttactgaagtcaaagtaaccccaaagtctttgggtccgagtaagtcacaaagtcaagccagggtcactgtaacaagggaatcacagaaagggatggatgataggaggcattaatgattggggccattctgtaataatttgcaacaaactaagtcaacttcatggacgtgtgaacagtgaagtcacaygggacggagcccatgcttgatttaatgtttcaatgtcatcatttgaaatttctaaacactttttgaagaagagaacccacattttcattctgcactaggtccaaccaattgtttagcatgtctgaccacggatatgttattatgcattaccctaggtgcaccccacccctacattatgggtccttctcaacacaggc

SEQ ID NO: 664055 - DNA, 680 bp, Homo sapiens
tttaaggaattaaggaattccacagaatgagatggctaagtcctattagctctaccttcagtcctgttcaggtcaatatttgtgtccatattcatataagggcattaacaacaacattgcattttcagatgacaagaatgtaaaaatatagtgaaaaatatgtgaattaattttgttggaagattacatacagttcaagggtctaattccaatgtttctcacctagaacttgacccagtgatttaacacctctaaccactcacgccttccctaccttcaatacacttccccatctctgtacattttcccatgccaatctttttgcatgcactgtccktcccttcctgaatgccccagcaaacccttgctcaccctcatgaccctgctcaggtggagcctccttgtagaaaccttcctagacccaatgggcaaagtaacttcctccatctctgtgctcccaaaaagcaatgttcatataagtgttattgcttctatcacatatttagtttctctgcttctccataagctacttaaggaccaagactacgtttcatgtatcttaatatatcctgtgactaacacagtttcaggaatagagtgcgcagtacataaatgcctcatttataaagattaaattcccattttacatagtgaaatacaagcctaggaatgtaaatgac

SEQ ID NO: 664056 - DNA, 583 bp, Homo sapiens
ggaaactggagaaagaaaaattgtttcaaaactatagtacacctgttgttaaattctagtgttgcctggtgtttttcagtttttattattttctacagtttggattaaattctaatttttctgactacaagtctgyagataatgttttcaattttttccttttgcttttcctttgtccccatttttcctaactgaaaatcattgaaacctaagctgtgctttcttaaagccctgtgaacggaagactagacaacttacatttcagaagaaaacagcagcaacctatttatatgtattgctgttgcatactattatgtttcatcgggcactgcctctaatccccccaaacagagagcgctactgggaacaaatcgacctcttccaccccagtgctgcgttcagtgccccataacgatgaccctctctcagcaggaagtagccagaaagattacaatgccccatctccctacgattctcatgataaataaatatacaagcatgatagaaatcatgcacaaattgacagtggggattgtagcaggccaggcttcactaatgcaggcctccatcacaactgtttcag

SEQ ID NO: 664057 - DNA, 372 bp, Homo sapiens
ccaagaataatgttgatgagaggtgggtgatgtttggtagggtagattggggcctagttagttgtataggtccttgaatgctaagcaaaaagatttagcaatgagaagctatagtatatcttgagccayagaatattcttgagcaggagtaataaaaaatactgttttgtgaaaattaatctgatggggaggaggtaatagagatggattatgggtgggtgggagtgaagaattagatttagaaaagagatcatttagaaaccagagtagtcatccaactatgagatgataagaacttgaataagggtggaagcaataggaatggaaagaaaggcatagatttgtaagacaaagaaaaaaaatagaaagtgg

SEQ ID NO: 664058 - DNA, 564 bp, Homo sapiens
tcaagagtttttagaccagtgcccggcacatggtgagtcctcagtatgagcctgagtccatcagtcacacagccctgacaatcttaaacttttcccaagcccatctcttccattcttatttcttcctcagtggatgctctcgtctcgcctggacagcacacacactccaactccagtaagactcaactcaaatatatctcttatacaacttcaagagaaaaagtgtgrtcccttctttcgtctaaaagtctgcaatagcttgtttctcatagggtaggggtgcccagtcttttggcttccctgggccacattggaagaagaattgtcttgggccgcacataaaatacactatcactaacgatagctgatgagcttaaaacatgcaaaaaaattcataatgttttaagaaagtttacgaatttgtgttgggctgcattcaaagccatcctgggccacatgtgacccgcgggccatgggttggacaagcttgtcgtagggtatagtccaaactacatctcacaggacataagacttcccatgatcttgcacctgcccatgtgtaca

SEQ ID NO: 664059 - DNA, 564 bp, Homo sapiens
tcaagagtttttagaccagtgcccggcacatggtgagtcctcagtatgagcctgagtccatcagtcacacagccctgacaatcttaaacttttcccaagcccatctcttccattcttatttcttcctcagtggatgctctcgtctcgcctggacagcacacacactccaactccagtaagactcaactcaaatatatctcttatacaacttcaagagaaaaagtgtgatcccttctttcgtctaaaagtctgcaatagcttgtttctcatagggtaggggtgcccagtcttttggcttccctgggccacattggaagaagaattgtcttgggccgcacataaaatacactatcactaacgayagctgatgagcttaaaacatgcaaaaaaattcataatgttttaagaaagtttacgaatttgtgttgggctgcattcaaagccatcctgggccacatgtgacccgcgggccatgggttggacaagcttgtcgtagggtatagtccaaactacatctcacaggacataagacttcccatgatcttgcacctgcccatgtgtaca

SEQ ID NO: 664060 - DNA, 562 bp, Homo sapiens
tgcagccttccatccagcctccactccaaaggctagactggcctgtgctgatacacatttgatacacagcctggtttaaaccgtggattttatctccyaacattcatgtttctacggcagcaggggcataattctctatccagaacttctatccagaagttcagcctgcaaagtttgggataccttaacaaagaagtgaacagctgctcccccaaccaaggcctcgctgaggacaaaccagaagagccagaggcctgtgtgaacttgttcttgattctcttttgccatctagtggcatttctcatctccagcaccacttttgcttctaaagatccttcatcctgacccccaacccacagctgtgctgtccagctactaaaataatgtcctcctggcctcaaaacaaactccccatcctcctgacttagaatcataaattctggaccagaacacaaactttatgatcaggatgggttgtgcgacttctccacagttataatccacacaacagccaggtaatcctttaagctgacacgttctttattcatctacttagaaccct

SEQ ID NO: 664061 - DNA, 575 bp, Homo sapiens
tgtggccgccacctgccagacccccaaaatagcctgcaagaatggcgataaaaactgccaccagagccacgggsccgtgtccctgaccatgtgtaagctcacctcagggaagcatccgaactgcaggtacaaagagaagcgacagaacaagtcttacgtagtggcctgtaagcctccccagaaaaaggactctcagcaattccacctggttcctgtacacttggacagagtcctttaggtttccagactggcttgctctttggctgaccttcaattccctctccaggactccgcaccactcccctacacccagagcattctcttcccctcatctcttggggctgttcctggttcagcctctgctgggaggctgaagctgacactctggtgagctgagctctagagggatggcttttcatctttttgttgctgttttcccagatgcttatccccaagaaacagcaagctcaggtctgtgggttccctggtctatgccattgcacatgtctcccctgccccctggcattagggcagcatgacaaggagaggaaataaatggaaagggggcatatggg

SEQ ID NO: 664062 - DNA, 567 bp, Homo sapiens
ggaaaggatgattaaaggaaaggagagcagatcattaaacagttctaacagaatgagggccaataagtggatgagttggtcacaacagccaaacgactgagtgtaaaaacaamtgttacctgaaaacagaacattgccatcatcgaatggacttctgggattcttgaataaatctgaagtttatccaaaatctgaatttgttttgaactcttgtggtcagtatactacatttaccatcctaaagagatgattttcacttgtggtgcacagaaaagcaagatacttggggcagccgatttttctcttcattttattcttttttcacaactctatcttctttattgatgatctttcttatggataatatggttttagagacattctcctcacaaaatttaaagtggctaaaattatgccttcaatgcatcctcccaaaataagaagaatttccaactaaaactttttcttgaaacttgacctaatatagcattaaaagttgacctaaatagcattaaataactagaaagttctgaagtaacctgtggtgatacaggtcagaatagttgt

SEQ ID NO: 664063 - DNA, 587 bp, Homo sapiens
gcagactgtttgtgcaataacagaccaaattacaaacaggaccgaaggtcttgcaaaacaaggatgaggtcactcctgcaggccatcaatcttgctaactaggtcatttttgacctggtatacggtggctgactctgacacagcatcctcatcttaccttaaacattcctttctgctaactctgtttttagacaaagttttgttccttcarccaactgcaaattaaagaatctccgaatgctcctgtgccttataacatccccaccctgacaccgcttgaaaatatcctgcctttccaggctgtgccaacctataccttccatgtgttgatttatgtcttcgccggtaactcctgcctccctgaaatgtgttaaaccaaactgtaatccgactaccttgggacagttactcaaagcttcctgggtttgtgtttgctcctggctgtggtcactcatattggctcagaataaatccctgcaaaacattctacagagtttagtttttacattaacatttataacacgcccctttcagccatagctgaatttctgttaacaagaggactggtggctgaagcccctaggtag

SEQ ID NO: 664064 - DNA, 587 bp, Homo sapiens
gcagactgtttgtgcaataacagaccaaattacaaacaggaccgaaggtcttgcaaaacaaggatgaggtcactcctgcaggccatcaatcttgctaactaggtcatttttgacctggtatacggtggctgactctgacacagcatcctcatcttaccttaaacattcctttctgctaactctgtttttagacaaagttttgttccttcagccaactgcaaattaaagaatctccgaatgctcctgtgccttataacatccccaccctgacaccgcttgaaaatatcctgcctttccaggctgygccaacctataccttccatgtgttgatttatgtcttcgccggtaactcctgcctccctgaaatgtgttaaaccaaactgtaatccgactaccttgggacagttactcaaagcttcctgggtttgtgtttgctcctggctgtggtcactcatattggctcagaataaatccctgcaaaacattctacagagtttagtttttacattaacatttataacacgcccctttcagccatagctgaatttctgttaacaagaggactggtggctgaagcccctaggtag

SEQ ID NO: 664065 - DNA, 587 bp, Homo sapiens
gcagactgtttgtgcaataacagaccaaattacaaacaggaccgaaggtcttgcaaaacaaggatgaggtcactcctgcaggccatcaatcttgctaactaggtcatttttgacctggtatacggtggctgactctgacacagcatcctcatcttaccttaaacattcctttctgctaactctgtttttagacaaagttttgttccttcagccaactgcaaattaaagaatctccgaatgctcctgtgccttataacatccccaccctgacaccgcttgaaaatatcctgcctttccaggctgtsccaacctataccttccatgtgttgatttatgtcttcgccggtaactcctgcctccctgaaatgtgttaaaccaaactgtaatccgactaccttgggacagttactcaaagcttcctgggtttgtgtttgctcctggctgtggtcactcatattggctcagaataaatccctgcaaaacattctacagagtttagtttttacattaacatttataacacgcccctttcagccatagctgaatttctgttaacaagaggactggtggctgaagcccctaggtag

SEQ ID NO: 664066 - DNA, 587 bp, Homo sapiens
gcagactgtttgtgcaataacagaccaaattacaaacaggaccgaaggtcttgcaaaacaaggatgaggtcactcctgcaggccatcaatcttgctaactaggtcatttttgacctggtatacggtggctgactctgacacagcatcctcatcttaccttaaacattcctttctgctaactctgtttttagacaaagttttgttccttcagccaactgcaaattaaagaatctccgaatgctcctgtgccttataacatccccaccctgacaccgcttgaaaatatcctgcctttccaggctgtgccaacctataccttccatgtgttgatttatgtcttcgccggtaactcctgcctccctgaaatgtrttaaaccaaactgtaatccgactaccttgggacagttactcaaagcttcctgggtttgtgtttgctcctggctgtggtcactcatattggctcagaataaatccctgcaaaacattctacagagtttagtttttacattaacatttataacacgcccctttcagccatagctgaatttctgttaacaagaggactggtggctgaagcccctaggtag

SEQ ID NO: 664067 - DNA, 554 bp, Homo sapiens
ctcatttttcccagcccctattcaagatggagtcactctggttcgaatgcctctgacaggagcagcaccctgatctgtctccatcctcacactgcattctccctgtgtctgtctccaaatttcccctttttaggacaccagtcrtattggattagagccacccaatgacctcattctaacttgattacctctgtgaacactctagctccaagtagggccacattgggagttacgattttaagatgaatttggggggacacaattccctagccacaccagcgctttttcaatgaacccacaaacaatgtatttatggtgaccaagatggaggctacgcatgggcccagcaacacgggctcatctctccaggctggtctgactaatctcactgctggcagccccctctcacaaccccagagagcagcactgagtgcctgatggcaccttcccccacagagagcagccagcatctggtagcaggtgggtcctggtctcttccatcatggaggggacacagactcaccttcctggaagggacacactttgcctccctt

SEQ ID NO: 664068 - DNA, 554 bp, Homo sapiens
ctcatttttcccagcccctattcaagatggagtcactctggttcgaatgcctctgacaggagcagcaccctgatctgtctccatcctcacactgcattctccctgtgtctgtctccaaatttcccctttttaggacaccagtcgtattggattagagccacccaatgacctcattctaacttgattacctctgtgaacactctagctccaartagggccacattgggagttacgattttaagatgaatttggggggacacaattccctagccacaccagcgctttttcaatgaacccacaaacaatgtatttatggtgaccaagatggaggctacgcatgggcccagcaacacgggctcatctctccaggctggtctgactaatctcactgctggcagccccctctcacaaccccagagagcagcactgagtgcctgatggcaccttcccccacagagagcagccagcatctggtagcaggtgggtcctggtctcttccatcatggaggggacacagactcaccttcctggaagggacacactttgcctccctt

SEQ ID NO: 664069 - DNA, 554 bp, Homo sapiens
ctcatttttcccagcccctattcaagatggagtcactctggttcgaatgcctctgacaggagcagcaccctgatctgtctccatcctcacactgcattctccctgtgtctgtctccaaatttcccctttttaggacaccagtcgtattggattagagccacccaatgacctcattctaacttgattacctctgtgaacactctagctccaagtagggccacattgggagttacgattttaagatgaatttggggkgacacaattccctagccacaccagcgctttttcaatgaacccacaaacaatgtatttatggtgaccaagatggaggctacgcatgggcccagcaacacgggctcatctctccaggctggtctgactaatctcactgctggcagccccctctcacaaccccagagagcagcactgagtgcctgatggcaccttcccccacagagagcagccagcatctggtagcaggtgggtcctggtctcttccatcatggaggggacacagactcaccttcctggaagggacacactttgcctccctt

SEQ ID NO: 664070 - DNA, 526 bp, Homo sapiens
aaaagactgagtggcaatacccaggaaagatggactctattttacaggattccatatacgctttgaatcaggggccaccacatggttctacttcccttatagccaaaatgcatggctccagaaaccaagctgtcacaggtagtgactaactaggaccagtggcrcatgcaataaaggaatttaccaagagagttgtaggtaaagacaggcaggcttattagagaacacaggaaaatacattgcaagaaagcaatgggcagatcagcaaaaggggagctgactacaaggagacaaagacttgtgggggattttataggatggtgcttgtgctggagagggccacgcgcagtgctgataatgcccaggttgcagcgagctaactgacacttgtctatcggctgaggatctggcgataagatgggcacaggaagattgtgagttatttgcttaggagggctctgtgtgtcctgggccatgtagaaaggcaggcttatagcttatctgttttttgtttgtttgttttgct

SEQ ID NO: 664071 - DNA, 526 bp, Homo sapiens
aaaagactgagtggcaatacccaggaaagatggactctattttacaggattccatatacgctttgaatcaggggccaccacatggttctacttcccttatagccaaaatgcatggctccagaaaccaagctgtcacaggtagtgactaactaggaccagtggcgcatgcaataaaggaatttaccaagagagttgtaggtaaagacaggcaggcttattagagaacacaggaaaatacattgcaagaaagcaatgggcagatcagcaaaaggggagctgactacaaggagacaaagacttgtgggggattttataggatgrtgcttgtgctggagagggccacgcgcagtgctgataatgcccaggttgcagcgagctaactgacacttgtctatcggctgaggatctggcgataagatgggcacaggaagattgtgagttatttgcttaggagggctctgtgtgtcctgggccatgtagaaaggcaggcttatagcttatctgttttttgtttgtttgttttgct

SEQ ID NO: 664072 - DNA, 385 bp, Homo sapiens
ctttccaacgcctcctgagtcaagaacgactagcttatattcacacatgatgcaaacttgtcaaaacctattacctctcacgctgtcactgggtccccgcagccagcgtcaccccgtgccgctccccgcgggtcgctactctggtcgtcacsgcggtcctgcagctgccgccgccgctcgggctggtttacacgcctgactctgggagaggtttggcaatgtcctgaacactttcactgtagtagatgctgatggaattcatgacgtgctatcccaaaatacaacaccttggcatttgagaagatagcagaaggaggaggctcattctcacctttccccttttttctccagaagcaggtcataaagccgaaaaggacatttctgc

SEQ ID NO: 664073 - DNA, 566 bp, Homo sapiens
agtatggactgttgatttaatcagacaccccaaagtgaaagctgtgtttgaactacagggaatggagatggggcagagtaaagaaaggttctcggacttcttgggttttacaagatgtgaacacagaattacttggctgctattgtcactgttctacaagacaggaaaataatgtccccaaaggtgattcagagatttcaacagagaaaatctacatttgtgtggaactgcgttcaacacaaatcatgtggatgggtctgcccaaagccatgagggaaaaaatcctacctggcattgccacagcttgggtgcaaccactgcagagccatgggggtgacactgccaccccagtgttcatgraaagtaaagcattgagccgatgaggattattctcaaagttttagatcccatgcagtttactttgtgaggttttgttcttggtgtcaagtgagacccaccactcattctttctttcctttcagaatgaaaatatttctactaccctttgttaccattttattttggaagcacataacttgtcacataattctgtgcttccaaaatat

SEQ ID NO: 664074 - DNA, 473 bp, Homo sapiens
aacttggactataatttttattggtcaataatctcttttattgtcattgttgaggtttgttattaaactgatgagaacctggtaaaatgagttagtgaacatgtttgctttatttacttggaagagctgatacaagattacaattatttattccttatatgtttgatagaacctacgttgaaactatctggaaatytctgtgaaaaaaattttaaattattgattctaatgcttactttgcagttctatttttatttattttcagcaattttatattgataatattttgtccactttaacacttttcaaaatatttgtaaagttgtttataatcttatattttttataacttcagtatattaagagtgatgtcccctttaatccctgatgtgtttttttgtgtgtgtgcaatttctactctgtgttcttaattagtgtcatcaaaaattaccagttatcaatcttttggaaga

SEQ ID NO: 664075 - DNA, 473 bp, Homo sapiens
aacttggactataatttttattggtcaataatctcttttattgtcattgttgaggtttgttattaaactgatgagaacctggtaaaatgagttagtgaacatgtttgctttatttacttggaagagctgatacaagattacaattatttattccttatatgtttgatagaacctacgttgaaactatctggaaatttctgtgaaaaaaattttaaattattgattctaatgcttactttgcagttctatttttatttattttcagcaattttatattgataatattttgtccactttaacacttttcaaaatatttgtaaagttgtttataatcttatattttttataacttcagtatattaagagtgatgtcccctttaatycctgatgtgtttttttgtgtgtgtgcaatttctactctgtgttcttaattagtgtcatcaaaaattaccagttatcaatcttttggaaga

SEQ ID NO: 664076 - DNA, 577 bp, Homo sapiens
aaactatctggaaatttctgtgaaaaaaattttaaattattgattctaatgcttactttgcagttctatttttatttattttcagcaattttatattgataatattttgtccactttaacacttttcaaaatatttgtaaagttgtttataatcttatattttttataacttcagtatattaagagtgatgtcccctttaatccctgatgtgtttttttgtgtgtgtgcaatttctactctgtgttcttaattagtgtcatcaaaaattaccagttatcaatcttttggaagaaccaacattttggggggaatttctatttttttatttttacagttcatcttgttagcttctgttctagtggttataatttctgattatttttaaatttcttgaggtttatttggtattaaacttctatttgcttaaaataaatatttagtccactaagttgctggacttctgctcttgtaatatacatcttgaatgyttaaatttttctctgtcctgttttaagtgtatgacatattctttgtgaaaaggtaatttacttgtatttcagttcaaaaattttggta

SEQ ID NO: 664077 - DNA, 554 bp, Homo sapiens
gagagattctgatcattagtcttactggcagagatgactagagcttggggcaggcggaagatcttagtgatgtggaagtgaatccttaatgtagtaaaaaaccctaagtatggctcacctttaagagagtgaattaggtaaagattaaattttcaaattgagataataaggtgaaatatttgtatttgaaattataaagctcaatagagtaaggacattcaaaataaaaatcacaaggcaatatggctctgtatcccacatattgtartattaaaggagaaatacttaggcagcttacacagaatgcttctttagtaggggatacagagcattgatgtgagagcaagagacctgtgtttaagtgttaacactaccatgcactaactatgagacaacagcaattccatgaactggtagagttttgagctggaagattggtttttgttactctctatggttaatttcttttaatacttggtatgatttaaagttacaggctgtgactttacaactgcaaagccactggtaaaatattaaaacattcacaagctatg

SEQ ID NO: 664078 - DNA, 554 bp, Homo sapiens
gagagattctgatcattagtcttactggcagagatgactagagcttggggcaggcggaagatcttagtgatgtggaagtgaatccttaatgtagtaaaaaaccctaagtatggctcacctttaagagagtgaattaggtaaagattaaattttcaaattgagataataaggtgaaatatttgtatttgaaattataaagctcaatagagtaaggacattcaaaataaaaatcacaaggcaatatggctctgtatcccacatattgtaatattaaaggagaaatacttaggcagcttacacagaatgcttctttagtaggggatacagagcattgatgtgagagcaagagacctgtgtttaagtgttaacactaccatgcaytaactatgagacaacagcaattccatgaactggtagagttttgagctggaagattggtttttgttactctctatggttaatttcttttaatacttggtatgatttaaagttacaggctgtgactttacaactgcaaagccactggtaaaatattaaaacattcacaagctatg

SEQ ID NO: 664079 - DNA, 557 bp, Homo sapiens
ggcagcttacacagaatgcttctttagtaggggatacagagcattgatgtgagagcaagagacctgtgtttaagtgttaacactaccatgcactaactatgagacaacagcaattccatgaactggtagagttttgagctggaagattggtttttgttactctctatggttaatttcttttaatacttggtatgatttaaagttacaggctgtgactttacaactgcaaagccactggtaaaatattaaaacattcacaagctatgaaataaaatcccataattttaaattaaagycatttgtttaagcttactcattaataaaatatacatgcaaacataaccctagatgtttccaaatgcaaaaaacaccagaaaaaaaatctatatatattacagaaatgtttttatcagtcttgtataaaaacttagagagaaggagcgagagaataaatatataattcagaaacatccagataagataaattgttgcataaatcattgtattaagtaaattagactgattttaagagccatgtgataaactacatagcaata

SEQ ID NO: 664080 - DNA, 563 bp, Homo sapiens
cctctttactgtattatctgaacattccttgcacaaaccagatggaaacatcaagtcacagacaagacaacttgttaaggtcacattctgcaccatatatatcattcatgcttaatttatttgcagccccacctagacagattgccatacattatgaaagctgagaacatgaaaagatcatttttgctccccattaattcccacttggaatagctcctgactttacaaaactttgtggcagcacattcactgatgactgatcactccttctcattgcagaaatagggcataagcagcaagatttatctttcagtaaattcctaatgaaataacaaagtgtattgggttatctccaactgccgtaccatactactctctaaamatagcaagtcaaaaatgactgactttgccaatatcctgagattctacagacatctcagtgaaggcagaggatggtggggagagtggcatttggctcagcttcagaactggcactgtctccatgataaagggatcctgttaacttctgttttccacctcctgacagttgacattttaatgtg

SEQ ID NO: 664081 - DNA, 563 bp, Homo sapiens
cctctttactgtattatctgaacattccttgcacaaaccagatggaaacatcaagtcacagacaagacaacttgttaaggtcacattctgcaccatatatatcattcatgcttaatttatttgcagccccacctagacagattgccatacattatgaaagctgagaacatgaaaagatcatttttgctccccattaattcccacttggaatagctcctgactttacaaaactttgtggcagcacattcactgatgactgatcactccttctcattgcagaaatagggcataagcagcaagatttatctttcagtaaattcctaatgaaataacaaagtgtattgggttatctccaactgccgtaccatactactctctaaaaatagcaagtcaaaaatgactgactttgccaatatcctgagattctacagacatctcagtgaaggcagaggatggtggggagagtggcatttggctcagcttcagaactggcactgtctccrtgataaagggatcctgttaacttctgttttccacctcctgacagttgacattttaatgtg

SEQ ID NO: 664082 - DNA, 565 bp, Homo sapiens
aatatgattactcttctgcttycctgtgagcctgtgtaggcagagaataagaggagagtctttgcactctgagaagcattgctacccgcagctgctatatctctatcagcggggggaccactgaactgtggcttcctgacagcacaaatttcatactgcacttcagagtcatcatcactcactgcctgaggatcatcaagacaattatttctttcttttatccatggttacatcagtcaccataaaaaaccaggggcattctaaaaatgatgtcaaccactggactctataacttttaacattccatcttccacctatgcctaattctgaattaattcctgtgtgctctctggaagtcattttcagccatccgcaaaatcctttacatactagaaaattcatgtgaaagtttgctttatctactttctcaatggaaaattggttctcctctgaggtacatcttcccctctaaaaaggtaacttttttctttactcttgctaatcagcctgaaggagaaatagcagcttttcttacttcttgtgaccattcacttcctctcccata

SEQ ID NO: 664083 - DNA, 565 bp, Homo sapiens
aatatgattactcttctgcttccctgtgagcctgtgtaggcagagaataagaggagagtctttgcactctgagaagcattgctacccgcagctgctatatctctatcagcggggggaccactgaactgtggcttcctgacagcacaaatttcatactgcrcttcagagtcatcatcactcactgcctgaggatcatcaagacaattatttctttcttttatccatggttacatcagtcaccataaaaaaccaggggcattctaaaaatgatgtcaaccactggactctataacttttaacattccatcttccacctatgcctaattctgaattaattcctgtgtgctctctggaagtcattttcagccatccgcaaaatcctttacatactagaaaattcatgtgaaagtttgctttatctactttctcaatggaaaattggttctcctctgaggtacatcttcccctctaaaaaggtaacttttttctttactcttgctaatcagcctgaaggagaaatagcagcttttcttacttcttgtgaccattcacttcctctcccata

SEQ ID NO: 664084 - DNA, 333 bp, Homo sapiens
attccatcttccacctatgcctaattctgaattaattcctgtgtgctctctggaagtcattttcagccatccgcaaaatcctttacatactagaaaattcatgtgaaagtttgctttatctactttctcaatggaaaattggttctcctctgaggtacatcttcccctctaaaaaggtaacttttttctttactcttgctaatcagcctgaaggagaaatagcagcttttcttacttcttgtgaccattcacttcctctsccataaaaagatagagtattttattttagtggcattagactgtaatatacgccacccttatttatagcagtca

SEQ ID NO: 664085 - DNA, 503 bp, Homo sapiens
cctctcccataaaaagatagagtattttattttagtggcattagactgtaatatacgccacccttatttatagcagtcattcaccagggcattcttctccrtctgtcttgtatattttatcttctagcttactgttccatttatacacactggttcttccagactacttggtgatttcaacatgcacatggatgaagcttctagcaaattggcctctaagtttagtgatcttatctctcatctcatcaaaactactcaatcttatggtgataccctggtagactctatctcttcataacttcagctttccttaaattaaatttcaaaagccccactctccaatcaacaatttctagcttattccatcgacttccttcagtccaacaatctttgcaacaaccagcctttctataacatcaattcatttgtcctgctggtattttactgtccctggttctcatcatctgctgcttccctcgttactcaacataaattcaactgtc

SEQ ID NO: 664086 - DNA, 503 bp, Homo sapiens
cctctcccataaaaagatagagtattttattttagtggcattagactgtaatatacgccacccttatttatagcagtcattcaccagggcattcttctccatctgtcttgtatattttatcttctagcttactgttccatttatacacactggttcttccagactacttggtgatttcaacatgcacatggatgaagcttctagcaaattggcctctaagtttagtgatcttatctctcatctcatcaaaactactcaatcttatggtgataccctggtagactctatctcttcataacttcagctttccttaaaytaaatttcaaaagccccactctccaatcaacaatttctagcttattccatcgacttccttcagtccaacaatctttgcaacaaccagcctttctataacatcaattcatttgtcctgctggtattttactgtccctggttctcatcatctgctgcttccctcgttactcaacataaattcaactgtc

SEQ ID NO: 664087 - DNA, 585 bp, Homo sapiens
ctagtgaaacccaattgttctcctatatcatccttgtgttagtagcaagcaagcaagactgaaaaacaacacaattatgctcgatgtgctcactctaagtccataatcacttattgcatatgagtcccattggtrcctcctggcactatatttctgtgatctcttcaatttgtaagtctccttaataatgttttataatttttcctcatatgtaaacctctttaaattattttaatagctttcccacattctcactcttagttggctattttgttttctgtttcactgagaagataagaacagatggaaagcaatctaaataagcttccaactcacatttatccatttagatgtattcatttccaaatgctgctccttctctctggtttctagaaaagacatgtctgtgtttctagtaaaatttaaccctactacttgtgcactcgattctttcccctcttatacacaggcattttattttcacttgcgtcattaatttgattcctttaaactaaattttcccatcaacataacattgcttatgtttctctcatctttaaaaatcccttaaatttatcttcttct

SEQ ID NO: 664088 - DNA, 579 bp, Homo sapiens
ctttgagtggctttagtctagtgtcaacattgtagctagatttgtcctattaagactaggtcagatcccattgcctctctcctgaacaccttccaattgctctccatcttatccaaagagaaaactgaagcccttataataatgacacataaagtctcccagggcttgacctctgttcctctctgactcatgcacttccaagtgcactcttctttgaacacaccaggtatgttacagcctcaaggccatygcacttgccatcctctttgcctgaaatactcttcccctaaatagttacatcacttatatcttcgtggtctccaagtctttatgccaaaagcactttctactaaatatttccactatcccgtatgtaaaagtagactcctgatagtcatagcacagttcctgatgtgtctgcatagtacgcatgctcccatcctgatctaatacaagttttattacttttttatttttagtttcttttttcacgtctcatacattaacatctaaatttcataagagaaggcattttagtctcttttgtttgcctctgtatctttctctctgacccccagt

SEQ ID NO: 664089 - DNA, 579 bp, Homo sapiens
ctttgagtggctttagtctagtgtcaacattgtagctagatttgtcctattaagactaggtcagatcccattgcctctctcctgaacaccttccaattgctctccatcttatccaaagagaaaactgaagcccttataataatgacacataaagtctcccagggcttgacctctgttcctctctgactcatgcacttccaagtgcactcttctttgaacacaccaggtatgttacagcctcaaggccattgcacttgccatcctctttgcctgaaatactcttcccctaaatagttacatcacttatatcttcgtggtctccaagtctttatgccaaaagcacttkctactaaatatttccactatcccgtatgtaaaagtagactcctgatagtcatagcacagttcctgatgtgtctgcatagtacgcatgctcccatcctgatctaatacaagttttattacttttttatttttagtttcttttttcacgtctcatacattaacatctaaatttcataagagaaggcattttagtctcttttgtttgcctctgtatctttctctctgacccccagt

SEQ ID NO: 664090 - DNA, 579 bp, Homo sapiens
ctttgagtggctttagtctagtgtcaacattgtagctagatttgtcctattaagactaggtcagatcccattgcctctctcctgaacaccttccaattgctctccatcttatccaaagagaaaactgaagcccttataataatgacacataaagtctcccagggcttgacctctgttcctctctgactcatgcacttccaagtgcactcttctttgaacacaccaggtatgttacagcctcaaggccattgcacttgccatcctctttgcctgaaatactcttcccctaaatagttacatcacttatatcttcgtggtctccaagtctttatgccaaaagcactttctactaaatatttccactatcccgtatgtaaaagtagactcctgatagtcatagcacagttcctgatgtgtctgcmtagtacgcatgctcccatcctgatctaatacaagttttattacttttttatttttagtttcttttttcacgtctcatacattaacatctaaatttcataagagaaggcattttagtctcttttgtttgcctctgtatctttctctctgacccccagt

SEQ ID NO: 664091 - DNA, 579 bp, Homo sapiens
ctttgagtggctttagtctagtgtcaacattgtagctagatttgtcctattaagactaggtcagatcccattgcctctctcctgaacaccttccaattgctctccatcttatccaaagagaaaactgaagcccttataataatgacacataaagtctcccagggcttgacctctgttcctctctgactcatgcacttccaagtgcactcttctttgaacacaccaggtatgttacagcctcaaggccattgcacttgccatcctctttgcctgaaatactcttcccctaaatagttacatcacttatatcttcgtggtctccaagtctttatgccaaaagcactttctactaaatatttccactatcccgtatgtaaaagtagactcctgatagtcatagcacagttcctgatgtgtctgcatagtacgcatgctcccatcctgatctaatacaagttttattacttttttatttttagtttcttttttcacgtctcatacattaacatctaaatttcataagagaaggcattttagtctcttttrtttgcctctgtatctttctctctgacccccagt

SEQ ID NO: 664092 - DNA, 630 bp, Homo sapiens
gggaacaagcagtgagcatgttcttattttatagacatgggaagatgggcttgttagtggtgtacatattatacaatctcaataaagtaatcttttaagtaattctaaagaccttagttgagaacacgtgatgttttcacttgttcttctgataggaacatctccccagagacgggctggcactctacctttggtggtgtcattcctattaaagtccagttaattttccaattgcctggattcattggaaaatcaccccctttctttcttagcaacatatgtttaggtcattatttaagaaaacagccttttgtaaaaatttgtttcagaattatattccataactaaagaatatttattttaaaaaggattgttttacagcctttctttatctgaatggtttattctttaacttaacaaaagtrttaaagcaaataaaacattcctcaggattcatcttatgaggttacttccaattattattcttttactttttgagaatgtcctgagcctttgtatagaatttgtgctcttactgcatttacagatatcagtaatatcattatgcatacatggttgtattttttatagcctatagccctctctctctcaatggactatgaatttgtt

SEQ ID NO: 664093 - DNA, 607 bp, Homo sapiens
attaggctcaaacatttctatgtcagctgtcatttcttcatggcaagatgtcctcctctcctccccagcttgctcaaaggagctgtcaggtcagaaaaggggaaaaasgaaacaaatgctttttctctttcaatttcccagtgggggagccctgttgaaatgccaggcatgccctgctgctttctgcatcaacagatggcagacgggctgcattccttgtgtttgtttcccatttagcaaattgcagctcacatctggtctagcctctgcttggtctgagcagatgggagttcacattctttataggtggatgacttataaaaagaaggaaaaaaaaagagtgaaagagagagggaactagaaatacagaggaaaagagaaagacagagaagcattaaaaagatgacaaggaaatctgagcagctggtatgagttcagtatcagcaaaccatttagcagacctggccaacagtgaatggaacagaatcacacttagagacagccaagcaatccaggatgggaaagaataagcttccagatgagggaaagaagatggcgacacaattcatttcactctccagagattctataatttacattttttttc

SEQ ID NO: 664094 - DNA, 596 bp, Homo sapiens
tttctgcatcaacagatggcagacgggctgcattccttgtgtttgtttcccatttagcaaattgcagctcacatctggtctagcctctgcttggtctgagcagatgggagttcacattctttataggtggatgacttataaaaagaaggaaaaaaaaagagtgaaagagagagggaactagaaatacagaggaaaagagaaagacagagaagcattaaaaagatgacaaggaaatctgagcagctggtatgagttcagtatcagcaaaccatttagcagacctggccaacagtgaatggaacagaatcacacttagagacagccaagcaatccaggatgggaaagaataagcttccagatgagggaaagaagatggcgacacaattcatttcactctccagagattctataatttacattttttttcccaattgcttgagcccgggagttcaaggctgcagtgagctacgatcatgccactgcatgccagcccaggcaacagagcaaacctcatctcaaaaacaaaacagaacaaaacaraaaattgtatttttttctaccctggattttcaccaactttaggaaggtcatttatg

SEQ ID NO: 664095 - DNA, 471 bp, Homo sapiens
tgcatgccagcccaggcaacagagcaaacctcatctcaaaaacaaaacagaacaaaacagaaaattgtatttttttctaccctggattttcaccaactttaggaaggtcatttatgcttcatagttttaaaatatacttctaccctgttgttctaagtcactccagctcctgtgggaatcttaagcaacattccactacatggcaatctgtgtaaaatcattgatcagagagatcatggttatgggcttctgrgctgtaagaatgccccgagctaaattcactatgcaaagaaataattctcaaattaggatgctcatggtaatcaccagttgtggtttttaaatatgcagataccagagcccctgcaacatagtttctgattcagtgtctaaaacaatgtttctaaaacttactttgaataaaaatcaattggattatttattaaatgcataggctcaggaccttaccta

SEQ ID NO: 664096 - DNA, 512 bp, Homo sapiens
tttttttgttgttgtttttcctttttttttattttttttatttccrtataaacattatctctttgtggatatctacaaagtagcttgctgggattctgacaggaattgcactgaatctttagatcaagctggaagaattaacatcttcacaatattaacttttccaatttatgaatacagaatatctctccatttatttggatcttcttttgatttctttcatcagagttttgtacttttctgcatgcaaattctgtaaatagctctttagatttatacctaggtatattatcttttatcgttcctaatgtatttctttttaaaatttcaaattccaatttcttatatataggaaagtaatttgcttttgtatattaaatttgcattctgccacattgttatacttagttattatttccaaagatttttatgttgagtttttggaattttttcatagactgccatacactcagtgataaaataacattttatttcttccttttcaatctgta

SEQ ID NO: 664097 - DNA, 512 bp, Homo sapiens
tttttttgttgttgtttttcctttttttttattttttttatttccgtataaacattatctctttgtggatatctacaaagtagcttgctgggattctgacaggaattgcactgaatctttagatcaagctggaagaattaacatcttcacaatattaacttttccaatttatgaatacagaatatctctccatttatttggatcttcttttgatttctttcatcagagttttgtacttttctgcatgcaaattctgtaaatagctctttagatttatacctaggtatattatcttttatcgttcctaatgtatttctttttaaaatttcaaattccaatttcttatawataggaaagtaatttgcttttgtatattaaatttgcattctgccacattgttatacttagttattatttccaaagatttttatgttgagtttttggaattttttcatagactgccatacactcagtgataaaataacattttatttcttccttttcaatctgta

SEQ ID NO: 664098 - DNA, 492 bp, Homo sapiens
ctagaatatgtgatgtaatgaattaatgaatttttttatacttcatcagccaacatcaagataaactgtattgaactagcatgtgtccagctgaagagtgtttaaactgttagtgcaaagctgaaacttcaataaacgctaggaaaggatccaggttttattacyggtgatacagtttgagtggataaattctaaccattttagctaaaccctccagcttcatattaatcatgaagtagaataaagtggggaaaaaaaacaaccatggggaatgtgaaaataagagtttaaaactgaagtattacaaaggtcagcttctttatgagaagacaaacatagctgcattttaattaaattatgagattgaaaaaataatttatgtaccatctggtccttctcacaacttatgaaaggaagaagggaaaactgaaaaaaactggattttctctctgatgttgtcattacttttctgtaggagcttggcaaatcaca

SEQ ID NO: 664099 - DNA, 597 bp, Homo sapiens
gctatattcagtagatgtaaatttttttattatgtcatgtgctaataactgaaaaatctgcaatattttcatataagaatatatctaatttaaaatatatttttgcgcttcttagatgtaaaaaattaccataaagttgtgtctttaaatagaaacaaattacctataatctggttcattctgaacattgcatattctcgattcttcgtgtatattgaaacatctagttttaaagcagacactcatgtatatcgtccactttgagaagtatgcaaaactacaactatttcctctgccaagctattgttaaagtcccactttacaactttagagctatgacttgggcagcattaaagttattactaacttaaaatttcttattattctccagaaacattagggatgttaccactatgagttactattaaatattatttaataacaaattttagattaattactttatgcaatttaacacattttaattgagcacttactgttataatatgrcacatattaggtgcttgggattattttcaagtatgttaaattgagcaaaaattcctctggaaatgagacacagattcaaatagattt

SEQ ID NO: 664100 - DNA, 546 bp, Homo sapiens
ctgtggttggtcagaggccagattctaaaacgtatctgactgctgaggtgaagactcacagaatgacctaaggagattttcactgcaattatgaagaaaagtggggaaaaaaatcaatgatgcagttaagagtgttacaatagattaaacataggaggatgtaaacacgcttagaattgagtcttcatctcccgctgggtttgagatagagaaaagacattttatcaaagaaatcatggctaagcccattcaaaaataaaattaatactaagcagttaagcyaggcacagtggcttgcacctgtaatcccagcactttgggaggccaaggcaggtggattacctgaggtcaggagttcaagaccagcctgaccaacatggagaaactccatttctactaaaaatacaagattagccgggtgtggtggcacatgcctgtaattccagctactcatgaggctgaggcaggagaatcgcttgaacccaggaggtggaggttgcggtgagccaagattgtgccattgcactccagcctgggcaacaagag

SEQ ID NO: 664101 - DNA, 550 bp, Homo sapiens
tttctccaaggtatatgcttctgatacgtaaaatgtttgtaattttgttaattctgccattcattagctcaataatttctttcattaacrccctgtaaactatgaatttcaaagaagtctattctgcattcatttggttcataaagtttcctctttgtgaatgttagattaataaaacaactttacaacattcgtttaacatggttcctcacttgtatgaactttttaaaaaaggtatgacttgtggctgaaaattttcagaggagttactaaattcatagttttcctgtgtatgttctactatcttttcgcatgtaaagaacagctttctgtggatgcctttccatatgctgtgtattcataaagtttctattgagtatgagtttcccggaggatgacaagatgattccacttagagtttctctttatatatgattttgttggtatctcctgtgaattcacttttcagagtttcatatgattatcaacatacaggagagaaaccctatggttgtaatgaatgtggaaaagcctttacgttcaagtcaca

SEQ ID NO: 664102 - DNA, 489 bp, Homo sapiens
acctctgctcgtgattacatctcactttctgtcatctgtaaccttcccaaacagtctgcctacttttgctaaatttacagtgctttaaagtagttgatttatatgctttctccagagtgtatagttgttttcagagacagagttgacccaaattgagttccctccaggagaaatgtcacaagttaattttgaaacagtctttcacctgtaaatttgcaattcctatctgtggataatcggctgaaaataatcttaaagagaattatttatgatcatataccatttaacaacagagaacataaaaagtaaaaaaaaaactaaacatgtctcactttaagacatcacttaaagtttytgaatgaagcagttattactaatgtttgtagtcttagattaattaaaaagccaaggagttctaggtgtaagatagggtgcctcattttatatatatattgtgtcttcagcttgtcttctataaaagcaggcctt

SEQ ID NO: 664103 - DNA, 592 bp, Homo sapiens
caccttgtgttttcttttagaggcmgcaagctcaagttcaaggtactggcagggtcatgatttctgtaatgtccctaggagaagatcctttcttacctccttcttgcttcgagtgtttgctagtaattcttgtcttatagatacatcactccagtatctgccttcctgtgggctgaaagtttgtgttccctcaaaattcatttgttgaaacctaatccccaatgtgatggtattagggggtgtgcctttgggtgataatgaggccatgaaggtggagtcctcataaatagaattagtacctatacaagtacctatacaagctgaaggggctagagttctttttttaattatacaaagacagagagaaggcaccatctatgaggaagtaggccatcactaaattgcccagtatcttgatcgcggacttcccagcctccagaactgtaagaaatacatttctgttgtttataaaccatgaagtttaaggtgttctactgtagcagcacaaagggactaagacatgtctctgtcatcacatgacactttttctgttgtgtctaaattctcctcttcttattaatatgccagtcat

SEQ ID NO: 664104 - DNA, 581 bp, Homo sapiens
tgttttatttttcttgcttattcaactttctctgttatagctaatttccctggggcaagaacatttgttttctttcaaatccattctttttggatgtaggtccacagctggattcactacttgaatttctcataaattttttgattgttcacacacattgtttctctttcacagttcttgatagaaatacttttttttatttcattctctaagtagtagcaaaaaatattttagtgacacactaccaagacatatattaccactactgtgtttaaaattcttcaatggcacaacaaacatcttacaacgaagtaagtctttcttaatatgatcatactagacagagttttaaacatcccctcccctttacctcacaagtttccatcttctgattctcagtggaacattgactaggcacctctgcaggsgactttgcagatgtagttaatgttgctcatcagctgactttaagatagaaacagtagcgtggattatccaggtgggcccactgttaccacatgagcccttaaaagcaaaagaagatggcagaaacctcagagagatggagctcagagaaaagc

SEQ ID NO: 664105 - DNA, 543 bp, Homo sapiens
gctcaggcatgaaacagctgaccactcaactctaatgacaggatcctatttgaatgcagrttcatggctacattcactacttgaatttctcgtaaatttcttgtttgttcacactcattgtttctctttcacagttcttggtggaaatattttttacttcattctctatgtagtagcagaaaatattttatatgaccacacacaggaaaatctcacatagtccctaaagacgacagtggagaaagatttccattcaattcttatactttaagagcaacagagatagagttaacatgaacagtaatattttttcttgggaagaatgcactgtaattcattatttcttcatttccttgggaaggattaactggaatccaccagctcttaatgatgacacattgctattattaaaccaaggtttgattaacaataacttgattcactagagtacattttgaactctcatgaaatgaaataagcaggaataactcccaggaaaactggaagttactacactagattagatatgattagtactatctc

SEQ ID NO: 664106 - DNA, 601 bp, Homo sapiens
aaatgactaaccatcggggttacctgtggcaactaattcagcatctattgcttttctgaaaatgagaatgatattgactatacaaaatgttgtgatgtttcttcagtgccttgttcatgagcagtcagctgtatctataagttcaatgtgagctaatactgtttataagcaaacaacaaagcagaaaaaaactgtgacaaaatgcaacattatgccacataatactttagaattcaacatgatttatgtacctcagaagtttataagttagcacttcttaaacaggctttctagaccccaagaatctgctaatgttttcttcttttatttctacacaaatttagaccaaaatttaataataatacaagtacattctggatcatccaaataactcccatacatsctcatttaattatgctggttatatgtatatctttggttttgcttgtgttggatataagtagtactaattttattggcagagcctaataatataaagaaagggtaaacactgtatgtatatgagctgaagattgcctaagtgatttcataaagtttgaattgcaccaagatacttttgaaagtttgaaggaaaaaaata

SEQ ID NO: 664107 - DNA, 599 bp, Homo sapiens
acagttcagatcactttaaatttaaaatttaatatcataatgggagttaagcatgttttagacagtattaaatgagggttgtgttagataaactcagatcaaaataattcattttcattcagccatttactcatttgaaaatatctattgggccagacacggtggctcacacctgtaatcccagcacgtagggaagacaaggtgggtggatcatttaaggtcaggagtttgagaccagcctggccaacawggtgaaaccctgtctctaccaaaaatacagaaaattagccgggcttggtagcgcatgcttgtaatcccagctacttgggaggctgaggcaggataaatgcttgaatccgggaggcggaggttgcagtgagccaagatcatgccattgtactccagccagggcgacaagagtgaaattctttctcaaaaaagtgtatatatatatatatatatatatatatatatatatacacatcaggattttgccctttttataccctactttgtaacaaaagcctggctcatgatcaagaacatcctgttcaactccttcaccaaatacttgagaatatattatttggaggagggat

SEQ ID NO: 664108 - DNA, 599 bp, Homo sapiens
acagttcagatcactttaaatttaaaatttaatatcataatgggagttaagcatgttttagacagtattaaatgagggttgtgttagataaactcagatcaaaataattcattttcattcagccatttactcatttgaaaatatctattgggccagacacggtggctcacacctgtaatcccagcacgtagggaagacaaggtgggtggatcatttaaggtcaggagtttgagaccagcctggccaacatggtgaaaccctgtctctaccaaaaatacagaaaattagccgggcttggtagcgcatgcttgtaatcccagctacttgggaggctgaggcaggataaatgcttgaatccgggaggcggaggttgcagtgagccaagatcatgcyattgtactccagccagggcgacaagagtgaaattctttctcaaaaaagtgtatatatatatatatatatatatatatatatatatacacatcaggattttgccctttttataccctactttgtaacaaaagcctggctcatgatcaagaacatcctgttcaactccttcaccaaatacttgagaatatattatttggaggagggat

SEQ ID NO: 664109 - DNA, 553 bp, Homo sapiens
tgaatgatgatgattgagcctcaagtgtaaaatttgctactccctgagcacaaaattcacagaaaggttggtgagcctgttttcaccagctaatataattaagcagcacaaataatgtaatagaagacacaccatgaaagccataattacattttatttttaattttgttcatagaaaccggtatatagtttcctgatttgccaggagggaaagaagttgagttttctgctgtttaatttgtgttctgcctatgaccttttaatttatattcttagttcatcacctccacattttccttccttcatttttcttcactaataatctactagaatacatttgtcatcttacaaattacacaaaatcatagtttgatgtctttgacatttttgtagtggttttaaatattaaggatgtatcagatttcttctgaattatgtgtaatgagtaatgaaatattctaatcttttttacacatacaggtttagtaraataaatttactgactgtaataggactaaccaaatgataacattacttataaatgtgtcacagc

SEQ ID NO: 664110 - DNA, 492 bp, Homo sapiens
agagaaaaatatttgtcttcacattgccttcaacaatcctatgattgactggtatagaatgagcttgttctgtgcagtatcaacacaatcatcagccagtgtaatggagtgtattgattacttttgtcctaaattccttcctccctattggaattggtgggttaggattgtctcctctagaaccacatgaggcctgcaatggaaatttgaattgttaggagggaggagagtatgaatacaataaaaatatttctacaatagkcaccatttaacacgacatacactattttgaagcagcctagtgtcactgcagcagtctcattgtctgaggtattacctagagttctttgtctcacaaccaagaaaattaaggagtgtggacaccaacagagaggttggagtgacagtgtaataagaaaaagaggtaatctttccacaatggagaaaggacctgggagggttatgctttcacagttgaatgcaaaggctttt

SEQ ID NO: 664111 - DNA, 582 bp, Homo sapiens
tggaaatttgaattgttaggagggaggagagtatgaatacaataaaaatatttctacaatagtcaccatttaacacgacatacactattttgaagcagcctagtgtcactgcagcagtctcattgtctgaggtattacctagagttctttgtctcacaaccaagaaaattaaggagtgtggacaccaacagagaggttggagtgacagtgtaataagaaaaagaggtaatctytccacaatggagaaaggacctgggagggttatgctttcacagttgaatgcaaaggcttttataaacaagctaatgggatggggtgtttcatttgcataaggtaagaaaactggttaaggctggtgtcttatttgcataaagtgtgaattcttataagctccaccatgtctctctagtgtgcatgtgggcccttagcatgagttactccatgttgttgtattccctactgttcatgtgtcaggagatgatcttccactgcagacatgtctgattctgcatagattttcttatctatatagctgcaggtcagacttaggcaagaccccctgtgcaagtactattatctgtg

SEQ ID NO: 664112 - DNA, 588 bp, Homo sapiens
aaacatttgggtcattttcaaatttagactatcataaacattcagtattctcctacatgtctcctggagtgtgtttacaagcaattttgtaagttttatacctaagacagattttcttaacataggcacattgggatattttgagccctctaatttcttgctcttgtggtytgtcctgtgaattgtaagatgattagctacatctctggtctctactgacaggatgccagtatcactatgctgtccacacgctgccctcacagtcatgaacaattattgccaagtgtctcagggggaaaagtgtcaactgcccgtggttgagaaacactgacctaggaatatttctgaattctgtaaatagtggcaaacatttttcaaagcagaacttataattttcatttacactggagactttccattactcaacattctcagcaacacttggtgtattagtttgctagagccatcataaaaaaataccattgactaatgggttaaataacagattttttttttcgggttctggaatctgtaagtccatgataaaggggttggcaggtttagtttctcctaaggcctcttttcttg

SEQ ID NO: 664113 - DNA, 575 bp, Homo sapiens
ttcatgaatttgtacttatgctaaacaataatgacatccattaaaggcagaatcattagactaaatctgcacatgctggtttgataaaacatttaactgttttgtcaggcagagttccattaaattgacatttatttttagttttgggttttttttttcataatctcacagagtggtagttagataattagcaattaatgtaatttaggtacacctcacttttattctggaggagacagattatttagattgatggttggcatgaatgttgaatgtgccaattgaggcaatgatttgagaaattattttcataaagtatcatttcattagaataaaacttaacagatgaggaaattgacaaaatactagttcacgatccaattgtggatctcagtcctaatatgtttcaggatttagattttttctgatttgagaaaaccawtatgttacagaactccacaaccagacactccgaaatttctccagcaaaaatgagaatattccatctaaaagtcatacatgaagaatatgtatagcttctatcggagcagcacaagtttctcactataagtaca

SEQ ID NO: 664114 - DNA, 603 bp, Homo sapiens
agccaacctgaggtaatttagtttcaggtaaattaactcattgggaaagatacaagttacagctcttctgtttgtgatatgtcatcaactttattacttacttttgagaagctgataaagatggaaaaagtttaatattatgggtaacattcaattgcttcctctcataactaataattgcttttgatacagaagattgattatcactggaaagttgagttattctttcaaatgtttccatattatccaaaattcatatatttgatgtgaattaattgctaagaaatacttagactcaattacataaattacatttatttgataagcttttatacaccttggactgttaaatatatgcaagaaattctccttgcatrtcatgtagcatcagatcccacttacatttgccaatttggttgtgtctctggaatgtcaacttaactaagctacttgcttcattcattaggtcatgtgcatgtaaatggtgaagctgatatggaagggttatctaaataatttagtttaagcttgctcttttaaaatatttattcctctattggaaataccttaaataatttccttgctaatcttgttagttgtcca

SEQ ID NO: 664115 - DNA, 497 bp, Homo sapiens
gctctacctaaaatcaccaccacttctgatttgctatgattataaattaagtgacctggacccggaaactgaaactcttttgatgtagtagcgaaatataactatgtctattcttaactgtatgatttcaagttaattttactttatctcgaacatgaaagtaaaaactgggttaaactgctctaccttattctaatgggaatatttctcttttctccttcatgcactttataaggagcttatttttaaagacataactggttagtttaatatttgaaaatcaatgcatttcagcacagtaagagagtaaaaacagaaagagatcatttccacgcatgcacaaaacagcatttgttaatatccagtgtccatttctgatagacacacatacatgctaacaaaaaaaaacaaacaaacaaacatttcattaaactagaaatcaaagtaaagttcctaaatttgataattayagccataaaaaaatctacattaacatc

SEQ ID NO: 664116 - DNA, 472 bp, Homo sapiens
gagaagaaagaacacccctaacagtaccctgagtcccccagtttcatgtgatagggattttcggtacttgaatattcaactcccataagaaaaaaaaaagttagaatcatgattatgtttgattactggtccaatcctgtctcttacaaagtgaaattcaatgaatamgaatggagtacattttttctgaataagcaggtttccttgttgttaactctgattcatcttcctggaaatggatccatgtgagaattcaaagccagtgtaaaatgcttggctgcttagcaaaaaaaaggcaaaatttagaaaatgtctgaaccagagattacttagcgattagtggaattcaggatgatgttacattaaatacagtaaaataaattctaaagaaatcatgtaaatatttttttcaaggatgtgagctggctttcacctgagactgcagaggggataaaaaaaaggaatcttgtag

SEQ ID NO: 664117 - DNA, 472 bp, Homo sapiens
gagaagaaagaacacccctaacagtaccctgagtcccccagtttcatgtgatagggattttcggtacttgaatattcaactcccataagaaaaaaaaaagttagaatcatgattatgtttgattactggtccaatcctgtctcttacaaagtgaaattcaatgaataagaatggagtacattttttctgaataagcaggtttccttgttgttaactctgattcatcttcctggaaatggatccatgtgagaattcaaagccagtgtaaaatscttggctgcttagcaaaaaaaaggcaaaatttagaaaatgtctgaaccagagattacttagcgattagtggaattcaggatgatgttacattaaatacagtaaaataaattctaaagaaatcatgtaaatatttttttcaaggatgtgagctggctttcacctgagactgcagaggggataaaaaaaaggaatcttgtag

SEQ ID NO: 664118 - DNA, 633 bp, Homo sapiens
gtaactagatttggaaacagaagaaagcaaattagtatctgttgggtgtcatctaagttctaactactttggtaggaattcacatatatcacctcgttaaattaagtttaatgatcacagcaatgacttgaagtaggtatttgaaatcatgtttctcagctgggaacacagggaagcctagtggttaagttgtaaccagtaatagcactggtaaaaagaagaggctctggattcaacttgccagggtgaaatctcggttttcctcctttttaggtgcaggtactttacaaagtcatttaattttctaagcacaatttctcaacttaggaactagaaatcacacctgcacacgcacatggcatacttaggataaatattttcatgcctgyctgtttacatactaactacaatcatcattcttatcatcattgtcatccctgtctccctccgttaaaggacatgcagtaatctgagatttgaacacaaagtaacttgaccctcaaaagcatactatttcatctataaacactaaattgttactacctattagactactgaaatataggttcccatttttctaggactgacatttagtattgatacagtcagtcatcccattggtttggttagagc

SEQ ID NO: 664119 - DNA, 633 bp, Homo sapiens
gtaactagatttggaaacagaagaaagcaaattagtatctgttgggtgtcatctaagttctaactactttggtaggaattcacatatatcacctcgttaaattaagtttaatgatcacagcaatgacttgaagtaggtatttgaaatcatgtttctcagctgggaacacagggaagcctagtggttaagttgtaaccagtaatagcactggtaaaaagaagaggctctggattcaacttgccagggtgaaatctcggttttcctcctttttaggtgcaggtactttacaaagtcatttaattttctaagcacaatttctcaacttaggaactagaaatcacacctgcacacgcacatggcatacttaggataaatattttcatgcctgcctgtttacatactaactacaatcatcattcttatcatcattgtcatccctgtctccctccgttaaaggacatgcagtaatctgagatttgaacacaragtaacttgaccctcaaaagcatactatttcatctataaacactaaattgttactacctattagactactgaaatataggttcccatttttctaggactgacatttagtattgatacagtcagtcatcccattggtttggttagagc

SEQ ID NO: 664120 - DNA, 565 bp, Homo sapiens
ataataaatccttcctttattttctactttttatttatagatgaaagartttacataattagggagaagaaccactttctttactaattataaggtgattgatggccagagttaaagcaaaattatctggggaagcataatttgttcttaaagtaatgacatgtggtgtgtagattattctgtaatgtttccttggaaagagtaaattacttcataagtttattttgatgcaatatttacttctgaaagccatgttatggatgatgaagttaaagattaaaattgatagatacttgatttaccaaattacataatcacagagttggaagaaatttttaaaaagtactttaagtacattaaaaaaatgtacctgatggtatctaatgtaccatcagacagatggatgtttactccatgttttcagatacagtagaagtatctgtaaggactttgaagttttccagtatctgacaagagctgtggtttcagtgttactagtatttatgctgcaactatccctgaatttgatatttcttcctcccacacttagtattgatgtgggaga

SEQ ID NO: 664121 - DNA, 565 bp, Homo sapiens
ataataaatccttcctttattttctactttttatttatagatgaaagaatttacataattagggagaagaaccactttctttactaattataaggtgattgatggccagagttaaagcaaaattatctggggaagcataatttgttcttaaagtaatgacatgtggtgtgtagattattctgtaatgtttccttggaaagartaaattacttcataagtttattttgatgcaatatttacttctgaaagccatgttatggatgatgaagttaaagattaaaattgatagatacttgatttaccaaattacataatcacagagttggaagaaatttttaaaaagtactttaagtacattaaaaaaatgtacctgatggtatctaatgtaccatcagacagatggatgtttactccatgttttcagatacagtagaagtatctgtaaggactttgaagttttccagtatctgacaagagctgtggtttcagtgttactagtatttatgctgcaactatccctgaatttgatatttcttcctcccacacttagtattgatgtgggaga

SEQ ID NO: 664122 - DNA, 635 bp, Homo sapiens
agaattcttctagtcaaaatggagtgtaagcctaattttgagcagatgggtgctgcatgcattacacttctcaacttttcctcatatctgcyatggtagattgcttccagtgttggccacaacaatgcctctcacctacatgcccttaggcagtgtgactttgccccctttcaatcaataagtaaagcttattccccctcctcttgaatctgagctaggcttctgactagctttcaccaaaagaatgtggcagaagagatattccctgagttctagaccttaagaggtctagaccttaaaaggaattacagctttcgggatttggttttgttttgtttctaatttttgagagagagtccctgggtctgttccatctaaacactgttgaagcaagagacagatctgagggacctccagatgtgctgccgcggcttctgtttctgccctcttggaaccctgggccttcatggaagtccagtcaccctgatagaccacttaaaaagagagaccctgggggatgaaggatggtaaggagagagggttcagcattccagccagccatctgagtagccagaagttgaggccatcttggcttctccagtccagatgaaagctgcatgagtgagcccagtcct

SEQ ID NO: 664123 - DNA, 635 bp, Homo sapiens
agaattcttctagtcaaaatggagtgtaagcctaattttgagcagatgggtgctgcatgcattacacttctcaacttttcctcatatctgctatggtagattgcttccagtgttggccacaacaatgcctctcacctacatgcccttaggcagtgtgactttgccccctttcaatcaataagtaaagcttattccccctcctcttgaatctgagctaggcttctgactagctttcaccaaaagaatgtggcagaagagatattccctgagttctagaccttaagaggtctagaccttaaaaggaattacagctttcgggatttggttttgttttgtttctaatttttgagagagagtccctgggtctgttccatctaaacactgttgaagcaagagacagatctgagggacctccaratgtgctgccgcggcttctgtttctgccctcttggaaccctgggccttcatggaagtccagtcaccctgatagaccacttaaaaagagagaccctgggggatgaaggatggtaaggagagagggttcagcattccagccagccatctgagtagccagaagttgaggccatcttggcttctccagtccagatgaaagctgcatgagtgagcccagtcct

SEQ ID NO: 664124 - DNA, 509 bp, Homo sapiens
aactcttggtctctgaaacaaagtaaaacctcaaaagtcaactgaatgagcaaagaagctgtctcttgcttcttataatagcaatgactttattcatccaatttgaactagatcctctgtttcacggaaaataagtgttttgcaagctgcatttatttacatattcattcctgcaggttagacttaattcaacttccaaaaagactgtccagcaaaaagttactgaaagtgggaagtggtggggctgagcgtagagatagggtcagttataagaaggaagaaattaaagkctctaagaagagaaacaataaattagggatgaagggagaaaagaaatagaaataaaagctatcaaataaggggaggtcaatgaaaggagaaaaagcaggacaggcgagagaaaagaatgaaaaggaggcagaaagaaaagaaagtagagctgtgaaaaagcggggtggggattcaggctcagtgctggcctgcccagggaagtatccatcaataaaagc

SEQ ID NO: 664125 - DNA, 577 bp, Homo sapiens
caatagaagagtggtacaataaaatatttatttgagctaaattattttatcctaaaatagcctgagcttactgtgtaatagtattcaagtgctaggaattatgrgacatttcataaaatttccaacatactgcactatttgtttttatatactgctatatgaaggtatgccttacatttccatataaaataaatatatttctaaaattcaaaaaaagaagtatacaataaatattagctattaccattaccataatataatttttactcttaaaatttgaattcctcttgctatctttatctctgagtctttgtctctgttttgcctagctctatcttttgcctaatgttgttcaattttctcatcccgttgaataagaaatgaatacataaaccattaatctgccattcaatttataatggatatttctggcaaaaataaccagcacaaattaaaactgaaaatggctatgactgtatgtggcaaaaatgtgatattgactaaaagtggagcaaatcttgaaatgcagatctgcaaaatttgacccaggaaaattggatctcatagaaataagtca

SEQ ID NO: 664126 - DNA, 496 bp, Homo sapiens
cagggtctcagctacttaggaggctgagttgggaggatcaattgagcctaggaggttgaggctgcagtgagttgtgatcatgccactgcactccagcctgggcgacagagtgagaccctgtttcaaaaaaaaagaaaaaaagaaatcactttaagaaaccaaaaagaattaatccccaaaattaaaacagtgttatgtaatataaaaattgattcaaaaataaaaaataaaaaaaagaaagaggcactgaagagggtagtaaacacarcttgaatcactgatgccacccctccccccttcccttggcagtggccatgtaatgcagagagaaaaactgtgcacttggtggagaaacagcacactgcctgggagacttggcattgaactcagtaccatactgccctgtcacagcagaaagcaaagccatgctaggctcatttggcacccacccatgaagagaacatttcaatcagccctaaccagaatggaattaccc

SEQ ID NO: 664127 - DNA, 563 bp, Homo sapiens
ccacaataaatgcctagctcttcaaggtccagacactgacaaacatccacaarcattaagaccatgcaggaaaacatgaccttaccaaaagaactggataaagtaccagggaccaacctgggagaaatggagatatgtgacctttcagacagagaatttaaattagctttgtttgtttgtttgtttaggtaactcaaagaaatccaagataatacagagaaggaattcagaagtctatcatataaatgtaataaagagattgaaataatttaaaagaagaatcaagcggaaatcatagagttaaaaaaagtaattgacctgctaaaggatgcatcagagtctcttaatagcagatttgatcaggcagaaggaagaattagtgagcctgaagacaggctatttgaaaatatagtcaaaggagacaaaaaagaatataaaacaatgatacatgcctacaagatctagaaaatagcttcaaaagggcaaattcaagttattggccttaaagaggaggtagagaaggagataagggtacagagtttattcaaagggatattatcata

SEQ ID NO: 664128 - DNA, 484 bp, Homo sapiens
agtcaaagataaagaaagtatcctgaaagcagcaacagaaataaaacaaataacatacaatggagtgctaatacggttggcagcagagtttgtagtggaaaccttcaatggaaaactaggaaaaastggcatgacatatttaaaatgtttaaggaaaatgcttttaccctcaaatagtccatacaaatatatcctttaagcatgaaggaaaaaataaaggcaaacaaaagctgaggcatttcaacaccagatacctgtcctataagaaatgctaaaaggaattattcattttgaaagcaaaggatgttaatgagcaagaagaaattatctgaaggtacaaaactcactggtaatagctagcatgcagaaaaacacacattattataacactgcaattgtggtatgtaaactactcttaagtagaaagacaaaatgatgaactaatcaaaaataataactacaacaacttttcaagacatagtac

SEQ ID NO: 664129 - DNA, 484 bp, Homo sapiens
agtcaaagataaagaaagtatcctgaaagcagcaacagaaataaaacaaataacatacaatggagtgctaatacggttggcagcagagtttgtagtggaaaccttcaatggaaaactaggaaaaactggcatgacatatttaaaatgtttaaggaaaatgcttttaccctcaaatagtccatacaaatatatcctttaagcatgaaggaaaaaataaaggcaaacaaaagctgaggcatttcaacaccagatacctgtcctataagaaatgctaaaaggaattattcaytttgaaagcaaaggatgttaatgagcaagaagaaattatctgaaggtacaaaactcactggtaatagctagcatgcagaaaaacacacattattataacactgcaattgtggtatgtaaactactcttaagtagaaagacaaaatgatgaactaatcaaaaataataactacaacaacttttcaagacatagtac

SEQ ID NO: 664130 - DNA, 484 bp, Homo sapiens
agtcaaagataaagaaagtatcctgaaagcagcaacagaaataaaacaaataacatacaatggagtgctaatacggttggcagcagagtttgtagtggaaaccttcaatggaaaactaggaaaaactggcatgacatatttaaaatgtttaaggaaaatgcttttaccctcaaatagtccatacaaatatatcctttaagcatgaaggaaaaaataaaggcaaacaaaagctgaggcatttcaacaccagatacctgtcctataagaaatgctaaaaggaattattcattttgaaagcaaaggatgttaatgagcaagaagaaattatctgaaggtacaaaactcactggtaatagctagcatgcagaaaaacacacattattataacactgcaattgtggtatgtaaactactcttaagtagaaagacaaaatgatgaactaatcaaaaatamtaactacaacaacttttcaagacatagtac

SEQ ID NO: 664131 - DNA, 635 bp, Homo sapiens
attcggggattggtgtttttaaggataacttgggggtaggggattggaaagagtggagggctgattggtcagtttggagatgtaatcataggggattgaagtgaatttttattactgtcttctgttcctgggtaggattgcagaactggttgagccagactgccagtctgggtagtgtcagctggtgcatcagaacacaaggtctgcaaaatatctcaaatactgatcttaggttttacaagtgatgctattcccaggagcaatttggggaggttcagactcttgcagcaggagactgcaaggtccctaacccataatttataatcttgtaactaatttgttagtcctamaaaggcagactggtccccaggcaatgagggttcttttttcagaaaagggctattattaattttgtttcagagttaaactgtaaactaaattccttcccaaggttagttcagcctatggtcaggaatgaacaaggacagcttaaaggttagaattaagatggaatcagttaggtctgatctctttcactgtcataatttcctcagctacgatttttgcaaaggcagtttcaatattaagcatcttttttgactacaatggaatgaaatgagaaatcaataatgagg

SEQ ID NO: 664132 - DNA, 637 bp, Homo sapiens
ctttctaattttactaaaattaakaaatcttaagcaatttttgctattccttgtacaaatctacattccttactttttagggagatttgtcttagatgaagcttggaattgtaaactcacattaaaatatataagctggagacactgtgcttaggtagaatatctttcataaaagaagacatttctggggtttccatactaaaaatagtaaaaatgtatcattatattaagacataagaaaatgccctaattaaaggaaattaattatcttcaggagaattcttcttaaatagtatttaaaccatataatctgaacttgggagcaaaaatgtacaactgccaacagtgtgaagggcaaataataggtcctgaacacattttataggatagtgtgtgtcattttagtagggggttcttaatccacatcagcatgaaatgtttccttgacagttgacagaattcattaaaagacgaataaatctcagaatgaaatgttaaggagaaattgaacctattatttggtcaactatgtagtctgtcggtaaatttaccaggaaaatggaatggcccattaaccctaatgggaaggatagcaaggtgtctgtggagtggtgagatttaattcatcagtaccaca

SEQ ID NO: 664133 - DNA, 637 bp, Homo sapiens
ctttctaattttactaaaattaagaaatcttaagcaatttttgctattccttgtacaaatctacattccttactttttagggagatttgtcttagatgaagcttggaattgtaaactcacattaaaatatataagctggagacactgtgcttaggtagaatatctttcataaaagaagacatttctgggrtttccatactaaaaatagtaaaaatgtatcattatattaagacataagaaaatgccctaattaaaggaaattaattatcttcaggagaattcttcttaaatagtatttaaaccatataatctgaacttgggagcaaaaatgtacaactgccaacagtgtgaagggcaaataataggtcctgaacacattttataggatagtgtgtgtcattttagtagggggttcttaatccacatcagcatgaaatgtttccttgacagttgacagaattcattaaaagacgaataaatctcagaatgaaatgttaaggagaaattgaacctattatttggtcaactatgtagtctgtcggtaaatttaccaggaaaatggaatggcccattaaccctaatgggaaggatagcaaggtgtctgtggagtggtgagatttaattcatcagtaccaca

SEQ ID NO: 664134 - DNA, 637 bp, Homo sapiens
ctttctaattttactaaaattaagaaatcttaagcaatttttgctattccttgtacaaatctacattccttactttttagggagatttgtcttagatgaagcttggaattgtaaactcacattaaaatatataagctggagacactgtgcttaggtagaatatctttcataaaagaagacatttctggggtttccatactaaaaatagtaaaaatgtatcattatattaagacataagaaaatgccctaattaaaggaaattaattatcttcaggagaattcttyttaaatagtatttaaaccatataatctgaacttgggagcaaaaatgtacaactgccaacagtgtgaagggcaaataataggtcctgaacacattttataggatagtgtgtgtcattttagtagggggttcttaatccacatcagcatgaaatgtttccttgacagttgacagaattcattaaaagacgaataaatctcagaatgaaatgttaaggagaaattgaacctattatttggtcaactatgtagtctgtcggtaaatttaccaggaaaatggaatggcccattaaccctaatgggaaggatagcaaggtgtctgtggagtggtgagatttaattcatcagtaccaca

SEQ ID NO: 664135 - DNA, 643 bp, Homo sapiens
accactgagctttgagatattttacacagcaaaaaatgactaatacagaggccttgaagaaaaacaatgtttaagagttaagctaagggaaaggaaccagaggagaggaaaayactaaaaagaagaaattagagaggcagaaggaaaataatgagggaaaaagtattgaggatatcgggattagggagaatttcaaggcagaaatggtcaagttccacaaagagatcacactggatacagagttaaaaataaactactgaatttgtaaattatgtgttcaatgtttttgagctttgccaaaacaggttcagttagttggtagaaacagaaatcatattgctgtgggttaaaggacaagtggaaagggagaaagtagaggcaggatatgtagaccatgcttgagtgttataattagatggagggaggcaggtgtcagggaataacacaaagaccacaagagaaaagttagagttgaatttgcctcctttgcaagtagaggagaaccaagtcactcagaaagagttcggcaggtctccacaagctgaaagaggaaggatgaaatacgaggccaaagagagagttaactccatatgagaaaggattatttgcattaaattctaatttattaaggaaagtattataa

SEQ ID NO: 664136 - DNA, 643 bp, Homo sapiens
accactgagctttgagatattttacacagcaaaaaatgactaatacagaggccttgaagaaaaacaatgtttaagagttaagctaagggaaaggaaccagaggagaggaaaacactaaaaagaagaaattagagaggcagaaggaaaataatgagggaaaaagtattgaggatatcgggattagggagaatttcaaggcagaaatggtcaarttccacaaagagatcacactggatacagagttaaaaataaactactgaatttgtaaattatgtgttcaatgtttttgagctttgccaaaacaggttcagttagttggtagaaacagaaatcatattgctgtgggttaaaggacaagtggaaagggagaaagtagaggcaggatatgtagaccatgcttgagtgttataattagatggagggaggcaggtgtcagggaataacacaaagaccacaagagaaaagttagagttgaatttgcctcctttgcaagtagaggagaaccaagtcactcagaaagagttcggcaggtctccacaagctgaaagaggaaggatgaaatacgaggccaaagagagagttaactccatatgagaaaggattatttgcattaaattctaatttattaaggaaagtattataa

SEQ ID NO: 664137 - DNA, 573 bp, Homo sapiens
atgaatttatggattgagctgttttaattttttagtaatattttataattggtcacttacgacttgtaagtcwattttccattgtatacattgtacactcaaaaacattaaaataattctgtgaaaataaagtgtaagcttctgttttcattcctccctgttactaagcttgtttctctgcctctctgcatgcaccaacccccacactcttagttttaaagtctcagcgtactaataaaagtgggatatcttctagggactttgattccacgaggcagtgatttttattatgtcttaattatttttcatgggagtgcttcatttagattactttctaataccccccagttataacaagatgatagattttttaaaatttgtcacttatttcttatactattatttcttatggtaaactgtttaccatgcctttgcccatgtaaacacttgtaagattataatcactccaaaatgagcaagtattgttattgcacacattcttatcaagagaaaaagaaaatggcttggtgttcaagtttttccatgggttgaaaaatgcacaagaacttagca

SEQ ID NO: 664138 - DNA, 573 bp, Homo sapiens
atgaatttatggattgagctgttttaattttttagtaatattttataattggtcacttacgacttgtaagtctattttccattgtatacattgtacactcaaaaacattaaaataattctgtgaaaataaagtgtaagcttctgttttcattcctccctgttactaagcttgtttctctgcctctctgcatgcaccaacccccacactcttagttttaaagtctcagcgtactaataaaagtgggatatcttctagggactttgattccacgaggcagtgatttttattatgtcttarttatttttcatgggagtgcttcatttagattactttctaataccccccagttataacaagatgatagattttttaaaatttgtcacttatttcttatactattatttcttatggtaaactgtttaccatgcctttgcccatgtaaacacttgtaagattataatcactccaaaatgagcaagtattgttattgcacacattcttatcaagagaaaaagaaaatggcttggtgttcaagtttttccatgggttgaaaaatgcacaagaacttagca

SEQ ID NO: 664139 - DNA, 561 bp, Homo sapiens
aggctaaagctgttgaatgaataaattttttgctgcctgcatctggttaacatgtcacttcctgataaggaagccacttttttactgcagttgcacactattttattgtttattcattagatatttttgaaattattcctgttttaagacatttcataataaaaataatatatttgtaaaagcctcttgtcatattaaggcaccacctcaaatacacacaggcacacttacatacatacacacacacacatgcatrcacacacatatgtacatacacatatatttaaacttggactgtcatcttgtcactccagaatggtagctagtcaacagaagaaacgtactgaaaatagaaaagaagtctgaaaatataggcctctcctatgtagctagctgatttcagctgcttatgactgcagagtataagttaatcgaatcaatgctcacaatacaagttagtcatcagaaaggaccagaaactgattatgtatgaataagagtacagaaaacaatgtatctggacatacactataactctgggatatttctattctaagaatc

SEQ ID NO: 664140 - DNA, 574 bp, Homo sapiens
gctagtataggttttgacttggctctttcttaattgccagtaagaaatgagatacttttataattatctgttgatctgagtctcttcaaacaaaattccacctagaattgccttgataattcatttggattatttatgtcatggctccattatctgaggccatgatctatagaactaattctaaaaataagaaaaggctatataccttttgaagtatgtgatagactataaagtcaagtagacaagatggcaacatttgaaaaaaatcactaacattaccaaacaggatgaaaaaagcttaaaatgttatgctatcttttaaaaaatgattcaataacacaaytgagtgaagaataagtgggattgtattgttttctgattgtagtggtaatattcttaagaacgtaattaagaggcatataattatttggtttaagtcccaaataaaccaaattatttggtttaagctttggagctacatgtaatcaaatatgcaaaagcatcttccagattaagagaactgtgtgttcctatttatttttaccattgtttaggaatggccatgagtggtacc

SEQ ID NO: 664141 - DNA, 558 bp, Homo sapiens
atcactatttagctaggagttacctgtactaaaagatgtttaagtatttggatagaagtrgacaaagaaagatgcgatgtcttcagacaccaactggccagagttgggccaaacttcacaggttaagggcacagtccacctcaaggccactctcacttcagatttcagctgcaaattaagagaatcccaggctattctcatctcacttctgaccagctggttcaaatttgggggttcccattgccctctcagttttgataatttactagaatgacctatagaccacagggaagtgctatgcttattacagttttattatagcaaaaggatacaaataagaggcaggcaaaggaagagaagcatcgagtacagtgggaaggttccaaacatgcagttcacattgttttttccccacgagaggtcctgttatcctcctgccacaggaatgtgcagccatacccagagtatggccaacaatggaaacccacctgaactttggtgtccagggtttttattggggtttcattatgtacgcatgactgattggatcattgactt

SEQ ID NO: 664142 - DNA, 581 bp, Homo sapiens
gaatactatgcagccatacaaaggaaagagatcatgtcctttgcagggacatggatggagctgtaagtcattatcctcagcaaactaacacaggaatagaaaaccaaacactgcctgtcctcgcttataagtggaagctgagcaatgagaagacgtggacacagggaggggaacaatacacactgcggcctgtcagagaacagggggagggagggcatcaggataaatagctaatgcatacagggtttaatacctaggtgatgggttgataggtgcagcaaaccaccatggcacacatttccctatgtaacaaacctgcacatcctgtgtatcctagaacttaaaataaaattaaatttaaaaataaataaaaataaaaatctcctttctgtaaaagttggaaaaccttgttcccattgaacatcacaggtagattctaaacttatatatgatgacacttggctstcttttactctgatgacttgcattcctccacttatactctgtgtctcagacataagaagagaaaaagcaggaagcaacagcccctgttttgctcttggacattgcaatgggtgtga

SEQ ID NO: 664143 - DNA, 523 bp, Homo sapiens
tttacaataagaaccaagattaaggtcgtctgagaagagctcaaccttctggagattttggtagtagaattaaatgctttggttttaactataaaagataaacttttgagttctagaatttattagattgtctactccaagataagaacaatcacaatagctacttatattttcacaacattttatggcttaagaagcttttttamattcattattttatttaatcaaatttttacaacatagaggggaaagcccaggattcagggttgttcacatgtgtgagcctcgtttcctcacccgtgctaggggtaatcacaggaagtctacttatctcaagggtcagttgtgaatgtcaaagaatacagtgttatataaaaacaattttaattccattgttagatgttattttataatagattctattaaaccacaacctctgaattaattatcttgcactttttgatggtggttgatgctgagaatggcttcttcgctcttacattgcaactgtcaaagcctttaa

SEQ ID NO: 664144 - DNA, 564 bp, Homo sapiens
aaaaggacacaggagccaactgaaatagctcctcgtggatcaatggtgatagaattggattataacccaaggaataaaataaatatccatgattttatattaatatgagtaaataaataaattaattattggggaagaggacaactgtttcttacagaagaattccaattaataaatgcagaagaaatgaaggagatagaaaacaccattagaacactagagtagtaatcactacagccatgatcaaccaataaatgctaaaattagtgagagaawgtttatggagcaacaagatagcttccaattaccttactgaaaatatttattaattacaaaagggaaagcagtaacttttcatggagaagcctggcagacaccatcttaaacaagagatcaaggttaacatcacttcattttataagatatgagcaaacataagacaaatccaaaatgcaagacattttacaaacccctgaacattagttttcaaaagtgtcaaggtcgaaagacaaggaaagacagagaaactgtcacagatcaaaagcagctaaggagacatgacaa

SEQ ID NO: 664145 - DNA, 398 bp, Homo sapiens
ttaagttttgcttatgtttggaaatcaagcaaggttaaggtcatgtatgaagcttaactgactttgtctgctcagtgattcgtcaagcytggtctctattttcatttactttaacaagcatgagaggaacaagctgaggcccctgctttcagtgttgtcacagccccctgttaccagggccagtggatgccaagctctccctcattccttgtctcatcaatcagatggattgctcctttacccagggtgagactgcatgaaataagtatccataggtgtttttccaatatgatcgtctcttgatgtgtgcattgaaaatcctttcatagaaacataagaatgaagggaataagggttttgtctaaaatttaataaaacaaaaactttctcaaaggatg

SEQ ID NO: 664146 - DNA, 398 bp, Homo sapiens
ttaagttttgcttatgtttggaaatcaagcaaggttaaggtcatgtatgaagcttaactgactttgtctgctcagtgattcgtcaagcctggtctctattttcatttactttaacaagcatgagaggaacaagctgaggccyctgctttcagtgttgtcacagccccctgttaccagggccagtggatgccaagctctccctcattccttgtctcatcaatcagatggattgctcctttacccagggtgagactgcatgaaataagtatccataggtgtttttccaatatgatcgtctcttgatgtgtgcattgaaaatcctttcatagaaacataagaatgaagggaataagggttttgtctaaaatttaataaaacaaaaactttctcaaaggatg

SEQ ID NO: 664147 - DNA, 437 bp, Homo sapiens
aatagcatgcccaaaggggtaattgtgtggttgttctcacttctattatgacagttatcatactgcattattgacaagcatttgtgtccttatgtaacttctctattgtaatgtgagttctttgaaaacagaatctctgccctatcagccttcctattcctagtatccagtatgaggtactcaataaacaaatgccgactgcaagaataaatgacgactccatgactgtgacatgcacgggttagcacagtggactgggagtgcagggctctgatgtcagccttgagttagaacagcagccctaccatgtactagctttgtgacctgtggcatctcatctcacctctctaagcctcaggggctttttttggctaaaataataataaatgttttgaggrttaaatgagaaaataaatgtaagcatccagcattgtcat

SEQ ID NO: 664148 - DNA, 605 bp, Homo sapiens
agctctgcataaataatgcagtgagtctgccaaattaagaatctcataataggttgttcagatggtgttattagtaagagactgggattggactgtgctctgctgcgggaaatgggtagatgacattggtgcgtagggaaactgcacattagtggcaagaacacaaaatttaaaatgacagaataagtgtgagatggaaaaacagacaatgaaaggatttgaaagaaacaaaaaagattctcttaattaaatgtgattatgcttctgttacttaaaaaaaggaaataagagtggtattgggacttatttttctgatggttacaattaagcagtgggattttacccccrcctcccatcttcatttcttttaaactttcatttttggtggatgaatgctaaagtaggtctcagacatgactaattttagcctggaagctataagaaataaaaagaattttggaatgaaggttgtgaaatcaatcactggaatttctgcaagtaataacagcatgcagctctattaaacattgatagattcctctcctagattttttaaaacaccatatgtaatacttacagagacagggtacttgcagtataaaaaa

SEQ ID NO: 664149 - DNA, 590 bp, Homo sapiens
ggaaaaacagacaatgaaaggatttgaaagaaacaaaaaagattctcttaattaaatgtgattatgcttctgttacttaaaaaaaggaaataagagtggtattgggacttatttttctgatggttacaattaagcagtgggattttacccccacctcccatcttcatttcttttaaactttcatttttggtggatgaatgctaaagtaggtctcagacatgactaattttagcctggaagctataagaaataaaaagaattttggaatgaaggttgtgaaatcaatcactggaatttctgcaagtaataacagcatgcagctctattaaacattgatagattcctctcctagattttttaaaacaccatatgtaatacttacagagacagggtacttgcagtataaaaaattctaagtagccattttattaaggtcaaaattgcagaataatatttcagttcctagggcatctttrgagttttgtttttgttgtagttgttgtttttattaaagcacttctcaaaattacattgtcattttaaaaatagcaactacacttgaatactatcaatgttgtaattcattagat

SEQ ID NO: 664150 - DNA, 622 bp, Homo sapiens
ggaggtcagactgggctttgaaggattcttcagattttaaaagccatgtccaaaagaaaagaaggacataggttctgaaaacttaagagttctaagtaagaagagacagctttgtttcaggcccagcaaaggtgcttgacatcattgatcaccagagaaatgcaaatcaaaattgcaaygagataccatgtaaccccagttaaaatggcttttatctaaaagtcctgcccacctgcataaaaagaggaaacaatgctagaaatcaatttatatctaaaatacaggtatgaataaattaaaccagagtatttgaaataagaacatgcagaaagttctaaaataaattagccattcaaaactcagaacctcagacacctagagggatcactgaattattgcaatcagtccatgaatggaatctgagcccaggcacagacttaataaatattatcaattgcaaatttgcaccactgtcttttgaagcctttgtgaatgataacaaatgtattcacttaatagcaatgctgcattttctcaatgtagttacactgaaagaataatgactggaattttgtattatttcatggctttgttcaaattaaataaaccatatataagtatt

SEQ ID NO: 664151 - DNA, 534 bp, Homo sapiens
acacattggccataacgactatatgagagtactgaccatgaccatgaccatatcatggaatgacacaagagttagaaaaaattagctcaaagtaggacgtaaatagttttgtaattagtttgaaatagacagtttatctgaccaaattagaaatggaggaaagtttctattttttaataatatttattaagataataatatagaaccattttacccccactggattccaaatgcctaaaaatcttataataccaaatgtgaatctattggctcttttacatgttacagattagagcaaccactttggaaaaatttgacactttttttcactaaaattgaatatttgcaaactctagcacttccatgataaggtataaaactaagagaaatttttgcacatgtacaacagaagatatgtaaaaaatgtttatagtgacactattcatattaacaaaacsttgaatcaatcaaaatatccaaaaacagtataaaaataaactgtagtatattcactaatttaatattatataggag

SEQ ID NO: 664152 - DNA, 601 bp, Homo sapiens
ctgtttttatgtctctaccatgccgtttttgttactatacctctacagtataatttgaagtcaggtaatatgattcctccagttttgttctttttgcttaggatagcttggattattcttggtcttttgtggtttcatacaaacttgttttttctatttctgtgaagaatgtacttagggattgcattgaatctgtagattgttttgggtagtgtgaacattttaacaatattgactcttctaatccatgaacatggaatatctttcctttttgtgtgtgtttcccctttaatttcttgattcaatgttttacagtatttcttgtggagatcttccacgtctttggttaagtttattctgagatattttatttgtagttattgtaaatgacaatactgtcttgatatctttttcagatttcttactgataccatatagaaatgttcctgatttttgtatgtggagtttgtatcctacaactttattgaatatayttatcaattctaatagatttcttatggagtctttatcatttccaaatataaggtcatataatctgcaaacaaggataattggactccttcctttccagtttggatgc

SEQ ID NO: 664153 - DNA, 471 bp, Homo sapiens
tgaaatgacagacgtagaattcagaatctggatggcaaaaagctcattgggattcagaaaaaagttgaaacctagtccaaggaatccaagcaatccagtaaaataattcaagagtggaaagacaagatagccattttaggaaagaaacaaactgaacttttatagctgaaaaattcactataaggatttcataatacaattggaactactggcagaatagaacaagttgaggaaagaatctcagagtttgaagaytggttttttgaatcagataaaaataaagaaaaaattgaaaaagttaagaaaacctctgagaaatatgggattatgtaaagagacaaaatctatgacacattggcatctctgaaagagaaggagagagaataagcaacttgaaaaatatatctgaggatatagtacatgaaaatttccctaatctcactagagaggtttacatactaactcatgaaa

SEQ ID NO: 664154 - DNA, 512 bp, Homo sapiens
ttactaaaatctctggaatgcaggtaaagcagtgttaagaggaaagtttatagcactaaacgccttcatcaagaagttaaagatttatcataaattaactttgcacctaggaaaaagaaaaagaaaaaaccaactctaaagctagcagaaaaaagaaataactaaaattagtgaactgaacaagattgagatacaaaattcataaaaaggtcaatgaaaccaagagtttgtcattcaaaatagtaaacaagatttacagactactrgctggattaacaagatataaaagaaaatatccaaataggtacaatcaacaatgacaaatatgacattacaagtgatcacacagaaatacaaaagatccttacaggctactatgaacaactctatgctcacaaattagaaaatctagtgaagatgaataacttcgtggaaacatgtaatctccaaagattgaatcagaaagagattgaaaccctgaatagaacaatattgagctctgaaattaaaac

SEQ ID NO: 664155 - DNA, 512 bp, Homo sapiens
ttactaaaatctctggaatgcaggtaaagcagtgttaagaggaaagtttatagcactaaacgccttcatcaagaagttaaagatttatcataaattaactttgcacctaggaaaaagaaaaagaaaaaaccaactctaaagctagcagaaaaaagaaataactaaaattagtgaactgaacaagattgagatacaaaattcataaaaaggtcaatgaaaccaagagtttgtcattcaaaatagtaaacaagatttacagactactagctggattaacaagatataaaagaaaatatccaaataggtacaatcaacaatgacaaatatgacattacaagtgatcacacagaaatacaaaagatccttacaggctactatgaacaactctatgctcacaaattagaaaatctagtgaagatgaataacttcstggaaacatgtaatctccaaagattgaatcagaaagagattgaaaccctgaatagaacaatattgagctctgaaattaaaac

SEQ ID NO: 664156 - DNA, 616 bp, Homo sapiens
cctaacagtcaggcccatcttctgcaggtctgctggagtttgctggggtccactccagaccctgtttgcctgggtatcactagcggaggctgcagaacctccaagattgctgcctgctccttcctctgaaagcttcatcccaaaaaggcacctgccagatgccagccatagctctcctgtatgaggtgtctgtcgacccatgctaggagstgtctccaagtcaggatgcatgggggttagggaacaacttgaggaggcagtctgtcccttagcagagctcaagcactgtgctgggagatcagctgctctcttcagagctggcaggcaggaatgtttaagtctgctgtaactgtgcccacagccgccccttcccccaggtgctcttttccaggtagatgggagttttatctgtaagcccctgcctggggctgctgcctttccttcagagatgccctgcccagaaaggaggagtctagagagaggcagtctggctacagtggctttgctgagctgtggagggctctgtccattggaacttccctgtggctttgattacactgtaaggggaaaaccgcctactcaagcctcagtaatggcagatgcccctccccccacc

SEQ ID NO: 664157 - DNA, 610 bp, Homo sapiens
atgccagccatagctctcctgtatgaggtgtctgtcgacccatgctaggaggtgtctccaagtcaggatgcatgggggttagggaacaacttgaggaggcagtctgtcccttagcagagctcaagcactgtgctgggagatcagctgctctcttcagagctggcaggcaggaatgtttaagtctgctgtaactgtgcccacagccgccccttcccccaggtgctcttttccaggtagatgggagttttatctgtaagcccctgcctggggctgctgcctttccttcagagatgccctgcccagaaaggaggagtctagagagaggcagtctggctacagtggctttgctgagctgtggagggctctgtccattggaacttccctgtggctttgattacactgtaaggggaaaaccgcctactcaagcctcagtaatggcagatgcccctccccccaccaagctcaagcatcccaggttgacttcagacttctgtgctggcagcaagaatttcaagccagtggattttagcttgctgggctcygtgggggtgggatccgctgaacaagaccacttggctccctggcttcatccccctttccagggggagtg

SEQ ID NO: 664158 - DNA, 620 bp, Homo sapiens
ctcaagtcgcagccttaaaacattctacagaagaaggaatcttctgctgtagcttcataaggaaaaccccaaaaaaggattctgactgacccagcttagatcatttgccaatcattggtacaatcactgtagccaaaaagaaaggattagtcaaacttaggggacacagtttgttccacaagtatttgtaaggagtgtttaattctgagcctaccatataatttgaatagatcctgttttgtgtatcaacttcgaacatactggccatcatatgtcttctcactggcctgcctccaccattttgggacccatcaaatccattcttaacagtcatcagcatgatcttaaaaaaccttagactggttatgtctctcttccatgtaaacactttaatggctttccattgctccaaaaataaagctcaaaattcttagtgaggaacctacaaagccttgttcctatgcccctgcccagctktatcttctcttccttctggtctcagttcaattgccaacaccttggcaagatctttccaagcaatccagtctcaattacccacccaccaaatatttatgccagtctctgtgacatcaacttatttttttccgcatagcagttat

SEQ ID NO: 664159 - DNA, 450 bp, Homo sapiens
aacaatgcagccaccatccaagtcaggaaatacaayagagccagcttatagttacaacttctttgggatatttcctccctgctctgctcaatcccaacacaatttcccttaaagtttactaggattagaaggtacagtttctgttttaccttgacattaaggatgcagttcatttgattggtaggaggatcttatctggtgagattgggtttagacacttgttcccttctccctgggaggtcattaaaacagaagttcaagatcatcagggttggcaaatgcccaagagcaaaggtaatctcattgttcactttaggttcctgtgttcttcctcccccttatatttccacctggttttgtgagtgtgtgcatgtgtatctatacatacacttatacacatatctacgtatacccttaggcacacatatgcacatatacagtgtatatttt

SEQ ID NO: 664160 - DNA, 475 bp, Homo sapiens
agtactgaagttaatataagtattacagctgtrggcaactagagcccaatcctgctgtgagccctctgagagcctatgaaacccaactcagcatgtcccactaaggggtgatgaagctgagatatttatttacaaattctgcccttcaaccaggtagctccaggtaatttggtcttacgcacttccagcgccccctgagcacaggccaggcgcactctggtgtatggagaactgtagtcagagagacaccaagggtatgtatagcagtaactatagttggttccaataacttagcctgccatattcccaccatccttcagcttttggcctcccagccctgaagtactgtggattgtgtcccccactttattttatctcatggtcccctgtattgttttatttatagcacgatcacaaatgtaagcatatagttatttgtgtgattcaacacctgttttgtctagtaccttgctac

SEQ ID NO: 664161 - DNA, 595 bp, Homo sapiens
gaaaaacaaccaagatactctttagtaaaaatttggtttggtttggatttcaccatcagagaattctctttgatttgtagatgtacaatctcatcccaggaaattgcttcagtttcttcccatcctgaatacaagggaagtaatatttttttctttgcattatrtttcaatcttgtctctcttaactgttatttaatttgcctaaaattataattaccaggggacctaatgcattggataatgagaaaaaaataagttattataggttgaaaattatagtcatctagtgttttaaaaattcactcagaacaacttttaataagataaatttttcagttccttcccaattatagtgaaaccactcactaatcttcactactggaaagctagacttgtcacaaaagggagttgtcctctcccatgtagttgctctatgtcaagtcccttgctacctattgcgatatcagttttcctgatatatatccatcacctctcttccacctactcacgttatttctccaaaaggaattacttcattgatttttggctgtgatatttactcactgttaatagaaaatgtcaggatggtaggaag

SEQ ID NO: 664162 - DNA, 559 bp, Homo sapiens
ttcagttccttcccaattatagtgaaaccactcactaatcttcactactggaaagctagacttgtcacaaaagggagttgtcctctcccatgtagttgctctatgtcaagtcccttgctacctattgcgatatcagttttcctgatatatatccatcacctctcttccacctactcacgttatttctccaaaaggaattacttcattgatttttggctgtgatatttactcactgttaatagaaaatgtcaggatggtaggaaggacttgtttgatatttataatttttataagaatccrtaagtcattttctctgaattaaaaaaaaaaaaacattcctttgaaatttcagaatgcatctgttactcaacacagagtgtgcctaaatcagtacatatattcttacatatcatatttatgttctcataaggccagattttttttaaaatgacttctagtttctgtgctcccacaaattgtatttgtctcctttgtccacatatacaattgtgtctttattgccttaaatgagtcaattgagatcccagtaaagttacaa

SEQ ID NO: 664163 - DNA, 620 bp, Homo sapiens
attacatcaaaataaaacttttctgcaaagaaataaaaattaacagagtaaaaagacattccatggattggaagaatatatctgtaaactgtacatctgataagagactgatataaaaaaataggaactgaaacaacttaatagcaagaaaggaataatctgattttaaaatgggcaaaggatctgaatagacatttctcaaaataagagttaagaagggcgaacagataaatgaaaaactgctcaacatctctaatcattacggaattacaaatctaaaccacaatgagttatcatctcacacctgttagaatggctattatcaaaaagacaaatgagaagtgttgatataggaraatcttgtacactgttggtggggatgtaaattagcataatcattttggaaaacagtataggggttcctcagaaaacttaaagcagaattaccatcagcaatgccacttctgggtatatatccaaaggaattgaaattggtatgttgaagtgatatctgcactcctatgttcatttcagcatttttacaagagtcaaaatatgaaaacaagctgagtgtccaacctaagaatgcataacaaaaatgtggtatatatacacaatgc

SEQ ID NO: 664164 - DNA, 585 bp, Homo sapiens
tttcttagtgctgcctggttgactattcaccataaaattctctccctcttagtttttctcttacccatagaaatgacctatgtctcaggaagtttccatcttgccctggcattgggggatagatgaactactagaagaaaacactgggaaaatgccataggacacgagtttgggcaaagatttttggggtaagacctcaaaagcacaggcaatgaaagcaaaaattgacaaatgggattatatcaagctaaaaagcttctgcacagcaaaggcaacaattaatatagtgaagagacaacttgcagaatgggagaaaatatctgtaaactttccatctgacaggagattaatatgttaaatattgttccaaaatgtataagaaacccaaacagctcaatagcaaaaaacaacaaataatctaatttaaaaatgggcaaaacacctgaatagacatttctcaaaagaaggcatacaaatgactaacaggtatataataaaatgttcaacatcactaataatcaktgaaaggtaattcaaaaccacagtgcaatatcataccaccctagttagactggctgttatcac

SEQ ID NO: 664165 - DNA, 583 bp, Homo sapiens
ctagtcctttgttggatgtatagtttgtgaatattttcttcaactctgtggcttgtctgtttactttgctgattatttcttttgttgtgtagaagctttttagtttaattaggtcccatctatttatttttgtttttgttgtgtttgtcttggtgtcttagtcataaattctttacctaagccaatgtccaggagagtttttctgatgttatcttctccaatttttatgatttcatgtcttagatttaagtctttgatccatcttgagttgatttttgtataaagggagagatggggatacaattttattctcctacatgtggtctcccagttttcccagcacaatttattgaattttctccaatttatgtttttgtaggctttgttgaagatcagttggctgtaagtatttggctttatttctgggttctctattctgttccrttggtctacatgcctttttctttttatacaagtaccatgctcttttggtaactatagccttgtagtacaatttgaagtcaggtaatgggatgcccccagctttgttctttttgcttagtattgctctggttatgtgggc

SEQ ID NO: 664166 - DNA, 445 bp, Homo sapiens
tgcatccaaacgaaagaaaattagtacattgaagagatatctgcattttcatgtttattgcagcactattcataacagcctagatatgaaatcacttatacttgatataagtggaattatacagcatttgttcttttgttactggcttatttcacttagcataatctcaaaatgatgataggtgtctatcaatggatgaayggataaagaaaatgtggtacaaattcacaatggaatagaattcaggcatagaaagaatgcaatgctgtcatttgcagcaacatggatgagactggaggtcattatgttaagtgaagtaagccaggcgcagaaacacaaatatcacatgttctcactcatatgtgagagctaaaaaaaagtgtatctcatgaaggtagagagtggaatggtggttaccagaggctaagaagggaaaggagaagag

SEQ ID NO: 664167 - DNA, 625 bp, Homo sapiens
tagcatatatataacaaataactccttgtttctatctgaaacatgataaacttagataacttgtcagaaggtagaggttgtagcatgtattcagtacttttcattgataaaagagataaaataggtcaacagcaattagtatgttaataaggaagaagcccctcgagtgggggaagatgtttatgatttctccttggtctgggtataatatttctgtgaggtcagagccctgcttgaatagctaccactttgttctacttctgcttatcatacagcttctcttatcgattgcttcaggggtgagtgcagagacacagagataattggttttgcagatatattgatgtgtgtaaaaaattttgtatattttctgtaaaatagaaaactggcaatttaattaatgtctcttgtaaacatattagggtcattaggtttccctgtatatagttgactttggagcactagacaagatcaggttsatggatgtaaaaagctaaggcctggtcccacatcatgatacattcaccaaatttcatccagggagatttctaggcagccagccatttggcttttctccagccagttgagatgtatgtgagacagttaaatggaaatgtttaaaaat

SEQ ID NO: 664168 - DNA, 537 bp, Homo sapiens
tgatgataggtgtctatcaatggatgaacggataaagaaaatgtggtacaaattcacaatggaatagaattcaggcatagaaagaatgcaatgctgtcatttgcagcaacatggatgagactggaggtcattatgttaagtgaagtaagccaggcgcagaaacacaaatatcacatgttctcactcatatgtgagagctaaaaaaaagtgtatctcatgaaggtagagagtggaatggtggttaccagaggctaagaagggaaaggagaagagtgggatgaagagaagttgattaatgggtaccaaaatstagatagaaggaatgagttctagtatttgatattatagtagggaaattatagttaataataataatttatcatatatttcaaaattgctagaagagaagaattgtaatgttcccaacacaaataaaagataaatgtttgaggtgatgaatatcccagttaccccgatttaataactacacatagcatacatgtatcaaaatattacatatacacttaaagtatgtac

SEQ ID NO: 664169 - DNA, 596 bp, Homo sapiens
ctatacaaggtgaccatccccaagaaacaaagccctcagattctccaatgttcatatgaaagaataaatattaaagacaactagagagaaagggcaagtcacctacacagggaactccatcaggctaacagcagaccttccagcagaaaacttacaagtgagtagagattggggtccatattcagcactcttaaagaaaacaaactccaatgaagaatttcatatctggccaaactaagcttcataagcaaagaagaaataagatccttttcaggcaagcaaatgctagggtaatgtgttaccacaagatctgccttacaagaggtcattaagggagtgctaaatatggaaacaaaaaaccatcactagcaaccacaaaaacacacttaagtacatagatcattgacaatatraagcaactacacaattaagtctacatcgtaaccagtaacaccacaataacaggatcaaatccacatgtatcaatattaaccttcaatgtaaatgggctaagtgccctaattaaaaggcacagagtgacaagttcgataaagaagcaagacccaactgtatgctgtcttcaagagattaatctc

SEQ ID NO: 664170 - DNA, 596 bp, Homo sapiens
ctatacaaggtgaccatccccaagaaacaaagccctcagattctccaatgttcatatgaaagaataaatattaaagacaactagagagaaagggcaagtcacctacacagggaactccatcaggctaacagcagaccttccagcagaaaacttacaagtgagtagagattggggtccatattcagcactcttaaagaaaacaaactccaatgaagaatttcatatctggccaaactaagcttcataagcaaagaagaaataagatccttttcaggcaagcaaatgctagggtaatgtgttaccacaagatctgccttacaagaggtcattaagggagtgctaaatatggaaacaaaaaaccatcactagcaaccacaaaaacacacttaagtacatagatcattgacaatatgaagcaactacacaattaagtctrcatcgtaaccagtaacaccacaataacaggatcaaatccacatgtatcaatattaaccttcaatgtaaatgggctaagtgccctaattaaaaggcacagagtgacaagttcgataaagaagcaagacccaactgtatgctgtcttcaagagattaatctc

SEQ ID NO: 664171 - DNA, 571 bp, Homo sapiens
aaaaaaaaacaaaataggataaggagctagataatgactacaaaagggctattttagatggagtggtgaaaaaaggctttttttttttttttttttagatacagggagcatatgtacaggtttgttacatgggtatattgcactcaggtagtgagcataatcctcaatatgtagttttcaacccaggaccccctcwctttctcccccttctagcagtctccagggtctattcttcccatctttgtattgatgggtgctcaatgtttagttcccacttgatttttttttttttttgaggcagagtctcactatgtcacccagggtggagtgcagtggcacaatctcagctcactgcaacctccacctcctgggttccagccattctcatgcctcagcctcccaagtagctaggattacaggcacccaccacctagcctggataatttttgtatttttttttttttaagtagagagagggttttaccatgttggacagactggtcttcaactcctgacctcaagcaatctgcctgcctcaccacttataattaataaggattatgatctctag

SEQ ID NO: 664172 - DNA, 571 bp, Homo sapiens
aaaaaaaaacaaaataggataaggagctagataatgactacaaaagggctattttagatggagtggtgaaaaaaggctttttttttttttttttttagatacagggagcatatgtacaggtttgttacatgggtatattgcactcaggtagtgagcataatcctcaatatgtagttttcaacccaggaccccctcactttctcccscttctagcagtctccagggtctattcttcccatctttgtattgatgggtgctcaatgtttagttcccacttgatttttttttttttttgaggcagagtctcactatgtcacccagggtggagtgcagtggcacaatctcagctcactgcaacctccacctcctgggttccagccattctcatgcctcagcctcccaagtagctaggattacaggcacccaccacctagcctggataatttttgtatttttttttttttaagtagagagagggttttaccatgttggacagactggtcttcaactcctgacctcaagcaatctgcctgcctcaccacttataattaataaggattatgatctctag

SEQ ID NO: 664173 - DNA, 571 bp, Homo sapiens
aaaaaaaaacaaaataggataaggagctagataatgactacaaaagggctattttagatggagtggtgaaaaaaggctttttttttttttttttttagatacagggagcatatgtacaggtttgttacatgggtatattgcactcaggtagtgagcataatcctcaatatgtagttttcaacccaggaccccctcactttctcccccttctagcagtctccagggtctattcttcccatctttgtattgatgggtgctcaatgtttagttcccacttgatttttttttttttttgaggcagagtctcactatgtcacccagggtggagtgcagtggcacaatctcagctcactgcaacctccacctcctgggttccagccattctcatgcctcagcctcccaagtagctaggattacaggcacccaccacctagcctggataatttttgtatttttttttttttaagtagagagagggttttaccatgttggacagactggtcttsaactcctgacctcaagcaatctgcctgcctcaccacttataattaataaggattatgatctctag

SEQ ID NO: 664174 - DNA, 605 bp, Homo sapiens
tgagaaacctccaaactgctttcaaaagtggctgaactaaattacatttccaccaacactgtataagaattcctttttctccacaacttggccagtatctgttattttctgacttatataatttggttatctcattgtggctttgatttgcattctctgatgattagtgatgatgagtattttttcatgtttttttgactgcttgtatgtcttcttttgacatatctattcatgtccttagcccccatttttaaatggggttgttttgtgcttgttgatttaagttacttatagattctggatattagacttctcagatgcctagtttttttactattttatgtcattctgtstatttatgtctatttggcttcctgaagaaggtggcatttgtgcagtgaggccagtttatacttcaattgatctgtggctccttctggaatgactcactaaatcctacagctcttatttgttagctgatgttcttgagccctgctaatggcccctgcaccctgtagtttcaactgaatagtgaacataaaccctctatctttgcaagagtctatcagactgcttactaaaaaggctttctattactgagaaac

SEQ ID NO: 664175 - DNA, 480 bp, Homo sapiens
tacatgtccttaggattaatcagtgatctgaaaaacatagtgaaaaagaaactattacctttttagagctttaacaataggctctgactcagactgttttgtcctgacctttctatttgaaactgtgtctagggtaagtaaccactactttctcatgtgtaaaataaattttcattctcttttttaaaagatttgttttcagagaagtttaagttcacagaacaattgagaagaaggtatagagttcccatctactccctgccccacacatgcatagcctccctcattttcagcatcccctaccaatatgatacatttgataaaccaacattgayacatcgttatataaaccaaaaataaaattccagttccctgcccccaaccatctgaatgggccccttctctcagccaagggcattccaaagttaacctagaaaactagtttcacaccctgatgagaaaggggagccagaggcccca

SEQ ID NO: 664176 - DNA, 552 bp, Homo sapiens
attattacaaacattctgaatcatactgtatttgttacatgcaatatgaggagcaaatcaggtattatatttatagtagtagagttcttcctgatttttgaaagtggaaaaccatttctacattaaatcaatgctgtaatattttataagtagtgaacatctacaggtaattttttaaaaatatgttttgggactagtagccaaagaaattactattaaattggtatttctaaagaaaacatgtctttataaataaaatactcaaagtgcaatgtagttctggagcccagagctgtttctggaacatcataagggttcaataaatatttgtataattaaatgaattttacagatcctgaaagtgttatgtatwgtaaacaaaaagtaatatccttgttagactaaatgcttacttttcacccatatcacattgaagagtaagatcttctagaaagctatcatatctttagaactattatgattcctttgtttattactaaacattaaaataatataactgtacatagcaagccactaattaagtatcaaaga

SEQ ID NO: 664177 - DNA, 604 bp, Homo sapiens
gctagtcttgggctgtggcctatcccatgagctttgcatgtctgtatggtttgtgctgcaagcctccatgttgttttacacactgggggcatggcctgtaactgcttggcaaggctttgtttaggaatcctgccttagggaataaatttctttctggtttgatatctgcaagttttcctagccctgtctcttaaagggccccacctagcaactgggttttcttctgcctgtgtgtgtgtgtactgtgtgtaatctctgtcaaaagagctttagttaatttggcctaaagaaagacatgcacttggatctaatattttttaaagggaagttaaaagctgtggaaactttcagttgatgactttaagaaataaagagagcgctaaagactactggtgaaatgcaggtcaggtgcaaggtttgctaagtgttttgaggttacaaactgctttttgggttttgagaactattcgacttgctggcttcataagtggtgaggcctggggacatatggaactaaccacycgttaactaataaggcaaaccttggctgcagttagcacacaattaaagcaacttaccaagttttaccttaaagttcaaaatt

SEQ ID NO: 664178 - DNA, 380 bp, Homo sapiens
atcatgaatacagttattatgagcattcctgaataaggttttttttttttttcaacctttataaaaaccatttttattgggtagatacccagcattggaattagtagttcatatggtagatatatgtccacttttgtaaaaaaatttctagaccttttcmcaagtgcttgaatcattttactttcctaccaattatgtatgaaaatttcagttactccagatcatcaccaacatttggtggtgttagctttaattttaaccattgtagtgtgtgtgtagtaatattttattgcagttttcatttgtatttacctgattattaatgatattatatgttacccaaacagcaagagttagctctaggtcttgctgcttgccca

SEQ ID NO: 664179 - DNA, 584 bp, Homo sapiens
gactttctattttaaaacttggtcctggccgggcacggtggttcatkcctgtaatcccagcactttgggaggccgaggtgggcaaatcacgaggtcaggagttcaagactaacctggccaacataataaaactccatctctactaaaaatacaaaaattagccagggatagtggcgcatgtctgcagtcccagctactcggggggctaaggcaggagaatcgcttgatcccgggaggcggaggttgcagtgagtagagatcgcgccactgcacttcagcttaggcaacagagtgagacttcgtctgaaaaaacaacaacaacaaaaaacttggtcttaatgtttacacagaaacaaactttgtctattacttgtcagaccaaaattcatgtcattttccaagaccattgtcctcctctgctatcccacttaaactgattgctatcttcttgtgcagtttgtagttaaaattattaaaaattttctgggctatcagttctagtagctattgagtgactcagatagttttaatacattcacaaagtttaatgggcagatagcttttctgtattaagttgaaaaaaa

SEQ ID NO: 664180 - DNA, 582 bp, Homo sapiens
gaggtagatagtgtaaggattgggaataattgatattaatataaggagatatagaacacggaggttaccaatgttgagatcaagcatatcccaaaagaactatatacttcctgcgtaacagagggccatggctagaagaagaaattggcagatctacattggaatacatttaaccagggaggtgaaagacctctacaagaagaactacaaaacacagttgaaagacatcgtacatgacaaaaataattggaaaaacctcccatgttcatgggtagggagaatcaatatcattaaaatgaactatactgcccaaatctacagattgcatacaattcctatcaaattaccatatcatttttgacaaaattagaaaaaacaattgtaaaattcatatggaattgaaaaatagcctgaatgcccaaagcgatcctaagcaaaaataataaagctggaggcatgacattatctgacttcaaactatatatactacaaggccatagtaaccaaagcaacatgatattgatacaaaaatggacacatagatcaatgtaacaggrtagagaacccagaaataaagccata

SEQ ID NO: 664181 - DNA, 593 bp, Homo sapiens
gacaagggactaatagtcagaatatacaaagggctcaaacaactccataggaaaacaattaataatcttatcaaaaaatgggcaaaagatgtgaatagtcagttttcaaamcacaaatggcaaacaggcatatgaaaaggtgcccaacataattgatcatcagagaaatgcaaatcaaaattaaaatgagatagcctctcaccccagttaaaatggcttataactaaaagtcaggcaataacaaatgttggtgagatgtggagaaaagagaacccgtgtacactttttgtggaaatgcaaattagtataaccactatggaaaacagtttggcggttcctcaaaaaactaaaaattgagctactgtatgatccagcaatcccactgctaggtatatacccaaaagaaaggaaatgagtatattgaagagatatctgtacccccatgtttattgcagcactgttcacaatagccatgatttggagactacctaagtgaacatcaacagatgaatggataaagaaaatctggtatttatacacaatggagtactattcatccataaaaaagaatgagatcctgtcatttgcaacaa

SEQ ID NO: 664182 - DNA, 591 bp, Homo sapiens
acataccataagagaacctagcactcattcgcaatgtaaatccaggtagaccagtgatatgtttagcttggtaagaattggtgcaggaattggggtcaatggttctgtactgttagaggaggttcattggcaaatacatttgagaatctgggaaacatttccctggagagccttttyttctttttttaaagacatcatgacactcttacaaatacctctcctaagttctaaagagacaagcacaagtatactgcataagccataatgactgaaaaaatataaaagacaaggtgaaaggaaaataaggaagaataataaaatggggctataagagagagaactagagatatgtgctataaaattctcacagtgtctgaaggtgggacaccacatcaattttgaatttcctaatgagccaaaaccaagagggaatcaggacaagttgcaagattcaaattgtccatatgataacatataccagctcgaggggaggccgtggccttgaagtctaaaggaagttcccccatagttgttgcaagggagacagaatgaaacagtatgcaacaagattttcttacaacatttttatag

SEQ ID NO: 664183 - DNA, 591 bp, Homo sapiens
acataccataagagaacctagcactcattcgcaatgtaaatccaggtagaccagtgatatgtttagcttggtaagaattggtgcaggaattggggtcaatggttctgtactgttagaggaggttcattggcaaatacatttgagaatctgggaaacatttccctggagagcctttttttctttttttaaaracatcatgacactcttacaaatacctctcctaagttctaaagagacaagcacaagtatactgcataagccataatgactgaaaaaatataaaagacaaggtgaaaggaaaataaggaagaataataaaatggggctataagagagagaactagagatatgtgctataaaattctcacagtgtctgaaggtgggacaccacatcaattttgaatttcctaatgagccaaaaccaagagggaatcaggacaagttgcaagattcaaattgtccatatgataacatataccagctcgaggggaggccgtggccttgaagtctaaaggaagttcccccatagttgttgcaagggagacagaatgaaacagtatgcaacaagattttcttacaacatttttatag

SEQ ID NO: 664184 - DNA, 591 bp, Homo sapiens
acataccataagagaacctagcactcattcgcaatgtaaatccaggtagaccagtgatatgtttagcttggtaagaattggtgcaggaattggggtcaatggttctgtactgttagaggaggttcattggcaaatacatttgagaatctgggaaacatttccctggagagcctttttttctttttttaaagacatcatgacactcttacaaatacctctcctaagttctaaagagacaagcacaagtatactgcataagccataatgactgaaaaaatataaaagacaaggtgaaaggaaaataaggaagaataataaaatggggctataagagagagaactagagatatgtgctataaaattctcacagtgtctgaaggtgggacaccacatcaattttgaatttcctaatgagccaaaaccaagagggaatcaggacaagttgcaagattcaaattgtccatatgataacatataccagctcgaggggaggcygtggccttgaagtctaaaggaagttcccccatagttgttgcaagggagacagaatgaaacagtatgcaacaagattttcttacaacatttttatag

SEQ ID NO: 664185 - DNA, 622 bp, Homo sapiens
taaaatagccagtcggaattagctaagactgtgcagtccagccctagccagtaggggaacaacacagcagtaggggctacctgcgtcaggaataagagctccttcccttcccctgtccaggtgtgttctcgccattaccccatttgtgagtcacacccttctatagaagtaaaaattgccttgctgagagaattaaatttacattcaagtgctattccttcacggcactgaggagcaagcattttgcatttccagcagtgtcataaatatttaataagtgaggagggaaaaaagggaaaaaaattaaagaaagaaagaaaatagagattaaaaaagagaaaaaaacaagctrcctgtgttaggctgattcatttcaaaggcagtaacaggcaaagtttcgataacgttatctaagagccacagctcagaggaacgtgctctgaagactctcccaacactccctcaacataaggatgtgaagagataagtgttcctatctctcctttagtgtaagtaaacttcccccttgaatcccatcccctctgctatgtaaactataccttgctccttgctctgtaagttttatgagtttctgtttttcctatagttaatgattgtaggt

SEQ ID NO: 664186 - DNA, 622 bp, Homo sapiens
taaaatagccagtcggaattagctaagactgtgcagtccagccctagccagtaggggaacaacacagcagtaggggctacctgcgtcaggaataagagctccttcccttcccctgtccaggtgtgttctcgccattaccccatttgtgagtcacacccttctatagaagtaaaaattgccttgctgagagaattaaatttacattcaagtgctattccttcacggcactgaggagcaagcattttgcatttccagcagtgtcataaatatttaataagtgaggagggaaaaaagggaaaaaaattaaagaaagaaagaaaatagagattaaaaaagagaaaaaaacaagctacctgtgttaggctgattcatttcaaaggcagtaacaggcaaagtttcgataacgttatctaagagccacagctcagaggaacgtgctctgaagactctcccaacactccctcaacataaggatgtgaagagatragtgttcctatctctcctttagtgtaagtaaacttcccccttgaatcccatcccctctgctatgtaaactataccttgctccttgctctgtaagttttatgagtttctgtttttcctatagttaatgattgtaggt

SEQ ID NO: 664187 - DNA, 456 bp, Homo sapiens
gctaggtcatatggtttgtatattttcaacatkattaagaaactggcaaactgttttctacagtggttatactactattttacattctacttagcaatgtatcagaattttagttctatcaattggtattgtcagtcttttaaaataagtgtgtactgttatttcattattgttttaatttacattttcctggtgactaatgatgttgagtatattttcatggcttattggccagttgtatatcttcatttgtaaaatgaatgttcaaatttactttacacagactaattatgagaaccctgactagagaactagagaactagataaccctctctagagaaccttgactaatacagattttggttgcaggggtggttttagaggaacagagtattaaggatggggtcctttcgttggttttagggtttctggaggtgactgtttaatatcattaga

SEQ ID NO: 664188 - DNA, 395 bp, Homo sapiens
actgttttctacagtggttatactactattttacattctacttagcaatgtatcagaattttagttctatcaattggtattgwcagtcttttaaaataagtgtgtactgttatttcattattgttttaatttacattttcctggtgactaatgatgttgagtatattttcatggcttattggccagttgtatatcttcatttgtaaaatgaatgttcaaatttactttacacagactaattatgagaaccctgactagagaactagagaactagataaccctctctagagaaccttgactaatacagattttggttgcaggggtggttttagaggaacagagtattaaggatggggtcctttcgttggttttagggtttctggaggtgactgttt

SEQ ID NO: 664189 - DNA, 456 bp, Homo sapiens
gctaggtcatatggtttgtatattttcaacatgattaagaaactggcaaactgttttctacagtggttatactactattttacattctacttagcaatgtatcagaattttagttctatcaattggtattgtcagtcttttaaaataagtgtgtactgttatttcattattgttttaatttacattttcctggtractaatgatgttgagtatattttcatggcttattggccagttgtatatcttcatttgtaaaatgaatgttcaaatttactttacacagactaattatgagaaccctgactagagaactagagaactagataaccctctctagagaaccttgactaatacagattttggttgcaggggtggttttagaggaacagagtattaaggatggggtcctttcgttggttttagggtttctggaggtgactgtttaatatcattaga

SEQ ID NO: 664190 - DNA, 456 bp, Homo sapiens
gctaggtcatatggtttgtatattttcaacatgattaagaaactggcaaactgttttctacagtggttatactactattttacattctacttagcaatgtatcagaattttagttctatcaattggtattgtcagtcttttaaaataagtgtgtactgttatttcattattgttttaatttacattttcctggtgactaatgatgttgagtatattttcatggcttattggccagttgtatatcttcatttgtaaaatgaatgttcaaatttactttacacagactaattatgagaaccctgactagagaactagagaactagataaccctctctagagaaccttgactaatacagattttggttgcaggggtggttttagaggaacagagtattaaggatggrgtcctttcgttggttttagggtttctggaggtgactgtttaatatcattaga

SEQ ID NO: 664191 - DNA, 471 bp, Homo sapiens
ttgcagtgagctgagatcgtgctactgaattccagcctgggtgacagagtgagactccatctcaaaaatacaatacaatacaatacaatacaatacaatacaatacaatacaatacaatacataaaaaaataaaatattagaagctttataaaaagtcattttgtttctaaagcaactttgcattttaaagatccatctcttttgtatccatctgaaataaattttgcactctctgattcatttcctatttcatgatgatacttttcctttctaaaactttctcttaatatttttagaattattaatatctttcatttctttgctgtatgccatttttctgatttaattaaaataaacttttccattccctgtttcatctaatttcttccaaaagttctgggaaaatatttcctcccatgaaargtatctacatttttaatagatttaacttcagcatattcaatgcttat

SEQ ID NO: 664192 - DNA, 580 bp, Homo sapiens
atgtatttaaattggtttgcattatgscagagaaataacaggcaattaataaagcttattatttttaatatttttatagtaataagttcatatgtaacttaaataaactgctaattatttaactaaatttccagagagcctagggagagagcaataatcttactgtaagtcagccctaaaattgcagtcataaacgtgaaggatcaacctgtttttattttgtacatttcttttaaatcaattaaatttgatgaattttgaatagaaaacagatagttgacaagaaaggagctatcatatcactgttaatgaatgcatgggtgcaaaaggagtttgatgtatcatagtgaagacgtaagtttgttcccggaccaaaccgagggtcaggctgcttattctcacagcccaataacgagatgcagatgaactgggaaagaagggaggttttcatttctgtaactggttacagggagaaggcctggaaattattagcagaccaactcaaaattacaaattccagagcttgtatatcttctaagcttcatgtctacatgtaagtgtgcattaatctaaagacata

SEQ ID NO: 664193 - DNA, 580 bp, Homo sapiens
atgtatttaaattggtttgcattatggyagagaaataacaggcaattaataaagcttattatttttaatatttttatagtaataagttcatatgtaacttaaataaactgctaattatttaactaaatttccagagagcctagggagagagcaataatcttactgtaagtcagccctaaaattgcagtcataaacgtgaaggatcaacctgtttttattttgtacatttcttttaaatcaattaaatttgatgaattttgaatagaaaacagatagttgacaagaaaggagctatcatatcactgttaatgaatgcatgggtgcaaaaggagtttgatgtatcatagtgaagacgtaagtttgttcccggaccaaaccgagggtcaggctgcttattctcacagcccaataacgagatgcagatgaactgggaaagaagggaggttttcatttctgtaactggttacagggagaaggcctggaaattattagcagaccaactcaaaattacaaattccagagcttgtatatcttctaagcttcatgtctacatgtaagtgtgcattaatctaaagacata

SEQ ID NO: 664194 - DNA, 580 bp, Homo sapiens
atgtatttaaattggtttgcattatggcagagaaataacaggcaattaataaagcttattatttttaatatttttatagtaataagttcatatgtaacttaaataaactgctaattatttaactaaatttccagagagcctagggagagagcaataatcttactgtaagtcagccctaaaattgcagtcataaacgtgaaggatcaacctgtttttattttgtacatttcttttaaatcaattaaatttgatgaattttgaatagaaaacagatagttgacaagaaaggagctatcatatcactgttaatgaatgcatgrgtgcaaaaggagtttgatgtatcatagtgaagacgtaagtttgttcccggaccaaaccgagggtcaggctgcttattctcacagcccaataacgagatgcagatgaactgggaaagaagggaggttttcatttctgtaactggttacagggagaaggcctggaaattattagcagaccaactcaaaattacaaattccagagcttgtatatcttctaagcttcatgtctacatgtaagtgtgcattaatctaaagacata

SEQ ID NO: 664195 - DNA, 582 bp, Homo sapiens
tcattgtactaactaccctcgatcccccatcccctccctacaactttgtaaatagtcactttgtaaacaaaccttcctcaaatcttctaaatttggcctgccttcttgttcttatcaggaccataaatgctataacatccaagtagaaccattctccctctctgggaagtggctggggttaaaygcattgctcatgttcatgtctctttctcctttggaatggctaatcagaaactcaaaagaatgcagccacttgtgtctcacccatctgtgccctagaagctacctccctgtttccagtcttcctgcctttgtttcaagttgtcccacctttccagactgaaccaatgtacttcttacatatattgtctcatgtcttcctaaaatgtataaaatgtataaagccaagctgtgccccagctaccttgggcacatgtcgtcaggacttcctgaggctgcgttatgggtgcgtcctcaaccttggaaaaataaactttctaaattaactgagacctgtctcagattttctgggttcacatacttttctctgcagctgagtcagtcctcagagtattgacctca

SEQ ID NO: 664196 - DNA, 401 bp, Homo sapiens
tatggttatgctgaccttagccattacactgatgccctttggatttaggtggttttttattaakgtgaactttagaatgaggggcttgtccaagatggcaatgctcctgctctgttagtaagtgcttgatcaatattgaataagttaacaaactgtgatataaaatctgtgataagacaattctcacattcagggaagagtatgagggttcaaaggtttagagggagttgggtagggtagtagtggaaagtgaaagtgagatacaaaagaggaatttaggtgcaggaactatcaataaattaccaacttcacagttttgtctagacctgcccatgctgaacttttaggaaaaaaactagagacatcatgataaagctggagattagcatatttagaggatc

SEQ ID NO: 664197 - DNA, 593 bp, Homo sapiens
gcttattgtcctatgagaaatagaagaaccagcaatagaagagacccagatcaagtttgactgaaaggcaaacaccattcccaactggctttaccatctggtaagggtttgtcaataaaaatatttgggtagcagcaatttttccaaattcttatttatctagacttccagaaaaagccagacaaaatacataagggggcatttaccccctccctcaactaataatttaaaatcaaaatcacatttaaggctcaatggagttgttttttatgtgttcattttgttttgttttattttttgaatttctcccagaaagcatcgtgttatttaatagttatacaaatcatgcccaggcctgaaagattcaaaatactacaaagtttatctgcttgtttctgagtgagtctgaggtatctttcttagcaaactagcatgccatcactaataaatgcttagttttcacagctgacattgctcatgagatggaaaataaaaacataatgaaaatgtttataagcaacttaaggaacctgcgacatggcattttgygaagccatcttttagaagtaaaaagaactttcttcataattaca

SEQ ID NO: 664198 - DNA, 565 bp, Homo sapiens
atcctgatttaatcattacacgatacatacatgtatcagaacataacattgtgccccatacatatgtagacttattacatgtatttttaaaattattattggctatagtcaycctgttgtgttatcaaatgcttggtcttattgattctttctattttctgtacccattaaccatccctacttcccctccaaccttaccctcactaccctttccagcctctggtaactatccttctactctatatttattgcccattttttaattaggttatttgtttttttgctattcagttgtttgagttcttcattaattctggatattaatctctttttacacgtacagtttgcaactaagttctctcattcttctagtgcctttatagttttgggttttacatttatgtctttcattttaattgattttttgtatgcagtgagaaataggagtctagtttcattattctgaatgtggatatccagtcttcccaacaacatttatagaagaaactatcctttccctaatagttgttcttggtgcctttgtctaaaatcagtttgctgtaaa

SEQ ID NO: 664199 - DNA, 278 bp, Homo sapiens
ggcagaggttgcagtgagctgagatcctgccattgcactccagcctgggtgacagagcaagactccatctcaaaaacaaaaaacaaacaaacaaaacaacagaaacaaacaaacaaacaaatggcttgaattagatataagaaagactaagttaatttatccyagtctttttttttaaaccagggcctggctctgtttcccaggttggagtgcaatggcatgatcttggctcactgcaacttctgcttcctgggctcaaattatcctcctacctaagc

SEQ ID NO: 664200 - DNA, 525 bp, Homo sapiens
gtagggaagaaaaaataaaggaggaaagaaattaaaacaacttacacttaacttgtgttagcttacataacaaaaagctgaaagtaggcctatccaactgaagataaacataaatagatttgaggaaatggaagaaagatgagtatttcagaaaacagaaggtcttgagtgctgctaagaatgatagtatcatggacacagatgagaagtttgggagaggaggaaatttttttgatcaatacattatctttgatacttctatgttcaataaataattctgatatacattaagttttaaaagcagtgcttgagaatattttttcacrgagcaggagtgagaagcacttgtactgggctggcagtgccaaatgccccttatcacccccgagaatattttttcacaagagtaacactacatctttgaactctggtttttcataatgtgttcataaagtgttcatttttccctcaaagcaaacaaattaaggtgtgcttcctttgtaaaataaattataaaacttggtt

SEQ ID NO: 664201 - DNA, 585 bp, Homo sapiens
aggaaatttttttgatcaatacattatctttgatacttctatgttcaataaataattctgatatacattaagttttaaaagcagtgcttgagaatattttttcacggagcaggagtgagaagcacttgtactgggctggcagtgccaaatgccccttatcacccccgagaatattttttcacaagagtaacactacatctttgaactctggtttttcataatgtgttcawaaagtgttcatttttccctcaaagcaaacaaattaaggtgtgcttcctttgtaaaataaattataaaacttggttcatctatcatgctatcttgtacagttcttattatctagtgcaaccaagtgtcaatagtacagacatattgaatgttcttaatgatgccctgaggctcagccgtattgacaaccacatctctaaccaccagctaataaactgatcatgatttaattaaatttgtatattaaggatgaatggccctctttgctattgggaaggtactttcatttactcaacaggcaatatttagagactatgatgcactggagctcaaagacaaattaagtaagactattta

SEQ ID NO: 664202 - DNA, 558 bp, Homo sapiens
tacattaagttttaaaagcagtgcttgagaatattttttcacggagcaggagtgagaagcacttgtactgggctggcagtgccaaatgccccttatcacccccgagaatattttttcacaagagtaacactacatctttgaactctggtttttcataatgtgttcataaagtgttcatttttccctcaaagcaaacaaattaaggtgtgcttcctttgtaaawtaaattataaaacttggttcatctatcatgctatcttgtacagttcttattatctagtgcaaccaagtgtcaatagtacagacatattgaatgttcttaatgatgccctgaggctcagccgtattgacaaccacatctctaaccaccagctaataaactgatcatgatttaattaaatttgtatattaaggatgaatggccctctttgctattgggaaggtactttcatttactcaacaggcaatatttagagactatgatgcactggagctcaaagacaaattaagtaagactatttacatacagagtacagacctacagaccaggaaacaaga

SEQ ID NO: 664203 - DNA, 538 bp, Homo sapiens
gtgctgctaagaatgatagtatcatggacacagatgagaagtttgggagaggaggaaatttttttgatcaatacattatctttgatacttctatgttcaataaataattctgatatacattaagttttaaaagcagtgcttgagaatattttttcacggagcaggagtgagaagcacttgtactgggctggcagtgccaaatgccccttatcacccccgagaatattttttcacaagagtaacactacatctttgaactctggtttttcataatgtgttcataaagtgttcatttttccctcaaagcaaacaaattaaggtgtgcttcctttgtaaaataaattataaaacttggttcatctatcatgctatcttgtacagttcttattatctagtgcaaccaagtgtcaatagtacagamatattgaatgttcttaatgatgccctgaggctcagccgtattgacaaccacatctctaaccaccagctaataaactgatcatgatttaattaaatttgtatattaaggatgaatggc

SEQ ID NO: 664204 - DNA, 552 bp, Homo sapiens
tatttttttgtagaggctatgtcttgctatgttgccaagcctggtctggaaatcctgtgctcaagtgatccttatgcctcagccttccaaartgcggtggttataggtatgagccactgtgcctggccactgcatggatttttagaagtgtctcatataccaactcaaattccctaatccaccccttcagttgcggtctgtatattgatacacatatgttgttcacttaactagtcagggttatctagagaaacagaagcaattatatatattatatataattatgaaatatatttatattatatatcatatataaatatatgttatacactaaagagagagaaagaaagaggagatttattatggaaatggactcatacaactctagaggcctgaaaatctcacaatctgccatctgtcagcttgagaatcaggaaagcctgtagtgtaattcagtcagagtttaaaatcctgagaccctggggtcggggcgggggcaacataggagtgggggtgaggtaggcagctctggtgtaagccccagcatccaaa

SEQ ID NO: 664205 - DNA, 577 bp, Homo sapiens
ttgctatgttgccaagcctggtctggaaatcctgtgctcaagtgatccttatgcctcagccttccaaagtgcggtggttataggtatgagccactgtgcctggccactgcatggatttttagaagtgtctcatataccaactcaaattcsctaatccaccccttcagttgcggtctgtatattgatacacatatgttgttcacttaactagtcagggttatctagagaaacagaagcaattatatatattatatataattatgaaatatatttatattatatatcatatataaatatatgttatacactaaagagagagaaagaaagaggagatttattatggaaatggactcatacaactctagaggcctgaaaatctcacaatctgccatctgtcagcttgagaatcaggaaagcctgtagtgtaattcagtcagagtttaaaatcctgagaccctggggtcggggcgggggcaacataggagtgggggtgaggtaggcagctctggtgtaagccccagcatccaaagacctgagaatcaggaactccaatgtctaagtggaagagaagacaaat

SEQ ID NO: 664206 - DNA, 552 bp, Homo sapiens
tatttttttgtagaggctatgtcttgctatgttgccaagcctggtctggaaatcctgtgctcaagtgatccttatgcctcagccttccaaagtgcggtggttataggtatgagccactgtgcctggccactgcatggatttttagaagtgtctcatataccaactcaaattccctaatccaccccttcagttgcggtctgtatattgatacacatatgttgytcacttaactagtcagggttatctagagaaacagaagcaattatatatattatatataattatgaaatatatttatattatatatcatatataaatatatgttatacactaaagagagagaaagaaagaggagatttattatggaaatggactcatacaactctagaggcctgaaaatctcacaatctgccatctgtcagcttgagaatcaggaaagcctgtagtgtaattcagtcagagtttaaaatcctgagaccctggggtcggggcgggggcaacataggagtgggggtgaggtaggcagctctggtgtaagccccagcatccaaa

SEQ ID NO: 664207 - DNA, 577 bp, Homo sapiens
ttgctatgttgccaagcctggtctggaaatcctgtgctcaagtgatccttatgcctcagccttccaaagtgcggtggttataggtatgagccactgtgcctggccactgcatggatttttagaagtgtctcatataccaactcaaattccctaatccaccccttcagttgcggtctgtatattgatacacatatgttgttcacttaactagtcagggttatctasagaaacagaagcaattatatatattatatataattatgaaatatatttatattatatatcatatataaatatatgttatacactaaagagagagaaagaaagaggagatttattatggaaatggactcatacaactctagaggcctgaaaatctcacaatctgccatctgtcagcttgagaatcaggaaagcctgtagtgtaattcagtcagagtttaaaatcctgagaccctggggtcggggcgggggcaacataggagtgggggtgaggtaggcagctctggtgtaagccccagcatccaaagacctgagaatcaggaactccaatgtctaagtggaagagaagacaaat

SEQ ID NO: 664208 - DNA, 552 bp, Homo sapiens
tatttttttgtagaggctatgtcttgctatgttgccaagcctggtctggaaatcctgtgctcaagtgatccttatgcctcagccttccaaagtgcggtggttataggtatgagccactgtgcctggccactgcatggatttttagaagtgtctcatataccaactcaaattccctaatccaccccttcagttgcggtctgtatattgatacacatatgttgttcacttaactagtcagggttatctagagaaacagaagcaattatatatattatatataattatgaaatatatttatattatatatcatatataaatatatgttatacactaaagagagagaaagaaagaggagatttattatggaaatggactcatacaactctagaggcctgaaaatctcacaatctgccatctgtmagcttgagaatcaggaaagcctgtagtgtaattcagtcagagtttaaaatcctgagaccctggggtcggggcgggggcaacataggagtgggggtgaggtaggcagctctggtgtaagccccagcatccaaa

SEQ ID NO: 664209 - DNA, 600 bp, Homo sapiens
aattttgataagagaaaatgtcttttggggaagaaaaatgtagaagtagagatattttcttgactaaaactatgaaagttttttttcctgttgtttgtttgatgttattgttgtcttaatataataatttctagrtaaaagttactagcaaatatgttaggaatgtatatatttcagtacagtgggcaaaaaaacatgttctgatgacttctaatgattttctgataaagaactggtttttcacgttgtggaaatttagtgatcagaaagaggtcaacatgtctgaaatactttagtgatggattttgattcattttaaataaaagagatcactaaaatttttagtcatagaacattaatagaattcattggcacttcgaagacagccataatgctgtcattgaaacccccattagtagcttcaaggatattgaggtgacatggtgatccaggtgacatttgaaagttgctttttcctttcctgcaggaagataaggcactagtgctcagggagtatagtatggtttgaattaagaagtctaaatgccgagaagagaatccaaatctgaaatttccaaatgacagcttagatactaagtg

SEQ ID NO: 664210 - DNA, 564 bp, Homo sapiens
tgaatgtatatatgagtgtatgtatgtatgtatgtatgtatgtatgtatctaaagatatttagttttagaaattggctcacataattgtggggtttgacaagcctgaaatttttgaggtaggccagcacactggaactcatgaaagagttgatgtttcagtctttagcccaaaatgtgcagggcaagtgagcaggctggaaactcagtcagrgtttctgttttgcagtcttgaggcaaaattctttttttttttttcagagaaattgtctttgcttttaaggtcttcaactgattaaatgaggcccatcacattatgactagtaatctgctttacttaacatcttctgatttaaatgttaatcacatctaaaaattaccttaatagcaatgtattagtttgttttcacactgctaggcctcctaggcctttaggcctgtgatgggaggagctgccacaaaggtctctgacatgccctggggacgttttccccattgtgttgtgattaacatttggctccttgttaattatgcaaatatctgcagtcagcttgactttcccccag

SEQ ID NO: 664211 - DNA, 564 bp, Homo sapiens
tgaatgtatatatgagtgtatgtatgtatgtatgtatgtatgtatgtatctaaagatatttagttttagaaattggctcacataattgtggggtttgacaagcctgaaatttttgaggtaggccagcacactggaactcatgaaagagttgatgtttcagtctttagcccaaaatgtgcagggcaagtgagcaggctggaaactcagtcagggtttctgttttgcagtcttgaggcaaaattctttttttttttttcagagaaattgtctttgcttttaaggtcttcaactgattaaatgaggcccatcacattatgrctagtaatctgctttacttaacatcttctgatttaaatgttaatcacatctaaaaattaccttaatagcaatgtattagtttgttttcacactgctaggcctcctaggcctttaggcctgtgatgggaggagctgccacaaaggtctctgacatgccctggggacgttttccccattgtgttgtgattaacatttggctccttgttaattatgcaaatatctgcagtcagcttgactttcccccag

SEQ ID NO: 664212 - DNA, 564 bp, Homo sapiens
tgaatgtatatatgagtgtatgtatgtatgtatgtatgtatgtatgtatctaaagatatttagttttagaaattggctcacataattgtggggtttgacaagcctgaaatttttgaggtaggccagcacactggaactcatgaaagagttgatgtttcagtctttagcccaaaatgtgcagggcaagtgagcaggctggaaactcagtcagggtttctgttttgcagtcttgaggcaaaattctttttttttttttcagagaaattgtctttgcttttaaggtcttcaactgattaaatgaggcccatcacattatgactagtaatctgctttacttaacrtcttctgatttaaatgttaatcacatctaaaaattaccttaatagcaatgtattagtttgttttcacactgctaggcctcctaggcctttaggcctgtgatgggaggagctgccacaaaggtctctgacatgccctggggacgttttccccattgtgttgtgattaacatttggctccttgttaattatgcaaatatctgcagtcagcttgactttcccccag

SEQ ID NO: 664213 - DNA, 534 bp, Homo sapiens
gaataactctctcagaattagagtccatacagctctgatcttttcttcttttatgctgcttgtttttccaaggcttttagtgatgcaaacttatcattactttaacaattccagctttccttytatgtcttggttttacacgacaagaagcccagaaactgaacttgcttactcagctcccgaggttgaaggtggcaagaaggtggtaagaatcctagacaggctaggcctggtggctcacgcctataatcctaacaatttgggaggccaaggcaggaggatcgcttgaggccaggagttcgagactagcctggggaacatagtgagaccctgtctctacaaaaaaaaaaaagaaaaaattagctgggtgtggtagtgcacacctgtggtcccagctactcaggaggccaagttgggaggattgcttgagcccaggaggtggaggctacagtgagcaatgatggcaccacactccaacctgggcgacacagtgagactctgtctcaaaacaaaacaaaacaaaacaaaacaaaa

SEQ ID NO: 664214 - DNA, 536 bp, Homo sapiens
ttggcatgttgtctgctgcagttatttgccagcgacacactcttcccgtccaaactaacttctctgcctcaaggacagggagactctgcctttcaacctgagagaaaccaggactctcagctttaatgaaaattggacttagggtggggcagtggagacttttcacagctattgtttagctgatgaagcagatgcttctccatctttggagcctgtcttcattacctgtggacctcatctttatcaacccagagcacacttgcgtctctctattttggctaaacaccaaacagctgaggctggtactgtaaaactttccctccaaatgccccccctcgtcttcctctattagagatctggatcacaaccctcaaaaaccatgtcccttatgccacctgagtagatggtttgatgattaattaggcacagatgtgacactggggggktctcacaatggcctgtgggtcacatgctactttccttttcattttcatcagcaacagctgccttaaagccagttaagactgtggtcctag

SEQ ID NO: 664215 - DNA, 573 bp, Homo sapiens
cttaaatttaatatatagcatgcttaacagtcatgatggtgggctggctcctgaggaagaaagaataaacacattttttggaaatggtcagaaatcaggaattcagctacagtggactttgagaattgatctagacacatttcttcccctaggctaggagggtctcagttcacaatcyccttgttttctgggctgtgtttagattatttccctaactttctctaaacgccttctggatttttttttttaaatcaacttgttgatgaaaagaatcaaactctgtaaaatatttgaagagatttattctgagccaaatatgagtgacaaatggcctgtgacatagccctcaggagatctgagaacatgtgcccaaggtggtcaggccacaacttggtcttatacattttagggagacataaggcattaatcaatgcatgtaagatgtacattgattcagcctgaaaaggcaggacacctgaaagcaggggcttccaagtcacaggcagttcaaagattttctgattggcaattgattgaaagaattattatcagtaggaagcaatgattgggtta

SEQ ID NO: 664216 - DNA, 616 bp, Homo sapiens
agtgtggtcttgcccaggagaccttgttttatctcacttccaggcctttatcacccagtacctgtattccatatttgcttctaaataagttctttgtctccactatcttrcctcttaagaaccttttttaaattttttttaaatctcaagtaatacctttgcatttcctgctcatggttatttctgattcttgctgttgacagtactaaaaccctttattaactgattgatcattcattcattctggaataccagttaagagctctggaatcggggtatttgtgttcatatttagatctgccaggtactggccatgtgcccttgggtaagttaactttcctaaacctcatctgaaaagcaaagataataatagtgcttaacttgtaggtttattgtgaggattaaatataatcatccatataaagtagtttagtgcccagaatattgcacataaccagtaaatggttaaaaaataattaattccacaaatttttattaaggacatactggtgccaggtactgtgctggttgagattaatgctgactgaacaacagagtactttgttctagagttcataactttctcagtaaaaacctgttatccttagccggacat

SEQ ID NO: 664217 - DNA, 524 bp, Homo sapiens
cctcttcttgctctagactttgctggattctagggaacatggcagctgctataaccatggttcttgggtgggtagggctggggtttcactttgagattctctatcccccatgtttaaacactttccttgtcatttrtgaatgacaaaaagcagacttccagtagagccagccattgaacaggcatgcacccacctgtcccgaccttctcccacaatcatcccacctccctacttggttggaaccttccctctgctgggcttcaaatccccagctgcagcccttccctagcccctttatttttctgttgtttttgccacttccctgaatattgtggtatcatgccaagccttccatcccattctttagctattaagttgttggctatattacacagtggattttgattcggatcagttagagctaatagcaattttcagtaaaatattaaccaaacacacacaaaagtcgctcgtgtggctccatcctctccttcaataggattaatcaagttagctatttactc

SEQ ID NO: 664218 - DNA, 592 bp, Homo sapiens
tggccaagtaaggaccaaccgggaacaactgaggaaaaagtctctgagcacttatcatgactaagacaagataggatccagaatattctcacatagatcatcagatcacattgggcctgtgaaacccagattccactgagacctacttcttacacactggataatcatgtgatcaactagagctccttcctttaaatctgtgggtyctttggaacatttcctggcaccatgaaacgggatcctgagaggaacatgggcaatggggctggagctgtcctgcaggctctctcagcttggggactggcccttgttgctcagtcaaggtgcacaggatagtccttcaagtcttttgttggacttggccagctggccctgtcgcccagcagctttagtctctattcggaggccatgggtctaatgcgttgtgaccggccttttctggcctgaggtcatctcctgggcacccttgcctttctcccctcttcatgttcatgtcctaggttaccaaataatttagatcagtagttcccaaacctggctgcatatcagaagcacctgggcagtgagttaataacagattcctgagccctat

SEQ ID NO: 664219 - DNA, 515 bp, Homo sapiens
acagaaatcatagtcctcatgctatgtgaagaaagaaaatcgggaccagcatccaagtttyttcatgtccagtccagagcactttgtgtctcaaagccacccttaaggaagcagaggctcagtgagttgggatggtcaagtccaccacttattgaacactcactattatattatctaatttaatgctaacagtagtattgtggggtagatttcaatattcctattttaaagaagagaaaacaggctcattgaaattgtcacttgcctaaggtcacaaagctttgttttctagttattcatacaaatttatggggcacatgagaaattttgttccgtgtatataatgcataatgatcaagtcagggttttcagggtgtcgaagtacaatgcatttttgttaagtatagtcacactactctgctatcaaacattgaatttattccttctgttttactactgtatgtttgtaccctttgacccagttctcttcttcctcctcgctcaccccattcatc

SEQ ID NO: 664220 - DNA, 592 bp, Homo sapiens
gtgcttttaaaaaacaacaaaaaaaggcaagtcaataccaagaaccaagcatactcctatcagaggcaacagcgggggcacagggagtgtagcccacccagtggttagtcagataacatgggagccaccatccrcttctccacttgccctctggtgcgtgccagccttggtgccagggcggcagggccctgacgcatgtggagagtcagacagtttcactggctcccactggctcttcaggccgaagtccaggcagaagttggccttgtggggttcctgtcttcctgccaaaccatggcactcccgggacactgctagaacgctggccaaatcttgcatgagaagtcacctccattacagtctcctcaatgtcgggggtcagactacaggaaaccccttttatcagattttatggagtctgtacactagccaaggaaagtaagagaaagaaaaagaaagcaacttgtttaacctcacctaatagaaaggaaaggattctccaaagtagttcatctgggaatgaagcccaacatccctaaatctcagctcagtttactagtttttcatttaccagtggtttttagaaacttaa

SEQ ID NO: 664221 - DNA, 592 bp, Homo sapiens
gtgcttttaaaaaacaacaaaaaaaggcaagtcaataccaagaaccaagcatactcctatcagaggcaacagcgggggcacagggagtgtagcccacccagtggttagtcagataacatgggagccaccatccgcttctccacttgccctctggtgcgtgccagccttggtgccagggcggcagggccctgacgcatgtggagagtcagacagtttcactggctcccactggctcytcaggccgaagtccaggcagaagttggccttgtggggttcctgtcttcctgccaaaccatggcactcccgggacactgctagaacgctggccaaatcttgcatgagaagtcacctccattacagtctcctcaatgtcgggggtcagactacaggaaaccccttttatcagattttatggagtctgtacactagccaaggaaagtaagagaaagaaaaagaaagcaacttgtttaacctcacctaatagaaaggaaaggattctccaaagtagttcatctgggaatgaagcccaacatccctaaatctcagctcagtttactagtttttcatttaccagtggtttttagaaacttaa

SEQ ID NO: 664222 - DNA, 613 bp, Homo sapiens
catctcaaaaaaaaagaaaagaaaagaaaaaatcatatgtataaaagcaaaaatatgtcaacatttggaataagccttaataaatttaattgtagcattgcaattattaagcctattcagaagcatagaaaaatatttattagttaataacaagttattttatgttgccacattattgtatctttaattctttttataacaaattgggacataagtaactacctaaacaagtaataaactatgaagtcacagtagcaaaacaggaaatagcatgactatcctattgtgtcgtcatagaaacatacatgtttttggaaagcagtatatacatactcaattcaacaaatgataatggaatactatatatcacacactctgctaggccgggagggtgctagactgtggcagaggctattggctactgaccaaaatctatataccctttttcttaggcacagagctagaatacatttgcagttaggtrgacatgtgactaagttccagccacatggaatgggaacagaagtcttgtgtgccactcccaggcctggcccataatgccctcccattctcactcctctgtactctttctcccttccacctggctgtgatg

SEQ ID NO: 664223 - DNA, 592 bp, Homo sapiens
ccccttcccccaaagccagtggcttttgtcctgacctagaatagggtttgtggggactgtacctgagccgggcagtctgcaatttccaaattgacaagaagagactggaagataaagagcatgttcttacaggtgaagagcaattttgcaacttttcaaggcgacacccaggagaaagcttgcctgctaccaactgctgcagagtctgggcagaattcctctagaaagaaaaagaaagtctttcaccccccmcccccttccttgtctgcctctctctgtctctagttctctttctcctctctgtctctctctctcagatccaatcttttaagagcttcagcacattgctaagctaaagggaaattctctttgataaagcggtgtttccagcttctgggttttaaaacctaaatctatattcaaatctggctgaaggtgtgttctgggatttatgaaagcctcttaaaggggtaaatttaccaaaccgtgacaaaatcatcacaatcttactttagacatctgaagtggatgagaattttaaagagacccttgtttatttaacactgtccatttccaactcgtagtttattgg

SEQ ID NO: 664224 - DNA, 515 bp, Homo sapiens
agggagattttcttgaagataataaatactctttaattttagaagaacaggtattctgctaagaaatgaaagttaatatattttgaattgtcactattagtaaaacttactagttttaagtgctactagttcattaggccattgaaatttacatcaaacatctaataaattaattctttttttttttttttgagacaagatctctctgtatcacccasgctagagtgcggtgttgtgaacatgactcactgcagcctcaacctcctgagctcaaatgatcctcctgcctcagcctctcgagtagctgggactacaggcatgcaccaccacacctggctaatttttaaatttttttgtagagacagggtttcaccatgttgcccaggctggtctcaaactcctgggctcaagtaatcctcccgcctcggcctcccaaagtgctgggattacaggtatgaaccatcgtgcctagcctaacaaactagttcttatattaatggagatggaagtttgca

SEQ ID NO: 664225 - DNA, 627 bp, Homo sapiens
ctgcctaataaaccattactcatccctccagacagctcaaatagcatcatctctgtgaggccttccagctccagcgattcattccttggcctggccaaagaatccttctgtctaccaagttgccacagcactttgcaaatactaatatttagcacttattacaagttatcataactgtttgtttacatgattatctttccagctagaccatgagctacacagggcagaaagccaggtyttaccattttataatctcagcactggccaggcatggtagctcatgcctgtaatcccaacactttgggaggccaaggtgggaggactgcttgagcccagaagttcaagacaagcctgggcaacttagggagacccccgactctacaaaaataaaaaaaattaccatgcatggtggtgatgtgcctgtgatcctagctacttcggaggccagggtaggaagatcgcctgagcctgagaggttgaggctgctgtgagccatgattataccactgtactctagccgggacaacagtgagaccctgtctcaaaataataataatcatcatcatcatcttgcacacagtatatagcccagcacacaataattctttaataaatatttgttgaatt

SEQ ID NO: 664226 - DNA, 627 bp, Homo sapiens
ctgcctaataaaccattactcatccctccagacagctcaaatagcatcatctctgtgaggccttccagctccagcgattcattccttggcctggccaaagaatccttctgtctaccaagttgccacagcactttgcaaatactaatatttagcacttattacaagttatcataactgtttgtttacatgattatctttccagctagaccatgagctacacagggcagaaagccaggtcttaccattttataatytcagcactggccaggcatggtagctcatgcctgtaatcccaacactttgggaggccaaggtgggaggactgcttgagcccagaagttcaagacaagcctgggcaacttagggagacccccgactctacaaaaataaaaaaaattaccatgcatggtggtgatgtgcctgtgatcctagctacttcggaggccagggtaggaagatcgcctgagcctgagaggttgaggctgctgtgagccatgattataccactgtactctagccgggacaacagtgagaccctgtctcaaaataataataatcatcatcatcatcttgcacacagtatatagcccagcacacaataattctttaataaatatttgttgaatt

SEQ ID NO: 664227 - DNA, 627 bp, Homo sapiens
ctgcctaataaaccattactcatccctccagacagctcaaatagcatcatctctgtgaggccttccagctccagcgattcattccttggcctggccaaagaatccttctgtctaccaagttgccacagcactttgcaaatactaatatttagcacttattacaagttatcataactgtttgtttacatgattatctttccagctagaccatgagctacacagggcagaaagccaggtcttaccattttataatctcagcactggccaggcatggtagctcatgcctgtaatcccaacactttgggaggccaaggtgggaggactgcttgagcccagaagttcaagacaagcctgggcaacttagggagaccsccgactctacaaaaataaaaaaaattaccatgcatggtggtgatgtgcctgtgatcctagctacttcggaggccagggtaggaagatcgcctgagcctgagaggttgaggctgctgtgagccatgattataccactgtactctagccgggacaacagtgagaccctgtctcaaaataataataatcatcatcatcatcttgcacacagtatatagcccagcacacaataattctttaataaatatttgttgaatt

SEQ ID NO: 664228 - DNA, 628 bp, Homo sapiens
gaatggacttgcagagcagtgagcgattcatctatgaacaagccaagcagaaacaggatgaaattttggtcctatgttttgtagaaggaatttccatagtctatagaaggaargttgaattacaagatgtttaagatatctttgtactctaaaatccttagcttcatttctccaaggaaaccatccttatttccttcctgccctagtctgagtgctcataaagcaccctggggctacccctgtcatactagtaccccacattgtggtaatcacttacctgtcttcatcattagactgccatgtctttgaaggtagggattgtcttttgtctacataagtttattgtccagtgcagtgttcagcacagagtattagcattcagtaaatgtttgtcaagtgttgaacaaataaatgaatagagatgatttgagtgcaactgctataaaattttagtaaaaggagctaaagctgggcagtttccatatgcaaaattaccttagtgggaaagtctcattctcagaaatcatatgctttctttccttcttctttcctagtacagactcacttatcagaaatatgagggcgtttgatcataattgaaagtaatcacctgatctgaaaagtcaga

SEQ ID NO: 664229 - DNA, 628 bp, Homo sapiens
gaatggacttgcagagcagtgagcgattcatctatgaacaagccaagcagaaacaggatgaaattttggtcctatgttttgtagaaggaatttccatagtctatagaaggaaggttgaattacaagatgtttaagatatctttgtactctaaaatccttagcttcatttctccaaggaaaccatccttatttccttcctgccctagtctgagtgctcataaagcaccctggggctaccyctgtcatactagtaccccacattgtggtaatcacttacctgtcttcatcattagactgccatgtctttgaaggtagggattgtcttttgtctacataagtttattgtccagtgcagtgttcagcacagagtattagcattcagtaaatgtttgtcaagtgttgaacaaataaatgaatagagatgatttgagtgcaactgctataaaattttagtaaaaggagctaaagctgggcagtttccatatgcaaaattaccttagtgggaaagtctcattctcagaaatcatatgctttctttccttcttctttcctagtacagactcacttatcagaaatatgagggcgtttgatcataattgaaagtaatcacctgatctgaaaagtcaga

SEQ ID NO: 664230 - DNA, 628 bp, Homo sapiens
gaatggacttgcagagcagtgagcgattcatctatgaacaagccaagcagaaacaggatgaaattttggtcctatgttttgtagaaggaatttccatagtctatagaaggaaggttgaattacaagatgtttaagatatctttgtactctaaaatccttagcttcatttctccaaggaaaccatccttatttccttcctgccctagtctgagtgctcataaagcaccctggggctacccctgtcatactagtaccccacattgtggtaatcacttacctgtcttcatcattagactgccatgtctttgaaggtagggattgtcttttgtctacataagtttattgtccagtgcagtgttcagcacagagtattagcattcagtaaatgtttgtcaagtgttgaacaaataaatgaatagagatgatttgagtgcractgctataaaattttagtaaaaggagctaaagctgggcagtttccatatgcaaaattaccttagtgggaaagtctcattctcagaaatcatatgctttctttccttcttctttcctagtacagactcacttatcagaaatatgagggcgtttgatcataattgaaagtaatcacctgatctgaaaagtcaga

SEQ ID NO: 664231 - DNA, 581 bp, Homo sapiens
aaatttcaatgtgttaagggttatataaactgaagagcataaacactacagtagaaactgaaggctttagcatgcttatacttagtggtttccacctgagtagctaaaacaagcacacatgttgaatgtattcacagatctctttctattcctgtctttacacctccacctaccccctctatctgattccctttaaatcaaagtgtatacagatggtcagagggcgaacttgatctagtaaaggatttttccctccctgtatgttctcttgcactttaaggagtttccgaaaggaggaggaggagcatttctcactggacatgagggaactgatacgacaaattctgaaaagagatttcattcagaaagccaagtgatttaagcacaatgaatggkcttctttctctgatagaattcccaagacagtcgctaacatccaaagttgacttttaattaattttaagttcattgaaaatttggcctgaggaaacgccaatgagggatcccaagagtttgttcccatcgcttttgtcccattcagcctatacgtggacctgatgaagctgtgaagctgccggctg

SEQ ID NO: 664232 - DNA, 557 bp, Homo sapiens
caaaatcttctctaaaaaaatggaattgataaatcttgttgacatggtatgacatttataatacattttatggaaaaacactaattatcaaagagttatgaagcatttttaagcgagagaaaactatagagaaagatacctagaaatatatatgccaaagtgttaaaatatatttttattatgtatagtgttagcatggttatgatgtataatgatgttaggagtaattctttctttactttttatttggagagtgaggatacttggtaatatagscacttttttaattgtttaaaaatggcatactaattttgcaatattgtctatatttttaataaagaatttgttacaaattataacattagtgaaattgctacacccatccatttattcattcatatatttatttaccacggattatgtgcaggcgcctactcagtctataaattacttcccttggaaatttgccattaatgagatgccttacagaagctgaaattgaaggtttttctgcgaaagacctactcacagccctgaagtctccccacataggtaag

SEQ ID NO: 664233 - DNA, 516 bp, Homo sapiens
ctgcccgtaacagtcacattataagtatcattatatatgttaaagttcaaaatatgtggacccttctatttcggagatgctcacatcctctgctgcatggtaaatcactgttccatggarcttgcaattcctctcccttttcctctttccaggatcattttgagggttatgcatttgcccttcagcagtgatgaatggagtgttgtgctaatgctggactctaccattattcatgtccccatcctctgtccaggccgttaattgcagcatcctggaagtggaagcaaaaactgtattacagaggaaactttcatcttcctgattataatacctgacaaaaggcaggcttttctattaatctcagataccttccaccggagaggcatccattcactcactgtacatacacagggcccacatccaggcatcatcacacagaaacagaatatgtggctcatgggatctataacttcggtctgaagaagctgagctgataatcatatcactccactgcca

SEQ ID NO: 664234 - DNA, 625 bp, Homo sapiens
aaaaaaaaatcaatcatgctcattgcatgtcatattktgataaggaggagagttaatatagctctggaaaccatgaatatatactattatattttctaaaaggacaatggctttttattcacttcattcctggtgactgaaaaaaaattcaaatcaatgaccacataataaatgtaaaaggatattttgaaattttccaatagatacatgatataatacacagcaatgggaattggtgctataacctggttatgtttacaacagtgcatggacctctaccataatccaatttgtttttgcagaaactatacgaaccaattgaagagaaatatgaagtatcctattatttctgcaatcttgaagactttgaatttaacccttatctctacaattttaccaaaaatgtgatattgcttctgacaaagtctcctgactaggatgtgtttgtgtaggtgggtgacgagttggggaagttggttcaaggactttcattttacacttcctacaataatggatattctttcataggtcagagaaccaaacatgagggttcagttaccatttatctataaccattccaattatgcatttggggatcagaaaaaatactgtaaggtgtgtccat

SEQ ID NO: 664235 - DNA, 598 bp, Homo sapiens
ctgacagccgcattcaaacgtggcaggtcagaccactcatgttttccaccactctcctatctgtttcctgggccctgagaacaaaagggtacctgggcccaggagtcacttggtcctgtggggagaggggtgggagtagagtatccaaggacagatccttgctgcttctaggcctctcacacactcaaagaaccaagcagggcagccctaaatgaaatgccagatcacttgggtagtggggaaaagcrgggagggggagaaccagcctagcaatcacaggggctgagaggagcaggggccagacccctctccacttttcttcggcaaagcttagccaacctcagaacgatttccccagggcaaggcagtgggaagcctcaggtttactgtgtggctgcagtcttcctgcatacaactttgctgcctctgtctctttcggtcactcttgatgctgcaatctgttgtgcgtttgtgggaagcagcctgatgtgctgaagagagcaccttcttgaaagttggatccatctgggttagaatcctgtggcttctgcttcccagctctatgaccctggacgtgtctcagtctctcattgagcct

SEQ ID NO: 664236 - DNA, 443 bp, Homo sapiens
atcctaagccattcaggatctagtcattgcctacctagcctttctagcttcatcttctgccactctcgcacccagcccccacatttcagccaggccaaattgtttatgctctcagatcgctctatgctttctaatggacaggcttgtctacaacttctacgctacattgccccaccaattagagccccattaagttttccttgtttgtatttccccagggcaaacccacagttgaaatttccaatattgttcacacacacagatcgctgtgcygtgggccaaatccccacatcagcaggactgacccaccgctgagagagctgcagaaaagctggctatgtctctggaggtcttgaacttctaagacgcaaaattgcctgctgaaagagacactgctcctacttggagaaacaagacgctcgatcaataagttaattaaataa

SEQ ID NO: 664237 - DNA, 526 bp, Homo sapiens
aggctgatcttgaactccttacctcaagtgatccgcctgcctcagccacctaaagtgctgggattacaagtgtgagccaccatacctggcctaattagtcaaaatcttatgagagacttctggttccaaaatggcagccaaggagcaagctggttttactttccccacccacagaaagccaaaarcactgagatcagcaccagcaatatcccagaactcaaatatgaggatgagacagttcctggggccacagagaagtggaaaaaaaaacaaaaacaaacaaacaaacaaaaaaacggacggtaagagaattggacttccatatccacaatgcctcacactacaatctgccttgtaccgagcacatggaaaattttcctccaactcatggtttctacactggaaaaaagagagactgaagttgacgaccaactcctccaccatcttggatttcctggcaggagacctaatccttcctcaacctacaggaagttccatgagttccagaagggagaaatatccccga

SEQ ID NO: 664238 - DNA, 500 bp, Homo sapiens
taacttctaatcctaatattttagcagtgctgctaactttacacagtctcttgccctcttgctccatctctctcgtttttttttttttttttttttttaatttttatttctttctttttccgaacacatcaraactggggtgttggtgttttacagcaaagggtgtctgcctaacaattactttccctagacatgcataaatatttaagttgacaactattcctgatttacagtgcaactttatagcagataatactatcactggttatgaataacatcatggtatgctgctacaaactgacaagactaatgtgaccactaaatcaaaacctcaaattacaaagaaaatagttcctagtcacgagggctgcattgaaaagtgagagctgagatcagagcattaacaaggctgattgatctatatatgatgagatgattacttatatgaagattattgcgagaggagatgacaaggcttatagataaaagccatttctctg

SEQ ID NO: 664239 - DNA, 577 bp, Homo sapiens
agggttattcaggcaatgctgcctgcagaattcctaagctgagttcacaagatacagatcgatgcaccgccaaagagagtctatatcaatctccatttcattcattagctcccacttcgagctggttggctgctagttaactctttaatgtgggagaaactgtcagtgtaaaggccactgggacacgtgctcttcccagctgtacttgacctgtcaatatttcttgcagcagactgtttaaactggtacggctaatggcaaaatggagacctatggggttttgaaggctttcatagctttagaatggcttaccatccaatagcaaacattagtaaattcatcccattgctgtatttctgcctgtgtcttacaatccaggtgcacacaaactaggataaaattattttccatagttctattcttgaaytcaaaggtattttagactacacattacgtaaatgtgggctccactacaatgagatactatcacaccaaggacttggctgcagtggagatcattagtttgtgattcagctctaaagaagctccaaacaatgagagaagcaaagcagcactt

SEQ ID NO: 664240 - DNA, 594 bp, Homo sapiens
tctgctttctagctataatggaacaggcagaagtgaaaatgaattaagaaaacagaatgggttccctaacactgaaaatgtagcaatgatatatagccagcgtttatgaaatctcttccaaaatgtaaggggcttaatcgccaaagaatccaaaagagactttacatgataaataaaaagtatttctagttgatacaggatttaaagcttagagaaatatttatttgttggcttatactctcctctttccacaaaggatttcaaatagcttacataaacacatatgataaaaataatgtcaaaatagaactagggaataaggaaaagragataagcaaaagtaggtaaactgttaccacatagtaggaaaacacaacaaagaggctcataaaaagaccatttattataaatggtctttattaaagtttcagatgtaaccatgagcttcatggtaaccaaagcaaaaagggaaatccagtaaaccatcaaaaatgaaaaaccattgtttcttaaggaaggcaaagtttttctgggactgaaatctgaaaatctcacgtaggattttggaagagctaacctgtagattatgacatt

SEQ ID NO: 664241 - DNA, 578 bp, Homo sapiens
gccagcgtttatgaaatctcttccaaaatgtaaggggcttaatcgccaaagaatccaaaagagactttacatgataaataaaaagtatttctagttgatacaggatttaaagcttagagaaatatttatttgttggcttatactctcctctttccacaaaggatttcaaatagcttacataaacacatatgataaaaataatgtcaaaatagaactagggaataaggaaaaggagataagcaaaagtaggtaaactgttaccacatagtaggaaaacacaacaaagaggctcataaaaagaccatttattataaatggtctttattaaagtttcagatgkaaccatgagcttcatggtaaccaaagcaaaaagggaaatccagtaaaccatcaaaaatgaaaaaccattgtttcttaaggaaggcaaagtttttctgggactgaaatctgaaaatctcacgtaggattttggaagagctaacctgtagattatgacattgatttgcttccactggagtccatattcacagcaaggctgtcgtgatctacacagcaaacacaaagacccaaattacaaa

SEQ ID NO: 664242 - DNA, 566 bp, Homo sapiens
aatttacacatttgtatggggtgataycattagaaaataccctacgtgccagctaaaacctctcttgaaatgtgttctaatcaccccccactgcctccagtcccctcctgcacataatgagtcacttccctttttctcaccaagtcctcacccttatataaggtatttcctgactattgtaagccagccagaaggtagctgcagacaaggttacaaattggcttgattcaaggcagcttgctgaaaagggcagggtggctgcagattataataagagttaatagaggtgaaggtgaaagggggtaagtggttgttttaaatttggtattttttttaagccatgcagatatatttgccataaactcctttccttatcctgttgttcatctccatattttagatttctctgcatttgttatataaaatggcaaataaaattacagctacagcacacaagtacaaggtcaaataaatgacagagctcagtctatttgtgaagctattctgaaagggaaccatggtgccaaatgtggtttatttgaataataaagaagaattagattccc

SEQ ID NO: 664243 - DNA, 578 bp, Homo sapiens
gttagcttggaccctataagaatgatgagtgaatgcaaactgctcatatgaagaaaaagaaataacttgaccttctgggaaggaggtctaaaatcattaaattcatgtgaaatccaaatttcatttctatacacacacattcaatctatattgggttttagctcttacataagaagataaggtttcatgacagaagtaacatggcaacaatttcagtgataatttcagtaggactgtaataaggaaattgactttagatttttgcataagttctagaactaggctggtaacctgaaaattgatgtcagttttagacaacaaatgccctatggcttyttatctttcatcctcactcccttctttggaatgacagtccaaagatataatctctttttcttaaaatcatcattgttaaagagactgatagcagttgaattatttaaagtatcttttgatgcatttttgtgtgaatatgtgtttattcacatgcctatatatgtttataaatgcatacaatttgtttctttctgatatggctttcgtgcctactgcatttttatctacagatataaataatt

SEQ ID NO: 664244 - DNA, 589 bp, Homo sapiens
tcttactttgcctccttctctcttcagaagccagatgaactaccaacacctttgtttttttttccctcyttgagacggagttttactcttgttgcccaggctggagtgcaatgacgcgatctcagctcaccacaacctccacctcctgggttcaagtgattctcctgcctcagcctcctgagtagctggaattacaggcatgtactaccacacctggctaattttttgtatttttagtagagacgggtttctccattttggtcagggtggtctggaactcaaaacctcaggtgatctgcccgcctcagcctcccaaagtgctgggattacaggcataagacaccgcacccagccccaacacccgtcttttgcacactcaggggtttggccagtggggctaataatctatcctacatttttaaaaagagccatcaaaggcctggcttatcataggcactaaacaaatatttgctgactgactgaatatcttccaacttccatagaggattttgctcatatgttaataatcctgcaatcaggggttttccaatgggtcagtcaatgctgaagtctgtttcagtcttccact

SEQ ID NO: 664245 - DNA, 589 bp, Homo sapiens
tcttactttgcctccttctctcttcagaagccagatgaactaccaacacctttgtttttttttccctctttgagacggagttttactcttgttgcycaggctggagtgcaatgacgcgatctcagctcaccacaacctccacctcctgggttcaagtgattctcctgcctcagcctcctgagtagctggaattacaggcatgtactaccacacctggctaattttttgtatttttagtagagacgggtttctccattttggtcagggtggtctggaactcaaaacctcaggtgatctgcccgcctcagcctcccaaagtgctgggattacaggcataagacaccgcacccagccccaacacccgtcttttgcacactcaggggtttggccagtggggctaataatctatcctacatttttaaaaagagccatcaaaggcctggcttatcataggcactaaacaaatatttgctgactgactgaatatcttccaacttccatagaggattttgctcatatgttaataatcctgcaatcaggggttttccaatgggtcagtcaatgctgaagtctgtttcagtcttccact

SEQ ID NO: 664246 - DNA, 611 bp, Homo sapiens
ttagtcttggcttttcttgacagacctgaaaattggccatgcagaactgtttaaaattggtaggaaaaacttaccctgaagtttactgttgatgaacacaagcgaaaacatgtaattaatggaaatgcatgtcagaataaagaaaaatgtgttatccccttcatttctgagtcccagccaaaggtgttgaataaagctgatatttcagaggcaaaaaggggacttgtgcttgttttagaaaagtaaaaatttgtatcatacttcatatgggcagtaattaatttatatcctgacaagtcctttaattaaaaatgttttaatacatttttaattacaaaagcatcaaattcacaacaaaaatttgaacactgtagactgacagaaaataccacctccattcaaaaagatatattgtaaaaaatctgctgcatagtttctgagatccttcacaayggatttatatttacatgtttgttttatatttgtgaccgctttgtagcccttttgtaaaatttaaaatactatgggcgtttttgtctttttgaaacagtgtctcactctgtcgcccaggctggagtgcagtgtcacgatcagagctcactgcagccttg

SEQ ID NO: 664247 - DNA, 603 bp, Homo sapiens
gcttcatttttcctctcccaagtggggcaaatatgtaaaactaagtaacatctcaaggagtttgatcttttggattgaaataaccttatcatcttttacaaattttctgatttctcagtaggctgaaaacaaaaacccaccatgtaagagaaaaacagaaacaaaccaaatcagagatacatgactcttatattaatcttaagctatgcaatgccaacctattatcagaactaatgtcattaatgttccaaagggtttacctcctcataatttctttyagttttccgctgagaatcatgctggtgcctaatgtattttagatgcagcatgaaagtctcaaaatgtgggcttgaaaactcaggcaaaattttcagtgggctactgaaggacattatgttcagtagcttaaaaatctgatggtctcttttaagcccctggactttgatgttttatgcctttttagttttattttctgatcatattttcctttataaatacacagggaaggatcacatcctgaaatctgtgattatcagaaatatgatagattctcctgctgccatttagaatcgggtgagtggttatgaggcacctagcaaggga

SEQ ID NO: 664248 - DNA, 603 bp, Homo sapiens
gcttcatttttcctctcccaagtggggcaaatatgtaaaactaagtaacatctcaaggagtttgatcttttggattgaaataaccttatcatcttttacaaattttctgatttctcagtaggctgaaaacaaaaacccaccatgtaagagaaaaacagaaacaaaccaaatcagagatacatgactcttatattaatcttaagctatgcaatgccaacctattatcagaactaatgtcattaatgttccaaagggtttacctcctcataatttcttttagttttccgctgagaatcatgctggtgcctaaygtattttagatgcagcatgaaagtctcaaaatgtgggcttgaaaactcaggcaaaattttcagtgggctactgaaggacattatgttcagtagcttaaaaatctgatggtctcttttaagcccctggactttgatgttttatgcctttttagttttattttctgatcatattttcctttataaatacacagggaaggatcacatcctgaaatctgtgattatcagaaatatgatagattctcctgctgccatttagaatcgggtgagtggttatgaggcacctagcaaggga

SEQ ID NO: 664249 - DNA, 450 bp, Homo sapiens
tggtgtggatgctaattattaacacctgattaggaagtaccagttcccaaaagtgggaaatacatcttcctttacagctaattgcagaaatcagtgctttaattttgttgaggaagttttgccatgaaatgttttgttgagatgcagataaagaatttgtagaagcaaggagcacttttcattagagaagaagaaattctttgggatggaggtggtttgggaaagtatcagcaagatgagaaggccataaaggtggcaataaaacccaaatrtgctgagatttacaacagaccccaaaagacaacatgaatgtgctcaagttatcccacctcagtttttgagatgtctctggaaaaaatgcagattatttatataagttcaaagcctcataagaaaatcatgagcagaaaattcctcagtatattatttgctatgtaaaaaaaggcagaa

SEQ ID NO: 664250 - DNA, 658 bp, Homo sapiens
tctctggaaaaaatgcagattatttatataagttcaaagcctcataagaaaatcatgagcagaaaattcctcagtatattatttgctatgtaaaaaaaggcagaaaaagatggtcaccaaatgaagttttagagtcttggaccacaggaagttttctaatcctggcatttcacaataatgaagacctccatctgttggtttttaaacactgaagtcagagctctgcattttgttttgtcttsagtggctttcagtatttatacaaatatatatataatacttactgctagatattctggacagtgtccacatctggacactgaggatttttgacatgtgaaccacttgctttgaatctcctaattgtcaaggtgagtgagatatatagatttggggggtggttggttgaggctttcagagaaggataataaaggtgtcaagaccaaacccatgtgttttgctcatctaagagagccacttttattttttgaatactcaggaaccagctattaatattttgcagcaataatgagcttattataagtttatgtacatgtaatcccagttacataagacctgaagagcaaaacccccaatccacatcaatcccccatgcgttgatgtgagccagatggagaaggggttgtagcaaaacacc

SEQ ID NO: 664251 - DNA, 515 bp, Homo sapiens
ttcctcaaagctaaatttctctggatgtgtacctgattagtgacagtgtcagagcttagaacttaacagtgatcatggggcagtagttttgcttccattctgttttgaatcttttattgtaaaatatatgccttatgcctcatttgctgtaaaatctattttattgtggtacttaattaatgatcactttgaccatttgtggcaagcggccaaaaatttatcttctctgcctcttttttttttaactgccagtgtttgagaaaagcagattaggtaaagacctatcaatctgccttatccattaataaactggagaaatcggctgtaatttcttcttaaattatatawtaagggcttctaaaaataccctttgttttgaatgctgaaataaaatgctgtgaaattcaaagttaaagtatattacatatttatgacttagaacatatgcatgtaaaatttttaaattgttttatgatttgataatgattagaaagagaaacaaaagggaaaaagaa

SEQ ID NO: 664252 - DNA, 515 bp, Homo sapiens
ttcctcaaagctaaatttctctggatgtgtacctgattagtgacagtgtcagagcttagaacttaacagtgatcatggggcagtagttttgcttccattctgttttgaatcttttattgtaaaatatatgccttatgcctcatttgctgtaaaatctattttattgtggtacttaattaatgatcactttgaccatttgtggcaagcggccaaaaatttatcttctctgcctcttttttttttaactgccagtgtttgagaaaagcagattaggtaaagacctatcaatctgccttatccattaataaactggagaaatcggctgtaatttcttcttaaattatatattaagggcttctaaaaataccctttgttttgaatgctgaaataaaatgctgtgaaattcaaagttaaagtatattacatatttatgacttagaacatatgcatgtaaaatttttaaattgttttatgayttgataatgattagaaagagaaacaaaagggaaaaagaa

SEQ ID NO: 664253 - DNA, 407 bp, Homo sapiens
ctaacatttctttccttcccaaagagcttacttttggtaaacaaggaagtgtacgtgaaatcaactgtttcaagcctttcagaatctctttatgacttggcttctactgtgagacccaccaaaggcctgctgcttgtgatatcagagtgtagcttgcagcccataaatattgaaagtgcagtttgtcacttgtatttgttttacacttacaaattaggagacacatttactataaatatagttagcatccagaggtttcaaagctaagaataygtgcgttcaaaatgtctgtttgccttatttatgctgtggctaccacatttgtataaacagaaaattactccattcatgctttattgcttcttcttttgtaccacagccttgaccccagtcatcataaattgaga

SEQ ID NO: 664254 - DNA, 581 bp, Homo sapiens
gtaagaagttgaaccgtttaaatccatttgttacctgaattgttttctcctgttttgaaacattttaatttataatcagacaagaagaacagatgtaagagttgtaatttaatcattttattgctatctttgtatattttgaagaattaggtattgtactcatgggaagtcgtattttatgcctagttggaaaaatgaataatgtaataatatgcaaaatgtaaagttttagaacttcactactgagtaaggcatataaactaatgatctggttaaggtcccctgtgcaccataataaatatggactaaatttgtcattatagctttagacagaggtttcaggcaacagatttaattaaatccttttttaatattcatacttctaaactgcataattcccttctactgtaaaactgagtgctatattaaaacaaacaaaaacrgcagattactaaatggatattagcgtgaagtcaataagcatttaattctggagagaactctgtgaggagagaggaagcttcatggagctcattcaggagatcttgacttagatttgggaagctcgttcaggagggctt

SEQ ID NO: 664255 - DNA, 632 bp, Homo sapiens
attcatacttctaaactgcataattcccttctactgtaaaactgagtgctatattaaaacaaacaaaaacggcagattactaaatggatattagcgtgaagtcaataagcatttaattctggagagaactctgtgaggagagaggaagcttcatggagctcattcaggagatcttgacttagatttgggaagctcgttcaggagggcttacttctgttttcatgctgactcttgtaggggaggttaattagttaattttggaactcatamaggacaggagcaacaaaagaaggccctttgttagccttaaaacaagtgatggttattaaaaatctaattcaggagtccatgagaaatgtgttgatgacactgaagaagtgtagaatatctggatactggtaacttttagaaaggttaaataataagatccgttactttgtaaggtcttgtgcccctgtgacatccagcccaggcactagagttcctccaaaaactgtaataactccttctggattttgcacagaacaaatctagatgttttgttcccttttgtgtgattaaaagctcgattctgaatatttccatgtgaacatttcttcgatgaagagtcatattatccacagaataactaa

SEQ ID NO: 664256 - DNA, 592 bp, Homo sapiens
tgctgctaataaagacatacctgagactggtaatttataaaggaaagaggttcaagtgactcacagttcagcatggctggggaggccccaggaaactcagaatcatggcggaaggggaagcaaacacgtccttcacgtggcagctgcaagaagagtgaaagcccaccaaagaaggaagccccttataaaaccatcagactgcttgagaactcactatcatgggaatagcgtgggggaagctgcccccatgattcagttacctcccactgggtccctcccaccacacgtraggatgatgaggaactacaattcaagatgagatttgggtggggacacagccaaaccatatcagagcatttaatggttaactctgttgacttagaaaaatctgaggacatttagaaaaattgaacattttagataacattcccaatgacatagaataagctattttgaacattctttagaaaacctattaggttcactttacataacggacatttgactgtagcctactatctagtcttatgttgctttccagtccctttcatttaggcagatctttgcattattttatgaaagcaatatgtgt

SEQ ID NO: 664257 - DNA, 592 bp, Homo sapiens
tgctgctaataaagacatacctgagactggtaatttataaaggaaagaggttcaagtgactcacagttcagcatggctggggaggccccaggaaactcagaatcatggcggaaggggaagcaaacacgtccttcacgtggcagctgcaagaagagtgaaagcccaccaaagaaggaagccccttataaaaccatcagactgcttgagaactcactatcatgggaatagcgtgggggaagctgcccccatgattcagttacctcccactgggtccctcccaccacacgtgaggatgatgaggaactacaattcaagatgagatttgggtggggacacagccaaaccatatcagagcatttaatggttaactctgttgacttagaaaaatctgaggacatttagaaaaattgaacattttagataacattcccaatgacatagaataagctattttgaacattctttagaaaacctattaggttcactttacrtaacggacatttgactgtagcctactatctagtcttatgttgctttccagtccctttcatttaggcagatctttgcattattttatgaaagcaatatgtgt

SEQ ID NO: 664258 - DNA, 586 bp, Homo sapiens
ctcagtactgccctaaatttcttcttgctaccttagtggtgacatggagagaagaaagagcacagccctggagaggtgagggtggcaggatgaggggtccagtccctgtgggccttgcagccacactggtgttttaaacaggaaatcagcctcgttcaaaaaccatattcttagctagcataagcagcttaaacagtcctgggggtcatataccacagcagtttagagcagtgttatcaatttgttgactatttaaaggtcagaacaaactagaaataaaggacttaagccattatctagttcttcagcccccaaaccccaaatttgaaggaacagaggcttttcaaacctagattatttaaagtaattgaaccttttccaaatttaattattcaaaatatattctgaatacctgtttacttaaaagttatacccaaattcctgaagaattgactgcttagcactataccaaaatttatagtgcaaagcagaatgtaagaagcaatgtaagaattgtaggaaaaaakgagccatgaaagttgagagagatggatgtgcaaagatgaattcatggaagaggctgcac

SEQ ID NO: 664259 - DNA, 577 bp, Homo sapiens
ctggttcaattcctaccagggacctatctatcttctttttccatctagttcctaggcttcccacctgctgcaaccctaatattgtaccctttcctctaatcttggccacaraactaacctgtgaagcttggggtgagccacttagaatttccatcactttttcctccagctgtaagacaaggataacacactgacctgcctcagagggatgtggtgtgaattaactcctgtaattagtggtttctgtgctctgcatacaccaagaggatatgaatgccaaccattatcacagtggcctgggtaagcgttgttgctaaagctatacttgggaataactgttggcaaagagctgacaactggaagttgcaaactttacacagaagcaatatttccagtattttccccaagcaatcatgagtaaattgctcactaggggtggagatggtttccagccagttctgcctcttctgatctgtgcaccctgcaaagctcagtcaatgctaggtaactgatccttcataagtaagtctgctgtttagtgcagatgaagaattcagagtggtataatttggacagg

SEQ ID NO: 664260 - DNA, 516 bp, Homo sapiens
tcaatctcattgctcttttaagccccagatagaaaataaccaacactgcagactttgaaggttaaggtagcttaacgttctctactggtgagagtcacattcaccatcaaggaagagggcctcttcttatgcgagtgtagctgatgagcccaagtcaagtgatgtggaaggcagagttttcaatctcactagcaaggatggctaaaggaaggctggtgaaggcaggggaaggaaacctaagtaaatttgtagtatctttcaatcacacttcaatgttaaatgattgatagrgtacctttaaaggagagagttaacagttgaaggagatatatattctcctacagtctagaagtaataatctgtaagaactgtgttctactagtgtacctagggttattttatgcatgctagggcttcatagaaggcatgggatttatgagagttcttatattgacatatttatttgggcttgctgtcgtatttagactctagcctaggatactctagcagaactgg

SEQ ID NO: 664261 - DNA, 587 bp, Homo sapiens
ttcaataatgcccttttaactgggcaaccacaaaacctcaacctgtgtgatctactaacccaacaccaagtaccttgtctagctgcgcatttccatgccgtctagatatggtggcatggctgagtaactgaaagactctttcaaagttttgctttaggttgtgaacagctaccataaaccttgcttccataagagagcactgatacattggaaattagccagaaaaatcacctatagtgttgtgccttctgaatttrattaaatttaccaattcattttgacaagctttacatgtggttatcaaaaccttccagttttaccaaaccccttcagttttgccttaaaagccaacagaagagcaaaaatgcattggttgagaaaggttgggagtgggtgggaagagaggggtgaaaacttatcaaaagtaaaattggattaagagtcaatcaaaatccaactgtgaatttatcatttcaatgaatttcaatgaatggtttaaaatctgtttgaaatctatttgaaaatgaatatgtaataatatagacatatctccttttcaaagccagtattgtcagatgtattgtgag

SEQ ID NO: 664262 - DNA, 496 bp, Homo sapiens
tatccatacttttagaagtacatgtttatgttacttcctgtcatttcatattatttatatagacagaactttacactggctatcatttcaaatcaatcattccagctgggtgcagtgactcacacctgtaatcccaaaactctgggaggccacgttgggaggactgcttgagactagcactttgagaccagcctgagcaacatggcaagatcctgcctgtacaaaaaatttaaaaattagccagccatggtgrctcaatgcctgtcctccagctgcttgggaggctgaggtgggaggagcacttgagcccaggaggctgcagtgagccatgtccatgccactgcattccagcctggacagcagagtgaaaccctgcctttaaagaaaacttaatttaaaaattaaaataaataaataatatagaaatcaatcattctgtaggttagagaattataaaatggggagggggcaaatgcaaacccatgaaagcgtgcag

SEQ ID NO: 664263 - DNA, 571 bp, Homo sapiens
gtatatgtaggagtatatgtagttataagtagaatacagtataacatggcaaaccctattctcattctcactgtaataatgacaataagcactccccaccactcccagaaaaaaaaaaacttgcaaatataatccttttaaaggcattagagagctgtggaagtgagggattaaattaactaaaattccagagcaggctgaactagctatgttcttacttgggaagcatttgctgattctgggtagggatcacacagaagagtggtgtgaaaatttggaaactgcaagagcagtaaacacatagccagttttctccatgattgatttgctggattctatggctccaaggctagacagtaattttaagacagaatgaaatttctcatagtcttacgaaatttacaggatgaagtcctgcttgaggtctaccttaaactcacagctagtyttctcttcaatgtatgtcaaatttagatgctacatggagcaagagaccaaagagcaaagctcaaaacctctgaagggcagaagaaatgtcctatacttcaaatctgaagagaaatctaccaaa

SEQ ID NO: 664264 - DNA, 571 bp, Homo sapiens
gtatatgtaggagtatatgtagttataagtagaatacagtataacatggcaaaccctattctcattctcactgtaataatgacaataagcactccccaccactcccagaaaaaaaaaaacttgcaaatataatccttttaaaggcattagagagctgtggaagtgagggattaaattaactaaaattccagagcaggctgaactagctatgttcttacttgggaagcatttgctgattctgggtagggatcacacagaagagtggtgtgaaaatttggaaactgcaagagcagtaaacacatagccagttttctccatgattgatttgctggattctatggctccaaggctagacagtaattttaagacagaatgaaatttctcatagtcttacgaaatttacaggatgaagtcctgcttgaggtctaccttaaactcacagctagtcttctcttcaatgtatgtcaaatttagatgctacmtggagcaagagaccaaagagcaaagctcaaaacctctgaagggcagaagaaatgtcctatacttcaaatctgaagagaaatctaccaaa

SEQ ID NO: 664265 - DNA, 552 bp, Homo sapiens
caacacattaaaaaaatggccaatatcattcattacagaaatataaattgaaacctcaatgagatagtattatatatctgttacaatgactaaaataaagataactgacaatagcaaatgctgggtaggaggagagcaagtagaactctcaagaatttctggtaggaatttcaaaacggtacaggtactctagaaaaagaactgggttgcttcttataaagttaaatatgcagttaacatatgacccagcagttccactcctaggtatttgcccaagagaaataaaaactatggtcatacaaaagtttatgaaacaaaggttaatagtgactttgttcacaactgccccaaaatggaaataacctcacattcttcaattggtgaatggattaaaaaaaaaaargtgatatatcttgctatgatttggatgtggtttgtcctcatcaaaactcacgttgaaatttgatccccaacatggcagtattggcaggtgggacctagtgggaggtatttgggttatggagctagatccctcatgaataaattaatgct

SEQ ID NO: 664266 - DNA, 548 bp, Homo sapiens
aggaaagaaagagaaagaaagaaaggatggaaggaaggaaaaaggatggaaggaaggaaggaattgattttcaaaacaaccaaaaaaaaaaaaaaaattaacaaactggcagtattaagtccttacctaaaataattaccttgaatgcaaatggattaaattctctcaacaaaagatacagagtagcttaatggattaaaacagacaaatgaacagaaaaataagacctaactagatgctacctacaagagactcactagagctttaagggcacatacaaagtgaagggatgtaagaagatattccatgcaaatggaaccctmaatatacaaaatggtcttttacaaaatagactttaagtaaaatactgtcgtaagagacaaaggtcattatatcatgataaaagagtgaattcatcaagatataaccattgtaaatatatatgcacccaatactatagcagctaaatatataaaacaaatattaacagaactgatgggagaaatcaacacaaatacaatagtattaggggcttcaataccccattt

SEQ ID NO: 664267 - DNA, 638 bp, Homo sapiens
  misc_feature 33: n = A,T,C or G
tagtcaaaattaaattttaccttagataacgtnactttcaagaagctttctcaacatcttcagtgatgattagatgtctcttccatccagctttcatagtcttcgcttattgattactataaacattcttccttatatgcaaactgtttcagttactaaattatgagttcctggatgaaacagccttcagagtgtccagctttggtgctcaataaatgcctctgtgattgactgaacaaagctgtggccaactgagctccattaggttgagtagggttgaactgagtwaggtgagttccgttgggcggtgttgaattgagccaaactgggcggtgttaaagacagcatgttgggctaagctgagctgatgtgagctctgagctgagttgagctgagcctggccagctaaggtaacatgagctgaggtccaccgagctgaatttaattgtgctaaattgtgctaggctccactgagctgagtcaagctgcattgatctaaccctggaaactgaagatctcacaacagtttgggcttctttagatagaaacactctggcacctactcccaattatacactgatagttcatccactaagaattaaaccacttcgagagaaatacaaaggctgacttccacc

SEQ ID NO: 664268 - DNA, 477 bp, Homo sapiens
gcagcaggtagtgggagctcaaggcataaagccacaggaaggcttcttggaggcaatgatgtcccagctgaaccttgaargactgagtggttggtcctgctgatggagttggcatctgctggacttggagccccaagcaactgttcaagtattgctgactggtcctccacctgaaggctgagcctcctactcttggcaaactgtcaattcaaaagtaaagcaatgttatgtgcgtggtcctatatgttcctcaataaccctctgaggtgggtatattacagcttattccacagcaggaggaagcaaagactaaggaggctagatctcttgtgttgagtcataccagcttcaaaaccacaactgaaaaactccagagctcatgcacataacccttgtgccgatgtttctggaaccttctgcaccagaatcatgtggaacgactgataaacatcaggatcccaagaccctctccaaaga

SEQ ID NO: 664269 - DNA, 666 bp, Homo sapiens
ttccagccagaaagtaactgagcatttcagttctgctatttgcctagttttctgggtgggaaagacagacacattaaggtttggccaggcacggtgggaggattgcttgaggccaggaggttgagtttgagattagcctgggcaacatagagagacctcatctctacaaacaacaaaaaaatagaaaaaaattagtgggcatactggcacacacctgtagtcccatctactttgggaatttgaagcaggaagattacttgagcccaggaggttgaggctgcagtgagctgtaattgcaccattgtactccagcctgggcaacagagaaagaccctgtctcaaaaaaaaaataaaaataaaaaataaaaaataaaaaggcccaaatatctgtgttttaaagcccactggggaaaagacttggagcccaggacctatggaaaagagaattttctctctgggaattcttattccttaagrccctaaaaagtaaggcaagtgtcccaaataaccatcagctccatttcttgtgctggagttcaaaccccacttcttgtccagcggccttgggagaacaatggcttgtgtggggtgaagacaggacatagaagaacgtgctgcccttctttttcttctcatctctgtgagcagagagcccacaaatcacct

SEQ ID NO: 664270 - DNA, 577 bp, Homo sapiens
atcactacaaattctatagatattaaagggataactagtggacattattacattttatgccaacaaaatcaacaacttggatgaaattcgacaaattaccaaggcttacttaaaaagaagtaaataacccaaatagcactttgactattgaataaattcaaatttttgtttaaaactttcccagtagaaaacaccaggcccagatggcttcactggtaaatcctacccaaatatttcagaaagaaataataccaaatttttccagaaaatagaagaggtgggagtgtttctccacatattcaataaaccagcacaatcttgataayaaaactagattactacaagacaggaaaactatagaacaacatgatcataaatgcttacataatcataaatgcaaaatttctttaaaattttttagcaaatcaaatctaataacaaatataaaggattttctccttggaataacagattggtttaatttttgaaaatcactacagttcattatattaacagacaaaaaaattttaaaaaacatatgatcatcttaatagacacataaaaaccatttggccaa

SEQ ID NO: 664271 - DNA, 564 bp, Homo sapiens
ctcaactacttataaatgccctactcttgtttacaccgccggtttacactgtttctycaagccatcacagctgatatctcttggtgctatccccaaactgccactcttaactccctcttagagtggatagatgatctttgctggcaaggcaccctccaatacttccaccctgatgaagttctattctttacttttatactcactcttattctcattcccattcttatgttaccctctacctctccccagctatctccaccacactatcaaccttacccattctctcctagctgcttctaatccctccttagcgaacaactgctggctttgcatttccctttcttccagttcctacacagctgttcccgccttacagacagactgggcaacatctcccatctccctacacctccgaacttcctttaacagccctcacctttaccctcctgaagaactcatttactttctagacaggtccagcaagacttccccagacatttcacatcagcaagctgccgccctccttcgcacttatttaaaaaacctttctccttatattaactc

SEQ ID NO: 664272 - DNA, 564 bp, Homo sapiens
ctcaactacttataaatgccctactcttgtttacaccgccggtttacactgtttctccaagccatcacagctgatatctcttggtgctatccccaaactgccactcttaactccstcttagagtggatagatgatctttgctggcaaggcaccctccaatacttccaccctgatgaagttctattctttacttttatactcactcttattctcattcccattcttatgttaccctctacctctccccagctatctccaccacactatcaaccttacccattctctcctagctgcttctaatccctccttagcgaacaactgctggctttgcatttccctttcttccagttcctacacagctgttcccgccttacagacagactgggcaacatctcccatctccctacacctccgaacttcctttaacagccctcacctttaccctcctgaagaactcatttactttctagacaggtccagcaagacttccccagacatttcacatcagcaagctgccgccctccttcgcacttatttaaaaaacctttctccttatattaactc

SEQ ID NO: 664273 - DNA, 564 bp, Homo sapiens
ctcaactacttataaatgccctactcttgtttacaccgccggtttacactgtttctccaagccatcacagctgatatctcttggtgctatccccaaactgccactcttaactccctcttagagtggatagatgatctttgctggcaaggcaccctccaatacttccaccctgatgaagttctattctttacttttatactcactcttattctcattcccattcttatgttaccctctacctctccccagctatctccaccacactatcaaccttacccattctctcctagcygcttctaatccctccttagcgaacaactgctggctttgcatttccctttcttccagttcctacacagctgttcccgccttacagacagactgggcaacatctcccatctccctacacctccgaacttcctttaacagccctcacctttaccctcctgaagaactcatttactttctagacaggtccagcaagacttccccagacatttcacatcagcaagctgccgccctccttcgcacttatttaaaaaacctttctccttatattaactc

SEQ ID NO: 664274 - DNA, 564 bp, Homo sapiens
ctcaactacttataaatgccctactcttgtttacaccgccggtttacactgtttctccaagccatcacagctgatatctcttggtgctatccccaaactgccactcttaactccctcttagagtggatagatgatctttgctggcaaggcaccctccaatacttccaccctgatgaagttctattctttacttttatactcactcttattctcattcccattcttatgttaccctctacctctccccagctatctccaccacactatcaaccttacccattctctcctagctgcttctaatccctccttagygaacaactgctggctttgcatttccctttcttccagttcctacacagctgttcccgccttacagacagactgggcaacatctcccatctccctacacctccgaacttcctttaacagccctcacctttaccctcctgaagaactcatttactttctagacaggtccagcaagacttccccagacatttcacatcagcaagctgccgccctccttcgcacttatttaaaaaacctttctccttatattaactc

SEQ ID NO: 664275 - DNA, 612 bp, Homo sapiens
gtggtgcaaaagaaagcacataacatggctccctctacatgagtctcgacggggaaaagatattttgggtggcacaaaacagtagtcacctcttagctggggctgggagggaggggatagaccaataagggacacaaaggaactgtatgggcatagtaatgctccatagcttagagtgatgtttgaagaaacgtatacatttgtcaaaattcatctatctggacccttaagagcttgaggctctgacatatgtcacaagtagacctcaatttaaaaatagcatctgcacggacacgcagtgagcacctcacatacttggtcaccattacgatgagtgtgccaaccgcatggactcccaggatgtcggagttcgcaggacccttggaaatccctcccccaggcactcttggtcattttcctgccatggaatcttccgaccaatgagtgaagcctgggaccttttctcagaataaagttttgcctgcataaaataaaataccataaactatatatgacgacaaagaaaaccaattattttgaaagttatcamatattaaaaacagatttgtgacctagaaatgcatgtgcttctttattaacgcattaaataac

SEQ ID NO: 664276 - DNA, 387 bp, Homo sapiens
aattctattgtttataagccacccagtctgtggaattctttcatagcagcccaaatggactaagacaccacccctgcttgcttatcaaagctgtaggaagggccaaatgagatcagcattttcttaacatttttttctataatccacaataaaaaatagataccaaatccagtacacacacacataattgaaccaaaaatttcacaaaacaattattaccyttattatgtataatgtactctgatgcatttaattctctttgatttaacttttggcacttaacaaaattggtcttatgagctactaatgagtcatgaccttctattaggaaaacactgaatcttagaataaatgggagattagttggtaaaagtgcagagtgattat

SEQ ID NO: 664277 - DNA, 598 bp, Homo sapiens
tttcagagtgaatcatatttctcggccactgaatcaagaagctataggcacttaaagtatttgaatctgttctccttctccttggatacaatcgctaatctttcttccttgccttctttctttttttcctggggatgcaacctgcttacctggcacataaaatactcatatgatgacacccaggctttagagatttmcatgagaatcagcaaaccttattttagcccaatatagagaatgtgcaatgcatggagggaactctggactgattccccagataagtcatttatttctttcctcaaagaaaaatccaatattctgagatcagatgcatattgaagctttggtggaaaggaaccagacaggggctggattaacatgttcccatcaacgtctcccccacacagtgatctgtgaagtgaagggaacctccgtggtcgaatgttccatattgggcaggagcagtgcctcccacacagtcattcccacggaaggcacacaccatcctgggatgggaagcttcccttcttatcagcacatttggtctcttaactcaatgtcactaaataatgtgtcagagagctgaagccacctgcac

SEQ ID NO: 664278 - DNA, 552 bp, Homo sapiens
aaaaatcaaaattttattgatttatcgattgttcaaaatctatgtatacataaagccctacccaattataccatattatttgctttcaggtacctttctctcactcactctggttatctgagttggtcttgacaatccaaaatttaaaggaaactattgtatggtagttgaaatagttggatttagtcctttagcaggaatttctggtcagcaaaaaggtttaagtcaatagcatataaagcagaaaagaggagtttgaagaggaagtagtaaacaaagggaagctaagaaataactagactgggcggggtagaaccctgcttccrtgggggttcaggctggaaagaagagaggacccaagtctgtttgttgttggtaaatcccttctgcctttttcttttctttgtcattgacctaattcaccaactgtcttgagctgttttgaaatatacctgtattcttttacctctgtgaaaaactgttaaacaaaggccataactctacagccaaactgatgagaggatggcaggtctgtttaggacatatctgcca

SEQ ID NO: 664279 - DNA, 593 bp, Homo sapiens
ttttctctcttcttttcttggttaatcttgctaatggtctatcagttgtatttatcttttcaaataaccagctttttgtttatcttttttatttttttgtttcaatttcatttagttctgctttgatcttggctatttcccttcttctgctgggtttgggtttggtttgttcttgattctctagttccttgaggtgttaccttagaatgccagtttgtgctctttcagtcttttttatgtaggcatttaggrctataaactttcctgttagcactccctttgctatataccagaggttttgtataggttgtgccgttattgtcgttcagtttgaagaattttttaatttccatcttgatttcatttttgacccaatgctcattcaggagcacattatttaatttccatgtatttgcatggttttgaaggttccttttggagttgatttccagttttattccactgtggtctgagagagtgtttgatataaattcaattttcttctatttattgaggcttgttttatggcgtatcatatatggtctatcttggagaaagttccatgcactgttgaatagaatatgtattctgtg

SEQ ID NO: 664280 - DNA, 522 bp, Homo sapiens
ctctttcagtcttttttatgtaggcatttaggactataaactttcctgttagcactccctttgctatataccagaggttttgtataggttgtgccgttattgtcgttcagtttgaagaattttttaatttccatcttgatttcatttttgacccaatgctcattcaggagcacrttatttaatttccatgtatttgcatggttttgaaggttccttttggagttgatttccagttttattccactgtggtctgagagagtgtttgatataaattcaattttcttctatttattgaggcttgttttatggcgtatcatatatggtctatcttggagaaagttccatgcactgttgaatagaatatgtattctgtggttgttggatgaaatgttttgtatatatctgttaagcccatttgttccaaggtatagtttaaatccattattcctttgttgactttctgtcttgatgacctctctagtgctgtcagtggagtactgaagtcccccactattattgtat

SEQ ID NO: 664281 - DNA, 413 bp, Homo sapiens
gactgtatctttccttcatatatgatgcttagtttcactggatacaaaattcttagctgataattgttttgtttgaggaagctgaagatagggcccctgtcccttctagcttgcagggtttctgctgagaaatctgctattaatctgatargtttgttttttttttttttacaggttacccagcgcttctgtctcacaggtcttaaaattctttcctttgtcttaattttagataacccaatgataatgtgcctaggtgatgatctttttgtgatgaatttcccaggtgttctttgtgcttcttgtatttggaggtctgggtctctagcaaggctggggaagtcttcttcaattatacccccaaatatgttttccaaacttttagatttgtcttcttcctcaggaacactgat

SEQ ID NO: 664282 - DNA, 601 bp, Homo sapiens
aaatcagcaaaataacacgttgccacccaatgcttctggctgcaacatccagatctgccatctctctcttgtctcacaatcatgtgtcttttgtatttcaaaaggactggctagacttaaagtgaattttttacatattaagtatgtaaagtcacctcaaacttttgtgattttttaatgattataaatgtagtagaaggttaatatagaaatattttttaatctttttactttatattttcaaaatctgaaaagtataaagaagaaaaataatacccaaagttaatattattgttgtcattttaatttttttttttttgagacatagtcttgtactgttgcccgggctggagtgcaatggcrcaatctccactcactgcagcctctgcctcccaagtttaagcaattctcctgcctcagcctcctgagtgtctgggattacaggcgcccaccaccacgcctggctaattttttgtatttttagtagagatggggtttcactacgttggccaggctggtcttgaactcctgagcttaagcaatctgccagcctcaacctcccaaagtgctgggattacaggtgtgagccactacacccagc

SEQ ID NO: 664283 - DNA, 622 bp, Homo sapiens
ctagacttaaagtgaattttttacatattaagtatgtaaagtcacctcaaacttttgtgattttttaatgattataaatgtagtagaaggttaatatagaaatattttttaatctttttactttatattttcaaaatctgaaaagtataaagaagaaaaataatacccaaagttaatattattgttgtcattttaatttttttttttttgagacatagtcttgtactgttgcccgggctggagtgcaatggcacaatctccactcactgcagcctctgcctcccaagtttaagcaattctcctgcctcagcctcctgagtgtctgggattacaggcgcccaccaccacgcctggctaattttttgtatttttagtagagatggggtttcactaygttggccaggctggtcttgaactcctgagcttaagcaatctgccagcctcaacctcccaaagtgctgggattacaggtgtgagccactacacccagcccattttaatattcttctctctagtttttttctgtacattttcacaaccttaaaagatactggatttttaatttttataaatatttcttgtagtttcttttgctgtgcagaagctctttagtttaattaga

SEQ ID NO: 664284 - DNA, 559 bp, Homo sapiens
atcaataaatcctaatattgcaccagatggcaaaggaaaaatgattatatagtcagctcaaaaatcacagagcagaaaagaaaaattggaggcagggatttggagctgagaaacaatatgttgataactgacacagtaatcaactgtgagacttctgattccttgcttgaaaatatgccaaggcagwtctatctcctttaatgtgggccatgattttttcaatgttccaggagccatttagcagcatagttgagaatgtctccaagaacccttgccagaacattaaatcctgagtcacagaagaatatattcatattaacaatctctctcctcatctaactccatatgacagtctacactagcagcccaccactctcaagagccattcccaggctaatatgcctgttcacattagccagctcctgcagttcagctcctttctccctaagcaggaccagcacttcctgagttgtgacatgacaatatttgatccaaattattagtctaatggccaggaagggagatgagagtagatcaggaggacagcacataaagcatc

SEQ ID NO: 664285 - DNA, 627 bp, Homo sapiens
ctttttccttttttttaaacatttttgggacagggtctcactctattgcccaggctggagtgcactggcacaatcatggctcactgcaaccttgacctcctgggctcaagcgatcgtcctacctttgcctcccaaagtgctgggattacaggtatgagccattgtgccctgccagagatcaccttctgaaccagtactctatacccaatttcagaaaaggaagcactatggattcactaaggacaagctatgcttaaycttattaactcttaaaatggaacttcacagtatacttcagattagtgtttctcaaacttaagtaatgcatgcacctcttcaaaaggaaaaaattctcataaaccccgtgttgccttaaattctcatgaaatattgtggcagagaccactaacagttccttagcattaattctccctaccttccttttcgttaatagaattcatcaagttttacccagagcttacatgttgcagcctcccttgcaactgagtacaatcatatgacaagttttggcagtgagaagtgaagagaacataaacaacttctggtcatgttctcattaagacgctgccagtcctcgacttcccctggaccccttcccatagctgg

SEQ ID NO: 664286 - DNA, 627 bp, Homo sapiens
ctttttccttttttttaaacatttttgggacagggtctcactctattgcccaggctggagtgcactggcacaatcatggctcactgcaaccttgacctcctgggctcaagcgatcgtcctacctttgcctcccaaagtgctgggattacaggtatgagccattgtgccctgccagagatcaccttctgaaccagtactctatacccaatttcagaaaaggaagcactatggattcactaaggacaagctatgcttaaccttattaactcttaaaatggaacttcacagtatacttcagattagtgtttctcaaacttaagtaatgyatgcacctcttcaaaaggaaaaaattctcataaaccccgtgttgccttaaattctcatgaaatattgtggcagagaccactaacagttccttagcattaattctccctaccttccttttcgttaatagaattcatcaagttttacccagagcttacatgttgcagcctcccttgcaactgagtacaatcatatgacaagttttggcagtgagaagtgaagagaacataaacaacttctggtcatgttctcattaagacgctgccagtcctcgacttcccctggaccccttcccatagctgg

SEQ ID NO: 664287 - DNA, 627 bp, Homo sapiens
ctttttccttttttttaaacatttttgggacagggtctcactctattgcccaggctggagtgcactggcacaatcatggctcactgcaaccttgacctcctgggctcaagcgatcgtcctacctttgcctcccaaagtgctgggattacaggtatgagccattgtgccctgccagagatcaccttctgaaccagtactctatacccaatttcagaaaaggaagcactatggattcactaaggacaagctatgcttaaccttattaactcttaaaatggaacttcacagtatacttcagattagtgtttctcaaacttaagtaatgcatgcacctcttcaaaaggaaaaaattctcataaaccccgtgttgccttaaattctcatgaaatattgtggcagagaccactaacagttccttagcattaattctccctaccttccttttcgttaatagaattcmtcaagttttacccagagcttacatgttgcagcctcccttgcaactgagtacaatcatatgacaagttttggcagtgagaagtgaagagaacataaacaacttctggtcatgttctcattaagacgctgccagtcctcgacttcccctggaccccttcccatagctgg

SEQ ID NO: 664288 - DNA, 627 bp, Homo sapiens
ctttttccttttttttaaacatttttgggacagggtctcactctattgcccaggctggagtgcactggcacaatcatggctcactgcaaccttgacctcctgggctcaagcgatcgtcctacctttgcctcccaaagtgctgggattacaggtatgagccattgtgccctgccagagatcaccttctgaaccagtactctatacccaatttcagaaaaggaagcactatggattcactaaggacaagctatgcttaaccttattaactcttaaaatggaacttcacagtatacttcagattagtgtttctcaaacttaagtaatgcatgcacctcttcaaaaggaaaaaattctcataaaccccgtgttgccttaaattctcatgaaatattgtggcagagaccactaacagttccttagcattaattctccctaccttccttttcgttaatagaattcatcaagttttaccyagagcttacatgttgcagcctcccttgcaactgagtacaatcatatgacaagttttggcagtgagaagtgaagagaacataaacaacttctggtcatgttctcattaagacgctgccagtcctcgacttcccctggaccccttcccatagctgg

SEQ ID NO: 664289 - DNA, 647 bp, Homo sapiens
actaaaatttgagaagcactgatccaggagaaggtagaacaacaagctagaaggagcttgggtatctagacgacccaccctactacaccacctaccagctcagacttttataagataagtagaccttctatatttgtttaagcacctttatttttacgtctgtttgatccaaaatgccaactatattaatatgtacaaacaaaacatgatataaattcccacctttacagctttttcaatatagtgtatttgttttgtaccttgcctttcttcaataccacaaccattattaaatcacatatattatagtggttttattgagtagttaagctgattatgtgccagtccacagccataaaattaaaacaaatttayaaatgaaataaaaaagaaaactataaaaccaataaaaatccaaatgaacaattgttttaatataacgaggtagatgatgtttttctgctggaacgaaatcactcttctcttcacaacacagctacggaactgatgtttccacacaaatgtttttgagtttggcatatttatactaccacgtgttttgtgatggctcaattctcttaccaattgactctatttgaagtactgtcaaatcaccattagcatcaaatgtcatgatagcttttgac

SEQ ID NO: 664290 - DNA, 471 bp, Homo sapiens
ttattattaaggagaatgacaagtttgaaatgagatcttaaagccaggacacaaggaacagaaacaatcacatgtggggatgctttcrtgagaattaaagctgcagatgaagaggctggagtgcatggatttttccatagtctctaggtatgttgtgtgtttttctcgatacgtgaatctaaccagtgaaattcttctcacgccgagcccccagtttgttccacctggaaattattaataccttgtcttcctgcctttgacctggaacggcagtgtgagaatattctcccagggggcagcagagagcagcaggacgctccagcattggaagccataccctggaaccagctcagacctgtcctcaggggcacccaggctgggcccaaaatctcagagtgtgcaaacacaagccttcataaactgcccctactaaacctcacctgccccaaccagcactacagatacaaatca

SEQ ID NO: 664291 - DNA, 471 bp, Homo sapiens
ttattattaaggagaatgacaagtttgaaatgagatcttaaagccaggacacaaggaacagaaacaatcacatgtggggatgctttcgtgagaattaaagctgcagatgaagaggctggagtgcatggatttttccatagtctctaggtatgttgtgtgtttttctcratacgtgaatctaaccagtgaaattcttctcacgccgagcccccagtttgttccacctggaaattattaataccttgtcttcctgcctttgacctggaacggcagtgtgagaatattctcccagggggcagcagagagcagcaggacgctccagcattggaagccataccctggaaccagctcagacctgtcctcaggggcacccaggctgggcccaaaatctcagagtgtgcaaacacaagccttcataaactgcccctactaaacctcacctgccccaaccagcactacagatacaaatca

SEQ ID NO: 664292 - DNA, 580 bp, Homo sapiens
ttgcagctttgcttcatgtccatgtattaaatgcatattcacgcagaaaaatgtatcatgagagtgttaaataagaaaggcccctgacctgaggctgtctctgtactctcagttcctaggtaatgaamcgcaacctaacttagcacataaactgaaaacctaacttgggagaataacaaacagctgagtctcagcccctctgcagcccagcttcagccaatcacaggctgccaactgatcagacccgaggccaaataaggcaagagctgagctgcaaccaaccaggctatttctgtactttaacttgttttctatatcactgcttctttgcagagttctctgaatcttttgtaattctgagtgctgcccgattcatgaatcattccttgctcaaataaactgctaaatttaaattgtctagaggttgttttgtttttttaacaagaggcttgtttaaaaaggctcctactgaggcaggagaataggatctggaggcaggaaaccttcacgcagacttcctagaactaaattgaaaggaaaaccctaactttccacacctaagcaacaaaacgaccagagg

SEQ ID NO: 664293 - DNA, 580 bp, Homo sapiens
ttgcagctttgcttcatgtccatgtattaaatgcatattcacgcagaaaaatgtatcatgagagtgttaaataagaaaggcccctgacctgaggctgtctctgtactctcagttcctaggtaatgaaccgcaacctaacttagcacataaactgaaaacctaacttgggagaataacaaacagctgagtctcagcccctctgcagcccagcttcagccaatcacaggctgccaactgatcagacccgaggccaaataaggcaasagctgagctgcaaccaaccaggctatttctgtactttaacttgttttctatatcactgcttctttgcagagttctctgaatcttttgtaattctgagtgctgcccgattcatgaatcattccttgctcaaataaactgctaaatttaaattgtctagaggttgttttgtttttttaacaagaggcttgtttaaaaaggctcctactgaggcaggagaataggatctggaggcaggaaaccttcacgcagacttcctagaactaaattgaaaggaaaaccctaactttccacacctaagcaacaaaacgaccagagg

SEQ ID NO: 664294 - DNA, 599 bp, Homo sapiens
tggagtgcagtggtataactgccggatgggttcaccttgaccgctgcctagacagaaccaatttatcaagacaggggaattgcaatggagaaagagtaattcacacagagccggctgtgtggaagactgcaattttattatcactcaaatcagtctcccagcgcattcggggatcagagttttgattttttgttattttggtttttttgagacggagtctcactctgccacccaggctggatggagtacagtggcgcgatctcggctcactgcaagttccgcctcccgggttcacgccattctcctgcctcagcctcctgagtagctgggattacaggcgcccaacaccacgcccggctaattttttgtgtttttagtagagacgggatttcaccgtgttaaccaggatggtctcgttctcctgacctcgtgatccgcccgcctcrgcctcccaaagtgctgggattacaggcgtgagccaccaagcccagctggggatcagagtttttaaagataatttggcgggtaggggcttgggagttggggattggtcaggttggagatggaaccacagggggtctaagtgaggttttcttaat

SEQ ID NO: 664295 - DNA, 563 bp, Homo sapiens
ttttttgttttgttctgttttgtttttttgtttttggacaaggaaagtaacttaaaagcagggatagacaccattgttctgagagatggtataccttatttcatctaatctaagatatttatagatatgtctatatttcattttaacgtattagaagttgggattgtcttataattgctagtatgttataatttaattggaaataaccttttctttcttagtggaccacaaaataatggtgtaccttgaaagtcctaggcaggaggattgcttgaagccaggagttcaagaccaaccttggcgaacatagagagactcccatctgtataaaaattaaaaaataataaaaartaatggtgtatttacaaccaatggcttctttgctttgatgaaacaggagtattttgtaaaccaaaggaatatgttcatcatcagctggagctgccatgataccaggaaagaaaatgtagaaaaggaaaggaggtgccctcatagccatgagagcttccccaaaatttgtgttgtcctcagtgtttctctctgggttagccacagtggtgctg

SEQ ID NO: 664296 - DNA, 617 bp, Homo sapiens
gttggtgatggcagggattcagagtgcacattacaatcatctgaggacctaaacaatacccttgcttgggcctcacccgagagatgccaatttaatttcaccgagtttctaatgtgtaatggtctgggaacctgaccatcagcttcatgagtagatgccgtgctcctcctctgtgcaactctgccaaacccaaactaaacagagcaaacaagcctgatttcaaccccctgcaagactgtggcagctttcctctagactggtgatctatgtcaccccttrgttatgtctgtaggaggttatgtgggttcagtcaattactgaggggaatcttgctaaaagatgtttacagatgcatttagaaggttgtgtaaaacattgcagctttttcccatccagtcccttgatacctggggtcactttgcattctgatctctcttctcttcctccaccctggtcctttcccctctcttctgtctgcttcccagggtcccaactcctccctggaatggcagtagcagaaccttcctgggaatcactggaggaggcttttgatcccagaatcgagtgtcctcagaaataaagttttccattacttatactcactggctcatagcata

SEQ ID NO: 664297 - DNA, 617 bp, Homo sapiens
gttggtgatggcagggattcagagtgcacattacaatcatctgaggacctaaacaatacccttgcttgggcctcacccgagagatgccaatttaatttcaccgagtttctaatgtgtaatggtctgggaacctgaccatcagcttcatgagtagatgccgtgctcctcctctgtgcaactctgccaaacccaaactaaacagagcaaacaagcctgatttcaaccccctgcaagactgtggcagctttcctctagactggtgatctatgtcaccccttagttatgtctgtaggaggttatgtgggttcagtcaattactgaggggaatcttgctaaaagatgtttacagatgcatttagaaggttgtgtaaaacattgcagctttttcccatccagtcccttgatacctggggtcactttgcattctgatctctcttctcttcctccaccctggtcctttcccctctcttctgtctgcttcccagggtcccaactcctccctggaatggcagtagcagaaccttcctgggaatcactggaggagscttttgatcccagaatcgagtgtcctcagaaataaagttttccattacttatactcactggctcatagcata

SEQ ID NO: 664298 - DNA, 603 bp, Homo sapiens
agattctgctctgccttctcccactgccgaggggaagcgcttcccaaaagtgagccacaccaggcgtggtgtgcacagcctgtcccacatgagagcgttgacaggaactgtaagtcaagggccccaggaggtgtgtgagagtcatagagagccttttcctctcatcaaagcagggcacactaagctgctcctagcccaggaggacaccctggttccaaatcaaaccagctgtttgctggtaaccatgttagccaagttcagagtgggaggggagataggttcttacacatcatttcctgcatccactcccttaacggggccctttatcatcccactctgttcctttccttcctggatgactacagtctgcttctcaccgtgatgccactactggggcacatagcagagatccccaaacatttgttwtcaggtttgagataaccagtgtcatcatcagggttctccataggaacagaaccaatagggtgggggaagtagggagacagagattaatttaagaaattggctcacacaatcatgagagctgataagtctgaaatccacgagttaggctggcgagtccagcaataagttgatgtatta

SEQ ID NO: 664299 - DNA, 528 bp, Homo sapiens
gctgggttttgtcaagtccagaatctgcagacctcatttgcagaggcctccttaatttaacgagaaggaaacccttttttatccctgggagagccactaaccaacaccacagcarcttacctccacaaacacatagagcaagctttcatacccacatcaaagggaaaaacaactctgtcttgcaaaaaagacatttaatccagccaagggaattcctggatcctctctgtgttggcctttggtacagtattttctgttgttgcagctgtaaattgtgaaatttctaacacctgtcatcaacatactttgataaaatcaggtgagtatggatgaggccacacttagaacaagcaggtctttcgggagcagggattgagcaaatcattgtggagaagatatttttctttcatatgatgccagagaaagactgaatcacagggaaagagttgaggagcaccagagttctaatactcaaacttaaccatcccaacccgagctaactgcatttcttagactgtatggggaaaa

SEQ ID NO: 664300 - DNA, 528 bp, Homo sapiens
gctgggttttgtcaagtccagaatctgcagacctcatttgcagaggcctccttaatttaacgagaaggaaacccttttttatccctgggagagccactaaccaacaccacagcaacttacctccacaaacacatagagcaagctttcatacccacatcaaagggaaaaacaactctgtcttgcaaaaaagacatttaatccagccaagggaattcctggatcctctctgtgttggcctttggtacagtattttctgttgttgcagctgtaaattgtgaaatttctaacacctgtcatcaacatactttgataaaatcaggtgagtatggatgaggccacacttagaacaagcaggtctttcgggagcagggattgagcaaatcattgtggagaagatatttttctttcatatgatgccagagaaagactgaatcacagggaaagagttgaggagcaccagagttctaatactcaaacttaaccatcccaacccsagctaactgcatttcttagactgtatggggaaaa

SEQ ID NO: 664301 - DNA, 530 bp, Homo sapiens
catgtctttaggtcaaaaatgccattatggggcaggtgtggtggctcatgcctgaaagcccagcactttgggaggccaaggcaggaagatcactttagcccaagagttcaagaccaacctaggcaacacagtgagtccttgtctctactaaaaatgaaaaaaaaattagcctggtatgatgacaagtgagtgaggaggctgaggcagaaggatggcttaagcccaggaggtcaaggctgcagtaagccatgatcatgtcactgaactctagcctgggtgacagagtgagaccctatctccaaaaaaaaaaaaagtctttaaattaaaaagaagtgcactctttctggcatatgagtactgtcccatgagtaagatttcctaaagaatgtcactaagcttttctttcagaaaccggttcttccacaayggcagctagaacattcagatcagaggagtggcttataagggtttccagctttttctttaacaataatacgttgaacagtttgttctcatgatacctctcagaa

SEQ ID NO: 664302 - DNA, 560 bp, Homo sapiens
ttttaatttggctttttttaagtgcctagtccattctgagtttatagtaggcactcaacaattgcttattttaaaattgacagtcatcccagtgaaattgtttatttctttgtttttaaggactttaatttccaaattataaagagctatgaccagctaaaaataggaacaagaaaagagactgggaatgtgagcgactgcaggaaatgaattatttgaaagtcaagcctttggccttttccttctcaacgatgagataaaccccagccttcaaagaatgttgggtaaagtggggatgggtgggttagggggttgaaatgcaaagsaggaaacaagctcattttggatatcaaattaattgtattggactaaggaaaatttacccacacccctatgttctaactctatgattttaaaaatacaatattctatgcacacaggaggtggtaaccaatgggaaaaggaggagactggtgccttctcaatctctgacaaacaatccaaagattgtagagatccaaacaaaaggatctctacatgaagcactattgataccaaag

SEQ ID NO: 664303 - DNA, 583 bp, Homo sapiens
gctttccacattggctgaactaatttacactctcaccagcagtgtataagcattcccttttcttcacaacctcaccagcatctgttactttttgactttttagcaatagccagctgactggtgtgaaatggtctcttaccatgattttgatttgcatttctctaatgattaggttaaacattttttcatatgcttgttggctgcatgtatgccttctttttaaaagggtctgttcacgtcctttgcccactttttaatgggattgttatttgcttataaatttaagttcttttagattctagatagtcgacctttgtgggatgcatagtttgcaaatattttctcccattccgtaggttgtctgttgacttgattgatagtttcttttgctgtaagcatatgttattttaaaattacatcacatctgtacactgagtcatctaaacaatgaasgaaatgaaatgatcaatatactaaaaagtaatgctggattaaactaagttcaaggtcttgcaataaaatttagcttgtcccacttattctacatttttaactacaacgaaactcatcttttaaaaaaact

SEQ ID NO: 664304 - DNA, 606 bp, Homo sapiens
taaataaataaataaataaaaataaagataacctgagtgctacttccttccatgggtactcactgttcacaccttacccctccacaagtgggagtacaattcctccccaattaccttttcacctcactctggcagctcaagtcagaaggaaacaggtcacagtccctacatccctgacactgaaggctccctcacttgccttatgaccctaggggcacactctgtcccctcccccaggaaggcactctgataactctcctgtcaaaagattctcactgccctttcccataacggattctttacctcttctccctcacctgcagcacatgaggagaatgctggcaaygccatttccataatcccttagcaagtgctgtgtaggtgatccaacatctcatgagacagtagggacatttgtcacctggggagacaactggaaagtcacatgtgacatcctgttacattaatcagactctcagttacaagagaaaagcctcactcttaattagtgacttcatcttaattagtggaggtttaagataagaatactcactgaaatcggaacactaaaatattacggcagctctaaaatactagagcagctgt

SEQ ID NO: 664305 - DNA, 647 bp, Homo sapiens
gtgctgaaggaaaaaatttttttatcctagaatagtatatccagtgaaaatatccttcaaacatgaaggagaaagtaagactttcccaaataaacaaaagctgagagattttatcaataccagtcctgtcctacaagaaatgctaaagagatttcttcaatctgacagaaaataatgttaatgagcaataagaaatcatctgaaggtagcaagcccactggtaacagtaagtatacagaaaaacacagaatattataacactgtaattgttgtatataaactactcaaatcttgagtagaaagactaaaagatgactgcatgtagggggtcacacctgtaatcccagcactatgggaggcaggaagatcacttgagctcaggagttcaaggccagcctgagcagcatagcaagacctcatctctactaataatttaataaaagaaagactaaaagatgaccygatcaaaaataataactacaacatttcaagtcatagacagtgcaataagatataaatagaagcaacaaagtgtttaaaagcaggaggataaagtgtagagtttttattaattttctctttcttatgcaatcagtgatatgttgttataatatcttacaatcttttaaaataataggttataagat

SEQ ID NO: 664306 - DNA, 548 bp, Homo sapiens
cgttcggtccctggagaggatggtcagtggccccaaggcttctacagcaacttctaagtggtgatttttgtgctcctttccctaaagggcttraatttctcggagcactaaatctcccccggttttctgcgcgctatcacgcgctgcggtgcaccaaagttgcgttgcagtgccacctacagtctgcttctgatagagacccagagccacccaatccagggccctctccaccagctgaccagttaaagcaaaatacagacattctggattcaagtggactctgcctctataagaaactgctcagtacaaagtcaaggagccctcctatctgaacttccatctggaactatggattgctaaaccgtttgaaatggtgtcatcagcttggattcttgcttcacattgtgtttttaactttggaagttttaaacaccttcatggcaagaggcctcccgtggtgacagtatgagaagaggaaaacagtggctgctgggcctttcctttctgcttcttgtggttgtggcagtgtttgagcttcgttaagatct

SEQ ID NO: 664307 - DNA, 548 bp, Homo sapiens
cgttcggtccctggagaggatggtcagtggccccaaggcttctacagcaacttctaagtggtgatttttgtgctcctttccctaaagggcttgaayttctcggagcactaaatctcccccggttttctgcgcgctatcacgcgctgcggtgcaccaaagttgcgttgcagtgccacctacagtctgcttctgatagagacccagagccacccaatccagggccctctccaccagctgaccagttaaagcaaaatacagacattctggattcaagtggactctgcctctataagaaactgctcagtacaaagtcaaggagccctcctatctgaacttccatctggaactatggattgctaaaccgtttgaaatggtgtcatcagcttggattcttgcttcacattgtgtttttaactttggaagttttaaacaccttcatggcaagaggcctcccgtggtgacagtatgagaagaggaaaacagtggctgctgggcctttcctttctgcttcttgtggttgtggcagtgtttgagcttcgttaagatct

SEQ ID NO: 664308 - DNA, 548 bp, Homo sapiens
cgttcggtccctggagaggatggtcagtggccccaaggcttctacagcaacttctaagtggtgatttttgtgctcctttccctaaagggcttgaatttctcggagcactaaatctcccccggttttctgcgcgctatcacgcgctgcggtgcaccaaagttgcgttgcagtgccacctacagtctgcttctgatagagacccagagccacccaatccagggccctctccaccagctgaccagttaaagcaaaatacagacattctggattcaagtggactctgcctctataagaaactgctcagtacaaagtcaaggagccctcctatctgaacttccatctggamctatggattgctaaaccgtttgaaatggtgtcatcagcttggattcttgcttcacattgtgtttttaactttggaagttttaaacaccttcatggcaagaggcctcccgtggtgacagtatgagaagaggaaaacagtggctgctgggcctttcctttctgcttcttgtggttgtggcagtgtttgagcttcgttaagatct

SEQ ID NO: 664309 - DNA, 588 bp, Homo sapiens
tacaggtctttgtgtggacatatgtttatgttttcatttctcttgggtaaatacttagacatgggattgctgagtcacattttaatgtgtgtttaactttataagaaactcaaagaggctttgttttccaaagtggctgtaccattttgtgtttcattagtaatatatactgcttcacaccctctcaaacagttggtakggtcagtctttttaactttagtcattctaataggcattctagtggtatctcattgtattgtcttaataaataatgtttagaatcttctcatgtgtttctttgccatccatatctcttgtttggtaaggagtttaattccttggtcagtttttggagggttctttgttttcttcttgagttgtaagagtgttcacatgttctagatataagtcacttatcaaatatgtgttttgcaaatatcttctcccagactgtggcttgtcttttttattttcttaacagtacatttcaaaaagcagtttttaatttttgtgaagtctaaatttatccattttttctcttatgtttcctacatattgtgtccaatcaaagaaatctttgtctgatcc

SEQ ID NO: 664310 - DNA, 535 bp, Homo sapiens
aatcttcttcttttgctcatarttttataaatcagaaattcaaaaaagtgttgcctggggcggttcatctctaccacacttggagtcacctggggcagctggagttggaggatctgcgtccaggatggcttctccactcatatgtctgactcctcagcatttctcagcatccctttctcccacatggtatctcaacttccagcagctctctgcatggttgagggttctcacagcattacggtctcagggtagatgctcttattccatggtgtctggcttccaagaggcaggaagtaaaagctgctaggcctgttaagggctatgcttagaaatcagacagcatcacttttgccatgttctactggtcaaagcagaaacagggcctgtccatattcaagggggtggagaaatcaactgcaccttttgataggtgagtggcaaagtcacattgcagaacagcatgtggaatgggagacactattgggatcatccctggaagatacactctgccataacttctctgtcattcctagca

SEQ ID NO: 664311 - DNA, 574 bp, Homo sapiens
gttatcacacctaaaaaattaacaataattccttcatatcatctaatatccagtcaatatttgaccttctccaactgtctcataaaattttttaagtgtgtttgaaccaagatcctagtaagggtcactcaagtcgcttttagtctataaattccccttcatctgttatgccttgtgatgtgtttgtgggagaaaccagcttgccccgtagtgtttctcacagtctggattttgctgattgtatccccatggtatcatttaacatgctcctttctcccctgtattccctgtgacttggcagctagatctaggcttaatcagattcacatttaattctttttaatcaagaacacyttgtaggtggtgatatgtttggtcggctctctttctgtaatattagcagccagttgtcatcattgtcaaaattcattaatccattagaggctgcaaaaaggtaatattccaattttattattctttattcatgtatggcagcaataactgtataaagagaaacttcccctgaagggacagctcataagggaatagtagcataagtgtttgattctttctc

SEQ ID NO: 664312 - DNA, 598 bp, Homo sapiens
tggtttggagagagccaccttctcgtatcctcagtggcagaaaggccaagggagctcttctggggttttttataagagcaytaatcccattcatgaagactccactcttacaacctaatcaccatccaaagttcccaccaccaaatactatcacactggggattaggtttcaacatataaattttggggagacacaactattcagtctacaataataaccaatggtgacgaatcacctatgtagcaaagcaacaatgatgctaaatgaaagggacagaaaaataaatgtaggcaaagatgattttttttaagaagtgatagtaaagcaagcagaacacaagctgttgaggagccaagaagttctaaatccaaaaaacagctgaatttctcacacaaatctctgcaaagtctatgtctgcaggacaggcttggcagaaaaacttctcaagatctatatactccagctaggtgtggtctgcaccttattaccaagagagcaaaagtcaatataaatggaagaaaaaaataatatgaagctatttcatcttgattataattatattcaattaaattcaataagcaataagtatccactaac

SEQ ID NO: 664313 - DNA, 584 bp, Homo sapiens
taatagatctgtgtgcattttccaaaacattctactaaggcatatacaaactttttaaaatagacatgagctcttgctatgtaaactcttacacaggtttccttcccaccacccccatccttggcatcgtattgtggacatttttctatgtctatatataagtttacctcattctttgtaatggcagcatggtgttctagtgaacrgatataccacaatttatttaatggacattacaattatttagaatttttctggccaggcgcagtggctcacacctgtaatcccaacactttgggaggctgaggcgggcagatcacctgaggttgggagttcgagatcagcctgaccaacatggagaaacccccatctctactaaaaatacaaaattagccaggtatggtggtgcatgcctgtaatcccagctacttggggggctgaggcaggagaatcatttgaacccaggaggcagaggttgtggtgagccgagatcatgccattgtactccagcctgggcaacaaaagcaaaactccatcttaaaaaaaaaaaagaattttcctctattactgagtttgaaggggtc

SEQ ID NO: 664314 - DNA, 547 bp, Homo sapiens
agaaattataagagaattatcaggaaagtgataaatgtccatgacgtcttcacaatttatgttcctctgccacagctccagccagttcctccattcggggtccctgacttcctgcaacattaagatttctttttagcaaaagaacccttgtgtsagtacaaaatgtaaaggagaaaaaatcagcacaattctcttgaaagtcaaggtgggagaccccaacccccaagctcaatggcctccagctggtcccctgcagtgcccccttcacatactccccatggaatttttaggacacaactgggctcagcttaaaaaccactgggcttagaagaactgtaaagtatctcccagcactactctagttaggatttaaatgaatagaaattctgaatcactctagtatacagtccctcggaatctatggaggattggttccaggaaccaccttgggtaccaaaatctgcagatgtttgagttatttccataaagtggtgtcatatttgagcacaagctatgcacatcttcctgtatactttaaatcatctgt

SEQ ID NO: 664315 - DNA, 637 bp, Homo sapiens
ctgcctcatcttgtagataattgtgtatttacccatttcttcttctatactatgacttcyttgaaagcattttggggttttacagaatgtctagcacagaattatacatataatatatttattgaatttttcagataagaaaacttaaggcaaagactaagcaagttgccaagctggaattagaaaccaacaaatcctagttcagccctgcatgctatctttccaccacacacattgtcaattctaaatacatattattgaatgaatttatttctggggccttctttactggatccctttcaagccacacaatttggtcataattgcaaaccaatctgaatattaataataattggaaacataaattaaaatttgataactcagttttccaagtaagttgagttggctagataagagttaatgcctaatatgatagagttttctgccaatgttcattttattaatgcaaaacaattttaaagcattgtaaaaatagcggcactattagtagtagtaagagttgtatgaaagatttgcttaattaaattgagtatcagatttttattagaatacatgtttaaagttgatcatcaaataatacctaaatttgaagtcgtttttacattatatttattta

SEQ ID NO: 664316 - DNA, 463 bp, Homo sapiens
aacccactctgggtttctgcccaacttctctccctgcagtgcccttcacagacctctcttcagtgcctcttcctcacttttcattcatctcctttaacatgtttttttcaagactggagccttaaaatattagaccttgtcaggacggcaaatgcaaaccagacaaaccactactgcactactgttcaaaatgtttgattmtccttttaattaaccaggaattcctccctgcaaaatagctttaaggggcatctggaaacatccagctaggctttacgttgtcctggtgaaggtcaaagttgcacactaggtacagcagagaccttcccactgacaggcaggtagcggtttttctagtatgtggtcttttctgagacctgcagagaccacagactttgcatttgccacaaaaagaattactgtgcactcacggttttcctgtgtgtggaactgatgtgcaata

SEQ ID NO: 664317 - DNA, 196 bp, Homo sapiens
ataggttatgcaatatgcttaataaagtatgtttgtctattttcgttatgtaatccaaaacctggccaaccacaaaactttttactgactttctctttcttccctgtttagtgcagcataaaattagttattgattttatctcttaacgctccgcctctattagwgaaaggatcttctcttatcatatttccagtc

SEQ ID NO: 664318 - DNA, 575 bp, Homo sapiens
tgtgcacacttgtgcacatgtgtctatctgtaggggagggatggcctggggatgtgcgagtccctgtgtgcatggatgtgtgtgctctgtgtattcatgtgtgtccatagcctatggatagtgcttcttgtttgtatgcatactgtatatcctatatatgcatcctgtatgtacttgtatatacaagtatatacacacacaagtagagggagcttaaaggaagaaaaaattctgaataggctttcagactgatgttattcaaccactccatgagatgtcagtatccccaaaaggttgcagatgggcctctcctgtcttcccagctcrgagtctgttctcctttcaatgagatatgggctgggcacagagcttggcactactagctctgtgagggaggaggttctctccctgctttacagatgaggtgactggggtctagagaagtaaaatggcttgcccaaggccatagtagcagctggtggagctgggatcaaatgtagctctacctcactctgaagcattctgtgattctgtgctgcttcctgggctttggctgcttcttatccgagaaactt

SEQ ID NO: 664319 - DNA, 467 bp, Homo sapiens
tgtgcacatgtgtctatctgtaggggagggatggcctggggatgtgcgagtccctgtgtgcatggatgtgtgtgctctgtgtattcatgtgtgtccatagcctatggatagtgcttcttgtttgtatgcatactgtatatcctatatatgcatcctgtatgtacttgtatatacaagtatatacacacacaagtagagggagcttaaaggaagaaaaaattctgaataggctttcagactgatgttattcaaccactccatgagatgtcagtatccccaaaaggttgcagatgggcctctcctgtcttcccagctcagagtctgttctcctttcaatgagatatgggctgggcrcagagcttggcactactagctctgtgagggaggaggttctctccctgctttacagatgaggtgactggggtctagagaagtaaaatggcttgcccaaggccatagtagcagct

SEQ ID NO: 664320 - DNA, 594 bp, Homo sapiens
cagaatttgataacaattttttaatgtattttttttagatggaatctctctctgttgcccaggctggagtgcagtggcgtgatctcggctcactgcaatctccacctcccgggttcaagcaattccttacctcagcctcccgagtagctgggattatagtcgcacaccgccatgcctggataatttttgtatttttagtagagatggggtttcatcatcttggccaggcagtcttgaagtcctgaccttgtgatccacccgcctaggcctcccaaagtgctgggattacaggcatgagccaccgcgcccagacttttaatgtattttttaagtctgctttcaatttataacaggggatactggtttgctattgatgtgatgattctaacttacaaaaatatattcgtttaaggaaaataaagcaagttgattaaaaatgaatcacgtaggtggcacaaagatttgacaaccatcatgraagttgtttgtgaatgatggatgtcgccagctgtcccatgctcagaatcctgagtggcaagtgatacatgatgtgttatctcacatcaattcccatttctcaccctaccagtcata

SEQ ID NO: 664321 - DNA, 616 bp, Homo sapiens
gggcaaaacccatgaagagacattttacagatcttaaataaataaaattatttttcaatatcatcagtcattagggaaatgtaaattaaaaccaaaattaagtattactacatgtctatcagaattgctaaaataaaaatagaaacaacatcaagtagaatgtggagaaactgatcacagatacattgctggtgagaatgtaaaatagtagagacactgaaatagtttggcaatttcttaaaaagctaaacatgcaaccaccatacaacccaggaactgcactcctgggcattgtcacagagaaatgaaattcagattcacacaaaaacctgtacatgaatatgcatagcagctttcttcacaataaccaataagataatttttttaactgtgttacatctataccaggggtgtccaatcttttgkcctccttgggccacattagaagacgaagaattgtcttgggccgcacgtaaaacacactaacactaacaacaactgatgaggttttttaaaatcgcaaaaaaaatctcataatgttttaagaaagtttacaaatttgtgttaggcagcattcaaagccttcctgggccacatgcagcctgcaggccacctg

SEQ ID NO: 664322 - DNA, 570 bp, Homo sapiens
tctcacacattttctgtgagtcaggaattctaaagcagtttaatgaatggttcagacttaaggtctctcgtggggttgcagtaaaggtggtaactgggctgcagtcatctggagacttgactgagtctagaggatccgcttccaagacgacccactcacgacactgaaaagttgacctcttggcagaagatttcagtttctctccatgtggacctttccataggcctgcatgagtgtctgcgtgacacagcagccagcttccggcaaagtgagtgatccaagagatactagcatataagctattttattttttatgagctggcctcagcagtcacacttcatttgtgtaatatcctattggctagacaagtcagtcccattcaatgtgagaggtactacacaagaatgtgaataccaaaaggtgaaaaccactggggatcatcttggaagctggcatctactgtggtagaacagaaaatctcagagtgaaaaacaagaattctgagtaagaaatgtgcatattgcaaygactacgccaactactgcgaatggtctgagagaaacagtgag

SEQ ID NO: 664323 - DNA, 576 bp, Homo sapiens
cttttacattttagaacagttttaaatttccagaaatgtcacaaagagattacaaagagttcctggatactcctttcccagatttccctgtggttaacaacttacattactatggtacatttatcaaaataaggaatcaacactgatacattacwattaactaaactccatacttcattcagatttcactagttttcctctaatgacatttttctgtgccaggatcttatctaagactttatgttacacttagttgtcatgacttcttagcctcctctggtctgtgatagtttttccaacaaccagattcttgtatttgatgaccctgacagttttgggaaaagctagacaagttctttgtagaacatccttcaatttgggtttgtctgacattttccttcatggggtcatggatgggttgggagagaaagatggcagaggtgaggtacctttctcatcacaggatggtgccattcctttcagatctttgggctttacttttgagagaactatgctgtaatggtaggcctagagtcagatggcctgatcccacacgctgtctccactacctactca

SEQ ID NO: 664324 - DNA, 632 bp, Homo sapiens
ggacttgtcacttccttcctctgtccacatttcaccccaacatgacagtgccagaagtaaagtatttgagtcagagtcaagctggagaatgacccagtgtaggccaggcatggtatcccagytgcttctgcatcaaatagctagccctatcttcaccttgttcggtaagactaaaccggccagcacaaatctctgtccactgcatctttaaagattctcccaatgtcaaacattattcaaagaaagaaatttgtgaccctgctggatggcactggcctgaggtggtttgctatgaactcactatgtgaccttagttaaaaagtctccctgttctagacctcagtttccttgcctatttaatgagatgcctcgattcactttcaaatgtttattgagtttctactctggggcaccaaggtgcacaagacagacgtactccttgccataggggagcttacaatttagtggaatagacagataagattttaaaaagcaaatctaaagtagtgtggaagtattccacagaggagaaattatagagattccactgaaaccaaaggaggggcagctaggccagactcagggagtcaaggaacatcttggcaccaataatatctgtgatggttaatact

SEQ ID NO: 664325 - DNA, 550 bp, Homo sapiens
ttatttgtcataagacttcccacactgataaagtctccttaaaagcatagtattttttttttccagcaacactgaaatcaaggtgcattttactgtttctggcatcttccaattgcaataggcaacaatatttcttccttattgccacacaaaataatggtgcatcttacaattgatggcatcttagattctgttaaatacaatgtgttttttacagatttgggggtatgtgttagcgatacacaggttcatatggaattatgttgttctcatagctttcatacattaatttttccagtcactctacctgctaagtatcagracttttcattgtattctgtttttttttcttcttcttcttcttcttttttattatactttaagtcctagggtgcatgtttttgtttttgttttttttacaaagcacaataccaagtacaaagggattttgtatttgttttctatagctcacatagtgtgaaatgggccacgttaacctctactgatcctctgtttaacactaccaccagccttggagaggataagagac

SEQ ID NO: 664326 - DNA, 539 bp, Homo sapiens
tctgaaaaattaagacaattagtcctttatctgccatatctggtacgaatgtttttctaatttagtattgattatagtatttttttccatgcagaacttcaaaaattttagatagtcaaatctgtcagtcttttttatggcatttgggttttgtttcttctttagaaagctcttttgtatgtcaagatcacaaaagcatttcatcacttttccttttagtgatttgtatggtttctgctaattttttttacatttaattcattaatccatgtggagctttgcattacttttctattactgcataacaagttatcaaaaacttagcagcttaaactgacatacrtatattatctcacagtttctgttgatcaagactctggccatagcttaactagggcctcttcttagggtttcataggctgtgaccaaggtgatggccaggactgtgttctcatcagaggctcaactggggaaggatccacttccaagctccctcactttgttgtctgaattcattttctgatgctgtaagatttatg

SEQ ID NO: 664327 - DNA, 622 bp, Homo sapiens
acaacctgtctgcccccatcgacatttgcatttgaagcccctagtctgatctttaacctagaaaagcagggtccctggaaactcagccaggacccagggacagaaaatgcctggaaacaacaaggttttgttttccagtaagaaagcagaagagccacaygagggccagggccgtgggactcaatgtccctgtgatggagagctaagtggatcctgctgaggtgagagtgtgtggttccagcgaggctggctattaccaacctgaggctgaggtcaccccagctgctcctggcgcctgcaactctgtttatttcattctggttcataccagagatttatttttatgaacagtgaacattttttgtaacattccctcatttaaccttcattatcaaagtctctgcccaaagcccatataagcaccattattgcccatataacattttccaacacaaaccatttaaggcatttttttccatttttatttatttctcttctgttacatttcatttgaaatgtgcatgggggagaatgtgtcttgtttttatgttgtctcatacagaccataagccctaatggtgggggctgcctattttggaggttaataagcaatggggacatt

SEQ ID NO: 664328 - DNA, 605 bp, Homo sapiens
tattcccaatttacagatgaaaaagctaatgtttacagagattaaagaatttgctgcaaatcacatgactagtaagtggcagagctgtgatttgatcccaggtagtctctttttgaaatccagtttcttaagtactctactgttctacctataaactcttgctgtgcccagaaaataattttgttttccctcatactgaggatcagcataaattttcatagagataactttcctttctcagaatctactgcccctttgagtgagactggaatttggtgatatttagagagggcaaagggcaccttctctgtgctttccttacttctaagttctcccagtggactagctccagacacttctcttggttggacatgatccaaaatgttcttttttgcttctgcttctagaaagctaatcaacccaaatcattaagcaaaatccrctttaaaaattagtaatagaccaagtcccgtggtatcatcagaggtttggctaagaccacagggaaagagctaatgtctgccatatgcaaagacttcttcacagatacttgctataggacctaaggatacacaataaaagcaatcatggagaaataaatttca

SEQ ID NO: 664329 - DNA, 422 bp, Homo sapiens
ggaaaagaaaataaaacaatgattcagaacacatactgaaaaatacaattagaaaacatgtagtctctggttagtggtgctttctatttctatcatttcttctacatttatcaatagactgccatcataagaaagatctgtctcttttccccatttacttatttattccattttttttatttattcaatcayatatttatggaagtatggactcacaaataatttattttattctacaggttgtaatgcaacctgtcattcctaagttttttgttcaaattgtttcagcattggatattggaaggatcttcaaggtgtttccaatgtcctttcaaacatgtcctcatcctttcttaaatacttccctacttttgaaaccacaatattttccaggctcatcttatatttttcctatcacatcc

SEQ ID NO: 664330 - DNA, 613 bp, Homo sapiens
agttccattgttcttcctcaaatacttgcatgttcctamgcagcagctaacagacatctgagcagagttcaggtcttgggacagtgtggtttcctacctggagttttggatattctcttcttaccacgaaaggaaaaagactcaaaatgcctaaacatttccaatgcttcagcatagctgcagcatcctgccatcactcctaagtgaaccatgtaacatgcattctgaatataacgttgcagggagctatgttggctttgatgaatgcaatcccgtggtttagcaaccccatataacaggccaacaaattatgctctctctccccctctgttccttgcacagccccaggagaattgcaccgccgtcagctgaaaatccccacagtgaccggctggaaagcaaggagaatggcacagcaaagaatagcaagaatattgattggagggccacctctctaattaaggaaaccctacgtttgtgattctgaggtgcttatagcaccaatttcccaaatcagcccgtacttgcttttctatctgatgtcccctgaggtactaccaaaggctttgtatttagtgtaagagaaacaagcactgcagccatacaaggtcag

SEQ ID NO: 664331 - DNA, 599 bp, Homo sapiens
gaactatttttaattctcagtagagtatagaaggatgtagcctttgaatgacattaaaaattcactagaagtgtaaacaataatagtcataatatcacgtaagtcacaaatgtctcaaaacatagattaaaatgttctgaaatattggaatataattaaagcccaaatttgagatagaagagaaaataaataatagcttatatatcaaatttattatgtgaaaaagacttttgggaagttgttccataataaatgaagatataaataacaataattaaaatttaccaaaaaaagcattaaaataactgtgaaaaacttaaaagaatgtaaaattgaaagttattaaatttttaatctcaaaaatcataaaaaagtcatttcatcaatgtcctatgaaaataaaataaacttagtaatgtaacaaataaaaagagtaattaagaaaaaagtaactttcacaaatgaaaktttaaaaaaaagaaaaaataatggattccatactttgtgtttaagatcagaacatagtctcaaatggttcagaaataaaaaaatcaaacttccaaatatattgtggtgattataaataataaaaataaata

SEQ ID NO: 664332 - DNA, 552 bp, Homo sapiens
taaagtgaatataggtcacccatataaaaatacttatgttggaaacattagtgcagttcacactctcacctctgaagaagttaagcctttctgacatcccagtgatggtccatgtactgagctgtgggttcacaggctgaggcatggccagcctcagaaactcattcctgcaaagaaaaatacctactttttattaccagtcccaaaggaatcattagcaatccactaataagatgcttgatcagaatcctcacaattaggttgaagagtgtgacttgaactcaagaactaagacatattgcaattgtaactgtattttatgatgtgctctgctgcttttaacacctctatgccagtaaagtaggttatctcagtcataattatatcagttctcacctttgcagcttccytaggtgagccatgcagaaatactaatttaatttctgaaatctgatagctgtcaaatttttggaacatgccacctgctacatatggagcctcagctctatactacattccttcttggtgatgttccctttctcctattttcac

SEQ ID NO: 664333 - DNA, 565 bp, Homo sapiens
tttgagcccatgaggtggaggttgcagtgaggtgagatttcaccactccactccaacctggggaacatagtgagaccctcttaagcaaataaacaaaacaaagaaaggggtagagagtggatctggaagagctgatgaaagatatttggcacacgtggtacagaaaggagtaagtgatggtcactaggtttgcatcatagtacaccaagacttggcatcagtctatcaaagtcagtgtgatgagggagcaggaagaacgaggaccaggaggaaccatctttaaagaggactcatagagaggcagagtyacagtacaatcccaatccttgtatcagttaaggcacacccaatacagtaacaaaaaatccttaagtttcagcaatttaacccgtagaagtagagtcacttctacaatagtacaacacaggttttcctggatggtagccggttttcctcagtgtgcgatttagggatccaggcttctcccatctgtgtctctgcacccactagggctttggaaccctctgcttccatcttgtgagtgatacagtcttgatgtgagatg

SEQ ID NO: 664334 - DNA, 510 bp, Homo sapiens
gttactcagatggatattccagatgtatttaagctgcttttattaggacaatggagaagtccaaccctgtcttctaaatgcaatcaagagtggtgtggctttgcctttgtaattttacaaggggttgtattaygtaactggaaaattgtctccctaagtagagagaatttgttagcagaaaatgcagcttggaacatgctgatgtaaagcttcaatccaagagagaaaccttttaagttgctgaaatgtagagcagaggaagaaggaaattgctgttttacatgattgaccaaaatgcactataattatatcaacttgaaacagattcctgagaagaactgataactctgtgatcagaataagtcatgtgtaatggaacaaaatactgcaaccaaatactgcaagtactttctctgcaaagcgtagacatgatgtatgtgagatacacagtagaagagacaactgttcttgccttagcctgtgtaatggggcctctcactgctttagcat

SEQ ID NO: 664335 - DNA, 510 bp, Homo sapiens
gttactcagatggatattccagatgtatttaagctgcttttattaggacaatggagaagtccaaccctgtcttctaaatgcaatcaagagtggtgtggctttgcctttgtaattttacaaggggttgtattatgtaactggaaaattgtctccctragtagagagaatttgttagcagaaaatgcagcttggaacatgctgatgtaaagcttcaatccaagagagaaaccttttaagttgctgaaatgtagagcagaggaagaaggaaattgctgttttacatgattgaccaaaatgcactataattatatcaacttgaaacagattcctgagaagaactgataactctgtgatcagaataagtcatgtgtaatggaacaaaatactgcaaccaaatactgcaagtactttctctgcaaagcgtagacatgatgtatgtgagatacacagtagaagagacaactgttcttgccttagcctgtgtaatggggcctctcactgctttagcat

SEQ ID NO: 664336 - DNA, 542 bp, Homo sapiens
tcagatggagatccaggtgcccatataacgtccaggtggagctgtccagggggaaatgtaaaagctgggtctaggccgtagagagatcaggcctagatatatagatttggaagtcaacagtgtggacacagtagttatacagtaattaccttaatggttgctatatttctgtcagggtctgtacccattctttcaaaatcaattgaacttttaaatttatgtcatttaaacaaaagcaacaatttatgctgttatgacacataattagatagcatcttttcatgtgtttcagtagactccatcggcatatttgcattatctacagttgttaaatagtggatttaaatgaagcctcartcaaaactatgttggaaatacattgcatttgtttgttttgtgctaaaacagtatggatagctttgaactatatatgcatgagaaaaaatgaggaatagaatatatttattctccctgatagtcaggtctaaaataaattagttttgagaagacaaaggataaacagcccaaatgagaagtgacct

SEQ ID NO: 664337 - DNA, 550 bp, Homo sapiens
ttaatccccaaaatacattttggatttaagatagaaatgtataataataagtatatacagtatactacacagagaaaacattttataaatatagatttaaaaaataagtagttataattagcacacagcaagtaaatgctcaaaaatgatgtatatttttatgattaggaaagtaacttcagtttaggctagaaagtggttaagagcatgcactttatagmcaagctgattgggttttgttttgttttctactgctgtgtaacaaatcattccaaaacctaggagcttaaagtgacaaccattctatcatctctcacaattctgtgggttgcctgggctcatgtgggttatcctcctactggtcttgatggggtgtttcatgcagttacaatcagatagtggctggggcttcagtggccaagactcccttgcagagctggcagttggtgccagctattggctgggactagagagcctcagttctccccaatgaggcctctgcatgtgacttgtgctgggtccctaaaagaaatggactaggcaaacacca

SEQ ID NO: 664338 - DNA, 607 bp, Homo sapiens
cttgtggtctaataaaatatgatactcattggtactctcttcagagtgcttttgtgattactgttgccagcagtgagttaatgaattaatacatgtaaaatacatgtaacagtttctgattcatgaaagcacgtaataaagtaagccagtttcagtagtggtagtggtggcagtagtagttatagtagtagtaatagaattagtagttgtatcagcagtagtaggagtgatacaagaaatgccatcataagagtagaaggtccctgcttcatggccactgctgaactgtaagaaatctgtggtatgaygatgcttgtgagaaaactaacaggctgggtttaatttccttttgatcatattaaaacctaattaacttttttatcacaatacataggaatagaaagcacactgaaggataagtaacaattcgtttagagaagcaaatcagaattaacagaatacaactaaaaacatctttgatttagagaattaatgtaaagaactcttcctggttcagttaagaattttacagttcattaactaattgacagggctgttcagtgatgaaatgactgtaattccgaaataagccactaatgaatgctta

SEQ ID NO: 664339 - DNA, 624 bp, Homo sapiens
tgtctgattaacatggccatttatggttttgtataattagtgtttacacaatatatcttttttgttcttttagcctatctgcgtttttatactgaaagtgggtttctcctagacagcatataattggggtttacrtcttaatttaattggacaaccactgccatgtaattgcaatctttaaaccttttacatttaatgtaattatttgatatgtttgggttaaggattactattttgtaggttgttttctggttcttccaactttacttattacctattccccctatccttgcattcttttgaattattttttactattgcgttttaatatcttttattaccccatttccttgctttatttttaaagcacttgcttggggtttatgatatatatatttttaaccttaagttagtctaccgtcagctaacattgtaccacattccatattatgtaagaatctcacggcagaatacaattgtccctcagtaactgtggggagttggttccaggatcaccacatggatactaaagtctgcagatgctcaagtcccttatataaaatagcatagtatttgcatataacctatacacttcctctgctatactcaaaccatccctagatt

SEQ ID NO: 664340 - DNA, 624 bp, Homo sapiens
tgtctgattaacatggccatttatggttttgtataattagtgtttacacaatatatcttttttgttcttttagcctatctgcgtttttatactgaaagtgggtttctcctagacagcatataattggggtttacgtcttaatttaattggacaaccactgccatgtaattgcaatctttaaaccttttacatttaatgtaattatttgatatgtttgggttaaggattactattttgtaggttgttttctggttcttccaactttacttattacctattccccctatccttgcattcttttgaattattttttactattgcgttttaatatcttttattaccccatttccttgctttatttttaaagcacttgcttggggtttatgatatatatwtttttaaccttaagttagtctaccgtcagctaacattgtaccacattccatattatgtaagaatctcacggcagaatacaattgtccctcagtaactgtggggagttggttccaggatcaccacatggatactaaagtctgcagatgctcaagtcccttatataaaatagcatagtatttgcatataacctatacacttcctctgctatactcaaaccatccctagatt

SEQ ID NO: 664341 - DNA, 561 bp, Homo sapiens
tagttgttttccaacatttacacagcaggatatgtgattaacaatatcatacttctgtattcaggtccttactgtgctttatttactatcattttatgaatgtttctctgtccttatctgcttatttatataaggttcaaactaatgaattaaatgcagaataaatagctgccagttcaatttatcttgagaatttagctgacataatggcatyggcagaaaccctaatgagcattaatttacttattcatcaaatacttattgagcatactgagtaccagccattgtgcaaagtggtgaggatacaaacatgaagagggcagatggagtctctgtcctcgtggagcttctagataagaaaagaaacagtggtagtgtcacacaataatacaagttcagggagctcctgtttcagagttagattagcatatgtggaagaaaacccaaatcgcagtagtttaaggaaaatagaaatttttctccaacatgagtgtctggaggtagataacccagaactccactatgtctgtcttgttgctgtgctgtgtgtggcctctatgc

SEQ ID NO: 664342 - DNA, 595 bp, Homo sapiens
tatttatataaggttcaaactaatgaattaaatgcagaataaatagctgccagttcaatttatcttgagaatttagctgacataatggcatcggcagaaaccctaatgagcattaatttacttattcatcaaatacttattgagcatactgagtaccagccattgtgcaaagtggtgaggatacaaacatgaagagggcagatggagtctctgtcctcgtggagcttctagataagaaaagaaacagtggtagtgtcacacaataatacaagttcagggagctcctgtttcagagttagattagcatatgtggaagaaaacccaaatcgcagtagtttaaggaaaatagaaatttttctccaacatgagtgtctggaggtagataacccagaactccactatgtctgtcttgttgctgtgctgtgtgtggcctctatgcccaaagttaccttgttrtctaacatggcagcctgtgtccatattccactagtaagatgggagaaagagaagaccaggctccttctctttaaaaaacttcccagatgttgctcaaaccactttcccttacatccctttggccagaacttagtcacat

SEQ ID NO: 664343 - DNA, 547 bp, Homo sapiens
aactctgaactctgattaaagtcacagcttccatataatttccaacatttctgttctctctgcctgtaatgcattttatcactaacttaaattctacaaattacttgttttgactaaaaataacagtgaataaataatcacatagagatcctggaccaaatatgttatatttgaccatttaggtcccattttccttttggccatgtcacagttttgcaggtagtttcatagatggccattgactctcaaatctagaggtgcatgggacaccaagacatctatgctatgatgagagaaggtgtttttactggtaaactgtttaccartggagagagggctgggacatcagtgctgttgtacttgcaagtgaataactgtgattgggagcactgcggggattaaatggagaagatgattagattattgggagagcacattagcagaggtcaataccactcctctgcttacaactcctcgaaatgtcttcaataaacatggagtacattggtaataagaaaaaacaaccaagagctattaaaaaaagaaa

SEQ ID NO: 664344 - DNA, 599 bp, Homo sapiens
ggtgcatactaggggaccatcataggggattgaaaataattttaagtaatcactraagtataatcatctgatctattatctgtttactaccagaaatgtgcattagcacatagaaaactgaaacaattttgcaaataggtaaacagatttatataaatgtggtctgattctccaagtcttgctgtaagctttaataagttgttggtattgtgggttcttttggtaaactttttgagaaatgtaccaactagcgctatttggtgtgtgttttttgcttctactctaatgtcaagtcagtgggagaagctttgtgtacttgctttggtaaactgattctgagtatcttatttccttatgtgcgtggaagtgcacttaatgaatttctgctacagtgtgtggtaaggatgctatttttaaagtctgagttcccagagtaaattttttaaataggattagggttttatcttataactaatataataaagcttaaattagaattataaataatatatgtatatgtatgtgtgtgtgtgtatctatctatctatctatctatctatctatctatctatctataatcccatcatgggggcaagacc

SEQ ID NO: 664345 - DNA, 558 bp, Homo sapiens
aactcccacccagttgatttgaattagcacgtctgattattttttaaattttctttcccctccagccctacctccctgccagagcacttgtaagaaagtactcgctcacatatcttacttccattgaaataaaatcatattatgcttctgtcttttgccactagcctattactattagctgtcatatccgaagtcccaagttctttatctgaaccctcacactcgagaaatcgacrggatcaaggaaataagaaccagtgtttacataagtgtttattggattttctttatcatctttcaggtcttgtagaaatttgcctgatgcaccccctagatgtggtgaaaaccaggtaaggttctgcatgaacaagttttattgactttggctaatatccaaattaagatctgtcagagcactaaatgctaggacttgtcccaggccggtagcttctctctgtaatggcagttatatttgcttctaaagaaagtactatttgacagataaaatgtgaacagtgaaaagcatttctgggtgaaggtcatctgaagtatgtaata

SEQ ID NO: 664346 - DNA, 568 bp, Homo sapiens
tttccatgaggtctccctaccctggctatttacagcacatgaacatctcccagcattgagtgagctctgaggatattttagctccaactccctcatagttcttttcctgaccttgtagaattttattccacaagtgtgcagccaacaatttaacaaaaaaaaaaagagggcctttatgaggatttctgaagcccctctgcatagctgatttctcctctctattattctgtcctgcaaattggagctgccttggccttcctgagctctaatctttgtctcaattcagtgagaccacagtactttggttgggttgtcccttcctgtttttcagtttagaaaytgcttccaatttctaattggaatgcaggaacgatcatagagataacttagggaaaacagctctgaactgccgcttatccattttctgaaaatagttgctccatattttgtccagttttctagttgtttatggtggaaggagggcaaattcagttgtttgtttatagtgggattccaaatcatggccagaattcttagtttccatactacaattttttttttttttttt

SEQ ID NO: 664347 - DNA, 640 bp, Homo sapiens
tctagttgtttatggtggaaggagggcaaattcagttgtttgtttatagtgggattccaaatcatggccagaattcttagtttcyatactacaatttttttttttttttttttttaggcagaatctcgctctgttgcccaggctggagtgcagtgatgcaatcttggctcagtgcaacctctacttcctgagttcaagcgattctcctgcctcccaagtagctgcgattacaggcatgtgccaccatgcctggctaatttttgtatttttagtagagatggggtttcaccatgttggccaggctggtctcgaactcctgacctcaggtgtttcactcatcttggcctcccaaagtgctgggtttacaggtgtaagccaccatgcctggcctatgctgtaatttttaaagcaacttttgatcaaagtatggcacacattcagaatggtgaacaagtcataaatattcagcctgagaaagttttcacaaaatgagcatacttgtgtaaactaacatcccagaacataatcagcaccttggaagcctgctcttgtccctttcaagttataactttctcctcagcaaggataaccactattccaaaatctgccacccttgattagttttgctgtcttttgaatt

SEQ ID NO: 664348 - DNA, 614 bp, Homo sapiens
ttgtccctttcaagttataactttctcctcagcaaggataaccactattccaaaatctgccacccttgattagttttgctgtcttttgaattttattgaaatggaatcatactgtatggactcttttcggtctgtcattttaaattcagtattatatttatgagattcatccattttgtttcatrtagctgtagtttattttcactgtattacaatgtaaattaatttattcattccatttctaatgtcctcgtttgaggatattacagatggtacagttatgaacgttcttattcattgaggataaaggactctattattttgcatctccagggcccaggatgtgccttttatgtacaaagtgctcaatatatgcactctgtatgaacaaatgaactatggtactactcttcagtgtaaaatcataggtactaatattatctcctttgagtatggtacagaatatgacttgctgaagttcatatagaaacaaggtcaattcactgtcagtgtagggcaaagttcattgggccacaatttctagcttttatgttaggagaagaaaccactaaacaacattaaaggaggattcagtttttaagaaccaggcctaa

SEQ ID NO: 664349 - DNA, 620 bp, Homo sapiens
ggagtcttttgaatgaagacctgatggaagcaagaaagagagtcccacggaaaatgaggggaaaagcattctagtccgagggagatgcagtgcaaaggctctgaggtacacacctacaaaagaaagcaaggaaggctgggctcagtgtctcacacctgtaattccagcactttgggaggccaaggtgggcggatcacttgaggtcaggagtttaagaccagcctggccaacatggtgaaaccctgtctctactaaaattacaaaatttagctgggcgtgttgggaggcaccagtaatcccagctattcagtctcaaaaaaaaaaaaraaaaaaaaaaaaaaaagaaaaagcaagcaagaagcccacgtggctggcatcaatgagcagaaatgactcagggatgacttgagagaggcatggagcaggcggctagctcacgtagggtcttgttcattgcaaagcctttggcttttactctaaagtaaatggggactattgattgatgaaatgggaacctttgattgctatatcaacacatcataaagataaatcctctaagcccagtaactttctctctctctctttctctctctctctctctctctctccccccacccctt

SEQ ID NO: 664350 - DNA, 603 bp, Homo sapiens
tctgagtataccttttcatgcagttttgactttgaaagtacaatcatgtgccgcataatgacatttcaatcaatgcatatacaatggtggtctcataagtttataatgaagctgaaaaactgctattacgtagtgatattatagctgttgtaacatagtagtgcagttactttattttttataaatgtaatgtagcctagatatacagtgtttataaactctacagtagtgtacagtagtgtctgaggccttcacattcactcaccacttattcactgacttgcccagagcaatttcctgtcctgcaagctcaattcatggtcttactatgtttcccaggctgatctagaacacttggcctcaagcaattttcctgaatcagcccaacaaagcactgggattatagatatgagccactgtgcctggccccagttatcttgtatatcatattttttactatgccttttctatgtttagatacacagatacttaccattgtgttacagttgcttccaatactcaatatggtaacatgctgtacagktttgtagcctaggaacaatagattataccatataacctaggtgtatagtagattacacc

SEQ ID NO: 664351 - DNA, 600 bp, Homo sapiens
tgctgcagaaattcaaagaatcactgagtttagaggctattatgagcaactatatgccaataaattggaaaacatagaataaatggataagtttctagacacatgcaacctaccaagatgaagaaatacaaaacataaacagaccaataacaagtaaggagattgaagtcataataaaaagtctcccagaaaggcaaagtccaggacctgatggcttcactgctgaatttaaccaaacatttaaagaataattaataccaattctagtcaaactattctgaaaaatacaggaggtgagatattttcaaatttagtattaccctgacaccaaaatcaaacaaagacgcatgaaagaaagaaagaaagaaagaaagaagaaagagagagagaggaaagaaagaaagaaagaaakagagagagaaagaaagaaagaaaaagaaaaaaggcgaggggagggaagggagacaggaagacaggaagacaggaaggaaaaagggtcaggtgtggtggctcacgtctgtaatcccagcactttgggaggccaaggcaggtggatcacctgaggtcaggagtttgagactagcctggctaacatggcga

SEQ ID NO: 664352 - DNA, 583 bp, Homo sapiens
actacttaaataactctagtttttacttgggaaagctawtttgataaaatcagtttagataataattctaggatattctttcacttctagcacgagtgaagcacattttaccttgaaattgggacctataaataaaacacatgtacagtatttgaatgtttagtacgtgagaatttagtatgtgagaatttattagtagtaaaaagtaacttgtgtaagatagtgtctaatgtacgaataattatcattttctgaagctttattttaaaataatttataacttaaaatgagaatatacactgtatcagtattctaaattatttttctggtactgccagtaccaatatgtgcaattatattatgatagcaacttttgaagctctgaatttacatcagttttctgttccattaagcaggacagctaatagtctgagttaacaatttggcacaaaataatttctcctaatttttcatgaattcaagagaaaaagtcatggatatcttaataaaaggtgtaattttgtacttctcatttgagtttgaactcaacaagatggcaaggggtggactttgagggaggaag

SEQ ID NO: 664353 - DNA, 644 bp, Homo sapiens
gcaggctgaggagcaaggagagccagtccaagttccaaaattgaagaacttggactccagtgttcaagggcaggaagcatccagcacaggagaaagatgtaggctggcaggctaagccagtctctgttttcacatgtttctgcctgcttagattctagcagtgctggcagctgattcgattgtgcccacccagattaggggtgtgtctgcctttcctagcccactgactcaaatgttaatctcctgtggcaacaccctcaagacacacccaagatcaatactttgyatccttcaatccaatcaagttgacactcaatattaattatcacatcatagttggccccacttcccttttggaaatgttcttgtcctggtgttcatgtttttactctttcttggttttccgctaaccactctgatcattccttcctaacctctttgactactttctctgcttccccatcttacattttaaaaattactttaaaaatagataatatgtacacgatatgaatttgaaaaggtacaaaagggtacagagtgaaaaataaatgttttccttttccttcctgcccttgacaactaaaacctgccaatcatcaagtcccttttccccaatctgttccttttcaaccccaaagtca

SEQ ID NO: 664354 - DNA, 604 bp, Homo sapiens
ccccaggtgcagcccacatccaatgactggtcagtgtggtgatatacaaatcaggcccccttgccttaatttggaacaactcagaaaggccagcgtagcttccaagctccagtgggattagctgagatgtttttttgcaattacatcacaattcgactctttttgctcaaccctggttccttaacgtctcacagtttttatcttgagaccattgcacaataaacttcccatacacaaatctgtttctctatctttttcctgggaaatatgacataagatagtttcctattaaatatttttaaaatatgtaggaaatgtatgtttgtgacatcttttatcaaaaatattctggaaatatgctatgcttgagtttattttaactaatttagcaaaccttagtaaagcaaatgtaaagatttagcaacggaataatatttggcaattagctgtaaatcactggacaggcatttaaagcatgctatttggatggctatgcttcatttttaagtaattcatatgtgttcagccaaatcaaataaactkctttagttcttttcataacatctgaggttaataaaataagtaaaagggttgataagctttc

SEQ ID NO: 664355 - DNA, 579 bp, Homo sapiens
tttgatcaaggaccctgtttcaatgtgagtgtggtgtttttgtttacttatgttttgtgtaaattctggtctctctcatgtgtagagtttatcttcaaactggttttcctctggattaataggtgggtgagatagcagccaggggaaggaggtagcttttcccctcaaagccatggaaaaaatgtcctgaatcctgctttgatggtcagcattaagtcatatgtccatccctaatcaatctttgtggcatattgagttcaaagcaacctgggggcacccctggagttgggagtgaagtcaaccccacccaatgcaacctatacaaaaggagagattgaaattgatgttggggagatactacaatgtcttctaaatttatctccatatttaaggcctaaaattttaggagctagtttcatgtttgtgacaaatgctggtagctgccttagtggcattctatttcaatggtaayaagaaagttaacaactcatgttatgaagaaataggataattcctagcgtagtaacccaaataaagttaattatcttaattatcttaataatcagaagatacaatagc

SEQ ID NO: 664356 - DNA, 520 bp, Homo sapiens
catagacagtgtctgtttttttaaaataaacatagaaattggccctttttgtcttaaagcttgaagcttacatttgttttatctgagttccttcctcaggaagagacccccagkcctctcaaaaagtatcaaagaactgaatttcaccagattatcacatccagacattgagactccagacccctcattcattgtgactgactgcttccttacccctcctgagttcctgttttctcatacatagttacatttctaccctgctatataatcctctaattttagttaatcagggagatggaatttagattgatctcccatctcctcctgcaacacctgattaaagccttcttctttggcaataattgttgtctcagtgattgtttttttgtgcagtgagcagcaggacttacactgcatgatggtgtttcagtaataaatgcagtaggatagctacaacccagtgcatatagcaataagtttgggtttggtttatccttgtcatctatgcatcttaaggacc

SEQ ID NO: 664357 - DNA, 598 bp, Homo sapiens
agcttgggacccaatcccagacaatggaagtgaggcagaggcagctggtggtggggtggctctggggtcatttgcatcattccaaaaagacaccccaggaagagacactgctttgctggacattgttatgagatgayatgctgcctggagctgccgcaaccatcttagaaacacagggggccaagcgtctgaaatgaaagcaaagatcgggaggatggctgagtagaaagatgaagagatccagggcttctgtgcacgccacttagctgcctaattaaccagccctgggcttcctgttgtgtgagttaacacatccctttgcaatttagtgattttcactgtgtggtcccagaccagtatcagcatcatctggaaatttttagaaatgcagattttggggccctaccccagacttgctgagaagagtctaggagtggagtccagcaatctgtttttaacaagcccctccagataattctaagaagtcctgaagtttgagaactactgctctgagcttgctacagtctgaatgtctgtgtcctcccaccactcctatattaaaatttgaatccccaaagtgctggtattaggaggtggg

SEQ ID NO: 664358 - DNA, 415 bp, Homo sapiens
tccacacttacctggctccatcctgaaggaatggtccatgcttacctgggcccatcatgaagtaacagtccatgcttacctggctgtattctgaaggaatggtccacacttacctggctccatcctgaaggaatggtccatgcttacctgggcccatcctgaagaaacagtccatgcttaccttgctccatcctgaaggaatggtccacacttacctgrctccactctgaaggaatggtccatgcttacctgggcccatcctgaacaaacagtccatgcttacctggctgtattctgaagaaatggtccacacttacctggctccatcctgaaggaatggtccgtgcttacctgggcccatcctgaagaaagagtccatgcttaccttgctccattctgaaggaatggtccatac

SEQ ID NO: 664359 - DNA, 487 bp, Homo sapiens
cttgcttacctgggcccatcctgaagaaacagtccatgcttacctggctgtattctgaaggaatggtccctgcctacctgatttcatcgtgaaggaatggtccacacttatgtgactccatcctgaaggaatggtccatgcttacctgggcccatcctgaagaaacagtccatgcttacctrgctgtattctgaaggaatggtccacaattacctgactccatcgtgaaggaatgttccatgcttacctgcgcccatcctgaagaaacactccatgcttacctggctgtattccgaaggaatggtccacacttacctggctccctcctgaaggaatggtccatgcttacctgggcccatcctgaagaaacactccatgcttacctggcagtattccgaaggaatggtccacacttacctggctccatcctgaaggaatggtccatgcttacctgggcccatcctgaagaaacagtccatgctttcct

SEQ ID NO: 664360 - DNA, 487 bp, Homo sapiens
cttgcttacctgggcccatcctgaagaaacagtccatgcttacctggctgtattctgaaggaatggtccctgcctacctgatttcatcgtgaaggaatggtccacacttatgtgactccatcctgaaggaatggtccatgcttacctgggcccatcctgaagaaacagtccatgcttacctggctgtattctgaaggaatggtccacaattacctgactccatcgtgaaggaatgttccatgcttacctgsgcccatcctgaagaaacactccatgcttacctggctgtattccgaaggaatggtccacacttacctggctccctcctgaaggaatggtccatgcttacctgggcccatcctgaagaaacactccatgcttacctggcagtattccgaaggaatggtccacacttacctggctccatcctgaaggaatggtccatgcttacctgggcccatcctgaagaaacagtccatgctttcct

SEQ ID NO: 664361 - DNA, 501 bp, Homo sapiens
aagtgctatattgattttaaatttgacaaaacgacagaatccctgacaaaacagaaccattactgtggaataaatcagttagattctggatcagccccattattmttcatatcatcacaagtgctttctaagatgttgtcaccagattagggcacaaagtggggaagagagctggaagggcttctccttaaagagtatggttattgtacttcacttccatgcttaatcatttgataacactcacccacagttgctattttggatactctataaaattcccaggcagttacccatttaatctaacataaatatgtgttaaaatcttttctgctatttctcaaggtcacgtgtttgcccatggaacttagagtactggcatctcactcagtcaccgcaacaatggattaaatccttcttgacaggtggtacctctgtgttcctagtggcatcataccacagaaggcttctccctcacactaatgggactgaatcaataacatc

SEQ ID NO: 664362 - DNA, 511 bp, Homo sapiens
  misc_feature 305: n = A,T,C or G
tactacaatatttaagaatccacaaaaaatggtttttttcaaaaccctacagttagaagcaagttgctcaaatattaccaaatattaccaatattaccaataatcagacccaattaatatcagagagaaaaaaagtcacacaaggctgtgtagctcatgcactactaatatagcmcattgactatttaactcataggatgccttttaaaatagattttattgtggtaaaatatatatcccataaaatctaccattttaaccatattgagtgtacagttcagtggcattaaatatattcacattgntgttcaaccaccacctgcatccagctcctgactcatttcatcctacagctgaaactcaaatcttctgaataattggtgaagtggctaacacaccatgctgacccttaatttgtgaagaaggcccacaagtattagaaagatacatttgtagaggtgtcacttgatgtgtcattccttgctagcacagatccatctcaaacaaactt

SEQ ID NO: 664363 - DNA, 593 bp, Homo sapiens
ctattttttggccatttaaccctttaagaaggaacaccaaataagcgctttcatgctcaattatctttgacttgcaatctaaaatgaaccatttactgaacagggagagaaacatgaaaagcaaacactattaaagaattatagacttcataagctgcacagtacttgtgcattttgctctgtagtgaaggaacctgtaaaattgtacagacgttaggagaaaagttgccacccagcatgcgttgatttaacggcataacttccagtaatgtaaagtagggaccttgattcttagggcacattttgttatcctttctttcttaataggacaaggtttaaaatatgctrctgtgcatacacaatagctgctttccacttatgctgttatctgtgcagaaatcattctctcaggcaagagattaaaataaatgcataacaactttttagaattgctaatccaagtaaacttctcacagaaaattcagcctttgaagaaggcatcttaaaccttgatataaacaaacattaataaaatgtacttcttcctacaatggacagtgatgacaatgagatagatatatgacttgtttttt

SEQ ID NO: 664364 - DNA, 573 bp, Homo sapiens
gttttatttaaatcatttgcctaataggtgtggcttagaggagctgatggaaatgacaggaaaccttcacattgccactggtttttagtaagaaaatcagcttcaaatacctgtatcccatcactagccttttgcctcagccatcactgttactgcagagcctctgcttccaccacacacccagggtcctttcacttcagagggcctgcacaggctctctgtcaagtgcctcttttgaaggcaaacaatatgattggctatgttgttgttgagaacttcatttgtaatggatctttagtggtgtacataacataaaaggcccttggatatcctagagagattctttgtttttcttactaacacggggataaccagactrttataatcagattccaccattgatggtggtcttgaatctgaggaccttcactgaagagttggtgtaaatttcattttgaatatatttagaaataacgatttaccttacagtgttattgttgattcttatatggagaagtactgacttttaaaaaaattaatgtcaataagatttattttaaaagactcaacagt

SEQ ID NO: 664365 - DNA, 573 bp, Homo sapiens
gttttatttaaatcatttgcctaataggtgtggcttagaggagctgatggaaatgacaggaaaccttcacattgccactggtttttagtaagaaaatcagcttcaaatacctgtatcccatcactagccttttgcctcagccatcactgttactgcagagcctctgcttccaccacacacccagggtcctttcacttcagagggcctgcacaggctctctgtcaagtgcctcttttgaaggcaaacaatatgattggctatgttgttgttgagaacttcatttgtaatggatctttagtggtgtacataacataaaaggcccttggatatcctagagagattctttgtttttcttactaacacggggataaccagactgttataatcagattccaccattgatggtggtcttgaatctgaggaccttcaytgaagagttggtgtaaatttcattttgaatatatttagaaataacgatttaccttacagtgttattgttgattcttatatggagaagtactgacttttaaaaaaattaatgtcaataagatttattttaaaagactcaacagt

SEQ ID NO: 664366 - DNA, 429 bp, Homo sapiens
caacattgtgcctatagtgttgcattgcacacttaaacatatgttaagagggtaaatctcatgttaagtgtttgtacgatgaaacttcttaaaaattaaattttaaaaagcagcaaaataaatgaactgtatatagatgaaaaatattctagttctcaaactcctgggtaaaatgttaaaatgctgtgtccagggccttacctcttcagattctgactcaatctggggtggagccctggagtctgcattttaacaaatccaagcatctgctgcagaagcatgttaagaagcactgatgygcgtgaaagggccttgtaaaaaatatgcaaaagaaaagtctaagttgttagtaaactttgcatagtgatagctgacatttattcatcagcttctgtgcctcagactcatgatctaggtcaccatattacc

SEQ ID NO: 664367 - DNA, 429 bp, Homo sapiens
caacattgtgcctatagtgttgcattgcacacttaaacatatgttaagagggtaaatctcatgttaagtgtttgtacgatgaaacttcttaaaaattaaattttaaaaagcagcaaaataaatgaactgtatatagatgaaaaatattctagttctcaaactcctgggtaaaatgttaaaatgctgtgtccagggccttacctcttcagattctgactcaatctggggtggagccctggagtctgcattttaacaaatccaagcatctgctgcagaagcatgttaagaagcactgatgtgcgtgaaagggccttgtaaaaaatatgcaaaagaaaagtctaagttgttagtaaactttgcatagtgatagcygacatttattcatcagcttctgtgcctcagactcatgatctaggtcaccatattacc

SEQ ID NO: 664368 - DNA, 610 bp, Homo sapiens
gtgacttatagtgagcagtggctaaatatgacaaaatacttgtgtgaagatacaggaatgaccattttcatttataaactaacaatagtcacacatcacttaacagggatatggtctgagaaatgcgttgttaggtgatttcgtcattaaatgaacatcagagagtgcgcttatagatggtggagcctatatacgattaggctatatggtgtagcctcttgctcccaaataaacatatattttgattttctttcmcactgtttaatgacatactgctcctaggctatatgatgtagcttatttctcctaggctacaaacctgtacaccatgttactgtactgaatactgtaggcagtggtaacacaatggaaaaaatgtgtgtctctaatcatagaaagggtgctacaatactataagggacatcatgatggctgtgatagcactagataagaggaatttttcagctcctttatcttatgggaccaccattatatatgctgtccatcgttgaccaaaacattatgtggcacgtgactgtacagttcttgtaatttcttgttcattgtgtttgtattatgttaaatgtactagtactcaatgtgtgagcag

SEQ ID NO: 664369 - DNA, 610 bp, Homo sapiens
gtgacttatagtgagcagtggctaaatatgacaaaatacttgtgtgaagatacaggaatgaccattttcatttataaactaacaatagtcacacatcacttaacagggatatggtctgagaaatgcgttgttaggtgatttcgtcattaaatgaacatcagagagtgcgcttatagatggtggagcctatatacgattaggctatatggtgtagcctcttgctcccaaataaacatatattttgattttctttcacactgtttaatgacatactgctcctaggctatatgatgtagcttatttctcctaggctacaaacctgtacaccatgttactgtactgaatactgtaggcagtggtaacacaatggaaaaaatgtgtgtctctaatcatagaaagggtgctacaatactataagggacatcatgatggctgtgatagcactagataakaggaatttttcagctcctttatcttatgggaccaccattatatatgctgtccatcgttgaccaaaacattatgtggcacgtgactgtacagttcttgtaatttcttgttcattgtgtttgtattatgttaaatgtactagtactcaatgtgtgagcag

SEQ ID NO: 664370 - DNA, 592 bp, Homo sapiens
ctatatgcctctgttttctggctcaaaaaattgggaaaattgaaaaataaatcaaggagggattatatttattttggttagcttcaaaaacattttttaccatttgaaataagaaattcytctttgcagttatctctaatttttttgaaaaaatcatttctacattcccaaagtagcaattgacctgaatactatcttaccactaaaagaaagtttgcccaactctgaattctgcttcaaatcttcacttctaacatatctttaggttaaacagaacataaggttaaagtagcacagcctggagaatcaatgagttgatgctacaattgtatagttaaaaactgtatttactctaaattgcaaaatggtaggtattgtatgtgatgtttaagtcacagcaattgttctagtaataaatgtaatattcagcagcattttcatagattactcagttcatcattagtgccatttttgcctctttataataatgtgcactttagaaagagcttggttatttctttggttgggcctatttgctccttttttatgtgagatttttcaatactatgaaatgatgcagagcaaaaaaggt

SEQ ID NO: 664371 - DNA, 554 bp, Homo sapiens
ataggcttttcaaaggcaaatttttctttcccctaaacagaaatatttgaattaggattattttattaaatcaaacaggaactgataacctctcctcaaagaaagtaaaaggcatgaaataccatcattctcatggagaaactggaggtgagagaaatgagacctaaccctgtaagttgcccagcaacatttgtgttgggatggggttaaggctccagtctggagactttgagctagtgctgtcccctcagagcccacagactatagcatctccagttgttatctgttctatcacttagtacattttcttagtcttgttattttgacattctgtgactcagtttacctatctataaaatgggctttttgactatgttattgttaaaaaatgakgatgggacagggggaaaaaaaggaggcagtttactttgaccctataagtaaatgtttcttgatgaagttttctatatgaatgaatgattgattttattttgatcttggtgtgaagccaaacacttctagctagaaattcttcattagaaagatgcttttaa

SEQ ID NO: 664372 - DNA, 578 bp, Homo sapiens
ttgggctcactcactcccaagaggcccaaagttcagtacatggctggtgggttttggtccaaggctgattataaatgcaataaattcttcatgcaattttaaaacaaacaaattgtccctaatgccattttcactaggagttaaacttcttgaacatgagacaaggaacaccaaaggcacaaacaataattaactcctgattgcagggcagggccaagaagtcttgttttgttatcagttctctcagagattaaacatttgattaaacatatttcagcaacagaaactactgaaacggcttttgaactattttagtcacatagctgtatatttaccttcacccaatgaaacartatcctgtactctgctcatttgtttatgtgcttgaaggaattgggtctccacgtctatttattctgccctttcttgaatatgaaggaaatgactcaattcaagaactatttggccagtgcctactatgtgctccatacactgagttgattgggttaggacagaagtaaaaagcaaagtttccaaatgctttcaggttaatcaaggaaggagagtgtacaagtaat

SEQ ID NO: 664373 - DNA, 614 bp, Homo sapiens
ttcttatgattcttcctaatttatgaacttacagaggcacattcaagactcatcaagatagagtcctttttctttgtccctcatctcaccaccctcacttttcattattcctcaatgaaacttttgctcctctcagtaagcaaatctgctcttccaaagccttaratgttttacttctgcctctttatttcctttctgctcaattactataattatctactttttaaaagtttgataattatagtttttattttgaatggtagaatatcacagctggttttaaccaacctatgagttacatgtataccacaaccaattccaagtagagttctgctccatagcttctgtttttaagttttgtaagatcattgtttttaccatgacgctgggctccaccaaaatttctagttttatcacaataaaaatagctactttcaatattgaatattttaactgaatttaaaatagcattcacaaaatgtcagatgtttcaactatgccagaataggctatatttttatttcatgaattgttgaaaagtagtatttttataattaagcgattttcaatttgaagctgaagcctgctataaaacttgtatcacttaaccattt

SEQ ID NO: 664374 - DNA, 516 bp, Homo sapiens
aaaactaccttcttctagacaccacagttctaatatgaatcttcaaaagacttaatgactgtagtttgggcattgaggmaattaagcactctgtgattttataaatttaaaaaaatttattgagtacctgctctgttcaaggtcctgtaagaaccaaaaagatgagtgagaccaaatttctccctcaagtcatagtttagcagggctgctaagacatatttataacttagtactatatcataaacagtgacacatcccagagaggctccgaggaagcatgatgggtagagtgatactatcaagtattgtctaaactggcacactctgagagtgaaagaagatgcttttaataattatgctaagaccacagacataaagtggggcagccccgggcacaccaggaccaagcagtcatctggttatggagaatagtagttgaggaaaaatcacagtggaaagaggaatccatgttagatatagaaactgaggccagagaaccagcgggttacagacatg

SEQ ID NO: 664375 - DNA, 516 bp, Homo sapiens
aaaactaccttcttctagacaccacagttctaatatgaatcttcaaaagacttaatgactgtagtttgggcattgaggaaattaagcactctgtgattttataaatttaaaaaaatttattgagtacctgctctgttcaaggtcctgtaagaaccaaaaagatgagtgagaccaaatttctccctcaagtcatagtttagcagggctgctaagacatatttataacttagtactatatcataaacagtgacacmtcccagagaggctccgaggaagcatgatgggtagagtgatactatcaagtattgtctaaactggcacactctgagagtgaaagaagatgcttttaataattatgctaagaccacagacataaagtggggcagccccgggcacaccaggaccaagcagtcatctggttatggagaatagtagttgaggaaaaatcacagtggaaagaggaatccatgttagatatagaaactgaggccagagaaccagcgggttacagacatg

SEQ ID NO: 664376 - DNA, 516 bp, Homo sapiens
aaaactaccttcttctagacaccacagttctaatatgaatcttcaaaagacttaatgactgtagtttgggcattgaggaaattaagcactctgtgattttataaatttaaaaaaatttattgagtacctgctctgttcaaggtcctgtaagaaccaaaaagatgagtgagaccaaatttctccctcaagtcatagtttagcagggctgctaagacatatttataacttagtactatatcataaacagtgacacatcccagagaggctccgaggaagcatgatgggtagagtgatactatcaagtattgtctaaactggcacactctgagagtgaaagaagatgctwttaataattatgctaagaccacagacataaagtggggcagccccgggcacaccaggaccaagcagtcatctggttatggagaatagtagttgaggaaaaatcacagtggaaagaggaatccatgttagatatagaaactgaggccagagaaccagcgggttacagacatg

SEQ ID NO: 664377 - DNA, 516 bp, Homo sapiens
aaaactaccttcttctagacaccacagttctaatatgaatcttcaaaagacttaatgactgtagtttgggcattgaggaaattaagcactctgtgattttataaatttaaaaaaatttattgagtacctgctctgttcaaggtcctgtaagaaccaaaaagatgagtgagaccaaatttctccctcaagtcatagtttagcagggctgctaagacatatttataacttagtactatatcataaacagtgacacatcccagagaggctccgaggaagcatgatgggtagagtgatactatcaagtattgtctaaactggcacactctgagagtgaaagaagatgcttttaataattatgctaagaccacagacataaagtggggcagcccygggcacaccaggaccaagcagtcatctggttatggagaatagtagttgaggaaaaatcacagtggaaagaggaatccatgttagatatagaaactgaggccagagaaccagcgggttacagacatg

SEQ ID NO: 664378 - DNA, 667 bp, Homo sapiens
ggttgctagtggctgactcacagaatgcttagatctagtgggctggatgaatatggtgttttttggtggcttcaaagggaatgaaaagtctggagaaatcatctttcccagatttaatatagtttatgacccatggtactatctaatgaaagcttgtttaacctgcagcctgtgggccacatgcttcccaggcagctttgaatgtggctcaacacaaatctgtaaacttccttaaaacattaggatttttttttaagctcatcagctatcattagtattagtatgttttatgtgtggcccaagacaattcttcttcaaatgtgacccagggaagccaaaagattggacacccctggtgtaaaggtagcccaaagtaagtatattggaaaatccttcacttcaatgaaattattggaagtggtggtcaatttcattacctgcttttgtttttaaatactttctcacgtttggtggtttaatggcaagtggttgtgaaggactgaatgaaaatgtctacyttctgggaaatgactttggattgggtccctcccaccccttctattcaaatctctatgaatccaaaattgttaatgaaggaacattccaggtggcaatgcttctcacccatttctttagcatctttcccaccaggagcatgaagaccagg

SEQ ID NO: 664379 - DNA, 482 bp, Homo sapiens
tgtaattctggaaggttgctattactgtatgagcaaactttttttttttgtattactactgtttattttaatgcaggggcatgttctctagtagacacataatgaaaatggccttgtattaaaattgtttacctgctgtttgctgagaggagttgtaaaattggaaatagaaaagacttcctatgycacctagcccatcccaggaagggcaaagaaaaagattagatcctaatgcagcttttcttggggagtccaaaataggccactgtcttcacatgcctcacggagtaatttctcggaggcaggatgagattgtttgtgtcaactcaggaggaaaaacagtatttctacaaatgttgaaaaagaggggtagcaatttattgacaaatttattgactgaggtcccatgtttgaggactttaagatcaaaagaaatttgtaacattccctaaattgattgtgctgaattatgcaatcaaatc

SEQ ID NO: 664380 - DNA, 482 bp, Homo sapiens
tgtaattctggaaggttgctattactgtatgagcaaactttttttttttgtattactactgtttattttaatgcaggggcatgttctctagtagacacataatgaaaatggccttgtattaaaattgtttacctgctgtttgctgagaggagttgtaaaattggaaatagaaaagacttcctatgccacctagcccatcccaggaagggcaaagaaaaagattasatcctaatgcagcttttcttggggagtccaaaataggccactgtcttcacatgcctcacggagtaatttctcggaggcaggatgagattgtttgtgtcaactcaggaggaaaaacagtatttctacaaatgttgaaaaagaggggtagcaatttattgacaaatttattgactgaggtcccatgtttgaggactttaagatcaaaagaaatttgtaacattccctaaattgattgtgctgaattatgcaatcaaatc

SEQ ID NO: 664381 - DNA, 602 bp, Homo sapiens
aattaccagggcagggtggacagcattttgttgaagtgctgctttaaatgactcatttcaatgctgaaaatgtattttttttgtatttgagagctaatgtagtgaattgttctttccgaaatctggctccaattgctttaaaaagccaggtaggaggaaaataataaattctgtgtcttctgggataaaaaccacattttgtattatactgctgggcagcacaatcactgtaattctggaaggttgctattactgtatgagcaaactttttttttttgtattactactgtttattttaatgcaggggcatgttctctagtagacacataatgaaaatggccttgtattaaaattgtttacctgctgtttgctgagaggagttgtaaaattggaaatagaaaagacttcctatgccacctagcccatcccaggaagggcaaagaaaaagattagatcctaatgcagcttttcttggggagtccaaaataggccactgtcttcacatgcctcacggagtaatttctyggaggcaggatgagattgtttgtgtcaactcaggaggaaaaacagtatttctacaaatgttgaaaaagaggggtagc

SEQ ID NO: 664382 - DNA, 574 bp, Homo sapiens
atttcagcttctcattttggcacaccccttctgtcagacagacctccattgtgattagagaagctcttacttagcaagtctttgtcacttgagaatttcaagggccttcatactgtgactgtggtcrgcagctgctaatatggcccctagtgatccctacttcctggtgtttgtccctgtgtgtcattccttccgcttgagtgtggctggaactagtgacttgcttctaacaaatagaatatgacaaatatgatgagataccacttctgagattaggttgcaaaaagaccatggcttcttttttaggctctctcttactctctcactggcttgctctgtctgagggagactggctgtcattttgagttgtcctatggaagggaacagaaggaagcctttgaccaacagccagtgaagagccaaagcatgctaatgacatgactaagcttagaagctgatcctcctctgttaaaccttcagatgagaacacagacctaaatgacagcttccctggaatttcatgagagaccttgagccagagacatccagctaagctatgcccaggttcctgacc

SEQ ID NO: 664383 - DNA, 554 bp, Homo sapiens
gttttcctcaaaccctaacattggaaattattttaaaatatttgtcaatttgatgggtgaaaactatatcatgtattttataatatattttatgtttttgactacwaatgtaattaaacattacacttttctttggcaaattgcttatttttgttcatctttgctcatctttctattcatgtgcttggctttcttcgttattgtgtggaagtttttaatatgatttcatgtgaatatagtgctttgaagccaaatagcagggtaagagtttggagaaccaacaaaggacagaggttgggggcacattattttagacagcatggttggtaagactactcagaagaggtgacatttgtttgtcggaaataccttttatttgcctccgtgcaggagattgtgcatttgcccctctaggttcactctctgcccttcccacagagctcctctctgggaggctggcccatagacactgcgacaaacactttctctggcttctcattgggcttagcaaatgaggagcccagcaggagatcagagggtggaaggagagtgag

SEQ ID NO: 664384 - DNA, 554 bp, Homo sapiens
gttttcctcaaaccctaacattggaaattattttaaaatatttgtcaatttgatgggtgaaaactatatcatgtattttataatatattttatgtttttgactacaaatgtaattaaacattacacttttctttggcaaattgcttatttttgttcatctttgctcatctttctattcatgtgcttggctttcttcgttattgtgtggaagtttttaatatgatttcatgtgaatatagtgctttgaagccaaatagcagggtaagagtttggagaaccaacaaaggacagaggttgggggcacattattttagacagcatggttggtaagactactcagaagaggtgacatttgtttgtcggaaataccttttatttgcytccgtgcaggagattgtgcatttgcccctctaggttcactctctgcccttcccacagagctcctctctgggaggctggcccatagacactgcgacaaacactttctctggcttctcattgggcttagcaaatgaggagcccagcaggagatcagagggtggaaggagagtgag

SEQ ID NO: 664385 - DNA, 513 bp, Homo sapiens
gtgggattgctgggtcatatggcagttctgtttttagttttttgaggaagctctgtattgttttccataatggctgtatgtagtaaatcatttattaaatgtagtattgacactcttattttaagggtatttattacataaccattatattctatatacaataattctaatatctacagtatttgagagttttactcttctttcagtggtttctgctcactcttagtatcttatttactttcgtattttatttttgtgagcatatatatttttatacattttgcagggattttgttgaagcctgggatttagggtaggttccttaatagatggtttacatttacttctgttgggaacatggtgacactcccattccagcattagtttaaagaaatttctcagcttcaaattaattggatcatagaggtagagaaaattctggctccaaacatatrtgaagaacagattgttatgtattctagaagaacatttttttcttcaatttggggtcaa

SEQ ID NO: 664386 - DNA, 513 bp, Homo sapiens
agactgtcctttcctaggatgaagtacagaccaaagtgtatstagccagtaagtggatcctttaagaaagaaaataaagtacatatcttttgggaggtaatttggaaaaatgtttgtatagtttgactcagtaatcctctctcaaggaattcaccttaaatataaaaagaaaaaagccaaatgcaccatttgttgtaattttttgcttagtgtggtatttctcaaaatagaggggaaaaactaaaatctatctagattcaaaatgaattttgtatattatgacacatcaaatgcagcccttaaaattagttatatcataagcacttttcatgttatcataaaatatcatacaaaatatttgatataaactgatttcaattatgtaaaaaattatataatcatatcaagaagtagacaagaaaacaaataatttattagttgtataactgtgtaagctcacttaataaattctgtgtaatatgcatatttttatatgtgtccatttaaaaaaat

SEQ ID NO: 664387 - DNA, 513 bp, Homo sapiens
agactgtcctttcctaggatgaagtacagaccaaagtgtatgtagccagtaagyggatcctttaagaaagaaaataaagtacatatcttttgggaggtaatttggaaaaatgtttgtatagtttgactcagtaatcctctctcaaggaattcaccttaaatataaaaagaaaaaagccaaatgcaccatttgttgtaattttttgcttagtgtggtatttctcaaaatagaggggaaaaactaaaatctatctagattcaaaatgaattttgtatattatgacacatcaaatgcagcccttaaaattagttatatcataagcacttttcatgttatcataaaatatcatacaaaatatttgatataaactgatttcaattatgtaaaaaattatataatcatatcaagaagtagacaagaaaacaaataatttattagttgtataactgtgtaagctcacttaataaattctgtgtaatatgcatatttttatatgtgtccatttaaaaaaat

SEQ ID NO: 664388 - DNA, 609 bp, Homo sapiens
tgtgtgtgcagatatacgaatgtttacatataaatataaaacccattttgcagttgaaatcaatcaaaataaatttaatttgagcagtaggagtaacaggcagagagaattcaggggaagataataaattagaaacccagttttgctgtgagaaaacttagcaacaacagtacctagagtaatttgtgcacctcaaacaaaaactgcctctccatccttacttttggatggaattaatgccaacattcattaaatgyataccatgtgcaggctctttggaacatgcaattgccagtgttaggtaagaagtaggaattacagatctcccaaacaatttcaccttcatatttattcagcctaatcctgcaccattactccgactaaaattcctgaatagttctggtcgcctctttttctcccatacccctcacccagtactcaaaactgttaagcctctactttcaaaatgcatcatgaatctttgcatcatctcctaccctagtccaaaccacatcatccttccccttaactatggcaagtgccttctaacaggcctctctcatacaggtttaaccctttatagtcaagtctttacccatgcaccaaagc

SEQ ID NO: 664389 - DNA, 609 bp, Homo sapiens
tgtgtgtgcagatatacgaatgtttacatataaatataaaacccattttgcagttgaaatcaatcaaaataaatttaatttgagcagtaggagtaacaggcagagagaattcaggggaagataataaattagaaacccagttttgctgtgagaaaacttagcaacaacagtacctagagtaatttgtgcacctcaaacaaaaactgcctctccatccttacttttggatggaattaatgccaacattcattaaatgtataccatgtgcaggctctttggaacatgcaattgccagtgttaggtaagaagtaggaattacagatctcccaaacaatttcaccttcayatttattcagcctaatcctgcaccattactccgactaaaattcctgaatagttctggtcgcctctttttctcccatacccctcacccagtactcaaaactgttaagcctctactttcaaaatgcatcatgaatctttgcatcatctcctaccctagtccaaaccacatcatccttccccttaactatggcaagtgccttctaacaggcctctctcatacaggtttaaccctttatagtcaagtctttacccatgcaccaaagc

SEQ ID NO: 664390 - DNA, 600 bp, Homo sapiens
agctgcctaacccaaatatattggctctgccccaggggcaacccacgtccaaggactggtagaaaagagagtaaacagaattctttctctatttggaatatctctgaaggtccatcccaactctacagcatcccatgcactcagcctaggactctgttgcaagtgaatcagagttcaccttctccctctgctcttcccaggctcccttcttcccttacaggtgttcttcccaacatcactctctaataaaccacctgcatgtaaaccttccacttggggtcggtttcctggagaagtcaacctatgacatgaacacactgcattctgctttgatctattctattaatcctcatgmcatgaaatcctatcaccctgctatgtcaataaatttattcctatttctctaggctaagattatgaccaaactaacacatctgctcctacccatgcaacttcaagtctaatccccagagcagagcacaatagtaggttgaaattctgctttactattttcattatttgctttataaataactttccatctgtagaaatgctgagtctttcattactactgtgaaaacctctgaaatgtcataataa

SEQ ID NO: 664391 - DNA, 612 bp, Homo sapiens
ttgccttcttactcctcctgagttcctgtttttccatacatagttaatttcttccttgtcatacgaacccctaattttagttggtcagggagttggatttgagactgatctcccatctccttcactgtgcacctaattaaattctccttccttggcaataatcattgtctctgattggctttctgtgcgggagcagcaggacctagaccaaacctctcatggttcagtaacatagtctctatgagaaacagtatagtggctcctaaatayattaaaaatagaattatcatatgatccagcaatcctacttctgggtatttattaaaagaattgaagccggctgggcgcggtggctcatgcctgtaatcccagcactttgggaggctgaggcaggtagatcacaaggtcaggagttcaagaccagcctgaccaacacggtgaaaccccatctctactaaaaatacaaaaattagccaggcgtggtggcatgcacctgtaatcccagctactcgggaggctgaggcagaagaatcacttgaacctgggaggcagagcttgcagtaagccaagattatgccactgcactccagcctgggtgacagagccagactc

SEQ ID NO: 664392 - DNA, 518 bp, Homo sapiens
aaattttatatattcagtagtatctcaataatgtaaaaattatgaatgagaaaaaacattgagtagttctatctagagtggcaatgtaaggatttttgttttctttrtatttaaaaaaattacataaagagtacatagtacttgtacaaatagggagtgtggagagtttctggggctcagagtgaaaaatagccattaagcagtttcctttaacaaggttcatttctttctgactatgctttatcactgttaaacactaaactaattgaggtccacaacaaagaaaataattaacaaattagtgaattgtgcttctgcttatacttcattccccaaatgcctaatcaaccttattaaaagtagctttttttattaacagtaagcaaaaagctaacttgtaaattttattattgtccttccttgatacaaatgtttcctggcccatgggaaactatgacaagtttttcttcttcctttcttaatctttgctcactgtgaacctctcatttcaagtagaa

SEQ ID NO: 664393 - DNA, 628 bp, Homo sapiens
attaccacgatgtagctaaggaaagaaaaagtgcttaggggtagggtttatsaacatcatttctgaggttgccttttattcatataagcataatatagctgataccaggattaaatttctttgaccttcccttttgagaggtaagtgttcacaattcatttacttgttaatcaagctgccatattgagattgcccctaagaatgtagtaagaatagtgaagtttattcacaatccagtgacaatcagattgaaaaaaaattatttaaacatctggcagacttatcattaggaaaaactggtttaaatagaggtaaatataaaattttcactaaaaattactttctaatttgtctgtgtaaagtaccaaaaatagataagagcaataataatatatgtgttcgtaaacataaaaaactcaatacaaaaatatctaattctaatagttataaatgctaaatgacaaaatatatatctcatctcaggtctaaaaactctttaaatacccttctctaatttctccattttgagccacttcaaagtctctgtcaaagtggtgactttcttaccaaaaggagttctagttaagctttactatattaacaggttttctgatgatacattgagagt

SEQ ID NO: 664394 - DNA, 559 bp, Homo sapiens
aaccacctaaaatcaaatagatcaaagaatgagctagataaagagtctagttgcttaactaactagtcttttcattaatcccctacaactgaatctctataatacccagtgtcttctccataggccataagtgccagcagctgcacatatacttctctatttagccaattctattatttagcatcattttcacatgagaatttaaagtctgttgtgtaactatagcctgtacagtagaatctactgtagttcctctcataagggagacatttctaatcattgcctcttttactccaactatgggaaaaaaaaaaaaaacrtactatgcccttctagaagagtaaaggcctcctggcaatgttccctttaaccataatatgggttaagagaagtgaaccaatgttctgtttctgactgattatgaggcaatgtatgtaccattaaagtttctcacctacattgggtcttcatctttatcaaagtataaggttatccatgtattaaggctggctgcaaaataattcataaataaaagtaaatacatgcacataacagactc

SEQ ID NO: 664395 - DNA, 559 bp, Homo sapiens
aaccacctaaaatcaaatagatcaaagaatgagctagataaagagtctagttgcttaactaactagtcttttcattaatcccctacaactgaatctctataatacccagtgtcttctccataggccataagtgccagcagctgcacatatacttctctatttagccaattctattatttagcatcattttcacatgagaatttaaagtctgttgtgtaactatagcctgtacagtagaatctactgtagttcctctcataagggagacatttctaatcattgcctcttttactccaactatgggaaaaaaaaaaaaaacgwactatgcccttctagaagagtaaaggcctcctggcaatgttccctttaaccataatatgggttaagagaagtgaaccaatgttctgtttctgactgattatgaggcaatgtatgtaccattaaagtttctcacctacattgggtcttcatctttatcaaagtataaggttatccatgtattaaggctggctgcaaaataattcataaataaaagtaaatacatgcacataacagactc

SEQ ID NO: 664396 - DNA, 553 bp, Homo sapiens
gggttttttcatttatttgtgtcatcaacagtttctctcaccatattttgtarttttccttgtatagatcattcacctccttggttacatatattcctaggtattttattttgttttatttttgttgttatttgtaaatgggattgtcttcttgattcagttctcacgctgattttgataggaattgggtggaatctgtaggttgctgcagtagagaaattctactgatttttgtgtgttgatccagaaactttactaaattcatttatcaaatctaaggaggtttttgtggagtctttagggttttctaggcataagagcatactatcagtgaatagagaaaatttgatctcttcttttttaatttggatgccttttatttcttttctctttgccgattgctctggctaggacttgcagtagcaggagaggtgaaaatgggcatccttgtcttgttcctgtttacagaggaatgctttcaactttttccctcttccatatgatgttggctgtgggtttatcatatattgcctttattattttgagatatgtt

SEQ ID NO: 664397 - DNA, 553 bp, Homo sapiens
gggttttttcatttatttgtgtcatcaacagtttctctcaccatattttgtagttttccttgtatagatcattcayctccttggttacatatattcctaggtattttattttgttttatttttgttgttatttgtaaatgggattgtcttcttgattcagttctcacgctgattttgataggaattgggtggaatctgtaggttgctgcagtagagaaattctactgatttttgtgtgttgatccagaaactttactaaattcatttatcaaatctaaggaggtttttgtggagtctttagggttttctaggcataagagcatactatcagtgaatagagaaaatttgatctcttcttttttaatttggatgccttttatttcttttctctttgccgattgctctggctaggacttgcagtagcaggagaggtgaaaatgggcatccttgtcttgttcctgtttacagaggaatgctttcaactttttccctcttccatatgatgttggctgtgggtttatcatatattgcctttattattttgagatatgtt

SEQ ID NO: 664398 - DNA, 552 bp, Homo sapiens
aacatgaaggaatgttaaattttattggaagccttttctgaatctattgagataatggagtttgtgtattgattctgttgatgtgatgattcacacttattgatttgtgtatgttgaactgaccttgcatcccaaggataaagcctacttgatcatggtggattagcttttcaatgtgctgctgggttcagtttgcaaatattttgttgaggatttttgcatcagtgttcatcaaggatattggcctgaagttttctttttgttgttgttgtgtctttccaaggttttggtgtcagaatgattctggcctcatagaatcagttatggaggtgtccctcctcctcaattttttggaatagtttcagtaggagtggttccagcttttctttgtacatctggtagaataggctgtggctccatatagtcctgggcttctttttgttgattcaattttgaagcttgttattattagtctgttcaggcattcagtttcttccaggttcagccctgggaagagtgtatartgtccaataatttatctctttcttctag

SEQ ID NO: 664399 - DNA, 493 bp, Homo sapiens
tttgttttgtaaatgaatttattgtttgggaaaytcttgggggatgtgtgtgtaacaaaggtctcttgattaattccaacctctcctcttctgaagaacaatttgcttgaaatgttttgagtattttcctcatttttattatgtctaaaattgaggtattttaccttctttaaaacctggcctctttttaaaatttaaccttttgcatgttaaaccatttttaaggtttttattttataaactgcaatgattagtagatttacttgcctttccctgacctccttcacacgcctgcctcctccatctcaaaactcccatccccagcttccacaattctcagcttccaatggactcatcctcccctctcctcccagccaaggagggatgcctgggaagtagacagtgtccttcttgggtcagaacctatgctctggttctagttcaggacacctccagtctgacctccaagccggcaaaacgagtgagagaagaa

SEQ ID NO: 664400 - DNA, 493 bp, Homo sapiens
tttgttttgtaaatgaatttattgtttgggaaactcttgggggatgtgtgtgtaacaaaggtctcttgattaattccaacctctcctcttctgaagaacaatttgcttgaaatgttttgagtattttcctcatttttattatgtctaaaattgaggtattttaccttctttaaaacctggcctctttttaaaatttaaccttttgcatgttaaaccatttttaaggtttttrttttataaactgcaatgattagtagatttacttgcctttccctgacctccttcacacgcctgcctcctccatctcaaaactcccatccccagcttccacaattctcagcttccaatggactcatcctcccctctcctcccagccaaggagggatgcctgggaagtagacagtgtccttcttgggtcagaacctatgctctggttctagttcaggacacctccagtctgacctccaagccggcaaaacgagtgagagaagaa

SEQ ID NO: 664401 - DNA, 493 bp, Homo sapiens
tttgttttgtaaatgaatttattgtttgggaaactcttgggggatgtgtgtgtaacaaaggtctcttgattaattccaacctctcctcttctgaagaacaatttgcttgaaatgttttgagtattttcctcatttttattatgtctaaaattgaggtattttaccttctttaaaacctggcctctttttaaaatttaaccttttgcatgttaaaccatttttaaggtttttattttataaactgcaatgrttagtagatttacttgcctttccctgacctccttcacacgcctgcctcctccatctcaaaactcccatccccagcttccacaattctcagcttccaatggactcatcctcccctctcctcccagccaaggagggatgcctgggaagtagacagtgtccttcttgggtcagaacctatgctctggttctagttcaggacacctccagtctgacctccaagccggcaaaacgagtgagagaagaa

SEQ ID NO: 664402 - DNA, 617 bp, Homo sapiens
ggacagccaaaagaattcacacatcctttgaaagaagcagcatgccactgcaaattctgcaagatgtgaaaaactgtgagttcccaaagtgtgaggggaaaaatctgcctctgaacacacatccccactggggactctgaaaagcccggtcacagaagaaggatttaaccttatctagagctgaaacagttttagggagccaacraaacataaaagtagaagcaccagtgggaagagccttgtaggcactcccagtccccagctcgagcccagggaagccatccctgactatatctaacaggggccctcagggaaggcagcaagtggaattagggaggggtcatggggtgaaagaagcttccagctgaattttgtaataatttcaactgggaacaaattttcttgagcagaatccagggaacgaacaggaactgctgcagatacaagcacaggagctgccaccaacattgggcagacagggaggggcaaggcctgaaaacagtgcttgctttctcggtggggaagctttaggcctggggcaaggtctgagttccatgtgcagactgactggatctaaacttggtgctattagtaggtcactgtggaaataagactgg

SEQ ID NO: 664403 - DNA, 567 bp, Homo sapiens
cttatctagagctgaaacagttttagggagccaacgaaacataaaagtagaagcaccagtgggaagagccttgtaggcactcccagtccccagctcgagcccagggaagccatccctgactatatctaacaggggccctcagggaaggcagcaagtggaattagggaggggtcatggggtgaaagaagcttccagctgaattttrtaataatttcaactgggaacaaattttcttgagcagaatccagggaacgaacaggaactgctgcagatacaagcacaggagctgccaccaacattgggcagacagggaggggcaaggcctgaaaacagtgcttgctttctcggtggggaagctttaggcctggggcaaggtctgagttccatgtgcagactgactggatctaaacttggtgctattagtaggtcactgtggaaataagactggccttgccaactgcgtgggaactgggtgaggcctttcactaccagctatccccctcttccctggcaaactatatggcacagcagaggcagccataatcctttctggaacataaccctatt

SEQ ID NO: 664404 - DNA, 594 bp, Homo sapiens
gtccaacaggaatatcacaatcctaaatataaatgcacctaacactggagctcccagatttataaaacaattattactagatctaagaaatgagatagatggcaacacaataatagtggggaacttcaatactccagtgacagcactagagaggycatcaaaacagaaagtcaacaaagaaacaatggacttaaactgtaccctagaacaaatggggccttaacagatgtttacagaacattctacccaacaaatgcagaatatatattctaatcatcagtgcatggaacattctccaagatagaccatatgataggccataaaacaagtctcaataaatttaagaaaatcaaaattatatcaagtatcctctcagaccacagtggaataaaactggaaactaactccaaaagaaactctcaaaactatacaaatacatggaaattaaataacctgctcttgaatgatctttgggtcaacaatgaaatcaagatggaaatttaaaaattctttgaactgaacaataatagtgacacaacttatcaaaacctctgggatacagcaaaagtactgctaagaggaaagttcatagca

SEQ ID NO: 664405 - DNA, 583 bp, Homo sapiens
taatcatcagtgcatggaacattctccaagatagaccatatgataggccataaaacaagtctcaataaatttaagaaaatcaaaattatatcaagtatcctctcagaccacagtggaataaaactggaaactaactccaaaagaaactctcaaaactatacaaatacatggaaattaaataacctgctcttgaatgatmtttgggtcaacaatgaaatcaagatggaaatttaaaaattctttgaactgaacaataatagtgacacaacttatcaaaacctctgggatacagcaaaagtactgctaagaggaaagttcatagcattacatgcctatatcaaaaagtctgaaagagcacaaataaacaatctaaggtcacacctcaaggagctagagaaacaagaacaatccaaacccaaactcaacatatacactatggaatactactcagccataaaagaaatgaaataatggcattcacagcaacctggatggaattggagaccattattctaagtgaagtaactcaggaatgaaaaaccaaatatcatatgttttcacttataagtgggagctaagctat

SEQ ID NO: 664406 - DNA, 545 bp, Homo sapiens
agtttcatttcaaaaagatggaaaatgaaaagcaaattaaacaatagtaaatataataaataatataataaagataaatgtggatatcaatgtaatagaaaaccaaaaattaggaaaatcagcaaagtcaaattgttctctgacaaaaattaatgaaattgataaaatgctgagaagactgattaagacaaaaaagagataaaacaaaattaccaatagctgaaaggtaaataaatggagatatcattggagattctacagatagtaagagaataaaaagagtatattataatcaacttcatgcaaataagttctaaatttcttagataacaaggaacttacccaaattattaaataaaaatagacttattcctcaaaagataaacttaccaaaagtgaaaccaaaataaatagagtatttaagtagtcctatatgtgttacaaaaattgagtttgtaaatataaatctycccacagagaaaacactgggcccagatagcttcactgatgaattctaccaaacatttaaggaagaaataatatca

SEQ ID NO: 664407 - DNA, 484 bp, Homo sapiens
actccagcattccattgtctctacctgttggaatcgcaataatatcttcttttctagctaagctgttctgctgattaccctgacaagttcacaaatattgcataaaacatactcacactaaaacaaaatttattgtttatctaaagttaaatttaataaagtgtcctatattttatctggcaattctaacctgaattgtcttttcccctcccatagtttaaatattttcccacttgtccctagagtcactcacaccctttatagcattccttagcacattaaaaaataccactattaaactatccaagctatataagaactacaacgtataaacacccccaagaaaatggaaatwatggtctttttggagttatgttataaagtgaaatgatgatggatccaatccaatgatggattcctacaaagttataaaaaatcaaattaaagaaagagacttaggactatgcattatcaaacagacatc

SEQ ID NO: 664408 - DNA, 553 bp, Homo sapiens
agacataatccacaagcagttgcattttgaggtaaatcatgcctgcctccttgtgtgtgcacatttgtttttgaaaatttgaccatctgactgtaacctgaggaatcttggttaaacatttctttatgcaaaacaaagaatgttgagtagttaaatattttacctctgaggctaaaattggkttattttttgtttcctcccctctgaatatttaaggtggaaaaccaagtgttaatgttcaaatgatttccagagacaaaaatcccatcatctatgaaagtatagtggttacctttggatggttaattaattcagcaaacatggattacacaccttctattgtaactgaatgagtcagcaatctttgctgagaatcttctaaatatggagagcccttaggtaatacagaggaaattgaagaccagtccttcttctcaagcatcttacaacctcgttgaggaaaaccgaacacataaattgaagagaactaaatggatatttgcacaatacaatagtaaagaatgaatatttgttgagctcctgctatatgcaa

SEQ ID NO: 664409 - DNA, 601 bp, Homo sapiens
tttcaaattccttttcctaattcttataccatttgtttgtctcattagatttatcagtagtttaaggcaaatagatggtgcgttgaatattttagtaggtactctactcatgtatagatgatagtggcccctgctcttgaaacctacaagtaagtctggatttgggtgyttttaacattatacctaggaggatcactgcagattcttaaattttcatctacaagaaactaacagtttcatgggagtgagatgaaaataaataaaggtcacgttgtggtccctggggaaaaacagttccattttgttcaagaagtactaggtagactacagcgtcaatgtaagaatgcaggtcaaattaatcctgggaattgaagatagtaagtaattttcttcttagagatcagctccaaatgtttggtaccagctccctgaaattctgaaatgagcaacattctgaggctgtgtctggcttagtgacaaagaatgctatgatcagtttgtgatgtcttccattggtgataaggagttgtggcaagactgcatacatgctagaatttgccatcataagagagagcaatggctcaaaaaagactaagcccca

SEQ ID NO: 664410 - DNA, 571 bp, Homo sapiens
ggacaggcatatccttcagggagggaataaaccgatcatgttcctgtaatgtctcttcatgtgcaaggacaaaggaactatgcccagtgagtagggagggacaccagatctggcaaaactttccctgctgcaaacttagagaacagcctagttgatgaggtgagtggaaaccctggattaatacattccagcagagaaagagaggggctgtgccggcagggcaaacatttggcacatgagctgagcaaaatagttgtccaagtcttcacagatccctatatrgaaagcttctcttctgaggaccctgagcgtgactcctcatgggaatcagggaaatactaggtgctttttactgttgcttttttttccttttttttttttaatggactgttctttctaaatacgctgtgtctgtctgatttgtttccctgccttgaaacattcacagtgtggtagaaccaggcaggtacaaagcagtgactcttatcccagagtcaccaatgaggggcaattggagatagaaggccctgtctctgtctggaaggggcagggacagcttcttagagaagaa

SEQ ID NO: 664411 - DNA, 571 bp, Homo sapiens
ggacaggcatatccttcagggagggaataaaccgatcatgttcctgtaatgtctcttcatgtgcaaggacaaaggaactatgcccagtgagtagggagggacaccagatctggcaaaactttccctgctgcaaacttagagaacagcctagttgatgaggtgagtggaaaccctggattaatacattccagcagagaaagagaggggctgtgccggcagggcaaacatttggcacatgagctgagcaaaatagttgtccaagtcttcacagatccctatatggaaagcttctcttctgaggaccctgagcgtgactcctcatgggaatcagggaaatactaggtgctttttactgttgcttttttttccttttttttttttaatggactgttctttctaaataygctgtgtctgtctgatttgtttccctgccttgaaacattcacagtgtggtagaaccaggcaggtacaaagcagtgactcttatcccagagtcaccaatgaggggcaattggagatagaaggccctgtctctgtctggaaggggcagggacagcttcttagagaagaa

SEQ ID NO: 664412 - DNA, 530 bp, Homo sapiens
ttaaggagtttaaggatttagactttaaggattttgatctttcaggatttcaacatttgagattatgrcgttcaagattatgatccaaaccaattcaaagctaccttctccccacccattcaaaagctacatgatgttgaataaggtagttagcctctctgtgccttaatttcctaacggcaaaactgagatagtaatagtatgcagcttatagggctgattttggagattaaatgagaatgtgtatataagatgcttagtacagctcttaggacattgtaagctctcaataatgccagctacttttgaatcaatgaatacattctttttctctttctacaaagtaagtaacggcataaaaatgtattttattctcctagtcacataaaactcactatttttatttcactagtttaactgaatttctgctaaggcatttatgatacagcacataaaaactgctcttgaatgatcctccaatctgaggatttaccattggcttcatgaccaaatggtctgtagagccttct

SEQ ID NO: 664413 - DNA, 670 bp, Homo sapiens
ctcagggtctgtgtccttgggtacccaacaatgacattgacatctgagatctgcttcacctattctttctattcatttaataatcagaaaatgtttactgagccccaagtatatgtttggtttcttcttttgagtactgcctttcataacatttgtgtattttctatcagtcttgttttaaaatttacagttcttcgatgaaaacacatggacacatggcaggggtaccaaacacacactggggcctattggggcggcaggggagagagagcatcaggaagaacagctaatggatgctrggcttaattcctaggtgatgggttgatctgtgcagcaaaccactatggcacatgtttacctgtgcaacaaacctgcacatcctgcatatataccctggaacttaaaataaaagttgatttttaaaacatatatagttcttttacacattctgaatactatctttgtattatttgcattgtgtatctatctctctgtttcttttaacattactgcatcttttgttatataaaagtctttattttgggattgccgaatgtatggatcttttgtggctctttcatacttgtacttcatgcatcttccctatggaaaatcagagaaatgcaaattaaagcaacagtgagattccatttcacactgatcatactgg

SEQ ID NO: 664414 - DNA, 547 bp, Homo sapiens
cagagatggcaatacaagtaattttacaatttgctacacacagtagtaagaaaaacaggaagtaggtgtttattagcagttccaaatataccagccaaaatacaactccccatggagtctgagttatwcaaaatatagcaaagaacagaattcctacgattataaaagggtaattaatcacaagcagtgttcacagaccagtgacttggaaactaccttcttattgaagatctggatcaagaacaaacttcaaagcaaaattaattgatctcagattcactgcatctggccaataaaccctcccacgaaatgtcactttaagcccacttgacagtctatctttattacataacaattctatatagggtgcattaaatagtcatttttcacctacttggctagtatatcattgcctgcccatataagctgttcgtgttaagaacaccacctcgcactgatactctgttaactgcattcataggtcaggcatattgtttaggcttgtttcataggaacacacactccccacgaagcagattcacaaact

SEQ ID NO: 664415 - DNA, 548 bp, Homo sapiens
attaaagctttaaagacctcataaatcactgaggagattagcaccagcgtgaatgagttaaaatacacttctgccttcagagcgttacaggggttcaaagcagtcctmtaggatttgatgggaaaattagttgtaataactaggaagagaaaaattcccaaatatagcttcttggggatttcacagtgcaggcttcacccaccacagttatttcaggtacctgacttagtgaaatataatatagatgcttttgggatccaacatatagcacaataaaaatgacttttgagaaatgttggaatccaaaaacattatttacaaataccaaacatttttcaaaccccaaaccactaaaaataactgaaatttaacctaaatgtatgactcagcagtggatttaacaccattttgtccttgtttcccatttatgcctctctccaaaaatcctgtggcatatatatgattttggggcaagattcatcatttctcccactggatggagtttccaagctctgtcgccagcaccaagaagtcttcagagcaaactt

SEQ ID NO: 664416 - DNA, 562 bp, Homo sapiens
gtatattaacgataaagagtaacttcacacagccctactaatcttccctaatttgaaggggtcattgcttaaataatggtaggycataggtagggtgaccacatgatctggttgactaagacagtcttagtttgcaccaattgtcaataattgagcactcttctgttctcataattatcctgatttggatgatgagtactatggtgatctagtcataggacagattaagaaatttctaactggaatctcctttatccccaccaattagtagcctttcaaaagcagcacagtgggcaaggacaggagtggacttaccagaacacaaacttagaggcaatgtttcctccagggctcaacttctccctgatgctagaagcattggtatccagcaggtaaacacatctccacctgtaactgaagtggaggacaggtaaatgtagatatcaagagttggccccaccatagaagatgtcaccaaagatggagaagaaagcacagatcctggtcaatccatgattctttcacttccttaaaggtgctgaatcactgaactgatgatata

SEQ ID NO: 664417 - DNA, 562 bp, Homo sapiens
gtatattaacgataaagagtaacttcacacagccctactaatcttccctaatttgaaggggtcattgcttaaataatggtaggtcataggtagggtgaccacatgatctggttgactaagacagtcttagtttgcaccaattgtcaataattgagcactcttctgttctcataattatcctgatttggatgatgagtactatggtgatctagtcataggacagattaagamatttctaactggaatctcctttatccccaccaattagtagcctttcaaaagcagcacagtgggcaaggacaggagtggacttaccagaacacaaacttagaggcaatgtttcctccagggctcaacttctccctgatgctagaagcattggtatccagcaggtaaacacatctccacctgtaactgaagtggaggacaggtaaatgtagatatcaagagttggccccaccatagaagatgtcaccaaagatggagaagaaagcacagatcctggtcaatccatgattctttcacttccttaaaggtgctgaatcactgaactgatgatata

SEQ ID NO: 664418 - DNA, 443 bp, Homo sapiens
cttctgaagaaggatgggcacaaacaagcccagaatgtaaaaactacaataaagatctaactcttcaatgcccagacaccgacaaatatctacaagcatcaagatcacctaggaaaatgtgacctcaccaaacaaactaaataaggtactagggaccaatgctggagaaagaaagacatgtgacttttcagtcagggaattaaaaatacctatgttgggcaaactcaaagaaattccagatgacacagagaaggaattcagaattctctgagataaatttaaccaaaagattaaaataatttaaaagaatcaagcacacatgctagagtcaaaaatgcaattgatgtactgaagaatgcatcagagacacttactagcagaattgatcaaacaraagaaagaattagtgagcttgaaggcaggttattcaaactctctggctg

SEQ ID NO: 664419 - DNA, 537 bp, Homo sapiens
gtattagtctgtttttacactgctagaaagaatacctgagactgggtagtttataaacaaaagaggtttaattgactcacagttcttcatggctggggaggcctcaagaaacttacaatcatggtggaagacaaagaggaggctgggaacttctcacaaggtggcaggagagaggggacagcaggggaaactaccacttataaaaccattaattctgtaagaactcactatcacaagaacagcatgggggaaaccacccccgtgatccaatcacctcccattaggtccctcccttgactcatggggattacaattcaagatgagatttgggtggggacacaaagccaaaccatattacctgccaatcaaaaaaagctcaggaccagacagatttatagccaaattctaccagatgtataaagaagagctggtacctttcttactgaaagtattccccaaaattgtggaagagggactcctccccaactcattctatgaggccagcrtcatcctggtactaaaacctggcagagacac

SEQ ID NO: 664420 - DNA, 623 bp, Homo sapiens
tcaaatgcagtggagagaagctggcaggtggaatgtagaaggaaatatgatgggtatggtgagggtaagaacatcctcatctcaagatgggagtcaagagatactgtcaataacagatggattaagaaattgaaataaaacaaagaaatcatcttttatgctaacctcatcttctccttctttctcacttggagagggagaagacaagattagtataaaaaagctagatccatatccaccacagcagagagtcaacagatcgtgtctatgggacatgtctgagagacagtggtatygtattcatttagatttagggaaatacttaaaagagcaggtgaagtacttatttgccagatataagacaggaaataataattgaaaagaagtaggcagaagaattcctgtggatcaacagagataggaataattcttgttctattagctggaagggaaagatgttgtaacatgtgagcatcaggtagaaggtataatagggctcaattagcactacactaacagcgtctcagaaccccaactaacaaagccacaaaaggctcacaatgatccaaataagtccaagaaacttaactatatatacaaaatcaaacactatttaaagtaca

SEQ ID NO: 664421 - DNA, 468 bp, Homo sapiens
tgtttcaaaatgaggataaaagaatttttagacaataaaactaagagaactttgttaccaacatccctgaactagagaaaattctaaagatatatccccagcagaatgagaatactcctagatggaaggccttagatgtaagaaggaataaatagcagagtactaaaaacatgtgtcaattgaaacaaacactgagacgataaagaataataataatatcatgtagggttatgaagaagatagcattaaaatatattaattcaatagcacttatgttgggagagccatcatcagagaaaaagtattacaagattcttktattattaagaaggataataaatatattaacaaaattgtatttataagttaaaaatgaaagttaaaagcttcagggtaactcataaaggaattaaaatataacatctccatattcataaagaaaaagatattcaatcaccccaaaaagca

SEQ ID NO: 664422 - DNA, 574 bp, Homo sapiens
tatatgcaataaaatctgaggcaagaaatgtggaagcaattcaagaaaacagatctcacatttttgcctttgtcagagtcagaatctgacatgctctgattaaaattcaacatctgcaggcatttaaaattaaaatatacaggtattcatgttttcctccttccacaatgttttattgctgcttttttcatctttaatattaaaaacattacattattttatttcatatgtcaaattccttgtctctgtatattacatgttgcccttttacccctgagctctggttcaaatccagctcttagctgaggaaataaaaaacatctgaaaatatttagtagactcatctcaaggactaayggactacggtttacattaacttgacaaacacaacaaacaaacagattttccacaaattaaaaatgtttacatgaaaacattcaggaacgaagagtatgtaaggacctctcagacagatctgaggctgtgcttttatttcacagagaatttgcaacaaaattgagaaaatctgggcttcacctgtcccacccaaagcaggtgaaaagtgagggacctg

SEQ ID NO: 664423 - DNA, 511 bp, Homo sapiens
tacatacacacaaacacacactgttttatccctgaagatcctgggagtattttgcattccaataacctgtttctccttgattgctgcctcggaaatcctgcaagccaaagcccttcctcctgtactgactctcttaggttgtttagttgctctaagcatttagttatcatcgaagatgtttgaactgacactcaggcctaaagcactatctcaagcttctcttcaatttgctaagacactattttccaacattcagacacaaatatctttaatatttctatattgatatccatttaggaaaacatgtaaactatctattgaattcaaggttccattgctgcttaggaaatatttaggatttttaaaaagtgagctaacaaaaattaagtaaacaagagcaaagttagtatgcagacmtggggcaaaaattgtaagggtgatattcaaattataaaaactgttataccgtcttgttctattgtcaagaaggaagtggacccccaaattccta

SEQ ID NO: 664424 - DNA, 530 bp, Homo sapiens
tgcctctgatgtactaggcaagggctgagcgttctgcagggactaacgcatttacatctgaacaacagcccaatgaagcaggtttaactaagctccttgtttaatgggtgaggcagcagacgattagagaggataaataactgttctgagaactcgcaggaggtaagcataggagtactacctgggagttaactgagcccagcgcctctgctcttaaccatgaagctccaagcctcacaggcactgcacacaagctccttagaaagattgcccaccccagagaggyggcaggaagctgggccttaccagttgtgatcagataggcatcggggactgtgatatcacaaacatatggcggcttggcagtagccagtgttggtgtgtcgactgttgcttcgagagtgaaggcagtcacgggacgcagggatggcaggggaggagcagcactactctctggggggctctgacttgcggcgtcacccatcagggtggagtcgaggggaccaccagtggcagcaccggtgctggtt

SEQ ID NO: 664425 - DNA, 616 bp, Homo sapiens
ctcttttacaatagccacaggtaaaactaaatacctaggaattaactgaagaagtgaaatacctttacaatgaaaactataaaacatttatgaaataaatataagaagacacacaaaaaatgaaagatattacatgttcatggattggaagaatcaatgtagttaaaatgtccatactactcaaagctatctacagattcaacacaatccctattaaaataccaatgacattcctcatagatacagaaaaaagaatcctaaaatttatgtggaaccacacacacacacacacacacacacacacacacacacasagagagagagagagagagagagagaatagccaaagctatcccaagcaaaaagaataaaactggaggagtcacattacttgatttcaaattgtactacagaggtagggcaaacaaaacagcatgttactggcataaaagcagacacatagaccaatggaaaagaattgagaacccagaaacaaatccatacatttacagtgaacccatttttgacaaagatgtcacaaacacacattggggaaaggacagtctcttcaataaatagtgctgggaagactggatattcatatgcagaagagtga

SEQ ID NO: 664426 - DNA, 636 bp, Homo sapiens
ttgatttcaaattgtactacagaggtagggcaaacaaaacagcatgttactggcataaaagcagacacatagaccaatggaaaagaattgagaacccagaaacaaatccatacatttacagtgaacccatttttgacaaagatgtcacaaacayacattggggaaaggacagtctcttcaataaatagtgctgggaagactggatattcatatgcagaagagtgaaattagacccttaactcttgccatatacaaaagtcaaatcaaaatgttttaaagcttaaatctaagacctgaaatatataaaactactaaaagaaaactttggagaaactctacagggcattaatctggtcaaagattgttgagtaatacctcataagtataggcaagcaaagcaaaaatagacaaacaggatcatatcaagttaaaaagcttctgcacaataaggaaacaatcaacaacgtgaaaagacaacccacagaatgggagaaaatatttgcaaactatccatctaaaaagggattaataaccagaatataaaatggtctcaaacaacttaatagaaaaaaactaataactggccgggcgcggtggctcacgcctgtaatcccagcactttgggaggccgaggcg

SEQ ID NO: 664427 - DNA, 636 bp, Homo sapiens
ttgatttcaaattgtactacagaggtagggcaaacaaaacagcatgttactggcataaaagcagacacatagaccaatggaaaagaattgagaacccagaaacaaatccatacatttacagtgaacccatttttgacaaagatgtcacaaacacacattggggaaaggacagtctcttcaataaatagtgctgggaagactggatattcatatgcagaagagtgaaattagacccttaactcttgccatatacaaaagtcaaatcaaaatgttttaaagcttaaatctaagacctgaaatatataaaactactaaaagaaaactttggagaaactctacagggcattaatctggtcaaagattgttgagtaatacctcataagtataggcaagcaaagcaaaaatagacaaacaggatcatatcaagttaaaaagcttctgcacaataaggaaacaatcaacaacrtgaaaagacaacccacagaatgggagaaaatatttgcaaactatccatctaaaaagggattaataaccagaatataaaatggtctcaaacaacttaatagaaaaaaactaataactggccgggcgcggtggctcacgcctgtaatcccagcactttgggaggccgaggcg

SEQ ID NO: 664428 - DNA, 554 bp, Homo sapiens
ttccatgaataactttacatttctctaatatcttacaccttaacatttgtcctctgaccaaaaaattatataaatacaataattatccaggaatcccattgtctggaagtctgtctgtctcatcctggaaccggaaaacaaaatttaaaaggttaataggatttataattggttttataatgttaagaaaatgactccttaggctagaaaaccattgactcatggttaaaattacctgtctaaaaataaaaaaaaaaaaaagaaacatagctatgaataagccctctgctcttaggaggggaatgctagtttgattcataaaagaaaaattgaagagttgattgataatttctctatctgaaaaaaaggatatgtgacacaattaatgttttcttcctagaaaattcagtaggtggtccctaaggataaaataaataatatctgaaccaagtgagctttaacaaattggtagcaattccyaccacccaccccagagaagttaatctcttcttcccttttctttcattgcaggtaccttagcatagcatttttca

SEQ ID NO: 664429 - DNA, 405 bp, Homo sapiens
tctaacacattgagtaatgtcactgtctaaaaatttcacttgctgacacctgctcctattttcataccaaagcttaaactctttctaccatgtatactgtctgtatcagccatgcagaagttcccatagtcatcatcaccagccatcagccacctttcagggggctaaaccaaggtatgactggtttgagacttcgaccaagttgaagttgtaaggaagatttatggtgctgtctctgaaaagtaaaagaattagtgacaaggtttcaggttaaaaaggctcttttgtggcaattacaacattagtggaatgacaaacrgtgttgaaagtcaaagagccttgggttatttaggtaatttctttttaatttatcttaagcttcagttacttcctctgtgcaataga

SEQ ID NO: 664430 - DNA, 481 bp, Homo sapiens
agaatttctttaacagccagaaaaataaaatatgaatggtgagaaaatccacaagaacattcaaatctatgattgttgacaaacatttaaaattaacttgaagaaaataaaagccaaggaaattatatcaaatgaaatgatccttcagctataaagatgatacacaaatggtattaaatatatgaacattaagtggaaytattcctgtggatttttcttggaaattaatagaggacaagttcagcctccaacgatgagtatgaagaaaccatagcaacagtacagggagagaacattgaatggtaaataactgggagtcaaaagatatcatttaaagctgatatatcaaataatacaagcttattatttcatttttatgctgctgataaagacatacctgagactacgtaatttataaagaaaaagaggcttaatgagctcacagttccaggtggctggggaggcctcacaatcacagcag

SEQ ID NO: 664431 - DNA, 565 bp, Homo sapiens
ctgaccaaaatacaatgaaactaccaatcaataacagtaagaaaatggaaaaattctcaaagttgtggaaactaacaacactcatgaacaaccattgcatcaaatagataatcaaagggaactttaaaaataacttgggataaatgaaaatgaaaacacaacataccaaaatgtatgggagacagcaaaatcaatactaagaggaaaatttatagcagtagattactacattaaaraagaaaggtttcaaattaacaacctaactttacatttcaagaaattagaaaaagaagaaggccaaattaagccctatgttaactgaagaaaaaaagaacattagaaataaatcaaatgaagagagaatagaaaaaaaaaaatctaagaattgaattttgaaaaaataaacaaaattcgcaaatccttagctagtctaactaaaaaaaaagaaaagaaaaaaagacccaaataaataaaattataaatgaaagagaagatgttacaatggttacctgacaaataattcataagggactattataaataatcagataacaataaattagat

SEQ ID NO: 664432 - DNA, 617 bp, Homo sapiens
atccatatccagaaagatggaccaagttgtgaaaaattccaaatggccaaatttaagttttctacttttaaataatgtccctcctctgcactccattggttcattaatccctttactccatattacagacttccacttgaaaaaggtaatttttctactatgctgattctctttctcccaataattcacccagaaatttttgtcctttcactgctcagattgktagataatcaaatagagcttttaaaaaaaggcaagggaggtggcaaaagtaaggagttgtaaggggtctgagctaatgagctggtctgacagtctcatggatgctggcagaagagcatagtactttgttattcacagcagtaacagtaacaaaaagagcagcagctttgctggctttccaggcccaaattccaacaggaaaatgcaaagtgggcctggtaacacctactctcaaagtggattgcatcacaaagaaggtaccctaagcttgtgccaactgaatcttttataccacacagtaaatatacttgacttttgacctgaagtaattcattttctttattttattatacagtaaataaacctgccattggttctgaaggaaaacacaatct

SEQ ID NO: 664433 - DNA, 529 bp, Homo sapiens
tagttttaaatatctgccaaatgtgtagcttccccactttgagtattctaaaagacccaaagtattcctatatagaattctacaggatatcaccatagacatcctaaaatatagataggaagggttattttccacactcagatcatgtggataccaaacagatattaataaagcattgaccctacagagagggcagaggacaaagaagaaatgaggagagaggagtatcaaagaaaaactaagcttctaaaagcacactcaaggactgacagtacttggaatggaagacaagcaataagaacattcctgttgtgttcacaatagttattagtaagaatttttggtgaygaaagtctagtaatgagctgtccctgcacatcttccaggtcttataggacataatatcagggacacaggtaactaaaggcaaataaggaaagaacagaattaaaagacataataatgcataaagcaggagaaagcttagaggtcagggtctttagcaccacttggtttcagcaggcagagg

SEQ ID NO: 664434 - DNA, 595 bp, Homo sapiens
ttctataatttgcttaaacctttagttttttcctatgttttttaaattaagacaatttttaaaaacctttaaactagacaaaatgctttccctttcatgaaaaccatatttccatgtgctcttacaaccttttgccacagataccatctacttttcttatataccttgcatgtaaaactgtttctctagtagtctcagttatgtatgttacaatgctaactcttagcaacttttccttttagtgaaaacctggtaagtaagcaattttaactatgaattaaattgcagagcccagaacaagaacagaactacaatatctgactcttctcagcacagccagggggcacggctaactccacatgtccccaggccttacctagaatttaatggctataaaacagagaaatcaatcatcaaaaaatgwcatagaagcagtttgtgaccttgagacatctagcaaagacaatatctaacctgcctaattcaggccaagtatctaaattctgaaaatgttttttattttattttactaataatttttaaaactgtctttatttcccaaagattacgaaagtgaactaaaaggcattttagc

SEQ ID NO: 664435 - DNA, 568 bp, Homo sapiens
ctagagaaagtgtagagaatgcatctctatgacccccaaaaattctctctcagaaatgggcttaacatagcaaaagacccatagagctgggaccttttaagatagaattcaccaaagggcttgacgcatttggaaggaaaagggtactgctgtgtctcagcctctcagtcctttcagaccagccacatgacacaaaccccaaaattcccacccttcagatggcagaaaccaagagtcagtatccacatggtcacaaagtcaaattctcaagaacataagacaagataagtggaaaactttatctggtttttgtttcagggacctgcagcatttaaaacagcctgcagggctggctcaaaacayggggctctaggggttctaggcctgtgttctatcatatggtacccctctccataacagaacaacacaggaagacaaaaacaaaggaagatggcaaaactaaaagttactcctaagaggaaaaaggggtcaaacaatatgaatatttgcagtacaaagtacaaaatgtacaccagatttgctacaacctttgactagtcacaaattt

SEQ ID NO: 664436 - DNA, 632 bp, Homo sapiens
aaaattgttgagaaatcttaagaaggttctatccatacacatgacatcttttctccattgcataggaattgcatgtattgaaaattcagtgtatattaattccacgcaaaacatattttatgtttgtatgtaaactggggttaggtaatagcttcagatattataaataggtcccgcagaatattcactttcaggatatcaagtatttctatcccccaaccacagagccagtagtggcctccaaaccttacaataatcaccatgacccacagacatccagatttaacttagggagacatgccttcccagttgagaagtactatcccgacactgaaggaaaggattaaccaccgaatttcttgcagaraagaataaacaagaaaaacactaattgaaaagctataccagctagtgggtatgttataaacttcatgcaaaactttttatttcatttttctaacaatcatgcaaaatagatgaggttatccccattaatagatacataaaccaagtctcaaggggggcaaataacatttctttgatacacagcgtgtaagtagcttgggtatatttggaaaagtctcttagactatgagtcctgtgtattccacaacaccttgttcttaactgtt

SEQ ID NO: 664437 - DNA, 632 bp, Homo sapiens
aaaattgttgagaaatcttaagaaggttctatccatacacatgacatcttttctccattgcataggaattgcatgtattgaaaattcagtgtatattaattccacgcaaaacatattttatgtttgtatgtaaactggggttaggtaatagcttcagatattataaataggtcccgcagaatattcactttcaggatatcaagtatttctatcccccaaccacagagccagtagtggcctccaaaccttacaataatcaccatgacccacagacatccagatttaacttagggagacatgccttcccagttgagaagtactatcccgacactgaaggaaaggattaaccaccgaatttcttgcagaaaagaataaacaagaaaaacactaattgaaaagctataccagctagtgggtatgttataaacttcatgcaaaactttttatttcatttttctaacaatcatgcaaaatagatgaggttatccccattaatagatacataaaccaagtctcaaggggggcaaataacayttctttgatacacagcgtgtaagtagcttgggtatatttggaaaagtctcttagactatgagtcctgtgtattccacaacaccttgttcttaactgtt

SEQ ID NO: 664438 - DNA, 645 bp, Homo sapiens
ctgaccatttttgtccagactaatgatcccagagaatctatacttagagacattgtatagtctatttgaatctaaattgactttatagttaaggatgcacagtgttgtccccagggaaaccactaaataatgacataaaaagtaccagtaagcatccaagagagaaaataaaattgaagaatgaattaaacaaatttaacttacaagagcgcagtaaaggagcaacagataaagaaaccaaaggaaccaatggaaaataagtaacaaagaatgtccttaaawtcaaacttaaaaaattaccagggccaggtaattttaccatatgaaaaattaaatgggccaggtgcagtggctcacgcctgtaatcccaatactttgggagtccaagtcagggggatcagctgaagtcagaagttcgagactagcctggccaacatggtgaaacctgtctctgctaaaaatacaaaaattagctgggcatggtgacaggcgtatgtaatcccagctaatcaggaggctgaggcaggagaatcgcttgaacccaggaggcagaagttgcagtgagccgagatgatgctattgcattccaaccagggcaacaagagcaaaactccatctcaaaaaaaaaattacactaaatgtaaa

SEQ ID NO: 664439 - DNA, 645 bp, Homo sapiens
ctgaccatttttgtccagactaatgatcccagagaatctatacttagagacattgtatagtctatttgaatctaaattgactttatagttaaggatgcacagtgttgtccccagggaaaccactaaataatgacataaaaagtaccagtaagcatccaagagagaaaataaaattgaagaatgaattaaacaaatttaacttacaagagcgcagtaaaggagcaacagataaagaaaccaaaggaaccaatggaaaataagtaacaaagaatgtccttaaattcaaacttaaaaaattaccagggccaggtaattttaccatatgaaaaattaaatgggccaggtgcagtggctcacgcctgtaatcccaatactttgggagtccaagkcagggggatcagctgaagtcagaagttcgagactagcctggccaacatggtgaaacctgtctctgctaaaaatacaaaaattagctgggcatggtgacaggcgtatgtaatcccagctaatcaggaggctgaggcaggagaatcgcttgaacccaggaggcagaagttgcagtgagccgagatgatgctattgcattccaaccagggcaacaagagcaaaactccatctcaaaaaaaaaattacactaaatgtaaa

SEQ ID NO: 664440 - DNA, 597 bp, Homo sapiens
ggccccaggtccaacatttgggattacaattgaccatgagatttgggtggggacataaatctaaaccatagcattctgcmcctggcccctccatatctcttgtttttctcacatttcaaaatacaatcatgccttcccaatagtcccccagagtctaaactaattccagcatttaaaaaaaaaattccaaagtctaatctgagctaaggctagttcctactgtctatgagcctgtaaaataaaaaacaagttagttaccaccaaacacagcaatttacattccaaaatacaatgggagtacaagcattgggcaaatattcctattccaaaagaaagaaataggccaaaaagtggggctacaggccccatgaaattccaaaatgcagcagggaagtatttaattcctaaagctccaaaacagtctcctttgactccatgtcctacatccagggtccactggtgtgagtaatagagtcccaaggacttaggcatctcgcttctgtttctttgctgagttcagaccccatggctgctctcacaggctggtgttgagtgcctgcagcttttccaggtggaagcagcaaactcttattggat

SEQ ID NO: 664441 - DNA, 594 bp, Homo sapiens
attgcaggcaagtgttaaggtagtggttctcatcaggggtgatgttgtttctaggaatgtttgaaaacattcaagcacatttttggtggtcacaacttgaagyggaaagagttactactggcatccaacaggtagaggtcagagatgatgttaaccatcatatatgcacaggacagccctcacaacaaggaattatctggtccaaatattaacagagccaaagctgagaaatcctgcactaagctaatccataccaccataatccctcaccctacccctctgcactgcccccatatcaactgattgctctatacaagaagttgcccaaatgattcttcaaataaatctgctttgttggtttacccttttgattttagcctgattggtgttatttttcctccagagtagcagaaagatagcagtaactttctaatgtcataaagtacatattctcctgacttttttttacttttttgagagattttactgacagacaacagagcaaagtaggagtttaattttagaacaactagatgaaatagcagatataacccaactgcacacacttcattgttttctttctaaagctaaaaa

SEQ ID NO: 664442 - DNA, 565 bp, Homo sapiens
ggagaataaaaatatgggaactaggaaattgtcctagtaaatcaccacaaagggcgaggaaacgctataaaagtgatagccagtcaaggcatattcactgttctccaggatgtcaatttcaaattttgccctgcaaattcagcaattctcaatgtattacttgatatgtttataattctttattacataatccacatattttacatttaaccagatgtcttctccattcgaagagacaactgtcttctatcttctccttacaatgactcagtagaatttagacaggtgagcaagaaaaggtttgcactttcatctttatttggtggtgctccccacatcataggcaagagctgcatgctagccaatttgctatttccacatcttaatggaaacaaccgctatccggagaagttttaagaaaagtgcatttaggtgacacgtgtataaacactgagactgcttggaatgggcaatgatttcatgggggaagggaactcaggatttgtttgattcagrccataataaagacaacttaagaatcacaatctgtattgacaactagtca

SEQ ID NO: 664443 - DNA, 553 bp, Homo sapiens
ttagacaatgattgaagagagatagttttacataatgccactaataactcttttaccctttgctctattgcatgttagggcatatcttcaattctccagcagtttataattctgctttagacttcatgagttgctttgaaatccctcagggttaaccagaagataagatcttccctaggcatgcacacatccctgcacatgtgtgtagcctaggggtataattggagctctccaaagcctcctatggacatctcattttccagattttcattttaaaatttttggtcagcctcttgtctgccccaactgttacagctactttaggcaactgatgtgwtaaataattgccactaatggatttttccaaatgtcttggaagtaggggtttgctcattatgtgagctctgaatcaggtcaaataaacacaaactctgcaaataaagacaagtccaggaatctgccaaatacgtcaaatagcaacagttctctggggatgggagctttttcaggcactccatacctgttcttctccctgcaatgattgctatactgc

SEQ ID NO: 664444 - DNA, 578 bp, Homo sapiens
ataattcagttctttgaatctgtaggatgcacaggtcatcatttccttgctggttgtcagcagcgggrcactctgaccttctagaggctgtcatgtggcccttcctatccagaagccagctatggcacctcaaatccttctcatgctttgactctctctaccttccatcttttaagatggaagagcttgaacaaaaagctcttccatcttaaaaaggctcacatgatagattagacgagtgcagatatttcccttttgaaatgtaatgtaacataatcctgggagtggtatcccaatattttcacaggttccacccacgctcaaaaaggtacagattatacaggtgatggaatgttggggagtcattcttagaattctgcctatcatgtagacattaaaaaatgcatttaataagagaatgaccttccatatgttgaatttccttagcatgtagagatctaaaattttaatgttttaaattttatgttctttttcagtcacaaaaagccacaagcacacaggtacaatttcatctggtagtatattcagtattctatcatgaaagccttaggagcttc

SEQ ID NO: 664445 - DNA, 566 bp, Homo sapiens
gagaagtaatccgcctaccatagaatgtgaacctagacttctttttgccaaggtctacctaattcccctgcctccacttttacttcygtgtgcaattctgtgtagctggaccttttggccttgctctagtttccagacactctaagatgtgaaatcatgttagttaataacttagcattaagcaacctccaacagaagacaatggtacctctagactttcatttttttctctaaatcaaagttctagtcaccatgaacttgtttctagagatgccatacttgctagtagcctggtccagagcccgggaaccaacacacatggaaagaattctcctccccactgcctgctgtaattacctctgctcgtgattccataggacctgcttcccttgtctatgtgctgcccaccttctatgctgctcagtggaaacaacttggaattctgatacacatttaaaatcaccattgtacctgccttgtcctctgaatattatgtctgactatggttaggccagcatttaaccacgatcttctgccaattccaaactcctttcttctttttttct

SEQ ID NO: 664446 - DNA, 568 bp, Homo sapiens
aattctccaatctgataaagggcatttatgtaaaacctacagctaacaccatagttaactgtgaaatactgactgtttttgtgaatgatcaagaaaatgtgaggatgtacaataacatattttctattcaatatcctattagaggctctagtcagtgcaataaaacaataacaacaaaaaggcatacatttaataattattctgctcttgacctttatcacaattacctaagcctacctgtcacttgacatattgttaaaatggcattcacttatttaaaattcacctagaaccctaggtcccataaaactagaactcaggtttttctgttttccctcctcaaagttttattgaacttgaaatgtatatatgtctatatatggtaaacagactcttcaaggtaacattagacattaatagacagacctgtkaacacaacaaaagtcataaattacttttcaggatacagtagagccttgaacaacacacgtttgaactgtgtggtggttccacttacacgaaaattttcttttgcctctgccactcctgagagagcaaaaccaacccc

SEQ ID NO: 664447 - DNA, 586 bp, Homo sapiens
atctgaccacaatagaacaaaactagaaatctgtaacaggagaaattttggaaactatacaaagacacagaaattaaacaatatgctcctgaatgacaaatggatcaataaagaaattaagaaaattgagaaatttcttgaaacaaatgataatggaaacacaaaatacccaaacctatgggatacagcaaaagcagtactaagaattttatagccataagcaccatacatcaaagaagaagaaagacttcaaataacctaacaatacatcttaaaggactagaaaagtatgagcaaaccaaaycccaaattaggagaagaaaagaataaacatcagaacataaataaatgaaattgaaatgaagaaaacaatatcaaaaaatcaatgaaattggtttttttgaaagaataaacaaaattgacaaacttttagctagactaaaaaaagagaagatctaagtaaataaaattacagatgtaaaaggaaacattaaaactgataccacagaaattcaaaggattatttggggctactatgagcaactatatgccaataaactggaaaacctagaagaaatggataaat

SEQ ID NO: 664448 - DNA, 443 bp, Homo sapiens
tctattgcacccgtaaatgggaggcagtaaggttagcttccacaaaattatgttgatccccaaaaggaaactagggactgctgggaagagggaagcaggaaatagatgctggcaagacatctactaaatgttgaatctacagtcttggtcagcctcagtctgtgaagcctgcctattcaggtgggtagtgtcgctcactcatgttagtaggagaaaagaacgcagtatggacttcttccatctcttatggaaatggcatcatactctgacaataaaaacgagctttgctttggtgtttgttctgctcagaggaaaagtkttatggtctaatagaggcagcacttttaaataaaattatttttattctaaaatgctgaaatctttatgaataagtggagcccaagtaacagtatatacagtcttaagtactaaatttccaagta

SEQ ID NO: 664449 - DNA, 522 bp, Homo sapiens
gtcaagaagggagattttcttgaagataataaatactctttaattttagaagaacaggtattctgctaagaaatgaaagttaatatattttgaattgtcactattagtaawacttactagttttaagtgctactagttcattaggccattgaaatttacatcaaacatctaataaattaattcttttttttttttttttttttgagacaagatctctctgtatcacccaggctagagtgcggtgttgtgaacatgactcactgcagcctcaacctcctgagctcaaatgatcctcctgcctcagcctctcgagtagctgggactacaggcatgcaccaccacacctggctaatttttaaatttttttgtagagacagggtttcaccatgttgcccaggctggtctcaaactcctgggctcaagtaatcctcccgcctcggcctcccaaagtgctgggattacaggtatgaaccatcgtgcctagcctaacaaactagttcttatattaatggagatggaagt

SEQ ID NO: 664450 - DNA, 493 bp, Homo sapiens
tctctctttctcttcttataaagccgccagtcccatcatgggggccctacgctgacgatcttatctgaccctaattaccttccaaaggccctacctccaaataccaccaacatgtgaatttgaggattaagtttccaacacatgaattttgagaaacacattcaaaccacagcattcagcccttggcccctgaaatttatgcctttcttgcatgcagaatacatttattccattccaatatccccaaaatctttaatcattccagcaccacttcaaaagtccaaagtccagagtctgattttaatcagatctgggtgagactcaaggcacaatttatcccatgcaaatttcctccagctataagcctgtgraatcaaaacaagttatctacttccaaaatataatggtgggacaggcataggatagacattcccattccaaaagagagaaagaggaaagaaaataagcagtaactggtctcaagtaattctga

SEQ ID NO: 664451 - DNA, 543 bp, Homo sapiens
ttttcagccctttttgtcttttacaacttaagcaagatcagacacatttctgcaatgcatatgcagattttgcctcttgttactttctctaatgagcgttcacttaatcaatttgacagtagcctttatcccccaggcccctccgccctcccttttttttccacatccactaagaaagtttttaggaaaaaaaaaaagtgttaacagattcgagggggtgttagcgatgtgaaatggtagctggcctaagtggagtgactcacagggytttacttctaccactggttctgtccagcttctgaaaagagggagctggtctgccgagcttatgaggtagcatgtattttcatcaccagtagaaaatgattttccttttcaataattgaaaacgattgttttttgtttgtttgtttaagacagggtctcactctgtcactcaggctggagtgcagtagtgtgatcttggctcactgcaacctctgcctcctgggcttgggtgattctcccacctcagcctcctgagtagctaggaccacaggtgcg

SEQ ID NO: 664452 - DNA, 543 bp, Homo sapiens
ttttcagccctttttgtcttttacaacttaagcaagatcagacacatttctgcaatgcatatgcagattttgcctcttgttactttctctaatgagcgttcacttaatcaatttgacagtagcctttatcccccaggcccctccgccctcccttttttttccacatccactaagaaagtttttaggaaaaaaaaaaagtgttaacagattcgagggggtgttagcgatgtgaaatggtagctggcctaagtggagtgactcacagggctttacttctaccactggttctgtccagcttctgaaaagagggagctggtctgccgagcttatgaggtagcatgtattttcatcaccagtagaaaatgattttccttttcaataattgaaaacgattgttttttgtttgtttgtttaagacagggtctcactctgtcactcaggctggagtgcagtagtgtgatcttggctcactgcaacctctgcytcctgggcttgggtgattctcccacctcagcctcctgagtagctaggaccacaggtgcg

SEQ ID NO: 664453 - DNA, 578 bp, Homo sapiens
ttcagttcattctttattttgagggaaccagggaaatcaaatcatttacatgggattgctattgattattcttgtgtaacgataggcacagaattccccgatagccatttgcttcttcttttcatttctacccttgttctcccattactttctctccttcaaatatttttctagaaactgaaacagggtctgagtttgcatgcatcctgttgctcattacagccacttggcataagaggcaaagggacttgtacttgggaagaaaagaaaaagaaaaagaaaaagaaatttgtattcattttatcatgttgccagttttctccactatttcacttctaacagtctctattaccttcacaaaaaaagtacatgaaaaacttaaggataatttttttttgttaatcattgcataaaatttatcaatctcctcctaaatacrtaataatttatatggagaaaaaacatgtactttttatgattcattttaactatttttaaggatttatttgtaaataatttgctgaaaaacaaaaagctctgtttagtgtatccttaatgatgtgtgcctatttctgcta

SEQ ID NO: 664454 - DNA, 578 bp, Homo sapiens
ttcagttcattctttattttgagggaaccagggaaatcaaatcatttacatgggattgctattgattattcttgtgtaacgataggcacagaattccccgatagccatttgcttcttcttttcatttctacccttgttctcccattactttctctccttcaaatatttttctagaaactgaaacagggtctgagtttgcatgcatcctgttgctcattacagccacttggcataagaggcaaagggacttgtacttgggaagaaaagaaaaagaaaaagaaaaagaaatttgtattcattttatcatgttgccagttttctccactatttcacttctaacagtctctattaccttcacaaaaaaagtacatgaaaaacttaaggataatttttttttgttaatcattgcataaaatttatcaatctcctcctaaatacataataatttatatggagaaaaaacatgtactttttatgattcattttaactatttttaaggatttatttgtaaataatttkctgaaaaacaaaaagctctgtttagtgtatccttaatgatgtgtgcctatttctgcta

SEQ ID NO: 664455 - DNA, 569 bp, Homo sapiens
gtttttattgtatacagaattggaggcataaaagttcaccttttcctggtctgaatttgaaaagttagtttttggtttcttctatgaagcagaaaatcctaagttcatgacatacatacagtaaactacaatttggtgctgtggatactgcaccaagccaatgctttttaaacttcaattagtatttaagtacatagtctttcaaagttgtatcttgcttaaaaacattatatatgacagcaacatgccctttggcactaatgtgaattcactttgaaaagtttacatattgcatatgttcaacatcagtgtcaattaattgaactgcttaggttgaaacttttgacaagaagaggcaaagtgatacaaaatatattttcaagacaatacttcagctttgattacaaaagttagacaaatttaaatagaatgagtttttttaaaaactcacagctyataatgaaagcaaaaacacagcaatggttttaataaaggttcattaaaaactgtgattcttggcaagcatgtctattactacgttaaactataaaatctatatgttcagaggg

SEQ ID NO: 664456 - DNA, 617 bp, Homo sapiens
tgtctgatacaaatgtgcaggcatacctcagagatattgcacattcaggtccagaccaccacaagtagcaagttgcaataaaggaagtgacaataatttgttgctttctcagtgtgtatgaaagttatatttatatatactgtagacaattaagtgtgcaataccattatgtctaaaaatgttaatatattaataaaaataattcgtagctgaaaactgctaattatcatctgasacgtcagcaagtcatagtcttttcactggttgaaggtctttccttgatattgatggctgctggcatcagggtggtggttgaaggttaggggagctgtggcaatttcttaatattagtcccaatgaagcttgctgcatcaattgactcttcctttcacagaataattctctgtagcatgcaatgctgattaataatagcattttacccactgtagaacttctttcagaattagttaagactctcaaaccctgccactatttggtcaactaattttatgtagtattctaaatgctttgttatcattttaacaatgttcacagcatcatcaccagaagtagattccatctcaagaaaccactctctttgttcatccataagaaac

SEQ ID NO: 664457 - DNA, 655 bp, Homo sapiens
aggcacacccagttcgccaacccaaactttttgattatttatagcgtcaaatgactttttcttggaccacagttacttttcaatattgaattctgggtgaaagaagaatatttgatagacatatgtaataaacagagaaaaaagatgacatttgggaaggtaggtgcacttgaggaaaaaatttaggtgtcatttgggtagaaataaagcatttatcagattagatctctaagaraagagtaaagagaggaagacaccagctaggagataaacttaggcagcattcatattttgggggcaggaagaagaagaaacagctactacagacacaatttaaaaggattcaagactactgaatattatcattttgctgagtatttagcatgaaggttttaggtacaatattttatgtaacattacccaagaaatggtgaaaagctaacctgaaaacaaaaaattacataatttagcttttaaaattccatttgtaagtgtagtaagagactggcatttgaaattaagaaaggtattaagaaacaaagcattactatttggagaagatagataattccttccaagactaaactatttagtgacagtatgtgagatgaagataatttggttgtttattaataagatgcaagttacttgccta

SEQ ID NO: 664458 - DNA, 464 bp, Homo sapiens
ctataatattcaaagtttgggaaaagactatctttaggttagcagaatccagtggcttcatgagagaagtccagcatttgtggttggatgattttgagatatagagtacttggtgaatgtccagcttttccaagaacaaggacctggagaaaatgatggtattgttaactctaagtgaaaacacagaatagtctcagataaattattatttcatgtttgttcatttttcattttcttatcagtaaaataatattgcttatgtcataccttaaaaggatgaaattctagaatgttgagataaaatcaaacagatcttgggaagtagttgttcaactattctctttgctcatcagaggatgtctggaacattagatttggttttaaatgtcgtgttttaaatgttgtggactttatayctcatccaaactcctggtgaccaactcacccataactacaagttttgg

SEQ ID NO: 664459 - DNA, 519 bp, Homo sapiens
tattttaaacctaattgtgcacaactatgtaaatgtttgaaaacctgctcccagtcaatagcaasaaacactgtccagaaaaattgaaaaaaaaaagtgttaacagaatcaacatcaagaaacaactttgattaaaaatattgtacccagcgtaggagtgttgtgttttcaactattttgtatcagtttctaaaattagtcacataataccatgttcttctttttatcttttttttctttttctattttaaacaaaatcattctttaagggctagagaaaatggcctatcttctgggtagttaaattacatgtcaaacatttcagagcttagaaaccagctaatgagagtgtaatattaaaatgtcaaacatgcacataccattttcctcctcttcctgcccccaaaccctctggtaacaactataatgatctgtttaggcttcagtccattgttccctttcctcactcatatttagtaattactttctcctcaaggctgcacttttccagagaaaagt

SEQ ID NO: 664460 - DNA, 595 bp, Homo sapiens
tttttaactatcactgctttttaattatcactttttaacaatgtcagtggtawaacactagagtcagcctcttcaacagccctgtcccctctcatatgccattgcaaaaagtagtaataaagagaccaatacttgtttaattcttaaataatgaaactccagttttatgtttccaaattagacatccaatgcacttataaataaatatttggtggtatttatgagataaataccaaaaaaaaattttccagacatctttaaagtctttatgactagcttcagagtgctatttaccaataaattagaattaaaaactcaagattaattgaattcccactgggtgttcttttgtaaaataatatttgttacttatttaatgtctgtcttttccattagactgtaagatccatgaaggcagggcaatgcctacttagtttattgataaattcctggttcctagtacacagtgaatactgagtaaatttttcctgaatgtcatggttaattaccaataaaagttaaccaaattattccataaatatagacctgcaataaccataaactttaattttattactataacaatgaaagaact

SEQ ID NO: 664461 - DNA, 590 bp, Homo sapiens
aaacgtattttataatatatataatatatacaaacatataatgtaatacattatatgtttgcacatatgtgcaaacacaataatacattataaatcataggcaaagactaatagatgtatacatacacagtcacaaacaatttttcattgttacaaagggatcgttgatacatatgttaagtttgataagaaccactttgagtcttaattgtactttctccaggtaccaaataatttgcattttgcatattagttttcatttattctaaactatattmaattcagggtttttcacattatcagtattttgtcaagcgtgttgacatatttttctaacatggatctccaactttgtgattcctacttttattcatttaaactggtttctgaaaatttatggttcctagagaataaattacgtttcacctggattttgcattctaaaagccaagaccatgtataaagcacatatgagatttaacttttcaactatgagctcttttgacacagcgtgattagacaatttggattcttgaatttggtaccaatgagactaagctgctgagagccatatttggaactaggtctcc

SEQ ID NO: 664462 - DNA, 568 bp, Homo sapiens
ttgcccccctcccccttttatttttcctgtggaagaactttagcaatcctgaaatccttattcctctttttactgtacacgtaataaatccaatttcattagttttaaaactgctaataaaagataaatggttagctttaataggcaccactattagtaacacagaacagagaggaccattggtgttttgttcatgccacctaattgaaaaaatatgagaaaaaagaggaagatttrttagccgcttctaaatcctcaagaaggaaggacatcttttctacataaatctaaaaatattctcttaaggagaattaaaagtactattcagtgcaaatttgtggctggcagctagctgaagcagaagttgtctatttgctgcagctgatgccgatcagactccaaggcgcagtatgtaccagctgaagtctgtcaacagggagaccagcataagggcaatctgatagtcaaaacaggataaaaccacagtctaaacaagatgacatgagcatttgtgcaattaacagcatcagcaaggggaaagttgtgtttggaacattccactagaaat

SEQ ID NO: 664463 - DNA, 581 bp, Homo sapiens
gctgcattatattatcttcttcttgagttatttagatttgcatgatttttacatcaaaactttggtagtactttcaagatttgatggactatcccttctcagtgtcttctaggaccttgttgctactcagagtagaatggatatcacctggtggcttaatagaaatgcagaatctggggtcgctcaccagaattgcagaattcaattctgcatttttacaagatccccaggtgatttgtctatatgttaatgttttataagtsctgttctaaaaacgaccaggtacaaaagttatgattttgctggacacaactctcatgtctcgtgaaaataaaagaagatttaggttaccctgatcttcttgtagcaagaggagctaaattgcagcagaaaagtttaaaaagctgatatccttttaggtgcagaaaataaggtgggattttttaatcatatcattattacatatttgagttctaaatttaatgtgtttaggttattttagtgaattaagtgatataaatctccctagaagcgttccggttctttgttgctaagggacgttggcatctgttttttatgct

SEQ ID NO: 664464 - DNA, 515 bp, Homo sapiens
gaggttggaaaccgtattttaccaatcatgatgtatttaactaacaaagagataccttcaaaagaagtaaaatgtgtgacaggaccctggtgtattagttttatttgcctttggtatgtgaaacaaaaggaaacattttaattacagagcacatttcttaaacaacagtgctatrtaccttacactaaaaaaaatgaaatccagatgtactagagtcgaatgaaaaaataaatcattcaaccataagaaaatatgggaacatatgtattagttcataagatagggacaggtttcttatatataaagtaaagtaaaatttacagaagagtttttctctgaatcaaacaatgaactaaatcaattaaaaagcaaaaatgagttaaaaagcaagaaaagtgaaaaaaatagttaaaaacagatggaatgcaggttaattatatacccacacacggacacatatatgaataaatattgaacattgtttctaaagaaaatggaaggttaggttcctgtaa

SEQ ID NO: 664465 - DNA, 316 bp, Homo sapiens
acacaaaatctgcttgagtggagttgatttttccatagttccttctcttgctctttcatcccatatgtccaagtggtgagcctagcacaaaacctgacatacataaagctgtaaataaaggtgtggtgaattaacaacttcattaaaaaatgaatgacttgctaaagtatctaaccacagtggtaagatgttttaagaatgctttctctgtggagtacagatctaagcagagaygtcagaatcaatcttgacagctgttctcttgaaatcgagcctttgtaatagagccacatgtatccacaggcaatctctctaa

SEQ ID NO: 664466 - DNA, 517 bp, Homo sapiens
tgcagggaagtgatttctatgcccatgtgaaatgcagactcagaagctagttatatataggtgtcttatcttcatctctaatcataggtaatttggggccttgaccctcactgaaaaaaaagaaactgatatcacccccacagctccccgccccacccctagatttatgtggagtcatgctcaggattcatattcttttccctttgcagatgtagaaacctcagaccccatgtcttttcagcacctgcccctacctycaatctcacaatggccatagtcttacacgtcactaccagcatgggtttattatcgttttttattcacagagacttttctttcttgtttttaaaaatggttctatcagtcagggccccagcagaaaacaatgttattcagatacctaaattcaagagatttgaatgaagggactatttacagatataaggccaggaataaagcatacaacaaggtcatttgaggtgcccagagactaagaacagcaggctctaaagggcaa

SEQ ID NO: 664467 - DNA, 555 bp, Homo sapiens
atctcctgtttgtgctgtgtctctaggattgatcacatttagttgcctcttcggccaccaccacagctttcctgaaaaatgactgcagttccagactctgctccacctgagggccaggttctcctacctagcatgcaccccaaccagacagatggtcaacatggtgaaactccatctctactaaaaatagaaaaattagctgggcatggtggcacacgcctgtaatcccaggtactcrggaggctgaggcaggagaatcacttgaacctgggaggcggaggttgcagtgagccgagatcacactccagcctgggcgacagaaagagaccctgtcttaaaaaaaaaaaaaaaaaaaaaaaaggtttaattggctcacagttccacaggctgtacaggaagcacgatggcttctgagaaggcctcaggaaactttcaatcatggccgaaggcaaaggggaagcaggctcattgtacatggcagaagcaagaggaagaaagggagggaaggtgctcacacttttaaacgatcagatctcacgagcacttactcactat

SEQ ID NO: 664468 - DNA, 612 bp, Homo sapiens
cccttcaacccgtccctggtccaacctgtcttactaactaacacttctccttcctcccaacaccactagatcactacaacccatctcacagccccgacaaaaaaggtcacagcactcagctccctccaaggtacagagttcacagtgctggtatcttttcccatgagaagccaggaaaggagagggccatgtgccagctgctgccccacacagtcctctagggcttctggacgagtgtgtagtcccctcgcggcaggtcctgtacatctggtggaccactctatctctgcacastgtgtctccagccagcacagtgtccagtatgtagcaggtactcatgacacgcttgtggaacaaaggcctggttgcccccacccctaccgttcctctttcctttctgctagatactcatctaggggtaactctatttttagggcctcacccatgactaaatcccagacatcagaactgcttcccagagctgtttggtctgtttttgttttaatctcacgccacagcaaaaattctcatgcaacacccccaaaagctgggaacccagagattctaggaacctagtactagtcacctaagaaaaggtaagaatatcacatg

SEQ ID NO: 664469 - DNA, 579 bp, Homo sapiens
aatgcccaggagtttaattccaagagtggggcagtcacccttaaccaatgactaagatgactggaagtaagaaaacatagctcytttgcttcagggtcaaataattgaggtatagcttacacttcagatggtccctgcaggattcagctacagctgtcctctaaggtactttgcctggattttggcttttgcccctcccttatcctactccttccactcccctatggggtttccccagaaacacttctgtaatagttctttccatacaaattcttgtcccagtaaaactcattataaaccagtagaagaaagggagacactaagggatgttttccctgtccctctgcctcagtgctgtccccagcaaagtctgcatctgctcctcggctccaatttccatcaggtagccttcactggggttattcaatgcaagtacactcaagtcttttacattacagttaagacattatgtggaggaatgtgactgcaagatttgggatgggtgtctcagataaagctgaaaaatcttaaaccaccaaaaacctcttgttattttagggcaaaaatggagacttgcac

SEQ ID NO: 664470 - DNA, 280 bp, Homo sapiens
aaactctcaccagatgctagttctatgttcttggacttcccagcctccagaaccatgagccaaataaacttctgttctttataaattacccagtctgttgtattctggataatttctatagcagcagaaaatggaccaagataaacaagtacagtggtttctatttgcttctaataccattcttaagtgtacaatatagaataccacatagtatgtacaatatgatctcactttawtaaagaaaatacatatacatacacaaaaatgttttggaaagata

SEQ ID NO: 664471 - DNA, 630 bp, Homo sapiens
ctatcaactttgcccgggatcggggagaggcttagaacacaattttgcattcrataatgtggttttagttcacttacctaagacacatctttaaaatagtttctgctatgtgtaagattgatattaggtaattgggaagacatgaagatatattagacacaaagccatcttcaaatatttgacaaattaatagagggtagataacatgtattacaatatccacaatacaaattagattatgataagcataatgtgtgtaaaaaaattattttgtgggtgtgtagaaagatgactatgacatctatctgggtaaaattttgataggtaaatatagggaagaggaagttcaaatgagagaaaatataagcatgtaagcttagcaaaaaaaaaggggggggtgaagtctatgttcataaaatctagaaagtactttaaaaatgaagttaacaacatgggttgagaccaagttatgggaccaggaaagtctgtatcttaggtgaattaaatatgtccacctgtcctgagttgtaaaactgacaagaagctttttttaaaaaaaagtcacatcttaaaggggcaagggaagaatttgcaataacaagttttccaaaggtccaattaaaggaggcc

SEQ ID NO: 664472 - DNA, 503 bp, Homo sapiens
catttgaatgattcataaatcacaatgaaagtttgcccttgctcaaaggcaaagaaaaaaatttacaggrgacttaaataggtagaagtgggtttaaaaacagcttctcaaacaaaaatgttggataacactaagcaatggttagagacactagcttcaaaataactcagcttttcttcaagattacttgattctttcagagtacatctgaaattttctattaattttttgcttctctcaactgtgtggatgggaggcataataagatttagtgtaggtggtatttccaaaatatatttatgtaaatgtcacttggataaaaatcctgtactcccagagcaagaaaatcaatccccaacctcactgaatatttgatctataattaccttccaaaattaggtactggaaggacataataggtctaattccactgaagtatttttaatagcatatttaaatcatccctgattcctcctatacttattaacagttttctcagataa

SEQ ID NO: 664473 - DNA, 504 bp, Homo sapiens
tatcagaagaaaggtttgttcatgaatgtttttttttttttttgcatttttcaaaacccaaaagtgcaaactacagaaagtataaactatggtatatttctacaaaggaaaattgtaaagcaacaaaaacaaatgaaaataaacacagcaaccaccaaataatgaggaaatctcagatatataatgttgagtaaaagattcaaatcacgggagagtataagaactgtgattctatttaaataaaattaaaaacagggaaaatcaaagaatatatttgagagagagagagagagagagagagagagwgtgtgtgtgtgtgtgtgtgtgtgtgtgtgtgtgtgtgtgtgtgttttgcaatacagtacagtggcttgcactgggccaacaaaccaagttgacgaaggtaattcagaaaaatcaggacatctggatgtgacagcccacacattcaggactactagaacccaactttcagaacattttccagttttccaaaattttccc

SEQ ID NO: 664474 - DNA, 504 bp, Homo sapiens
tatcagaagaaaggtttgttcatgaatgtttttttttttttttgcatttttcaaaacccaaaagtgcaaactacagaaagtataaactatggtatatttctacaaaggaaaattgtaaagcaacaaaaacaaatgaaaataaacacagcaaccaccaaataatgaggaaatctcagatatataatgttgagtaaaagattcaaatcacgggagagtataagaactgtgattctatttaaataaaattaaaaacagggaaaatcaaagaatatatttgagagagagagagagagagagagagagagtgtgtgtgtgtgtgtgtgtgtgtgtgtgtgtgtgtgtgtgtgtgttttgcaatacagtacagtggcttgcaytgggccaacaaaccaagttgacgaaggtaattcagaaaaatcaggacatctggatgtgacagcccacacattcaggactactagaacccaactttcagaacattttccagttttccaaaattttccc

SEQ ID NO: 664475 - DNA, 573 bp, Homo sapiens
gtgtgtgtgttttgcaatacagtacagtggcttgcactgggccaacaaaccaagttgackaaggtaattcagaaaaatcaggacatctggatgtgacagcccacacattcaggactactagaacccaactttcagaacattttccagttttccaaaattttcccaagtcaatataggcaatgaggaatcagaaagaaatttgaagttaaaaggaatcaaagctcaaagctctgaaagagaaatagtaaggctatggcctaagaaacaaaagctgtacaaagcccacagtattcatcatattctctccctcaaatcctccaattactccccataattaaatactaatcccttagcattctgaattcaacccactttagctaagcaaaacaggccactttaccctccagcttcacattttcttcattcctcatttttgttactattattccctctctctaaaatcctttttgcacatctcatcatgtcaaatccctgctgaatagggaaaaactgaatgccttttctctaagatctgaaacatgacaagaatgcctattgttaccactgttattg

SEQ ID NO: 664476 - DNA, 531 bp, Homo sapiens
attgctggccccactataaggctcacgggagattctccacttccatatcataatacataacccaaaagcccacgccccaaatatttaaccacagactgtcaaaaccaggaggtaagtagagtaaaaggtcctatatgtctgtccccatcccaagtaaagacatggaacctctttcttcatctaatccacccttaatcatgggcccttcctctaatttttccttccttccccctcttatctcttcacctagtactcagtcaactcacttcatgttcaaaatagctctcactgtcaactctacctcatttcaaactccaattattatctttactctgtctaaacttcacactgtctattttcatttcttttagccaggagaatgaaagctgagcatcgatgagctgtgtgtatatatcytagagattcagcctaattatcttgtgttaaagacaatgtattattgtttcatccatttttaatcagccctcactgcaatgaaaaatgtcctttttgaagaagtgatctcagtgt

SEQ ID NO: 664477 - DNA, 642 bp, Homo sapiens
ctactattttctttaatgacattttttcttagtgttggatgccccctaccaccagacaattggtaataggattgcaactggtatagggaaggtggagggactgaggagaaaagagaaattgaatttatgtgtctccttcttagcacagcctcaaatttctttttcagaaaataacttctgcacatacagcattaggaagcagtgtttcccaaccactacatttgaatggtgagtacccaacccagaggtctcaggaacctactagattcccaactctgtcatgattttgcaccaaagggcacttaacttatttgtggatgtaaaatgaagagaaagatgcctgcccatcagaagccagcaccatgctccaggcatagggcttcaaaaaaacagagaagattcaaaaatgaggattgtcatctcagagaagtttatgaaattattaaaatttgcaaaacaattttaatcctatccaggggtcaggagctgctcatcttccatctgagggactgggccagggacagttttatcgaatgtgaatctaggcattgcacctccatayatgaccatcaatgtttacagttttcttttctgcatttactctggtttcacctttcatatgggactcctctgatcttcaat

SEQ ID NO: 664478 - DNA, 606 bp, Homo sapiens
cggcaagagagaataaggaggaagcaaaagtggaaacccctgataaacctatcagatttcatgagwcttattcaccatcacaagaacagcacaggaaagaccagcccccatgattcagtacctcaccctgggtccctcccaaaacacgtgagaattccgggtgatacaattaaaattgagatttgaatgggaacatggccaaaccatatcatgtatatatatgacatttgatggatggaactggaggacattatgttaagtgaaataagccaggaacaaaaagttaaacaccacatgttctcattcatatgtggaagctaaaaaaagttaacatcatagaggtaaaaagtagaacagaggatactagaggctaagaagtgtaggggaaaagggatgggaggtagggagagatttgttaaaggatacgaaattatacctagataggaggactaagttctaaaattctatagcactgtaggtaactatagttaataacaatataaaggttcaaatagctacaaggaggatattgaatgctcctaacacaaagaaatgataaatatttgaaatgatggatatgctaattactccaatcttatcattaca

SEQ ID NO: 664479 - DNA, 661 bp, Homo sapiens
tattaagttgctaaaaaggaagtcacagaacgataggcatagtatgatcatattatgttcaaaaatctataactgcgtagaacaaaatgtatataaatcctatcaaaggaacaaagaaaacatttagaaggatccatctacactgttaaagtggttaacgagaaagaaatgttaaaaagaaggtgtacacaaaaggatttgcacttgaattttataatcagcacataaatccrgtttctggaacaatgcttgacacaaagtagataacaaatagttgttgaatgaattaatagattacttaaggaatcaatggcttctataactttaaaacaaagcaattatatgaaaaaaacacaaataaataaaacaaatagaaaccacttaaaatctgccacccaaagaactgttgtttacattttggcatatacatgtagaccaatatttttatttttaattttcaaaattgtatatatttatggtgtgcaacatgatgtttcgatatatgcacacattgtagaatggctaaatcaagctaattaacagatctatctccttacacacttttcttttgtatatgtgatgagaaatctaaaatctactctaggtaattttcagcaattttaataagtacacaacatattattatctatattcatcatgt

SEQ ID NO: 664480 - DNA, 599 bp, Homo sapiens
cacacttggctaatttttaaaaattttttgtagagatagggtctccctatattgtccaggctggtctctaactccagaactcaagcaattctcccaccttggcctcccaaagtgctcggattacaggcatgagccatggcacccagccttatatattcttctaccatggaagttagtagctttgtctctggtaaaaagtctttaccctaggatacataaatgctggtgtgtgtatgtgtgtgtctatttgtgagtatgtaagtctgtgtgtatgtgtaagtgtatatttgtgcatgtgtgtatatgtattaatatgtgtatatgagtgtgtgtgatgtgtgtgaaattctctccttacccagttccacacactgatgctttgactgaatcaaactgcattctccagaggtagctgctgagcttcctgattttattctatacaaaataccaaaaatacttccaaataaatgggttgttaartacccttcactactttggagggctgtgcctgactttcttgccactgtgggaattttaccaatagtattgaatggaagtcaaatgtttaaaaaataaacaaaacttactttctaaaaaca

SEQ ID NO: 664481 - DNA, 549 bp, Homo sapiens
ttcaagcctaaacaatgacaaagatatttctttttaaagttctggggagggtgggaagggcatggctttttaaatgtgtagtgtttattcctagattggcatcctctttgcctctattgatgagcagcacctctcccttttatttaaattcactagtttggtgatcacgyggttccagaggagaaggcagaagtgatagtgcagcagagtccccactcctgtaacccatgtgccaagttataatctgatagattcatgtaataataggtttctaaattgtggagtcagacacaaaaggtcatcagcagatggtgaaactggttgggccaagcgaagggaataaggcaccctgaagggcacactgccttggactgacgcaacatcacatgtgctttcttccttcttttagtcctaacgtgaatggatcttctcaagtacgtgaagtactagagaccagaggagggcatctaaccccagacagcaaaaagacaggatgtccacagatgcttggtgggagagattggaccaataaccatgacagtgactcac

SEQ ID NO: 664482 - DNA, 612 bp, Homo sapiens
gtgcctttgccttcttacctataaaatagagatgatactagtaccttatgcatataataatggtgaggattgtgtgtgtgtgtgtgtgtgtgtgtgtrtgtgtgtgtccttgaagcagtgcctagtggtgatgaactattactattacacattatatatctgaacccctgacaggaagtcttgctttatggatcataaagaaagttctttcagaagtatcgaactcttttcccttatatatcgcaaatagcttatttctttttaaagtcttctagatgttcattaatctattttttaaaatagaatgatggaaatccacccacaagtttgaagcaaaagagtgaaaaaatttgcttcatttttttaaatggtcactgtggctactgtacaggaaaaaaagttggaagagggcaaaaggggaaacaagaaaaccagttataaggtatttccataggaaaaggataaactgacagtgtactagactggacaaaaataattttaggaaaaagtttaggaaaaaaataataaaaacagaaattatatattaaaatgtaaaatctagtactaaaaaactattgagaatattggagcaaaaagttactaaattatatc

SEQ ID NO: 664483 - DNA, 612 bp, Homo sapiens
gtgcctttgccttcttacctataaaatagagatgatactagtaccttatgcatataataatggtgaggattgtgtgtgtgtgtgtgtgtgtgtgtgtgtgtgtgtgtccttgaagcagtgcctagtggtgatgaactattactattacacattatatatctgaacccctgacaggaagtcttgctttatggatcataaagaaagttctttcagaagtatcgaactcttttcccttatatatcgcaaatagcttatttctttttaaagtcttctagatgttcattaatctattttttaaaatagaatgatggaaatccacccacaagtttgaagcaaaagagtgaaaaaatttgcttcatttttttaaatggtcactgtggctactgtacaggaaaaaaagttggaagagggcaaaaggggaaacaagaaaaccagttataaggtatttccataggaaaaggataaactgacagtgtactagactggacaaaaataattttaggaaaaagtttaggaaaaaaataataaaaacagaaattatatattaaaatgyaaaatctagtactaaaaaactattgagaatattggagcaaaaagttactaaattatatc

SEQ ID NO: 664484 - DNA, 592 bp, Homo sapiens
tgggctagagtgagtgctaaaaaataagcacatgtcctaaaccaggacagtcagacgcttcactgatatttttgtcaaagcaaatggggaaaaaaaratttctttccgatggaattgttaagattttgaggtggaactcaggctaaccagggtcatcatgcctactatttgaagagaatggaactaagaattggagagaaagaggaaaccttgataaaatcatttttatttttttactgaaagctatttaagtttcctcccgctgtaaagaaaaaaaaagctaaaacaaacatatcatagggatctctgcttgagcctaggtttgacagtatatctgattaaattggtggggccagtaaaggaatctgtttgctcacattaataggcagagataaatgtgctctgctgggcctggagtgtcaaaaacagagggtgcagcaaacagaacagtgtttgttccccagttgctatgcattttttgagtcctaaaaaatgagcaggtgctggtaaaaggaggcatttttgtggaatactttgttaggcttgagggcaagcacgtcttctgagggccccaggatagtgacacggcaga

SEQ ID NO: 664485 - DNA, 513 bp, Homo sapiens
acggccaacagatctataaaaaaatgttgaacatcactaaccatcagagaagtacaaatcaaaaccacaataaggtattatctcacctcagttaaaatggctattgttccagaaaaaaaaaatggctattgcaaacaaagaaaaacacacacaaaaaaaacgtctggcaagaatacagagaatcggagctttagtacactaacggtgagaatgtaaattagtagagctactatggaaaactgtatgaaggttcctcaaaacaatagaactatcatatgatccagcaattccattgctgggtatatatccataacaaaggaaatcagtatattgaagaaatatttgcactcccaggtttgcccagaactattcacaatagccaagatatggaatcaccctaagtgtccatcagcaggtgaatagataaagaaaatgtgttgcatatatgcaatggaatactattgtgtcattaraaagaataaaatcctattatttgcagcaacatgggtgagc

SEQ ID NO: 664486 - DNA, 545 bp, Homo sapiens
tgaattcaacaacacttatctgaaatctatgtactgaaaacatatactgtgtacttgataaatttaacctgcagtggtcaactctaaggaataccttggtaaaacttttcccttaaaaaaaaatgtggttatcttgacaaaaaagagcaagttgcttttaagaaaaagaaaatccgttttgcatcatgcttcttgacaccaacatataccaccagaaaagaaagcagcacttacaagacactcaaggaaagaaaaatgagtcaaggagccatgctgtcttaaggtataaaataggctacaggcaaacagctatcaacatgcaaaactccamggaatattgttctcaggagcccctccttagaactctaccagaggactaatttcagacaaccaagaaattattgtggggaaggggagtttggcaaatagtctggtgatgagaactgaatatatttaactgaagaactaagactaaaatgtgcaataagggtaacaaaataatacataaatattaaatcttggtcaggcagtgtagaaataataaa

SEQ ID NO: 664487 - DNA, 545 bp, Homo sapiens
tgaattcaacaacacttatctgaaatctatgtactgaaaacatatactgtgtacttgataaatttaacctgcagtggtcaactctaaggaataccttggtaaaacttttcccttaaaaaaaaatgtggttatcttgacaaaaaagagcaagttgcttttaagaaaaagaaaatccgttttgcatcatgcttcttgacaccaacatataccaccagaaaagaaagcagcacttacaagacactcaaggaaagaaaaatgagtcaaggagccatgctgtcttaaggtataaaataggctacaggcaaacagctatcaacatgcaaaactccaaggaatrttgttctcaggagcccctccttagaactctaccagaggactaatttcagacaaccaagaaattattgtggggaaggggagtttggcaaatagtctggtgatgagaactgaatatatttaactgaagaactaagactaaaatgtgcaataagggtaacaaaataatacataaatattaaatcttggtcaggcagtgtagaaataataaa

SEQ ID NO: 664488 - DNA, 587 bp, Homo sapiens
acttgggccctcttgtctctttcttacaagactttctgatgggctggttccactttacggaacactgtatcctagccacggcccctgctttcacatctcaacattgttaatttctcaaaaaactttctctcacctctcaaacaaagctaggttatttttctacaagttatactaaaactcatccttttcctttgttgcacttatcatgattataatcaattattcatatgattaattgtttgatgcctatctctccactgggtagtaaactctgcaagaagaaggaagtataatcttgttcattgctatatccctaggcctagagcagtttccgttctacatttagkgctcagttaatgtctgttgaatgcaatgaatgatgatgatcttaacacatttcactggattgcagtcagctctagctgccttggaaatccctctctttaaatggactttgcaaatttctactgtgatccagtaatggctaattttcttccctttagcttttcactaatgcaacaggacaaaacctgtggggcctaggtatataagctagtaaaataaatgttacccaggttcttatagat

SEQ ID NO: 664489 - DNA, 640 bp, Homo sapiens
aacatggagagagtctaggatttttgaaaatggaatggaataaggatactagcaactagcagtgtttacttaccaggtactgtgctaaatacttaacatatggtatttcctttaatacttccaacaattctgtaagctagttataattatctacattttacayatgaaaggaaaattatggcacagaaaagtctgcacacaggtaatggcacagtaactaccatactatgcttgcacagagaaaatatctgagattcatgtaagccttactccaaaatccatgcttttccacacagccacctctaccacacattctacacctattatatacctgtggttggtgcacaagaaacagtgagctggtatctcaacaaggtagccagaagaaagtcttggagtttagatttgagcctgaacatgcaaattaatattaatttttcaaggttgttatgaggctcagataagaacatgtgaagaacacctagcacagaaaccttcacccaataaagattatatcttccttccattctcttcattacttctcaaacaggtttcaaattttagtaagatgtatcactactttgcccatttttcctttataaaatacatggagcccaggataaactgttccagaaattat

SEQ ID NO: 664490 - DNA, 553 bp, Homo sapiens
tcatcaaattagcctcttgctgaggtaaaaacaagaagagcagcttacaaaattatatatgcagtggtatctcagctacttaaaaatgtaaacagaggagaaaaagatagaagaaaacacaacaaattactaactactaatctttgaaaatggaattgggagtgttttattattttctttttaatacttttacattttctacaataagcatatattgttagtaatttatcattcatggtattgaatgcttacaatatacatgcacatatttcatttaattctgaccaaaaaggaaaacaaaagaacctatgtaggaagtattatccccattacataacttgcctaaggtcacttagctgatatatggcagtcaatattcacacctaagtctacgtaattttgttgtctcccatatattgttctcatgatcagaaggagaaaagaagacatactcaaaataatatctaatayagaaaggatagtggaatcaacttgtgtaaaaaaaagaaaaaaaagtttccgaaaaaaatgccactgcagaggctaaaaaact

SEQ ID NO: 664491 - DNA, 273 bp, Homo sapiens
cgaatcatgtttttattatgacaaaagtttgtggataaaattcactttgctaaatgacattaatttaacacgatgtattgaatatctgctatgtgcccattacagaactaggttcaaggcaaaggccaacagaaaataagcatacttwgtttccaacatcaaatgtgtgtttttcctctacatttgcatccaaagaaaatactcttatgcacatcaggtttaatctcttagcttgacttacgctaaatttatattatatagagactaaaatat

SEQ ID NO: 664492 - DNA, 571 bp, Homo sapiens
ggcaactaatacatatctagtcatttgttttaaagttgattactcagtttgagatgtgcaaacttacttttcctagaaatccaggaaaacaactaaaccccttgacttcctgaggatcagttgcacagcttaaggcaaataaatgtcagcaaagcaaagggggtctgactgttgtttttcctctctccataagtgcaaatagcaccctagcaggagtcgggagagccatttattttttaactaacaaaggtgacagcaattaagtagytgagtcaggacctgagcttcattgtgtcccacacttgttccctgacttctataccacacaccagtcagtcagtttgtactctaattacccaacatacatttttcaaccatgacagatatctgtgaagtgttgagatgctaaagaaaaggtcaagaggtcccaccttctgcaggtgggctgcttttcttgtgtggagccattggagcccctcacttagtggaactgagaatgcttttaacagctaacatttagtaagctgttaactatgtgccaagcaatgtactgcattgcatatgaatcaac

SEQ ID NO: 664493 - DNA, 608 bp, Homo sapiens
aattactaaacaccttttatgtgcccccttccaacttcccacgttgtacctttttttaatcattgccattggtaacaattcaagaagaaccagctcttgcctcctaagaatgaggaaattctacagacccaacatatcaaatgattagctgagagggtattgttgctctgggggaaaaagggcaatttgactgggggaaattccgttcatttagcaaaatttaaaatagtgtttctttaacaatgattattttctatatgtttgtttattttctttagggaggggaactgacacaaattttctggaagatttataaaagctattagccagatctggaacaactttcactacatggcttctggagatcaaaagcagtaaagaatgcctcttcgaaaggaactccacttgcctcaggttgtttggtatggagcatgtattagtctattttgcattgctataaaggaaaacctragactggctaatttctaaagaaaggaagtttatttggctcacagttctgcaggctgcacaagcatagcaccagcataccctcggcttctggtgaagtgtcagggagcttttactcatagcagaaggcaaaaggggag

SEQ ID NO: 664494 - DNA, 595 bp, Homo sapiens
attgaaatattgtagcacaatacacgtgctatgccttcctgccatctcagcttttaatttagtggatttttaaaatttagaattccaagtatggcacttcctgttctctgttattgcagacagccgtccaggcagaaaaaagcatctggaccagaaatcatcattaccaagtgacagaactggaacaggtattagagtgrtccaagataattactgagtagaaaagattgatctcgactgtttcctgaatgtagctgagtttgacccagaacagtgcttctcaaactttaatgtgcatatgaatcacttgggatctagttaaaatgcagattctgattcaataaatatagagtggggcctagggttctgcattcctaacaagctcccaggtaacagacgggactagtcaacatggattggcacaggtcagagggcacaatcatgcccagacgcaaagaatgttcttcacagaaaggaagtggtggggccacgcccaaaagggtgaacagcaaagcccagatgtcgccagcagagggcagcagagggcaggttaaagtgcactggatccggccaaactcagcccaaaggcagctcc

SEQ ID NO: 664495 - DNA, 645 bp, Homo sapiens
taaccttgtaaaagtctttacatttttaccagtattatttcaaaaacatacagctcattggacccatggtttgaggttttgttctagttkctctggcagagtgtctgagcttgaggtgactctgcaaagctgggcttatacaaccaactctgagcttagcttcaccattagtaaacaaggtaaacaatgcccacctcacagagctactgaaatgataacaaagttgaaacatatgaaagtacctccttcatttcacctgatatataaaaaactatttacaaactgtaaagtgatatgacactgtatgttatttcaaatagatttatgaaatacgtgaagccctataattttatgtttaactgcataattttcacttaatatacaatattaataattgttttcttttcccactagaatgtttgcttcagaagagcagtgattattgtctgatttagttcgatgctatatcctcattgcctcaatgcctatgatgtacctggcacatcatagacattcaataaatactggatgaatgagttgtttgtgctaactttgccttaaagcatatgatgcaacaaataaaacaaatgggcaaaagttaaatggttactaggttgttgttggattgggcctgtggaacaagct

SEQ ID NO: 664496 - DNA, 640 bp, Homo sapiens
attgtattaggtattataagtaatctggagatgatttgargtatagaagtggatatgagttaggttgtaggcaaagactatgccaagtcctatgccaaggacttgagcatccacagattttggtatgcaggaggtcctggaaacaatccctcacaaatactgagggttgactatatatcaattacggtgatggtttcatgggtgcatacctatgtcaaaatttatcaaattttacactgtacatttgtgctggttatagtaaatatatatggtatagtattttatagacaactgaataatgaagtgaatacacaattaaaactagctgaacttcaagtttgctgagtgagaggcaagatcatccacaatataaatatttccaggatctccaacaaattgtttaaattcatttttaaaagcaacagctgcctatgatatctttccaatattctttttctgaatataaagattacctttcatgtctttgaaatgtacaaaatatctgtgcatttctaaaaaacaaatgtttttctaatgaaagaaacagtataagcaaaacaaattcttccactgccccacatcctcttaatacccaaccacacccacagaagagttgcaaacattaaaagaaatgatcaac

SEQ ID NO: 664497 - DNA, 640 bp, Homo sapiens
attgtattaggtattataagtaatctggagatgatttgaagtatagaagtggatatgagttaggttgtaggcaaagactatgccaagtyctatgccaaggacttgagcatccacagattttggtatgcaggaggtcctggaaacaatccctcacaaatactgagggttgactatatatcaattacggtgatggtttcatgggtgcatacctatgtcaaaatttatcaaattttacactgtacatttgtgctggttatagtaaatatatatggtatagtattttatagacaactgaataatgaagtgaatacacaattaaaactagctgaacttcaagtttgctgagtgagaggcaagatcatccacaatataaatatttccaggatctccaacaaattgtttaaattcatttttaaaagcaacagctgcctatgatatctttccaatattctttttctgaatataaagattacctttcatgtctttgaaatgtacaaaatatctgtgcatttctaaaaaacaaatgtttttctaatgaaagaaacagtataagcaaaacaaattcttccactgccccacatcctcttaatacccaaccacacccacagaagagttgcaaacattaaaagaaatgatcaac

SEQ ID NO: 664498 - DNA, 535 bp, Homo sapiens
cttcttcacaaggcggcaggagagacagcgtgcaaggaggggactgccaaacacttttaaaccgtcagatctcgtaagaattcactcactatcaggagagcascatggggaaaccacacccacaatccaatcacctccctccctcagcacgtggggactactattctagataacattcaggtggggacacagagccagcccatatcaggactatcaccctctgagatgagcagggttcaatatgtagagatggagagtgaggaatgatacacacagaggtacaggtagaaatgtaggtgtttttgtaatgtttttatttttacaactaaaatagttaacactcaacattttaggttatgttttatttaaaagtttttttcagaacttcaaagattagattagaggttctcaaagctctagagttcttaaagtggggttttcaaaacagcagcggcattagcatcacccaggaaccctatagaaatgcaagccccaggtctacccaggacctcctgaatcagaaactctggggcaa

SEQ ID NO: 664499 - DNA, 535 bp, Homo sapiens
cttcttcacaaggcggcaggagagacagcgtgcaaggaggggactgccaaacacttttaaaccgtcagatctcgtaagaattcactcactatcaggagagcaccatggggaaaccacacccacaatccaatcacctccctccctcagcacgtggggactactattctagataacattcaggtggggacacagagccagcccatatcaggactatcaccctctgagatgagcagggttcaatatgtagagatggagagtgaggaatgatacacacagaggtacaggtagaaatgtaggtgtttttgtaatgtttttatttttacaactaaaatagttaacactcaacattttaggttatgttttatttaaaagtttttttcagaacttcaaagattagattagaggttctcaaagctctagagtycttaaagtggggttttcaaaacagcagcggcattagcatcacccaggaaccctatagaaatgcaagccccaggtctacccaggacctcctgaatcagaaactctggggcaa

SEQ ID NO: 664500 - DNA, 601 bp, Homo sapiens
gtgtgtgtgtgtgtgtgtgtgtgtgtgtgtgtgtgtgtgcagagctattgtaaatgagattgcattcttgatttgtctctcaacctgaatgttagtgctgtatagaaatgctgctgattctggtatatttatcatttatcagtccttggagccttttagtggagttagagttttctatgtttagtgttatataatcaccaaacaaaggtaatttgatattttatttttttatttggatgtaatttatttctttctcttgcctgatggctctggctcagtttcccagcactatgttgaataggaatgatgagaatagacatccttgtcttgttccatttctcaaggggaatgcttccagctttttcccattcagtaagatgttggcagtgggtatgacataaatggatcttattattttgaggtatgttccttctataaatgcctagtttcttgagtgtttttctcatgaaccaatgawgaactgtatcaaaagctttttctgtgtcattaagatgattataccatttttgtttttaattctgtttatatggtgaatcacagttattgatttgcctatgttgaacccaccctgcatcccaag

SEQ ID NO: 664501 - DNA, 605 bp, Homo sapiens
aggaagtaaggcttagcactggggagcaaggaaagcactttaggtctgtagaaaaagtcattggaatgaaatacataggaagcaactaactactgtgctcactctaccttggaayaggttaagcaatttattatttcagaatcagtaaagggtaggcattgaatatatttaaggagaatatgtgtaaagaacaaggtgaaacttacttaagactgaaagaatgtaggcaaatgagagaaagaagaaagagaatgacaaggaagagagcaaagagggaggaaaagcaagggattaggaagataaattgcaagaaaaaattaaaaagcaagtaacaggaaacagaagctaaaagagaatgtaaagaaatattgttgtaaatgagtgtatgaagacagaattagcaggaagagaatggggaaggatgggaaataagaaagaagcaagataaagtgaatgaggaaggataagggagtgagctgctaggatgttgatcaggtccccagacacttggcttcaggagctggtctgaaaacagtctggaattgagatatgcacagtgttgcctgcagatgcttactgctctgcagtctggaagctgttgtgcg

SEQ ID NO: 664502 - DNA, 621 bp, Homo sapiens
gcctattgttgaaggtttcaagtgtattttgtatgtccttcaatgaagtttttagtgctaaaatatccttttttaatatttatctttttaaatttctcattcatttcctaaatacattttctgatttctttgtattggttttcagatttatcttacatctcactgagtttatttaaaatcaatattttgaattcttgatatggtatttctagaatttctctttggctagaatctattgctggagaattattgtgttcctttgagcgtgtcatataaccttgctttttaaagtttcctgyatctttacattgatttttgcacatctggagtgatagtcacttcttattttcaaatttactttcactggggagggtccttttactcaaagacatgactatgatgttgcttggttaggggcatttggtttagcttcttggtacatacagtagtgaatattctgtataatttctttggctataaatagcattagtggtatgtgtgctttccttggcttaatatggtgcagtgatttgcggggctgtggtgaaggtgtgctggggaggggaatgccagatggccctatcttcagatttcaatggtaaaggtgttgggctaagtggg

SEQ ID NO: 664503 - DNA, 582 bp, Homo sapiens
tattggttatttcctttcaaaagtctaaaaaaaattggctccaaagggtaccactctttatcatttttttctcttcaaatgaaatggctaaacttccctaaaggaagttgaaatccttctcattctccaagggctcatcyaaatgccctctccctcatgaaattcttcctgaactataaaggaatccaacccctaatgaacattcgcagcactttctctgaaccattcttacagcagggatgtgaggctcttgctatggtcattttacaaacttttctcccttccatgagactccgagaactccaaagccataatgcttatacacagttgtgtatcccctccccacctaattctgtgcccaaaaatgccatgcctattcaatgacattaggtcattaatcctactcataatgcttggaagtgggggcagatctatgaacttacatagaaaacaagtagctgatctgaaaacaaaaaacaagtctctactttttcagctcaatgaacttttcttggattatataaatatctaagcagcccatctgaaaatgtcttacatcgtattctcaaagaaaataaaaga

SEQ ID NO: 664504 - DNA, 609 bp, Homo sapiens
cactgtttatgtaactagaatggtaaccaatggattttgcagactcatattcccaatccagaaaatcaaagacctgtttcaacaagacaaaattaaacctgattctattcctcagctccatctacccttgatggctggggaactcttttaacagaagtgagaagcagctacctactattaatttgaacattttactcctgaaattggtaaattgcattaccaaatagcatgaattaatgagttagttcactatctcaaaagagaaaagtgatttcaaatagatccaagggtcctttgttccacagacacacaatctgagtcagccttgcccaaaattattgtgtggatgtgatccctttctgggaaataagaaagtgtatttattcattcattttrtgggtatttattgaaagctttctaagtacaaagcactgtgctaatgcctaatcacctctggtgaagtaacttctcaaattgacttcaagccagtgacaaaattctatttgaaatttgatgctcaggaagatgctgttgagtgagccagttcgaagaattttcccctggtagagagaattttcatacacgaaaagtaaaaggtacagtaaagaa

SEQ ID NO: 664505 - DNA, 565 bp, Homo sapiens
tttgaacattttactcctgaaattggtaaattgcattaccaaatagcatgaattaatgagttagttcactatctcaaaagagaaaagtgatttcaaatagatccaagggtcctttgttccacagacacacaatctgagtcagccttgcccaaaattattgtgtggatgtgatccctttctgggaaataagaaagtgtatttattcattcattttatgggtatttattgaaagctttctaagtacaaagcactgtgctaatgcctaatcacctctggtgaagtaacttctcaaattgacttcaagccagtgacaaaattctatttgaaatttgatgctcaggaagatgctgytgagtgagccagttcgaagaattttcccctggtagagagaattttcatacacgaaaagtaaaaggtacagtaaagaatgtctggtttaaataataagattgataacagaactcatctcgacagttaacgaacttcccagagaggctataaattacatcatgccttgaaatgttctcctaagccacgcttgaagacagttttatcacttttgcaa

SEQ ID NO: 664506 - DNA, 565 bp, Homo sapiens
tttgaacattttactcctgaaattggtaaattgcattaccaaatagcatgaattaatgagttagttcactatctcaaaagagaaaagtgatttcaaatagatccaagggtcctttgttccacagacacacaatctgagtcagccttgcccaaaattattgtgtggatgtgatccctttctgggaaataagaaagtgtatttattcattcattttatgggtatttattgaaagctttctaagtacaaagcactgtgctaatgcctaatcacctctggtgaagtaacttctcaaattgacttcaagccagtgacaaaattctatttgaaatttgatgctcaggaagatgctgttgagtgagccagttcgaagaattttcccctggtagagagaattttcatacacgaaaagtaaaaggtacagtaaagaatgtctggtttaaataataagattgataacagaactcatctygacagttaacgaacttcccagagaggctataaattacatcatgccttgaaatgttctcctaagccacgcttgaagacagttttatcacttttgcaa

SEQ ID NO: 664507 - DNA, 615 bp, Homo sapiens
agctcaaatccaacagttggtcaacgctggtgtacaaaggcctgacacttggtgacaagtataaatggccatcccagttccagagctccacatggcatcagctgagacttttgytgcaacttcatcacaattcaacttctgcccgatcctactttcatcactcccttataggtattgttctcaagagaactccacaagaaaccttatgcatacaaatgataggatctgtttccagggaacccaacctacaacatcgtgtcacttagaaagaaagtttcaaaagaaaaaaaaagacacttcatggtgtgtctctcttggctggtcaatttccttaaacattcgatctctattttcatcagtcatgaggataaggtagtgcagtgggtggcagatggccaagtgctgaccactgtccatgacagagtgaattgtgatgaagccatgctagcaatatttcaaaatgaagattgttatcaatcacattgtacagtttctcctgccacatattcctgagtagaagtatccctaaaaagttgtcagattgttcctattttgttactatttaaattgattcatttcacaagtgtaaatgaactgctagaataaagtgagtag

SEQ ID NO: 664508 - DNA, 615 bp, Homo sapiens
agctcaaatccaacagttggtcaacgctggtgtacaaaggcctgacacttggtgacaagtataaatggccatcccagttccagagctccacatggcatcagctgagacttttgctgcaacttcatcacaattcaacttctgcccgatcctactttcatcactcccttataggtattgttctcaagagaactccacaagaaaccttmtgcatacaaatgataggatctgtttccagggaacccaacctacaacatcgtgtcacttagaaagaaagtttcaaaagaaaaaaaaagacacttcatggtgtgtctctcttggctggtcaatttccttaaacattcgatctctattttcatcagtcatgaggataaggtagtgcagtgggtggcagatggccaagtgctgaccactgtccatgacagagtgaattgtgatgaagccatgctagcaatatttcaaaatgaagattgttatcaatcacattgtacagtttctcctgccacatattcctgagtagaagtatccctaaaaagttgtcagattgttcctattttgttactatttaaattgattcatttcacaagtgtaaatgaactgctagaataaagtgagtag

SEQ ID NO: 664509 - DNA, 615 bp, Homo sapiens
agctcaaatccaacagttggtcaacgctggtgtacaaaggcctgacacttggtgacaagtataaatggccatcccagttccagagctccacatggcatcagctgagacttttgctgcaacttcatcacaattcaacttctgcccgatcctactttcatcactcccttataggtattgttctcaagagaactccacaagaaaccttatgcatacaaatgataggatctgtttccagggaacccaacctacaacatcgtgtcacttagaaagaaagtttcaaaagaaaaaaaaagacacttcatggtgtgtctctcttggctggtcaatttccttaaacattcgatctctattttcatcagtcaygaggataaggtagtgcagtgggtggcagatggccaagtgctgaccactgtccatgacagagtgaattgtgatgaagccatgctagcaatatttcaaaatgaagattgttatcaatcacattgtacagtttctcctgccacatattcctgagtagaagtatccctaaaaagttgtcagattgttcctattttgttactatttaaattgattcatttcacaagtgtaaatgaactgctagaataaagtgagtag

SEQ ID NO: 664510 - DNA, 594 bp, Homo sapiens
cagtctactaatttaaatatagatagatgattagatagatagttgagatagagatctgatatatacaagcatatatacttgagaaaatacaaaaaatatttctcaagagatgtcacaaactataaatataccactggagaagctctcacattttacttcagtgatagagtctcatgaaataggttttgggttatgaaaggacctttatatttacaatatacatctatttctatctcaaggtaaatgycctgtagagatccaaaattcttatttgttaaataattttataaattatcttatctgtggcatctttttaaatttttattttaagttcaggggtacatgcagatttattacatatgtaaacttgtgtcatgggggtttgttgtacatcacgcaggtattaagcctagtacccattcattatttttcctgatcctctccctcctcacaccctctacccttcaacaggccccagtgtatgttgttccctctcccatgcatgtgtccatgtgttctcattatttagctcccacttataagtgagaccatgcagtattttgttttctgttcctgtgttagtttgctaaagat

SEQ ID NO: 664511 - DNA, 594 bp, Homo sapiens
cagtctactaatttaaatatagatagatgattagatagatagttgagatagagatctgatatatacaagcatatatacttgagaaaatacaaaaaatatttctcaagagatgtcacaaactataaatataccactggagaagctctcacattttacttcagtgatagagtctcatgaaataggttttgggttatgaaaggacctttatatttacaatatacatctatttctatctcaaggtaaatgccctgtagagatccaaaattcttatttgttaaataattttataaattatcttatctgtggcatctttttaaatttttattttaagttcaggggtacatgcagatttattacatatgtaaacttgtgtcatgggggtttgttgtacatcacgcaggtattaagcctagtacccattcrttatttttcctgatcctctccctcctcacaccctctacccttcaacaggccccagtgtatgttgttccctctcccatgcatgtgtccatgtgttctcattatttagctcccacttataagtgagaccatgcagtattttgttttctgttcctgtgttagtttgctaaagat

SEQ ID NO: 664512 - DNA, 550 bp, Homo sapiens
ggagttggaggttgcagtgagccaagatcgcaccactgcactccagcctgggtgacagagcaagactctgtctcaaaaaaaaaaaaaagaaaaaaaaagagaaagaaaaaaaaagaaatccttcaaggagtagaaaaggacagataatgagttgtactaaaagacttgctcttttgttggggatgaagaaaccttgaagtccaaaccccaattacagcttctctgcacactgctgcagaatggccctgctatggctccctgaccaagagcaccttgaggcctggtgaatgtcctatgagaggcagtgctcttcagtgaaactgttgtgacccagaagctctaattgaaagaagagagagaaagatcactaaggaggccatggttgtcctggggagagagtgatacccgttgaaattccacagcccccttgcctaagrtccattactcccccagccagtctaccctttctcgtgggaatgggtgatctgtccttagaacccacaattgacatcaacttatcagaaggcaaaattaaactcctgcaatacag

SEQ ID NO: 664513 - DNA, 554 bp, Homo sapiens
gcctggccaacatggtgaaaccccacctctactaaaattacaaaaattatctgggcgtggcaktgcacgcctgtaatcccagctacctgggaggctggggcaggagaattgcttgaacctgggaggcagaggttgcagtgagctgagatcgtgccactgtactcctgcctgagcaacagaatgagactccatcccaaaaaaaagaagatatacaagtggccaacaaacatagttttaaaaatgctctcaacatcactaatgatcagagaaatacaaattaaaaccacaatgagatatcctctcacaccagtcagaatggctgtgggtaagaagtcaaaaaacagtatgtatgggtgagactacagagaaaaagggaatgcttatacactactggtggaaatgtaaattaggtcagcccctgtggatagcagtttggagatttctcaaaaaacttagaactaccattctacccaacagtcccattattggatatataaccaaaggaaaataaatcattctaccaaaacatacatgcactcatatgttcatcacag

SEQ ID NO: 664514 - DNA, 554 bp, Homo sapiens
gcctggccaacatggtgaaaccccacctctactaaaattacaaaaattatctgggcgtggcattgcacgcctgtaatcccarctacctgggaggctggggcaggagaattgcttgaacctgggaggcagaggttgcagtgagctgagatcgtgccactgtactcctgcctgagcaacagaatgagactccatcccaaaaaaaagaagatatacaagtggccaacaaacatagttttaaaaatgctctcaacatcactaatgatcagagaaatacaaattaaaaccacaatgagatatcctctcacaccagtcagaatggctgtgggtaagaagtcaaaaaacagtatgtatgggtgagactacagagaaaaagggaatgcttatacactactggtggaaatgtaaattaggtcagcccctgtggatagcagtttggagatttctcaaaaaacttagaactaccattctacccaacagtcccattattggatatataaccaaaggaaaataaatcattctaccaaaacatacatgcactcatatgttcatcacag

SEQ ID NO: 664515 - DNA, 554 bp, Homo sapiens
gcctggccaacatggtgaaaccccacctctactaaaattacaaaaattatctgggcgtggcattgcacgcctgtaatcccagctacctgggaggctgggrcaggagaattgcttgaacctgggaggcagaggttgcagtgagctgagatcgtgccactgtactcctgcctgagcaacagaatgagactccatcccaaaaaaaagaagatatacaagtggccaacaaacatagttttaaaaatgctctcaacatcactaatgatcagagaaatacaaattaaaaccacaatgagatatcctctcacaccagtcagaatggctgtgggtaagaagtcaaaaaacagtatgtatgggtgagactacagagaaaaagggaatgcttatacactactggtggaaatgtaaattaggtcagcccctgtggatagcagtttggagatttctcaaaaaacttagaactaccattctacccaacagtcccattattggatatataaccaaaggaaaataaatcattctaccaaaacatacatgcactcatatgttcatcacag

SEQ ID NO: 664516 - DNA, 543 bp, Homo sapiens
caacagagaaaaaaaatcaaagctgctgaaaggaggaagtaaaattaactaagtctttgagataaaacttcttccatakttggagatagaaggacagcaaatgagttgtgctgaaagacctgcacctgcatcagggatgagaaaggcttagagcccaacttcagatgcaactgctggggaagagctagtgccctgctctggcctctcctgggcctggcaagtgtgccctgagaagcaactgcttgggagtcacagacctcaaccccaagcaagaaaggaaaaggtctataagaaaatcatggtggtcctgagaggagatggattcctgctgtcattacactgccctctatgcctgagatctcatcacaaatccagccatctcttttttctcaaaaaaatcagaggtaactctgtccccaaaacccataactgacaccactcactagaggcccagtgaacagctttctgcatcacagccataacaccctgtgttactttggtagactttcccttggatacctggtaggtgctctgagtgagctt

SEQ ID NO: 664517 - DNA, 576 bp, Homo sapiens
gaattggttgctgacagttgcaatgaatgtggcaatttcttaaaataagacaataataaaatttgccacatcaattgactccttatttcacaaactatttatttgtagtatatgatgctattygacagcatacaacccaaattagaacttatttcaaaattggagccaatcatcttaaaccttgctgctactttatcacctacacttatggaatattctaaatcctttgttgtcatttcaacagtgttcacagcatcctctccaggaggaggttccattcccaccaccccccaaagaaaacagtttatttgctcattcataagaagcaacttctcatgttttaaagttttgtcatgatattgcagcaattcagtcacatcttcagaactctcttctaattctagatctcttgctatttctaccacatttgcaattaccttctccgtggaaagccttcttcatgggaagtcttctccatgtaagtcttgaactcttcaaagtaatccatgaggactggaatcagcttcttccaaactcctgttaatgttgaggttttgatctcctcccatgaatcat

SEQ ID NO: 664518 - DNA, 576 bp, Homo sapiens
gaattggttgctgacagttgcaatgaatgtggcaatttcttaaaataagacaataataaaatttgccacatcaattgactccttatttcacaaactatttatttgtagtatatgatgctatttgacagcatacaacccaaattagaacttatttcaaaattggagccaatcatcttaaaccttgctgctactttatcacctacacttatggaatattctaaatcctttgttgtcatttcaacagtgttcacagcatcctcwccaggaggaggttccattcccaccaccccccaaagaaaacagtttatttgctcattcataagaagcaacttctcatgttttaaagttttgtcatgatattgcagcaattcagtcacatcttcagaactctcttctaattctagatctcttgctatttctaccacatttgcaattaccttctccgtggaaagccttcttcatgggaagtcttctccatgtaagtcttgaactcttcaaagtaatccatgaggactggaatcagcttcttccaaactcctgttaatgttgaggttttgatctcctcccatgaatcat

SEQ ID NO: 664519 - DNA, 576 bp, Homo sapiens
gaattggttgctgacagttgcaatgaatgtggcaatttcttaaaataagacaataataaaatttgccacatcaattgactccttatttcacaaactatttatttgtagtatatgatgctatttgacagcatacaacccaaattagaacttatttcaaaattggagccaatcatcttaaaccttgctgctactttatcacctacacttatggaatattctaaatcctttgttgtcatttcaacagtgttcacagcatcctctccaggaggaggttccattcccaccaccccccaaagaaaacagtttatttgctcattcataagaarcaacttctcatgttttaaagttttgtcatgatattgcagcaattcagtcacatcttcagaactctcttctaattctagatctcttgctatttctaccacatttgcaattaccttctccgtggaaagccttcttcatgggaagtcttctccatgtaagtcttgaactcttcaaagtaatccatgaggactggaatcagcttcttccaaactcctgttaatgttgaggttttgatctcctcccatgaatcat

SEQ ID NO: 664520 - DNA, 576 bp, Homo sapiens
gaattggttgctgacagttgcaatgaatgtggcaatttcttaaaataagacaataataaaatttgccacatcaattgactccttatttcacaaactatttatttgtagtatatgatgctatttgacagcatacaacccaaattagaacttatttcaaaattggagccaatcatcttaaaccttgctgctactttatcacctacacttatggaatattctaaatcctttgttgtcatttcaacagtgttcacagcatcctctccaggaggaggttccattcccaccaccccccaaagaaaacagtttatttgctcattcataagaagcaacttctcatgttttaaagttttgtcatgatattgcagcaattcagtcacatcttcagaactctcttctaattcwagatctcttgctatttctaccacatttgcaattaccttctccgtggaaagccttcttcatgggaagtcttctccatgtaagtcttgaactcttcaaagtaatccatgaggactggaatcagcttcttccaaactcctgttaatgttgaggttttgatctcctcccatgaatcat

SEQ ID NO: 664521 - DNA, 593 bp, Homo sapiens
gtacagaatactataataataaaaggcaaaataaaaagtaattaattagtatctaatctttatatgtgaacaaatgagtaagaaagtcaagatccrttgataagagtatgattttatggaataaacaatagaaaatggaacttctacttcttcaaatgatgtaattactgcatagtaattgtttcaaagtgatataatatttaagctaatctctgtgttgatatatttaaaattatatgatctcatatcatcaactattatcaccaactaatagaaataagaaaatattggtgttaactgtgacttattttttaattctctttgtatataaagaacttctggaacctttctgagttgagtaaatgaatcttaaaaatggatctctagtgaccgagtttattttactaggattttttggacgatgggaacttcaaattttcttctttgtgacattttccctgatctacggtgctactgtggtgggaaacattctcattatggtcacagtgacatgtagttcgacccttcattctcccttgtactttctccttggaaatctctcttttttggacatgtgtctctccactgccaca

SEQ ID NO: 664522 - DNA, 593 bp, Homo sapiens
gtacagaatactataataataaaaggcaaaataaaaagtaattaattagtatctaatctttatatgtgaacaaatgagtaagaaagtcaagatccgttgataagagtatgattttatggaataaacaatagaaaatggaacttctacttcttcaaatgatgtaattactgcatagtaattgtttcaaagtgatataatatttaagctaatctctgtgttgatatatttaaaattatatgatctcatatcatcaactattatcaccaactaatagaaataagaaaatattggtgttaactgtgacttattttttaattctctttgtatataaagaacttctggaacctttctgagttgagtaaatgratcttaaaaatggatctctagtgaccgagtttattttactaggattttttggacgatgggaacttcaaattttcttctttgtgacattttccctgatctacggtgctactgtggtgggaaacattctcattatggtcacagtgacatgtagttcgacccttcattctcccttgtactttctccttggaaatctctcttttttggacatgtgtctctccactgccaca

SEQ ID NO: 664523 - DNA, 593 bp, Homo sapiens
gtacagaatactataataataaaaggcaaaataaaaagtaattaattagtatctaatctttatatgtgaacaaatgagtaagaaagtcaagatccgttgataagagtatgattttatggaataaacaatagaaaatggaacttctacttcttcaaatgatgtaattactgcatagtaattgtttcaaagtgatataatatttaagctaatctctgtgttgatatatttaaaattatatgatctcatatcatcaactattatcaccaactaatagaaataagaaaatattggtgttaactgtgacttattttttaattctctttgtatataaagaacttctggaacctttctgagttgagtaaatgaatcttaaaaatggatctctagtgaccgagtttattttactaggattttttggacgatgggaacttcaaattttcttctttgtgacattttccctgatctacggtgctactgtgrtgggaaacattctcattatggtcacagtgacatgtagttcgacccttcattctcccttgtactttctccttggaaatctctcttttttggacatgtgtctctccactgccaca

SEQ ID NO: 664524 - DNA, 593 bp, Homo sapiens
gtacagaatactataataataaaaggcaaaataaaaagtaattaattagtatctaatctttatatgtgaacaaatgagtaagaaagtcaagatccgttgataagagtatgattttatggaataaacaatagaaaatggaacttctacttcttcaaatgatgtaattactgcatagtaattgtttcaaagtgatataatatttaagctaatctctgtgttgatatatttaaaattatatgatctcatatcatcaactattatcaccaactaatagaaataagaaaatattggtgttaactgtgacttattttttaattctctttgtatataaagaacttctggaacctttctgagttgagtaaatgaatcttaaaaatggatctctagtgaccgagtttattttactaggattttttggacgatgggaacttcaaattttcttctttgtgacattttccctgatctacggtgctactgtggtgggaaacattctcattatggtcacagtgacatgtagttcracccttcattctcccttgtactttctccttggaaatctctcttttttggacatgtgtctctccactgccaca

SEQ ID NO: 664525 - DNA, 515 bp, Homo sapiens
atcctgaaggggtcctgtctcagcttcaccttttttttttttttttttttgccatagtcagagaactatcctacctgtgcagggaattactgggcgacacacctatctaagccatttggacaggtttactggcttcccacccacagaagatcctgaaggggccttttcttggcctcagcccttctctgctgcagcaccagagttattctgcttgtgcagataactcctgggagatatacctgggcaggattgtcagccaccatgccacagaagtttcagaaagaaccatgaatgccagttccagcccccctcaactgtactatgcaagcaatactgcccacatagggcacttctgagaatcttgcccattggtgttactggactgggtttgccaacagtctcacagcagattctgaattaccctgaaggttagttttagtccctcycagctgtggtctggaagaagttctactcagtcaagctcctgccaagagatacactaagctgagcccctg

SEQ ID NO: 664526 - DNA, 643 bp, Homo sapiens
gtcagcattgcaggtaacagggctgctgtctgagaatccagaagcaaatcttcaccttacctccaactcttcatgggactccagcttgggcaacagcagccactatggaccttgtggtttctaagcctgtaacagctgaagtcattgcagtgctgacaatgacttcaacagtcacaggcttaggaaccacaacagtcttctcaatattcctgaacgtgcctactgtagaagggcaatcacagaaaagcaagactgcaaagattgcaatacattcctatgtcatccaatgcacagatattgaaacatgaccacaaggaccaagaacaaccagagaaactgacatcactggcataaaataaratgcaaactgctgaccctaaagagatggagatctatgatctgcctgacaaataactcaaactacctgtttttaaggaagctcagttaacttaaagaaaattgagagacagtttttaaatttttcagagaaatttaacatagagattaaaataataaaaaatcaaacagtaactttggatctgtaacatacagggaatgaaataaatgcaactgaaagcatcagtagcaaaaataggtaaagcagaaaaaggaatcagtgagttaggaagacaggctatttaaa

SEQ ID NO: 664527 - DNA, 560 bp, Homo sapiens
ataaatagacaaaaggtcaaagaagcaatgaaatagaaattttttaaaaaatcttgaaacaaataaaaattgaaaaacaacaaaatgtataggaaaagcagttctaagagggaagaatgtagcaataaacacatcaaaaaagaagaaagattgcaaataaaaaatgtactgttacaccttgaggaactagagtaagaacaacaaaataagctaaaatttactggaaggaagaaataataaataacaaaatagctataaataaaatagagactagaaaacaatagaaaagttcaacagaatgaaaagcaggttttttttgaaaatataaacaaatctggcaaatcttttaacgtagctaaatgagaacaataaaggacagagtcaaataaataaaaataagaaaatgaacrtcacatctgataccacagaagtacaaaatattatgagtccattatggacaattatttgccatcaaattggaagacccagaaaaatagataaattccaagatgcacacaacctatcaacattgaatcatgaaaaaatagaaaacatgaaaa

SEQ ID NO: 664528 - DNA, 619 bp, Homo sapiens
aaacttaaacaatgcagcatgcaaaaaacaaataattccattaaaaagtaaacaaaagacatgaatagacacttctcaaaagaagaaacaaatgaaacaatgttcaacatcagtaatcatcagagaaacgcaaatcaaaactgcaatgagatgccatctcacaccatccagagtgactctgacattaaaaagtcacaaaataaaagatgctggtgaggccgcagagaaaagagaatgcttataagctgttggtgagaatgtaaattagtgtaaccactgtraaaaccagtttggagatttctcaaagaacttaaagcagaactaccattagactcagcaatctcattactgggtatatactaaaagaaaataaatcattctgctaagaagacacatacatgtgcatgttcattgcagcactattcacaatagcaaagacatggaaccaacctaggcacccattaatggtggactgaataaagaaaatgtggtacatatacatcatggaatactagacagccataaaaagaatgaaattatgtaatttgcaacaatatgaatgtagctgaaggccattatcctaagcaaagcaattcaggaacagaaaactaaataccgt

SEQ ID NO: 664529 - DNA, 565 bp, Homo sapiens
ctgctcatatcactgcagtcactctatttttatgagccatgtgtctacatttacacttggccatttaggagcttttcagtggatacatttctttctgtgttttattcagttacacccttactgaaccccattacttacagtctgagatgaaagcatctatacatcaactgaggacccaacacatcatctccagacaaaccttctctaatcagcaatcatgaggacaggatattagttcagaacccatataaattacgtttcagaatatgttgatattaattttatttgttgatttctataaataatattgcatatattgaaattatcaaatataatttttcattattatatttctatggcatgtktggttttgttgaaaatataattatcagcctgggaactccattactgggtatatacccaaaggaatataagccattctattataaagatacatgcatgcatatgttcattgcagcactattgacaataacaaagacatggagtcaacctaatttcccatcaatgagagactgggatttaaaaaatgtggtatatatacacc

SEQ ID NO: 664530 - DNA, 565 bp, Homo sapiens
ctgctcatatcactgcagtcactctatttttatgagccatgtgtctacatttacacttggccatttaggagcttttcagtggatacatttctttctgtgttttattcagttacacccttactgaaccccattacttacagtctgagatgaaagcatctatacatcaactgaggacccaacacatcatctccagacaaaccttctctaatcagcaatcatgaggacaggatattagttcagaacccatataaattacgtttcagaatatgttgatattaattttatttgttgatttctataaataatattgcatatattgaaattatcaaatataatttttcattattatatttctatggcatgtgtggttttgttgaaaatataattatcagcctgggaactccattactgggtatatacccaaaggaatataagccattctattataaagatacatgcatgcatatgttsattgcagcactattgacaataacaaagacatggagtcaacctaatttcccatcaatgagagactgggatttaaaaaatgtggtatatatacacc

SEQ ID NO: 664531 - DNA, 658 bp, Homo sapiens
ctcatatctattagctattcgagcttcagttctgtgatttgttctttcatgaccttcatcacttaaaatgtgttttctgtacttttcttgttatttgaatcctgtagatctgcactgtccaatatggtayctattatcatatgtggccatttagatggtaatttaaatacatatttaaaaagtaaaattgacattttagttcactaacattagcctcttttcaagtgttcagtagccatagaggctactatgagataagaccaatttagaacattcccatccttgtagaaattctttttgacaaataatcttgtcaatttattacattttttttaatctactactgtttgttaattttgcccctagtattcgtctttggatagaatgtttatagtgtcattatttattaaaatgtttctttttattcatttttaaaagatttgtttatagatgttcttctcttaacttaggttgcaaagatattttattctattattattctattatatttttgcattttgttgttaaatgtttctaaatacacatttgtatacaaggaaggtagcaacctaactttatctccttttagtaaaccactatttccaacaacatcaccaatttgatcttgatcgctttgattggtcatcatatatcatat

SEQ ID NO: 664532 - DNA, 658 bp, Homo sapiens
ctcatatctattagctattcgagcttcagttctgtgatttgttctttcatgaccttcatcacttaaaatgtgttttctgtacttttcttgttatttgaatcctgtagatctgcactgtccaatatggtatctattatcatatgtggccatttagatgktaatttaaatacatatttaaaaagtaaaattgacattttagttcactaacattagcctcttttcaagtgttcagtagccatagaggctactatgagataagaccaatttagaacattcccatccttgtagaaattctttttgacaaataatcttgtcaatttattacattttttttaatctactactgtttgttaattttgcccctagtattcgtctttggatagaatgtttatagtgtcattatttattaaaatgtttctttttattcatttttaaaagatttgtttatagatgttcttctcttaacttaggttgcaaagatattttattctattattattctattatatttttgcattttgttgttaaatgtttctaaatacacatttgtatacaaggaaggtagcaacctaactttatctccttttagtaaaccactatttccaacaacatcaccaatttgatcttgatcgctttgattggtcatcatatatcatat

SEQ ID NO: 664533 - DNA, 658 bp, Homo sapiens
ctcatatctattagctattcgagcttcagttctgtgatttgttctttcatgaccttcatcacttaaaatgtgttttctgtacttttcttgttatttgaatcctgtagatctgcactgtccaatatggtatctattatcatatgtggccatttagatggtaatttaaatacatatttaaaaagtaaaattgacattttagttcactaacattagcctcttttcaagtgttcagtagccatagaggctactatgagataagaccaatttagaacattcccatccttgtagaaattctttttgacaaataatcttgtcaatttattacmttttttttaatctactactgtttgttaattttgcccctagtattcgtctttggatagaatgtttatagtgtcattatttattaaaatgtttctttttattcatttttaaaagatttgtttatagatgttcttctcttaacttaggttgcaaagatattttattctattattattctattatatttttgcattttgttgttaaatgtttctaaatacacatttgtatacaaggaaggtagcaacctaactttatctccttttagtaaaccactatttccaacaacatcaccaatttgatcttgatcgctttgattggtcatcatatatcatat

SEQ ID NO: 664534 - DNA, 658 bp, Homo sapiens
ctcatatctattagctattcgagcttcagttctgtgatttgttctttcatgaccttcatcacttaaaatgtgttttctgtacttttcttgttatttgaatcctgtagatctgcactgtccaatatggtatctattatcatatgtggccatttagatggtaatttaaatacatatttaaaaagtaaaattgacattttagttcactaacattagcctcttttcaagtgttcagtagccatagaggctactatgagataagaccaatttagaacattcccatccttgtagaaattctttttgacaaataatcttgtcaatttattacattttttttaatctactactgtttgttaattttgcccctagtattcgtctttggatagaatgtttatagtgtcattatttattaaaatgtttctttttattcatttttaaaagatttgtttatagatgttcttctcttaacttaggttgcaaagatattttattctattattattctattatatttttgcattttgttgttaaatgtttctaaatacacatttgtatacaaggaaggtagcaacctaactttayctccttttagtaaaccactatttccaacaacatcaccaatttgatcttgatcgctttgattggtcatcatatatcatat

SEQ ID NO: 664535 - DNA, 569 bp, Homo sapiens
ctcccagacaaagacttcacaataattgtcttaaggaagtgcagtaaagtccaagaacatacagggaaataattcaacaaaatcaagcaaacaacaaacaaaaaaatggggaaatttgatgaagagattgaaatagtttttaaaattccagaaatttgtttaaaaatraataacataaaaatatgtaaattgtgacagtaaaaacataaaatgtgtgggggaggtagaataaaagtgtagactttttaaatgcaatcaaagttaggtatttattcacttaaaatagtctatgataaccataagatgtgttatgtaagccttatggtaactacaaatgaaaaacctatagagcatttacaaaaacaaaaaaaataaaaaatcaaagcatatgctggagaaaataaactatgaataaatgaagacgaaagagaaagatgaagcaaaagaaaaggaagggaacaaagagtgtaaaaaataaccagaaaacaattaataaaatggaggtactaagcacagtcagttttctggcatatccataggttttacattcacagactcaatcaaccaca

SEQ ID NO: 664536 - DNA, 595 bp, Homo sapiens
atatgtttaacttcctgtttcaggcatatttcacttaacataatgtgcttcagtcctatgttatcgtgaataacaggattttattcttttttatggctgaatagtatttcatggtgtatatataccacattttctttatctattcgtctgttgttgacacctaggttgattctatatcttggctattgtggatagtgctgtaataaacatggggstgcagctgtctctcagacttcgaaaacacaggcaacaaaagcaaaagtaaacaagtgggattatatcaaactaaaagttctctgcccagtaaaggaaaaaattcaacagtgcaaaagacaacctatagaatgggagaaactattttcaaagtatttatctcacaagggattaacatccagaatacacaaggtactgaacatcttaacagcaaaaataatataatctgagtttaaaatgggctaacaatctgaacagacatttcttaaaagaagacatacaaatggctgacaaatatatgaaaagatactcaacaccactattcatcagagaaatatatatcacaatcataatgcagtatcatatcaccccagttaagatg

SEQ ID NO: 664537 - DNA, 567 bp, Homo sapiens
tttatcaactctcaaccctttcccactgtcccaactctattaattcccagcatcctttgttcccatctttatatccatgcgcacccaatgtttagctcccaattgtaagtgagaacacatgatatttggttttctgttcctgcattaatttcctttaggataatgaccaccagctgcatccatgtttcygtaaagggcaccgtttcattccttttatagctggatagtattccatggtgtatatgtatgacattttctttgtccagtccattgttgatgggcattttgttgattccatgtctttgctattgtcaacagtgcagtgatgaacatatgaatgcatgtgtctttttggtatagtaatctattttccttcaggtatataaccaataatgggattgctgggttgaatggggagttctttgagaaatctccaaagtgctttccaaaggagctgaactaatttgcattcccttcaatagtgtataagtgttctcttttttctgtagtctcatcaatatctgttgttttctgaacttttaataatagccattttggtggtgtgag

SEQ ID NO: 664538 - DNA, 580 bp, Homo sapiens
ttgagtgacagtatgacgtcaatgtggaaagaaagcgttctgtagcagaactgcctgtatctgctgggaatctcttctgtctacaacctctatgatcttggggaaggtgcatcatcactctattccttggtctctcctatgaaatgaaaataatttatttcctcataggtttgacatgaggattaaatgagcagtataagaaaagtgcttagaacagtgcttgccacatataactatgttattgatattatttctattatcatttcaccaggtcccatggagtttcatacattttccagagttacaaaacctggctaacactgagtcaagttaggaatctcaatcaatrtctttgaccaacttaaagtgtttgtagaatgtttgatgtacctaagagtgagtaaaatgtgaaagtcagttgctggaattggttgaatgagagtgtcgggtgaagaaggcaagacatgcaacagaggaagaggaatgtgtcatccaagaggggaaaagagaaatactattactatctgttgtcttggtggttctcatgaggagtgaaaggagaattgctaacctggaagaa

SEQ ID NO: 664539 - DNA, 534 bp, Homo sapiens
ttttagctgtacattgataaggtcgaggtagaatatatcttctgcttgagaaagttcttaaggcttggacatgggccagggcttctgtgtaattactttcatttacacacttagatgcattttagtaagagagtataagtaaaaatagatgtgaaaaataatggagatccagcactagataaagcagaggataaaactactggaaagctttgaactaacagggtgagtggccatggcaaggcatcctaaactttttagattccagtttcatctctagaaaaacaacttgctaattgtcctggctcataaccaaaggacaaagagaatgcaaagcagcagtcattgaatgctgtaattgtagtgaaaaccttgattatatttggttctcatttcaaaaatggtaaaaacatttaagatatatagtacggaattgaaattgtrtctccacaacaatgctgaagcaataaagatacctgcattttacctaaaatgctatagagatgatagaaatccaataataaaagtaagataatt

SEQ ID NO: 664540 - DNA, 583 bp, Homo sapiens
gaacttggcgtaaccttaacagataaaggtcaagaatatatgacgagaatatatttatcagtgatatgatcaaaggttaaaaagtttaatgagctgagttatgrggagatattataaggcagaaataaattgaatatgagtaaaaaaatcagtaaagttcagtgaaaatctgaagagaaagttaaatagtcacgatatgtctacattcctatagtgttattcttaaccaaaaaagtgcaaaacattccaactgaacattattaaaaatatgtacatactgttaccattttactctgaaatacgtcaccttatagctatgacaaagacctgaagtagattagcaaataacatgtcaatgggcaaaaaagagaccattttaatggcatgaccaattacatttcatacaagacctaggtaaattcaacagcaagaatgcatgaaaaatcagaattatcacctctttgtcatttaccagcacaaaacaaccatgttcctcaagaaatagagacaagatagaatcgaatttgaaacaagatactgcgtataaattattcccatcaatgccttatgagtctcattaagt

SEQ ID NO: 664541 - DNA, 583 bp, Homo sapiens
gaacttggcgtaaccttaacagataaaggtcaagaatatatgacgagaatatatttatcagtgatatgatcaaaggttaaaaagtttaatgagctgagttatgaggagatattataaggcagaaataaattgaatatgagtaaaaaaatcagtaaagttcagtgaaaatctgaagagaaagttaaatagtcacgatatgtctacattcctatagtgttattcttaaccaaaaaagtgcaaaacattccaactgaacattattaaaaatatgtacatactgttaccattttactctgaaatacgtcaccttatagctatgacaaagacctgaagtagattagcaaataacatgwcaatgggcaaaaaagagaccattttaatggcatgaccaattacatttcatacaagacctaggtaaattcaacagcaagaatgcatgaaaaatcagaattatcacctctttgtcatttaccagcacaaaacaaccatgttcctcaagaaatagagacaagatagaatcgaatttgaaacaagatactgcgtataaattattcccatcaatgccttatgagtctcattaagt

SEQ ID NO: 664542 - DNA, 599 bp, Homo sapiens
agagacatagtttccagctgaccacttcacaataccttaggtattgatcttatcctagattgtgtaatctgggccttactctgctaaacaaagatagaggaaaagaagaataaaaagaagcagcagcaaagaacaagcaacaagaggaccttaaagatgatttgagaggatgacataaaaaattcccatttatgtgctattgacaagctcttagtcttgctgcaaagaaggctgacaaatttgttcattattctaggtgtcttaaattctattattatagaagaagggcacattgcagaataaataattatctgtctatcccataatacmtcttttttggaagcctgtgacagcaatccatatttttctctctaacaatccaacaaaatcaacaagcatgaccagcacaaacaacaatctgacatatttattaatattccatcagagaataaataggtaaatatatttttactgtgatatgtgacttataaattctaaagaaataatagaatgtaccataatgttcactttaatctaaacttatttgcttttcaagtcccttgaacagattttgaacagattttgcctggggatgcttc

SEQ ID NO: 664543 - DNA, 592 bp, Homo sapiens
tccaggtgttatttaaagagcaatggggagctattgaagttttaagtttttaaatggttctagatagtaccattctcagatcgaattgaagaaatactctagatacttggacaaatagagtttaattaggagcaaaagtagatggctattgaagattcaaaggcctaatgaataatccttaagcccccatcacctttttgttcctcttaacattgcttgatggtcttgttttatattttactgagaagatgaaagaaatcagctgaaaacgttcacacacctctattaaattgcctgtgtctctatctatgttctgttcctctctctttgaaactatggagaaaagktttatccttctatttaagactaattccactatctgttaattagatctcattcccacataccccaccaatcatcagcttttccatttatctgctccctttattatcaaagttttagaagttaactttacttactaaccacttttactgctccagttttctgtagaaaactccagtgatgctttaatttctaccaatctaaccgcttttacgaaagtcaccaatatctgcattaaaaaattcaatct

SEQ ID NO: 664544 - DNA, 510 bp, Homo sapiens
gagacagaatgaagaaggtggaaaaatactgaagttataggtctccacccacagcattatttttctcactcatgcccactagtgacatagggcatgagtggattagtgcaccagcttcctcagctctcagttgagagcgctcttatttcttatgtctyctcgaagctctgtaatgagaatgagatccaattgctcagaatgaatgctgtcttggcaattcaacctttatccttgtgtctctctctcacttctttattctcctaattatgtcttataatatcactttttaaataaattacttgaactcaaatgcttgccttgggattagcttctggaggaattcaaaccatgacagtgactttttgggaatttttgtactaaatacgtagctgaagtgtttgctgatacaaggaaaacgagtgacaagctgagtcaaaatctccatgatttaggctctgctttcccgtattcataagtatttggatatttcagataaacaaatgatatttg

SEQ ID NO: 664545 - DNA, 477 bp, Homo sapiens
gaatttttaattccaagtgattcttatatttttatgtattatatacatcctatatattttaatatataatatatgatatataaaatatattatatgtacatataatatattttatatatgatatatatatttgatatatatatgatttatatatgatatatattaaaaaatcatgtacatattatatattttatataattatattttccatgtccccatcaagctatgtaatttgtatttccttaatttttttgctacatttactatggaggtttgggttcctagtagtcaatctaaactgtttccatttggctaaaggaagttttaattttattttattggccaagaaatataccaygtttacacaaaccaaattgttcttgtgtaggatctccaacacaagcatgaggataacaagattgtaactgtagtaatactacaattacctgaatgtgagtctacttcagttcaaggacc

SEQ ID NO: 664546 - DNA, 582 bp, Homo sapiens
tcacctcttctatttaacattgtactaaagatcctaccaagacaagtaggcaagagaaagaaataaaagtcatcatgagtggaaaggaagtagtgacagacatcagattatataatcttgtgtactgtgtggtcttgtctgtacaaaacctagaactacacatgagtgttatgcatcttttgtcttcttacccagtcaaattatgatgaaacattcccaaacggtcttttcaagccttcaaaaaaactcataataaattacatgtgaggatttatgaggattaacttgttaagctaaattatagtggtttgaaatttacactaaaataacttgttttgatttaacatcttgataagtaataatatgggctaatactataatttggggaagcaaacaytttatatatgatataaaatttacaggaataaactctcaaactctcaatttctagtttttttctctttctgtaacgtctctttaaaatccacacaataaacttatctaatgcagttgcgcacagcagctctctcatctaaatgaaggaatttcaacctttccctgaattgaattaatgacagacag

SEQ ID NO: 664547 - DNA, 582 bp, Homo sapiens
tcacctcttctatttaacattgtactaaagatcctaccaagacaagtaggcaagagaaagaaataaaagtcatcatgagtggaaaggaagtagtgacagacatcagattatataatcttgtgtactgtgtggtcttgtctgtacaaaacctagaactacacatgagtgttatgcatcttttgtcttcttacccagtcaaattatgatgaaacattcccaaacggtcttttcaagccttcaaaaaaactcataataaattacatgtgaggatttatgaggattaacttgttaagctaaattatagtggtttgaaatttacactaaaataacttgttttgatttaacatcttgataagtaataatatgggctaatactataatttggggaagcaaacattttatatatgatataaaatttacaggaataaactctcaaactctcaatttctartttttttctctttctgtaacgtctctttaaaatccacacaataaacttatctaatgcagttgcgcacagcagctctctcatctaaatgaaggaatttcaacctttccctgaattgaattaatgacagacag

SEQ ID NO: 664548 - DNA, 501 bp, Homo sapiens
caaatgtcaggccaggcacggtggctcatgcctataatctcagcactttgggaagctgaggtgggatgatcgcttgaggccagagtttaagaccagcctaggcaacatggcaaaacctcatctctacaaaaaatccaaaaattatccaagcatggtggcttgcacctgtggtctcagctgctcagggggctgaggtgggaagatcacctgagcctggggaggttgaagctgcagtgagccatgatcgtgcctctgcactccagcctggatgacagagtaagacctygtctaaaaaataataataataaaataaaaatttaaaaaagcctcatgtctattctgttatgtgatgaatggataaatacaatgtggtgtatacatacaaagaaatacttttttcagacattaaagcagtgaagtacctgatacgtgccactacatgggtgaatctcaaagtctttatgctaagtaaaagaagcctgtcacaagagactatatatg

SEQ ID NO: 664549 - DNA, 491 bp, Homo sapiens
ctttctctctctctctctctgtctctctgtctctctgtctgtctttcattttccackgccataaaccttttggagcataatattttcaagtgactgagaagcatgaggttaaaaaacaaaaaagactgacctatcctgtctgtgaccataaataactcactttgccaccctaggcggttctgtgagcactccactaccacacacacacacacacacacacacacacacacacacacacacacacacagagagagagagagagagagagagagagagagagggagagagagagagagagaggcacagggcttctgggtttttttctatcaaagaaggaggcaagtcaaggtttccttctataataattctgacattctgtaatttatatgacctctaataaagttgttcttcgtccagtgtggtttgtaagtagtgagtgttgtcaagaagattattgagtgaagaaagacaggaatgggaaggatactaga

SEQ ID NO: 664550 - DNA, 491 bp, Homo sapiens
ctttctctctctctctctctgtctctctgtctctctgtctgtctttcattttccactgccataaaccttttggagcataatattttcaagtgactgagaagcatgaggttaaaaaacaaaaaagactgacctatcctgtctgtgaccataaataactcactttgccaccctaggcggttctgtgagcactccactaccacacacacacacacacacacacacacacacacacacacacacacacacasagagagagagagagagagagagagagagagagggagagagagagagagagaggcacagggcttctgggtttttttctatcaaagaaggaggcaagtcaaggtttccttctataataattctgacattctgtaatttatatgacctctaataaagttgttcttcgtccagtgtggtttgtaagtagtgagtgttgtcaagaagattattgagtgaagaaagacaggaatgggaaggatactaga

SEQ ID NO: 664551 - DNA, 635 bp, Homo sapiens
ttatttaacatacagaagaatctaaagcttttgtctactcactagttttacttccttttaattttacatgaaaaaaaatctcaagttcattatagatgtaggtgacaaaagagggatagcatttggaaattacatttgttccagactttgaaaggcacatgtgatctaagacctttgggcttggcaaagtgagagctatcaaatggtggggacatggaaaagggccatccttgctgacagttgtatttctgagttacaatactgcctccttccttactgtcaaagtatgctgtggatatggagctgttttaatgctccaaaaaggtaagaggtgtgctttgaagatgrtgattagcgctaaccctacatgagctcattttattatttgaattctcttaaataagatagtatgttgtctcattgtaacactaaaataagctcattgtagaaaatttataaaatacagaaaaacataagtaaaaaccgactaaaggccctacacctagccataaacattaaacatgtttttcagattaatactcattttttccaactagagaaacaactttgaaaatttcacacaatcttacacaattaaagcactgttatccacagacatttttcctgtattcctg

SEQ ID NO: 664552 - DNA, 476 bp, Homo sapiens
ttcttgtactgaattgcttctcctcacattcagttgctctgattttggggaagctaatcctaccgtatgccccagagtggttaaaatgtcccattctggtgggctccactgcatgtggctcactgggggacaatgacacctgtgtagaagttttctgagagttataggaaagtagtttcattccttttctcccgaactacctgaagagatgcttttccatgttggaggtgtttaaagaaaaattaaagtttagcctgggcaacatagtgaaacgtggtctctacagaaaataaaaattagcagggcatcatggcstatgtctgtagtcctacctactcgggaggctgaggtgggaggatggtttgagcccaggaggttgaggctacagtgagccatgatcatgccactgcactccaacctcgatgacagagcaagaccctgtctcagacaaaaaaagagagagagagagagggagt

SEQ ID NO: 664553 - DNA, 630 bp, Homo sapiens
tcatcaggcacttctaaggatgaacaacagctccccaggaggtgtagtgcaaatccagtcctttaaactcatttactttaattgcgtaacattttaaatactgcacgccagtgagaggcaggtggatcagcaggtgcaatgtggcgatctgccaataatggcatcagaaaaacagtccctcacagaggcaagaagcaaaagagactgagtgaagaactcctctgagcttaatgtctatttcatccggtaattgcagcagaggggaggatttccaagcaatytaaaccaaagctgttttattcatttttagcaatgcctttttttttaaaacagtggagaaggtctcagaaatagaatttgagtcccaattcagccaagtcctttctacattcaccctactaaggctcatttatgggtaaagatgtaaaaaaaaaaaaaaaacacaacaacaaaaaagaaattgtgaaagcaaatgctttctttctaaacgttttttcatgaaaaatctgaagcatatcatgccaagtttttgtatttgggttctgatttaacttgagtaatgatatgaaggaaaattattaaaataactcatgagattaatttctaaatgagtaactccaaactacatta

SEQ ID NO: 664554 - DNA, 434 bp, Homo sapiens
aagttgaattcaaatacagactccaaaaccttgattatttttacatcarcagtccgcttctacagctagagccttaaagtgttccttctaatgctcctttccaccaccaattgtgctccagcctactgagaagacaaatagagtggtaaattttccaggaaagctgcagcaatctgcagagtggcaggaattcaagttggtgaagttaaaggtaatagccaattgaatgttggttgcccttttgacagatgtaccagctactagcattaaatcatctctatatttggcaggtgcaccagctactggtgttaacaccatccaaaatagggttaattggtggagctagattaaaaataagacagatcatctaatttcactacaattgcttagtcagttacccagtggttgccatatgccatctaaattagtacttt

SEQ ID NO: 664555 - DNA, 622 bp, Homo sapiens
gtcattatttacagctaatataatataattttctgttacagaaaatccaatatgtatcagcagaaaaaaatttagcttaaaatgcacaatggcaatttttcaagaaataagaacaaaatataaaaagtaactatattgttataatcaaaacaagtcaatcataaaaatagaaaatatttattaaaattagccatcacctttctaaagtacacagaaataaatttaacaaacgtcacaactgagaaaaaatttaatatagagaaacattaaagaagctacaaattatagagagtataatttattttctaagtatggaaracttacaattatgtagttattgattctcccccaagttttatatagaggcaatgcaatttaaatcaaaatctcaatagacttatttgtgtggctttgacaagctgattctaaaattcaaggaccaggaatagccgtaactcttttttgtttgtttgtttgtttgtttgtttgttttttgagacacagtctcactctgtcacccaggctggagtgcagtggcgcgatcttggctcactgcaacctccctgtctcctgggttcaagctattctcctacctcagcctcccgagtagctgggattacaa

SEQ ID NO: 664556 - DNA, 622 bp, Homo sapiens
gtcattatttacagctaatataatataattttctgttacagaaaatccaatatgtatcagcagaaaaaaatttagcttaaaatgcacaatggcaatttttcaagaaataagaacaaaatataaaaagtaactatattgttataatcaaaacaagtcaatcataaaaatagaaaatatttattaaaattagccatcacctttctaaagtacacagaaataaatttaacaaacgtcacaactgagaaaaaatttaatatagagaaacattaaagaagctacaaattatagagagtataatttattttctaagtatggaagacttacaattatgtagttattgattctcccccaagttttatatagaggcaatgcaatttaaatcaaaatctcaatagacttatttgtgtggctttgacaagctgattctaaaattcaaggaccaggaatagccgtaactcttttttgtttgtttgtttgtttgtttgtttgttttttgagacasagtctcactctgtcacccaggctggagtgcagtggcgcgatcttggctcactgcaacctccctgtctcctgggttcaagctattctcctacctcagcctcccgagtagctgggattacaa

SEQ ID NO: 664557 - DNA, 579 bp, Homo sapiens
tgttagcaggaccttgttcactttgaaaccagtagaggagcccttccttgactcttcctagcttctyatggtttgctgacattcgtgttccttgtcttgtagatgcatcactccaatcctctggcttcatgtggcattttctttgtgtatctctgtgtcttcatatgaccattttcttatagcaatggtcatattgagttaggggtccattacttttaatggcaaaaatcacaattccttatgcaccaacctagtagctttttggatgtgatttttatctaaagaaatggatagtactttgatgcataagaaacccatcaacttgaactgagtgataaaagtttagaatcttaaaaggcttttgggttctgaaatttctatgggccagaagatggatctggaggtgactttattgtaaacctgaacatttcatatggaaaaagaaggatgactcacagggcaaaagtgggaggccagaaatcagaataaggacccagggagaacaaccctcaggttggtggtctaagatatcatcaaggaaatggcaagatgggtctggctgtatttcagaatttctat

SEQ ID NO: 664558 - DNA, 578 bp, Homo sapiens
tcacagttcttgagattagaagtttgaaatcaggtgttagcaggaccttgttcactttgaaaccagtagaggagcccttccttgactcttcctagcttctcatggtttgctgacattcrtgttccttgtcttgtagatgcatcactccaatcctctggcttcatgtggcattttctttgtgtatctctgtgtcttcatatgaccattttcttatagcaatggtcatattgagttaggggtccattacttttaatggcaaaaatcacaattccttatgcaccaacctagtagctttttggatgtgatttttatctaaagaaatggatagtactttgatgcataagaaacccatcaacttgaactgagtgataaaagtttagaatcttaaaaggcttttgggttctgaaatttctatgggccagaagatggatctggaggtgactttattgtaaacctgaacatttcatatggaaaaagaaggatgactcacagggcaaaagtgggaggccagaaatcagaataaggacccagggagaacaaccctcaggttggtggtctaagatatcatcaaggaaatg

SEQ ID NO: 664559 - DNA, 578 bp, Homo sapiens
tcacagttcttgagattagaagtttgaaatcaggtgttagcaggaccttgttcactttgaaaccagtagaggagcccttccttgactcttcctagcttctcatggtttgctgacattcgtgttccttgtcttgtagatgcatcactccaatcctctggcttcatgtggcattttctttgtgtatctctgtgtcttcatatgaccattttcttatagcaatggtcatattgagttaggggtccattacttttaatggcaaaaatcacaattccttatgcaccaacctagtagctttttggatgtgatttttatctaaagaaatggatagtactttgatgcataagaaacccatcaacttgaactgagtgataaaagtttagaatcttaaaaggcttttgggttctgaaatttctatgggccagaagatggatcyggaggtgactttattgtaaacctgaacatttcatatggaaaaagaaggatgactcacagggcaaaagtgggaggccagaaatcagaataaggacccagggagaacaaccctcaggttggtggtctaagatatcatcaaggaaatg

SEQ ID NO: 664560 - DNA, 555 bp, Homo sapiens
tacagaaaacttactggttccaaaactggattgaactcacttctcctgggtctctagcttgctaaatgagacctgtcaacctctgtaatcatgttagccaattccttataaatctctttttmttttttcctctctcttctctctctctctctctctgtctctctctccgtctctctctctctctgtcattctcgctcttgctctcactctgtctcactctctcaggtctgtttctttggagaacccagactaatacaattctaagattgaaaaaatatagctgcatttaggaaaacaaaacatgaaaaaggaaacaaaaaaaaaaaaggaaaatacaaaccaccccccaatactaaagacaaaaataccaaataaataataaaattataaaaaatcatcctattttgcaagttaattcaaattgtgatgcaagcagtaatgatatatatgctttaaattgtttcatgcaatgaaaaagatgaaaagctttaacttttttaaatcaaacatcaatataaaatcagtctgaaaccaaaatttgcacacaagtgaaaa

SEQ ID NO: 664561 - DNA, 555 bp, Homo sapiens
tacagaaaacttactggttccaaaactggattgaactcacttctcctgggtctctagcttgctaaatgagacctgtcaacctctgtaatcatgttagccaattccttataaatctctttttattttttcctctctcttctctctctctctctctctgtctctctctccgtctctctctctctctgtcattctcgctcttgctctcactctgtctcactctctcaggtctgtttctttggagaacccagactaatacaattctaagattgaaaaaatatagctgcatttaggaaaacaaaacatgaaaaaggaaacaaaaaaaaaaaaggaaaatacaaaccaccccccaatactaaagacaaaaataccaaataaataataaaattataaaaaatcatcctattttgcaagttaattcaaattgtgatgcaagcagtaatgatatatatgctttaaattgtttcatgcaatgaaaaagatgaaaagctttaacttttttaaatcaaacatcartataaaatcagtctgaaaccaaaatttgcacacaagtgaaaa

SEQ ID NO: 664562 - DNA, 630 bp, Homo sapiens
tcatcaggcacttctaaggatgaacaacagctccccaggaggtgtagtgcaaatccagtcctttaaactcatttactttaattgcgtaacattttaaatactgcacgccagtgagaggcaggtggatcagcaggtgcaatgtggcgatctgccaataatggcatcagaaaaacagtccctcacagaggcaagaagcaaaagagactgagtgaagaactcctctgagcttaatgtctatttcatccggtaattgcagcagaggggaggatttccaagcaatctaaaccaaagctgttttattcatttttagcaatgcctttttttttaaaacagtggagaaggtctcagaaatagaatttgagtcccaattcagccaagtcctttctacattcaccctactaaggctcatttatgggtaaagatgtaraaaaaaaaaaaaaacacaacaacaaaaaagaaattgtgaaagcaaatgctttctttctaaacgttttttcatgaaaaatctgaagcatatcatgccaagtttttgtatttgggttctgatttaacttgagtaatgatatgaaggaaaattattaaaataactcatgagattaatttctaaatgagtaactccaaactacatta

SEQ ID NO: 664563 - DNA, 503 bp, Homo sapiens
attacactgaagtgcaaggtgaatcagcaagtgctaatgtagaagctgcagcaagttatccagcagatctagctaaaatcactgatgaaggttgctatgctaaacaactaattttcagtgtagatgaaacagccttatattggaagaagatggcatccaggacttttctagccagagaggataagtcaatgcctagcttcaaagcttcaaaggacagggtgaccctcttctgtgggactaatgcagctggtgactttaagttgaagccaatgcccattcaacttttttttttttttttgaaacagagtcyctctctgtcacccaggctggagtacagtggctctgtatcggcccactgcaacctctgcctcccgggttcaagcaattctctgcctcagcctcccgagtagctgggattacaggagatcgccaccatgccaggctaatttttgtatttttagtagagacagggtttcaccatcttggccaggctggttttgaac

SEQ ID NO: 664564 - DNA, 427 bp, Homo sapiens
ttctaaaaatcctagatctcttaagaattgtgctcaatatgccttgtgggtgttctgtaaacagaacaatgaagactacatgacagtacatctgcttayagcttggtttactgaatactttagacccactgaagacctagtgctcaaaagcgaaggtttcttcctgaatatcactgctcattgaccatacacctaatcacccaaaacctctgatggagatgtacaaagagattaacgtacaatatccattctgcagcccatagaccagagtaattttgactttcaggtctcattatttaagaaatacttttcataaggctatagctgacataaacagtgattcctcagctagatctgagcaaagtcaattgaaagccttctggaaagcatttgccattctagatgacattaagaacattcatgattc

SEQ ID NO: 664565 - DNA, 554 bp, Homo sapiens
atgaaattaaaaaaaaaatatcaagccctgtgataattttccttcccaccccagtacaaaaagaagcacgggacatctgacaattaatctcacctattatgataagcacccagtagagaatacaaaatatctaagaagtaatgcactagaagaaaaagtgaaagtagaaaaagtaaagaacttgcaccagaagaattaaatcctttagaacaaacaggattcagaagtaattatatcaatatgttcagaaaaatrgagatatcacctttaaaagcattcagatgtgaaggaggaagagattattatgaaatgattatcaagaagaaattctagaaattgtatgtgtgtgtgggtacctgaccatatatgcagacttttcaaaatgatacatttagcagatgggaagaattgcagtgcagtatagacatagctgaagaggggattagcaagcagaaagatagagctgaaaatattttagaatggatcacaaacctataaatggaggaaattaagaaaaaaaaacccaccacggtaagaagtatgatttagaattt

SEQ ID NO: 664566 - DNA, 552 bp, Homo sapiens
tttgccccaataaagagggcctctctatttctttctgggaatatttatttttaaaaaggtgattcactttggaatttctattacttgaagttggaagsctttgtatgagttttctttctttttcctctgtgtctgcagctccctgtttgtttaatcacaatatgttttgtttaatatttcagtgctgtttatcaggacaccctaatttgattgttttcttttgtatttgtcttcaccaggtgtttcttgactacagcacatttcccacatgataaaattaaaggtctaattaatgcctttaagaacactggtgcacaattcaacacctaattttctgcagggggcatatttaggtgtttaactaggtggaacttggtgccaaagatttcatttgcatacaaagcctctcttattttcttgtaaacactcttcaatacacaaagaatgcattcacttggtatgcacttttccagcaagtagaagaatacagcaaataaatatatctaagccacatttcatcagagcagaaacaaaaatcctattagatgagat

SEQ ID NO: 664567 - DNA, 554 bp, Homo sapiens
atgaaattaaaaaaaaaatatcaagccctgtgataattttccttcccaccccagtacaaaaagaagcacgggacatctgacaattaatctcacctattatgataagcacccagtagagaatacaaaatatctaagaagtaatgcactagaagaaaaagtgaaagtagaaaaagtaaagaacttgcaccagaagaattaaatcctttagaacaaacaggattcagaagtaattatatcaatatgttcagaaaaatggagatatcacctttaaaagcattcagatgtgaaggaggaagagattattatgaaatgattatcaagaagaaattctagaaattgtatgtgtgtgtgggtacctgaccatatatgcagacttttcaaaatgatacatttagcagatgggaagaattgcagtgcagtatagacatagctgaagaggggattagcaagcagaaagatagagctgaaaatattttagaatggatcacaaacctataaatggaggaaattaagaaaamaaaacccaccacggtaagaagtatgatttagaattt

SEQ ID NO: 664568 - DNA, 545 bp, Homo sapiens
taaacctcaaccatctggcacttctttatatttacattacatatattgagactgatatgtgtgagactcctgtgttcatatcggaactgccactgcaaaattataactgagacagtgaaagaaatctgacctaaccaactccatcttgcttctaacttccaagctgtccctgttcattcctgggcataggctgaactaaccttgggagaaacttagtttatagtttagaacaaagacaataagagcccttttccaaaacaaacccccttcttgcgtggggactggactgcctttgtaggactaacaaattagccaaaagattagaaatgatggtttaggagtcatggagctagaggttacaagattctgaccccgccaaaattgttcctggggataacatcactatygtaaatcctaagatcggtgcttgagatattttgcagaccctgcactggatggatcagctggcaccacacaaattgataaactggctcatttgacctgtggcccacacccaggaactgactcagtacaagacagctttg

SEQ ID NO: 664569 - DNA, 495 bp, Homo sapiens
agggaggctgaggtgggaggatcgcttgagcccaggaggttgaggctgcagtgagccatgagtgtgcccctgtactccagcctgggagacagagcagaatcccgtgtcaaaaaaacaaaaaaaaaaaaaaaaaaagaaacaaccataccaaatgttaattatgctaatatgggttttaatgtctccaatttataaataaggaaatttaagtccaagtgtttcatttaagatcacacagcaagaaaatgacagaaaaaggacttrgggctgtgttagtccacttttgtgtcactataaaggaatacctgagactgagtaatttataaagaaaagaggtttattttggctcacatttctgcaggctgtacaggaagcctggagctggcttcttcttctggtgaggtctcaggaagcttataatcatggcagaaggtaaagggaaagcaggagatatcacatggtgagagtgggagcaagagagatggagcaagagag

SEQ ID NO: 664570 - DNA, 540 bp, Homo sapiens
accccatctctactaaaaatacaaaaaattagccacgtgtggtggcgtgcacctgtaatcccagctactctagaggctgagacaggaaaattgcttgaacccaggaggtagaggctgcagtgagccgagatcgtgccattgcactgcagcctgggcaacaagagcaaaactctgtcttaaaaaaagaaaaaaaaaaaaaaaaaaaaaaaaaaagaatctaatgcctgcctgagaacatgtaaattgtagttttctttgtttcagtgatcatgttactaaaggtgatrtactaaagatgcccatcttttattctgctcaaacacttgttaagaacatatagtacttggtacatctttccactttctaccattaattagtcagcctgttttcaattatgctaagaaacctactaatccaagtgtgaaagtaggtgctaattgcttatatcggcaaagtgggccatattaactctctgttgatggttcatgtctaatccaagagtatgactgatttcacctcccctgcatagccagctaacaa

SEQ ID NO: 664571 - DNA, 540 bp, Homo sapiens
accccatctctactaaaaatacaaaaaattagccacgtgtggtggcgtgcacctgtaatcccagctactctagaggctgagacaggaaaattgcttgaacccaggaggtagaggctgcagtgagccgagatcgtgccattgcactgcagcctgggcaacaagagcaaaactctgtcttaaaaaaagaaaaaaaaaaaaaaaaaaaaaaaaaaagaatctaatgcctgcctgagaacatgtaaattgtagttttctttgtttcagtgatcatgttactaaaggtgatgtactaaagatgcccatcttttattctgctcaaacacttgttaagaacatatagtacttggtacatctttccactttctaccattaattagtcagcctgttttcaattatgctaagaaacctactaatccaagtgtgaaagtaggtgctaattgcttatatcggcaaagtgggccatattaactctctgttgatggttcatgtctaatccaagagtatgactsatttcacctcccctgcatagccagctaacaa

SEQ ID NO: 664572 - DNA, 592 bp, Homo sapiens
ctgaagctgaaaggccaggagaaagtgccataaaatgaggtttaacaacatactgttgggaatgtttttatagcaaataacatttaaaatcttttattaaaagaggctcttccagctccatccatgtccctgcaaaggacatgatctcattcctttttatggctgcatagtattccatagagtatatgtactacattttctttatcaaatctgtcattgatgggcacttgagttgattccgtgtctttgcgattgtgagtaatgctgcaatgaacatatatgtgtatgtatctttataacagaaggactaagtgaggggttcatctgygcagcaaaccaccatggcacacatttacctatgtaacaaaactgcaaatcctacacatgtaccccagaacttaaaatgaaagttgatatatttcttttaaaaaagctcttttttcacatgaaaagaaattactctgattcgttcatctgtttaactatgtaatggggtacccagactttgtgtctttctgatgtggctgttcttaatgtttgacttttggtttccttttgacacttatagtctcaggatggccactgtagcacc

SEQ ID NO: 664573 - DNA, 609 bp, Homo sapiens
agaattagagctccaacagtctctctgacaatttcccgatttctaattttctctatttccattttttatataataattttatttcataaattcaattgtttctataattttaaatttttctttgctgatttcttagtacttattaatagctgaacaagtttatttcaaaaatgatagtttgtatctataattctgagaactaacaaaacctttctttaaatcaatagttggtagggtgcagtggctcacacctgtaattctagcactttgggaggccaaggcaggtggattccctgagctcaggagtttgcagaccagcctgggcaaattgatgaaaccccgtctctactaaaatataaaaaaatagctgggcgtagcagcgtgcgcctgtartcccagttacttgggaggctgaagcaggagaattacttgaacccgggaggcggaggttgcagtgaaccgagattgtgccattgcactcccgctcccgcctgggtgacagattgagactcaatctcaaaaaaaaagaaaagaaaagaaaaagaaactataaagaagtcgttaagttagtttatgtatttatttacatatatttatttttttaaaaca

SEQ ID NO: 664574 - DNA, 620 bp, Homo sapiens
aactagcaacagtcattttaagagttctgcctacatgtaagatataaaaatgatgtaagtggctataccttctctagtttctgccttttatttctacaatgttcattaataaaagtgcctgatccaactgataaatcagaaaacacctctcatttaaatacatccggtctctaatattgtagcagcttctcaagaaattttctgttcactgtaccatttaatattttaaattaacctatagtcaccctttttataattcactattttcataacataattttatgtatattttcagtcatgttagtacactgggaaaagcatgcaaaacagggacataaggatatacctatttcaaagcaaaatcatgctgatgctaaaagggaggtcsgaaaaggaacttggataatagaaaaaaaatacacagcataactgtcccacttagcatatcttagtaaccagtaattagaatagaagtttgcatcattctttttaaaaatatgtggaatgagttacttctttgttctgttgtttaaaacttgctctggtgatgttaaagaatttctcctctccaccctggcactcatagtgccttgactaatcttcccagtcagcagcaggag

SEQ ID NO: 664575 - DNA, 571 bp, Homo sapiens
tgatcttttgtttctttataatcaaagctatttaatacctcttttgaatgaaattttacttgttaattctcatgttcaatttcctctgcaactcaaagtagttgtttaagtttgaataatttacttgaatgttaattataattcaaagctaatggatatgaaatatgtttgctttggtgaatgtacaaataaatatrtctcgaagtattttatatgcagaagagaatattaatttattataaaacattgccatgttgtattaaaataatataggaacaaataagactgtgtacaagaggaaggcatcagttagatgtttaattaaaattaaagttgaaatttagatatatttactttaatatctatatttgtatattcttgctctgtattacagaggttgaataaaacatactttgtctgtaacaaactattgtgatgagtcatttggaacctaaaatgacagttttaatttagctttctttgcaaatctgaaaatagttttaggcactgtaaatagctctgtattagaaaactatttactttcatgatttttctgagcataaacactcat

SEQ ID NO: 664576 - DNA, 592 bp, Homo sapiens
ataagttatctgtggctgctaatcactaaattcatgttaaattccttgagataggagcattttttgtatccttaacatggaagtgcctagtagataaagatattctcagtgaataaagaattcgacttactttcaaaagcatagctttgtggactcactcaatgtccctagatatgctsagactttctgtgtaaaagcacagaatgcactataaaaaaaaatctcattttaatttacttcacatcatgcctaatagtaagataggtaataaagaataattaatgactaccacaaaaatgatgagacaattaaatgtgtcctgataagcaaataacttttccattttgagatgtctttacttagcattttgcacacaagtttgccgaaaataatcaaaatgaaattcataaatacaaattaaaatggatggatacagagttatattttatcaagaaacagttagatggttccagttactttgcagtctttcatttgctgcctagtctcaatctataaagaccaaatacctggggtacaaaatgtctctctttatgcttcctcaccatttagcatccttatgaggagattcacc

SEQ ID NO: 664577 - DNA, 575 bp, Homo sapiens
ctgggcacagtggtggctcatgcctgtaatcctagctctttgggaggccgaggtaggtggatcacctaaggtcaggagttcaagaccagtctggccaacatggcaaaaccctggctctaccaaaaatacaaaaattagctgggcgtggtgccacatgcctgtaatcccagctacttgggaggctgaggcaagakaatcacttgaacccaggaggcagaagttgcagtgagccgagatcatgccactgcactccagcctgggcaacagggcaagaccctgtctcaaaaacaaaacaaaacaaaacaaaacagaaaaataattgtgtatcccaatattctatataatacaatagacatcattgaatggccagcccatctcccaggactgtgcagcataatggaagagaaaacttgtagctaatgaatgtgataaatggatttttgaaaattagatagagtttttggaagtccagatgtaattaattttgtcttgggagaaaggagaggaaataacactaacttgatgtatcaagagggaaaagtaatatatttcagctaactttgatgctgcaggga

SEQ ID NO: 664578 - DNA, 575 bp, Homo sapiens
ctgggcacagtggtggctcatgcctgtaatcctagctctttgggaggccgaggtaggtggatcacctaaggtcaggagttcaagaccagtctggccaacatggcaaaaccctggctctaccaaaaatacaaaaattagctgggcgtggtgccacatgcctgtaatcccagctacttgggaggctgaggcaagataatcacttgaacccaggaggcagaagttgcagtgagccgagatcatgccactgcactccagcctgggcaacagggcaagaccctgtctcaaaaacaaaacaaaacaaaacaaaacagaaaaataattgtgtatcccaatattctatataatacaatagacatcrttgaatggccagcccatctcccaggactgtgcagcataatggaagagaaaacttgtagctaatgaatgtgataaatggatttttgaaaattagatagagtttttggaagtccagatgtaattaattttgtcttgggagaaaggagaggaaataacactaacttgatgtatcaagagggaaaagtaatatatttcagctaactttgatgctgcaggga

SEQ ID NO: 664579 - DNA, 592 bp, Homo sapiens
ataagttatctgtggctgctaatcactaaattcatgttaaattccttgagataggagcattttttgtatccttaacatggaagtgcctagtagataaagatattctcagtgaataaagaattcgacttactttcaaaagcatagctttgtggactcactcaatgtccctagatatgctgagactttctgtgtaaaagcacagaatgcactataaaaaaaaatctcattttaatttacttcacatcatgcctaatagtaagatargtaataaagaataattaatgactaccacaaaaatgatgagacaattaaatgtgtcctgataagcaaataacttttccattttgagatgtctttacttagcattttgcacacaagtttgccgaaaataatcaaaatgaaattcataaatacaaattaaaatggatggatacagagttatattttatcaagaaacagttagatggttccagttactttgcagtctttcatttgctgcctagtctcaatctataaagaccaaatacctggggtacaaaatgtctctctttatgcttcctcaccatttagcatccttatgaggagattcacc

SEQ ID NO: 664580 - DNA, 606 bp, Homo sapiens
ctagggtttcagttattcagccactgtggaaggataaagacaattattttggaaaagcacaagaagttacaaactattgtctaaagatacctttgattagccaggcgtggtgttgcatgcatgtcattctacttacttgggatactaaggtaggaggatcctttgagcccaagagctctaggctgcaatgagccctaattgtaccaatgtactccactttaatggaagtgtttaaatgggctttgagtttcaagaagaaagaagaaacactggaatgcttaagtctgccatacttggggaagattaaataaaacaaggamttagttaagtctgcgtatccatgatgtcaagttatgcttttctgaagtaaatattttaatcatgaatactcagcattttcaaatggtgaatttcttaaagaaaacccaaagggttcattagaaccctccaaagaacaagacctcatctcaaaaaaaaaaaaaaaaactaaaaaataaagaagcctttgagatttcttgctggtagtgcttcaaaaattacctaatagcttgtaattatttgtaaagctgaaaccaaaatttactaaaataaacgcttcttaagatt

SEQ ID NO: 664581 - DNA, 613 bp, Homo sapiens
acagtaatagaaacagtatgatactagtataaggacaaagggatagaccaatggactagaatagagatctcagaaataaattctcacatatatgatcaaatgattttcgacaaaagttcaatggagaaagartcttttcaaaaaatggtattggtgaagcaggataagaaggtgtacattttaccatacacagaaattaactcaaaatggatcaaagaactaaatgtgagctaaaattataaaattcttagaacacaagtgagaaaaagcttatgacattggatttggcgattattttttggaaaggacccaaaaagcatagccaccaaaagaaaaaaaatgaataaataggactgtatgaaaattaaaaacttttgggcatctggagacacaatcaacaaagtgaaaggcaatccaagaaatggaagaaaatatttacaaatcatatatctgataaaggcttcatatccggaatatataaagaactcttacaactcaacaatagcaacaaaaacttgataaacaattgacaaaacagcttaaccatacatttctccaaagatatacaaatggtcaataagcacatggaaaggttttcaacatcactaatcac

SEQ ID NO: 664582 - DNA, 619 bp, Homo sapiens
ctaaactatagacttaaaaataactaagatggtaaattttgtactgtgtgtattttaccacaatttaaaatttgttaaaaataaatatttttcaggctagtaaatttgtaattaaaaaaaccctgaaattgcaatttctttgttagaagtaatgtgcaattgtaattttgatgaatatgaccaagatgttttaaatgtgttatatgtcatgcctgtttatgcatagggcaaaaatgtactagaatgtttcttaacctacatctttaccaataaattatattgtataagttgtatgatactttccagtataataaatgaaatataatagctcatcagtttttaatatgcatatctcttacyacaaatgacactttgtaaattttgtcattttcatttacctttttctgcactaattttatgcattaatatcttgaatgctggttaagtaattttccttttattgtctattcataaacctctgtatattaatattttgaaaggttttttctattttcatttgaattatgttgttttctttttagccgaatatttctttttattttatttaaataaattcatcaatgtctggagactgttttgggttttgcatcccagatat

SEQ ID NO: 664583 - DNA, 583 bp, Homo sapiens
tttatcttatatcatctttgaatgaagagaatttttattaatacagctgccaaaaattcatgctagttcacactgcacaccactacactactttccctatgataaagaagaaaaaattgtgtatgtgtgtgtatgtgtgtgtaggaaaggagtcattttaatmctttttttttttgccacctaaataatcagatttgtagggctgtttacagttcagcctatcaactcggtatggccttactgatgtgctgcatcctagaaaaatgtagccttgtgtttactcattcagcaccaccttccctattactcagtcatgctcaacagggtccagggaagcaaccacctccagccatacacactgtgattgttttgaccctcaggatgtattgcttactttgggggattgtgctctgccatctgtagctgaaatcagctgcaatcatactttcttggcatcttcccacactcatttgattttctctgtatttggcagcttataaatatattggtttgagacaacagatgtagtttcctcaaaggtgggtttttatctgtttttttgtttgttcgtttgtttgttttt

SEQ ID NO: 664584 - DNA, 583 bp, Homo sapiens
tttatcttatatcatctttgaatgaagagaatttttattaatacagctgccaaaaattcatgctagttcacactgcacaccactacactactttccctatgataaagaagaaaaaattgtgtatgtgtgtgtatgtgtgtgtaggaaaggagtcattttaatcctttttttttttgccacctaaataatcagatttgtagggctgtttacagttcagcctatcaactcggtayggccttactgatgtgctgcatcctagaaaaatgtagccttgtgtttactcattcagcaccaccttccctattactcagtcatgctcaacagggtccagggaagcaaccacctccagccatacacactgtgattgttttgaccctcaggatgtattgcttactttgggggattgtgctctgccatctgtagctgaaatcagctgcaatcatactttcttggcatcttcccacactcatttgattttctctgtatttggcagcttataaatatattggtttgagacaacagatgtagtttcctcaaaggtgggtttttatctgtttttttgtttgttcgtttgtttgttttt

SEQ ID NO: 664585 - DNA, 555 bp, Homo sapiens
ttccgaaattgctttttctatcctttccaatttagaaattctattctctcagaaacacctttgggtgattctctttttattctgccgccatttatctttatctcatcatcacaaaaaactgagtcttacattttatttgcctttttgctatggacactgcctttagagtactgtttcactacctttagattgctctgaccctttatgatcctaaaagcgtattctaaactttctgcatcagtctttgattctcctttggctaaatgcacgttctcagataaaactgtagttttaactttaagttctggtaattcctcagtttttgttttgtttcctagtttgttggtttatttatctttgttattgttgttttatagttcccattctatttattgcctttgtattctttctaaatgtattgatagacatctatttttgcgactctctagaggacatgtatactcctatacttttttaaccatagaatcctagccatctacttgtgttaaaaaaatctattttcctayagtggaagctacatgccctaatatgtcc

SEQ ID NO: 664586 - DNA, 616 bp, Homo sapiens
tatccattcttttctctggtacccttttgacatcataatctttcggcttccaatcatgctgcttactcataggattttagtaacccaactccaaactctaaagaaaggaatttggttggcccacttcatgtttgcacaytttacataaagaggtcaaaaagtagcctacagattgactctctttagtttgtgtaacccacatcttagtcaaatcggatgtcagtaatggttacgtggtaaatatgtctttttagatgtccggaggagcaggcaaataatgattcacttagtatatggcatggacttagtaggcagtgactgacttttctacatattctcctcctttgtctgcttttatagatgtgttatcagcctcacaaaaataagcctctctatttttgctcaacaacatctacctatcactgaaataccttcattttcccaaatagtagaattactcaaaacataattccatttagaaaatatataaagagcaccttctgaatttcctcctcaatgtgatcccccatttaacactactaacaccaaccttgttgaaacatgaggcacagtgtaaggctggtgaattctatgaggatcatatcactgtttcact

SEQ ID NO: 664587 - DNA, 616 bp, Homo sapiens
tatccattcttttctctggtacccttttgacatcataatctttcggcttccaatcatgctgcttactcataggattttagtaacccaactccaaactctaaagaaaggaatttggttggcccacttcatgtttgcacattttacataaagaggtcaaaaagtagcctamagattgactctctttagtttgtgtaacccacatcttagtcaaatcggatgtcagtaatggttacgtggtaaatatgtctttttagatgtccggaggagcaggcaaataatgattcacttagtatatggcatggacttagtaggcagtgactgacttttctacatattctcctcctttgtctgcttttatagatgtgttatcagcctcacaaaaataagcctctctatttttgctcaacaacatctacctatcactgaaataccttcattttcccaaatagtagaattactcaaaacataattccatttagaaaatatataaagagcaccttctgaatttcctcctcaatgtgatcccccatttaacactactaacaccaaccttgttgaaacatgaggcacagtgtaaggctggtgaattctatgaggatcatatcactgtttcact

SEQ ID NO: 664588 - DNA, 565 bp, Homo sapiens
tcacaatcatttaagactgctaaacaggtcctcacctgagacttctgagtacctatcagctactggagaacatgtggtaagtaaggctatgagactatggtactgaacagattagtgggaaataccatgccatggaattgagtcaakaatttttatttatcatcaaagttcactaaaaattgtagagagatacacaaatacataagtgagggctatgttcagaatctgcaaattcagatacctataagtgcctggaacgtaatgcaaataattgaaaagactgagcctaatacactagacagtagtggggacagtttcttgccacagctaaaaaggaagttgctgtgaaactgattttgttgctgtgaagaaatacatgcccagtttcaacattttttctaataaaaccggaagtcaacaatccgaattttgggagaaatatttgaatctttaaatattggtaactaaacaaatttattaaataataggcttgccaaaaacacatttgtagatcaaatcttgtctgcaaatggtccctcagttagcaattttgaggttaaagatt

SEQ ID NO: 664589 - DNA, 395 bp, Homo sapiens
gcacagaactataaaatgtgtgtccacatataacccacatgtgcgtacatatctgtaaatatttctatatgtaatcttcagtgtttatatcaagttaagcctgaattttatactgatatatttgactgtaatctattaccatgtatatcattctattcttcttgtytataacctcccaccccaacagtaggaaacctggcctcaccatcctgattcattacttagttttcaatttaaaaataaatatatagtggtagcagaaatttttacctgtaccctttaggaaacaagtttatcaaatagaatgcagtgtttttgtacagttccattttcttttagtcttacactcattttcaaagttatatagatgtcatctttctcccaaccccttttag

SEQ ID NO: 664590 - DNA, 544 bp, Homo sapiens
tcaatggccatgatagactggtgttactccctaagggcctgtggtggtggtggtggccatggggctagggtcctctgcctgtggaaaggggaggaaagagtgggaaggtgtatcttgtggtttgagtgcgtatcttcgtttgagaagtgcctgttcacgtcctttgcccatttttaaaatttttttaaaattttactttaagatctgggatacatgtgctgaacctgcaggtttgttacgtaggtatacttgtgccatggtggttttttgcacctatcaacccatcatctaggttttaagctccacatgcattaggtatttgtcctaatgctctcccctttcccccaactccctgtcaggccccggtttgtgatgttcccctcatgtgtccatgtgttttcattgttcagctcccacttatgagtaagaacatgcagtgtttggttttttgttactgtgttagwttgctgaggatggtggtttccagcttcatccatgtacctgcaaaggacatgaactcattctttttatggctgcatagtat

SEQ ID NO: 664591 - DNA, 350 bp, Homo sapiens
taaaccagtaacatagtcatttattatcattattaagtattatgcactgtatgtaattgaatgtactatacttttatatgattgcagtgtagtaggtttattatgagatgctatattactcatgtagcatctcaaacatgtgagtaatgtattgcactacagcattwcaagattacaatatcactaggctacaggaaatttttttggctccattataatcttataggactactgccatatatgcagtccatcattgagcaaaatgtcattatgtggtacatgactgtatttcaaatataatttagtttcatattctagttaatggagtattaaagaatacttcgtattag

SEQ ID NO: 664592 - DNA, 570 bp, Homo sapiens
actgcatataaatatccactccccactttttgctgattttgattttgattaaggcagcaatatacccagctgaaaactctcccagcctcccttgcaggtagaggtgacsatgtaatgcgattattgccaatgagatccagacggaagtcacctgagtgatttccagaaaatgttgctttcttgatagaggctttgcttctacctcttctcgtttatctcctcgtgcctataatgctggtcttatgcctgagggaagagaaaagccttgctattataaacacaaaactgaatgccaggaatggtggaggagaaagataaaaggaggttagttaccctgcctcaagcaaaggcatgaacccctgaactgtgtacttcctgaccacttgtttggtgagaaaaaacaagattcgaaggtgttgcagtggtgtcactgttatgtggagcaaaatgcattctcatcagtaaagtgagtactacaaattacatatttcagaggtttattttgaaaatcaaatgactgtattgtttaagtcactattatttctattatttgttactagcatcaaaagc

SEQ ID NO: 664593 - DNA, 630 bp, Homo sapiens
tcatcaggcacttctaaggatgaacaacagctccccaggaggtgtagtgcaaatccagtcctttaaactcatttactttaattgcgtaacattttaaatactgcacgscagtgagaggcaggtggatcagcaggtgcaatgtggcgatctgccaataatggcatcagaaaaacagtccctcacagaggcaagaagcaaaagagactgagtgaagaactcctctgagcttaatgtctatttcatccggtaattgcagcagaggggaggatttccaagcaatctaaaccaaagctgttttattcatttttagcaatgcctttttttttaaaacagtggagaaggtctcagaaatagaatttgagtcccaattcagccaagtcctttctacattcaccctactaaggctcatttatgggtaaagatgtaaaaaaaaaaaaaaaacacaacaacaaaaaagaaattgtgaaagcaaatgctttctttctaaacgttttttcatgaaaaatctgaagcatatcatgccaagtttttgtatttgggttctgatttaacttgagtaatgatatgaaggaaaattattaaaataactcatgagattaatttctaaatgagtaactccaaactacatta

SEQ ID NO: 664594 - DNA, 531 bp, Homo sapiens
tcaatatagttacataaagaaaatacatgtgagaacttacatgttacataaagaaaatacatgtgctgcacttaggccctcgaatcgagttctcctgcaggttgctgcagatttcggtgtatcctggggtgggagcctccagctttgcctgtggctgctgtcctttcagagctaacagatacctacttacagatagtattgtgaaattaaaagaatttcagcacaagaaggtggctgttgcatgtaatctttcctaaagaaacctattttaggaatttggaagagaaactgacaagctcatcttgaagggggagttgataaccttactttatttttgtgggtcccaggaccatgtggagctggctamaaatgtcatttacaggtaccatgcagggaacagaaatatcactttgggggagtataggtttggaccacttttcatgagtctgttatgggttggatcttgaggggctcatgaaagaccagcatttatgagattccttctcagattccacatcattcaatattttg

SEQ ID NO: 664595 - DNA, 568 bp, Homo sapiens
ttaatttgctcaagcaataaaaccacatctggtacagcagctgcaattggactcaccacttggttaagcttacgataatccactgtcattcttcaagatccatctgtcttctgcacaggccaaatgagagagttgaatggggatgtgttgggaatcctcacccctgcatctttccattccttgaaggtggcactaatctctgtaatccctccaggaatatgatattgttgtttatttactatttttctaggtagaggcagctctaatggcttccatttggcctttcccaccataatagtcctcaccctaccagtcagggagccaatgtggtgttctcccagctgctaagtatgtctatgccaattacacattttggcacyaaggaaatgaccgtaggatgagtccggggacccattgtaagtgggacctgagctaaaactccattaattacctcacctccataagcccctactttaactagaggaccacagtgacgttttgggtctcctggaatcaacatcagctcagaccctgtgtccagtagtccccaaaatgcctgatcatttcc

SEQ ID NO: 664596 - DNA, 568 bp, Homo sapiens
ttaatttgctcaagcaataaaaccacatctggtacagcagctgcaattggactcaccacttggttaagcttacgataatccactgtcattcttcaagatccatctgtcttctgcacaggccaaatgagagagttgaatggggatgtgttgggaatcctcacccctgcatctttccattccttgaaggtggcactaatctctgtaatccctccaggaatatgatattgttgtttatttactatttttctaggtagaggcagctctaatggcttccatttggcctttcccaccataatagtcctcaccctaccagtcagggagccaatgtggtgttctcccagctgctaagtatgtctatgccaattacacattttggcactaaggaaatgaccgtaggatgagtccggggacccattgtaagtggracctgagctaaaactccattaattacctcacctccataagcccctactttaactagaggaccacagtgacgttttgggtctcctggaatcaacatcagctcagaccctgtgtccagtagtccccaaaatgcctgatcatttcc

SEQ ID NO: 664597 - DNA, 628 bp, Homo sapiens
agaacgaacaggatagatgtttatatataaaggggagtttattaagtattaacttacatgatcacarggtcccacaataggttgtctgcaagcttgagcagcaaggagcgccagtctgagtctcaaaactgaagaacttggagtctgatgttcaagggcaggaagcatccagcacaggagaaagatgtaggctaggagcctaggccagtctcgtcttttcatgtttttctgcctgctttatattcactggcaactggttagatggtgcccaccagattaagggtggatctgccttccccagcccaccgactcaaatgttgttgttgttgttgttttttatactgtaagttctagggtacatgtgcacaacatgcaggtttgttacatatgactcaaatgttaatcttctttggcaacaccctcacagacacacccaacatcaatactttgcatccttcaatccaatcatgttgacactcagtattaaccatcacaacatgtttctctgccatatcttgaaatggccctgcaaagtgtcctttgtgggggaaaatctgcatttgtaaagaatctctactaacatagctagatctttttcttccaggccctctcaatcctgaagagatta

SEQ ID NO: 664598 - DNA, 628 bp, Homo sapiens
agaacgaacaggatagatgtttatatataaaggggagtttattaagtattaacttacatgatcacaaggtcccacaataggttgtctgcaagcttgagcagcaaggagcgccagtctgagtctcaaaactgaagaacttggagtctgatgttcaagggcaggaagcatccagcacaggagaaagatgtaggctrggagcctaggccagtctcgtcttttcatgtttttctgcctgctttatattcactggcaactggttagatggtgcccaccagattaagggtggatctgccttccccagcccaccgactcaaatgttgttgttgttgttgttttttatactgtaagttctagggtacatgtgcacaacatgcaggtttgttacatatgactcaaatgttaatcttctttggcaacaccctcacagacacacccaacatcaatactttgcatccttcaatccaatcatgttgacactcagtattaaccatcacaacatgtttctctgccatatcttgaaatggccctgcaaagtgtcctttgtgggggaaaatctgcatttgtaaagaatctctactaacatagctagatctttttcttccaggccctctcaatcctgaagagatta

SEQ ID NO: 664599 - DNA, 536 bp, Homo sapiens
gtgggcatcgtccaatctgttaagggcctaaatggaacaaaaaggcagagcaagggcaaatggactctctctgcttgaactgagacgtccatcttctcctgcccttggacatcagtgcttctggttcttggacctttatattcagactagaacttatgacactggctctccagattctcgaamctttgggtttggactggaactccatcaccagcttcccagcttgcagatggcaaattgtggggcttctcagcctcagtaattgtgtgggccaattccacatgacaaatctctttccatgtatcaatatatgctctattagttctttttctctggagaaccgtgactaataacagcaccaatcttcatttggaggcacatggcttttcattgaaatgtctgagtgaataaggtaccatccaacttttagaaatctccatgacaccttctaaaacccaaccttttgtacatgagctgaagaaattctgcacatgggctagcctggctatgttctacagaccatctctctgggtcat

SEQ ID NO: 664600 - DNA, 632 bp, Homo sapiens
atcactaaaagtggattttgtatgttcttatcacaaaaaccatgttaattatctcaatttagccattccacaatacatacatatttcaaaacatattgtatgtgataaacatgtatratttttgtcaatttaaaataattaatttttaaaaaagaatttgagaatggctatatacattttagatataagcagacttcaaagcaaggaaagttatcaggaatgaagagggttgttacatgttaaagacatcagaattctccaagaagtcataattgtaattacagaacatcaaaatgtgtaaggtaaaaaatgatagatctgcaaggagaaatagatgaatccactattatagttggagacttcagcactgctctatcataaatgaacagcaggtagaaaatcagtaagacatagttaaactcaacaacaccatctctgtcactacttaaacacgtgttcattcatttatttaacaactatgtattttgtatctatgcatgccagttgctttgccggcattgggcacacaaagtaaaatgtgggtacttggctcaaggttaagttgttcctaaaaccagagttcaaaaagattaaggtatacatggttaactggtgaggcagtgtttggaagg

SEQ ID NO: 664601 - DNA, 573 bp, Homo sapiens
ggagacaactcatctacacaaatgatcatcagtgatttaaagaaggtacagcagagcgagactccgtctcaaaaaaaaaagaaaaagaacgtacaggagatcatggaataagaacaagaagagattactttccagggctctcagaaagtttctaaaaagaggtgccattgaccctgaccttagcattgtgatggagacattacagagctggtaggaaggagaagaagaaggaacggctggaacacacttggggtgaaatgagcagcatttcagtgtgggagctgcagactcagttttggtggaagagttaagagccaggatcttgtcaggaataattctgtgtccaagtgcagaatcgtggtttgctccactactgccagtaactccatttctcaatcatgatggtgatgctttttttttttttggctcccaatcccrgagagtggccatactgaagtcacattacaacaattaacttttcaactattagatgattaatttttaccaagtagcaagaacagctgtttggcacgtagcagtgtggcatgagtatcttgtaaatgaattaaacaa

SEQ ID NO: 664602 - DNA, 534 bp, Homo sapiens
cgatttattaaagaagcaaaagtacaatccacagagtgggagcgggctggagcaggtggcccgagagcctcccctataagggtttttattaagctacagaagtttggtaacactcctaggtgccctttagaggcctccaattatgccctgtgaaggattggcctgcgaccaatcagaggctgaagtggagacttggcccacagtcagtcagaggctaactggaaggaatgtgtgatgtcccttgatcagctcttgggccctaacagcatgaatatttacccaggatcactgatagtcaactgatttctactgaaatggatcaggcttcctatgagatgtgatggaaaagggtaaataccttctctgcaagactctgtagaaactctgtctagttatcacaggagcragggtgtggcctggatgctgcctaatcttgcttagaactgtctgcacctgctgttcttttgcttatgccttaacctttggttaccctaattccctattctcctgcctcagaatgggcaccaaactaac

SEQ ID NO: 664603 - DNA, 623 bp, Homo sapiens
attgattggtattagatctgccccagctttggatggaggaaaggaaggtgctgacgtggaacaggaaaaattaagaggctgaaaagactaaagtccaacctcacagagatagtcaacataggttagataaaagcgcctggaggctgggtttattcatttcttcaaaatggtacaaactcaagcccagccttacacaatttatgtaagcttgaggtttattcttttaaacactgttgtgtgatagatcttcctttctagaaaattccttaatcaaattattagcatatattgtaaatttctaaaattgtgtgcttgcttgataaaggagtaaacagaagcagctacagagtttagattcagtgaagtttctacataattgactatatgatgtgaaaatttctggttgcatttgttctcaaaaaccaattgaattcacagaattgcaagtagtagttccccctgaggtttcatgatatagattaaaatgttacmaatttgaggagaattcaattttttccgttataaactgtgcaaccgtcacattttactttttcatgtttggcaaattgacagatgacagagcccatgatgataatagtgatagatctctctaattgccattc

SEQ ID NO: 664604 - DNA, 523 bp, Homo sapiens
gccattcgaagtaaattaatgcattcccgcaacaagtacagccaagcattctcattaaacttgggcaaaatagaaaggtgccttctggggagttttgactaaatataatcagaacatgcaccagacaaatcagactctatgcgcatctggagaattcaacatcagtactatttgattgcttgcttactccatttatctaggataaaatggtagtttggcagtgcctgtattgtctcaggaagctgaatttttattgacacacaaacgtcagaagaaacttctactcagtccatctgacttctcttaaaccaaattgaaataaatttctctgatcatagctagtgtaagactcagacactcatcaaacatttcaagttccaaactttctgttttactattccyaaagccaataaaatgtccccaaaactatagtatttctatatctaaaaatacctagtgcacaacttcacacactcaaagccacgcaaaagtcttgctacaggtgctcatctttaaaaattag

SEQ ID NO: 664605 - DNA, 478 bp, Homo sapiens
tgtgcaatgagttaacacagaagctgctggctgggtgcggtggctcacgcctctaatcccagcactctgggaggccgaagcaggcagatcacctgaggttgggagttcgagaccagcctgaccaacatggagaaaccctgtctctactaaaaatacaaaattagcggggcatggtggtgcatgcctgtactcccagctactcgcgaggttgaggtaggagaatcacttgaacctgggaggtagagattgcagtgagcctagatcgtgccattgcactccagcctgggcaacaagagcaaaactccgtctcaaaaaaaaaamacacacacacacacacacacacagaagcttctactagctctatattttcactacacctaaacctacctcccaaaccctcccgacaccactcctgagtcacagacccatacatccaactcaacttagatatcctaaaagcactacgagctcagtgtct

SEQ ID NO: 664606 - DNA, 482 bp, Homo sapiens
cacattcccctcagcttgacaaaactttagacaggcttcttgaccctaggccctgatctcccttttcttagagcatttactttgggaaatatgtaaattctttctctgtccttttgagatgtgtgtaaatgtttttagaaggcttttgccagtttttcaacgtaggcctgtttttctcaaggacttgagagccatctctttgaaatgtaaatgtcaaggaagatagtcccaggctctgtgggagggtaggagcctaacttcagccagcaccttgctctaagttgtaaaactatctcctgtcagaaagataagagaaagttgacttttcctttgggtaaagccatttagcaaacacaaaccacctctgttctccctctcaatccagctgttamaaatcttcccaccctccttttcagtggagttgagttcagagttctgttctctctccccatgacaatatccttgaaaaaagtctgttgtct

SEQ ID NO: 664607 - DNA, 532 bp, Homo sapiens
gtgtgagaaactgtttagggaaaatgcctgtgagagaagatacatggggagggagccagaagagacttggagaactgtcagaagtacaatgaagacctgacctcaagtaaagaggagagtgaaggaaagamggaagataagaaggaagcacgtaagactgcagtgcagttacacattcaacaaggccactggggagtccccaggccaaaatcacttgaaagaggaattctgtgcctccgagatgcaggcctgccttagtgttccagcctggtttagtccctggccaggagcagcccatgggaggcacggcttcagcagaaatgtgttgatagacttcagagcacagtagctggggtcttccattgattgcatttcgtggagagaccagaggcaaatcccatggctgccacataaataaaggttggaagttgaagaaaaccagtagtgtctcatgttgcactagaaccagccctgccagcatcaacattagacagaggattttagcacctcacaccaggtcacagagaaccat

SEQ ID NO: 664608 - DNA, 609 bp, Homo sapiens
actgactttcttgaaattctcccatcgtaagcagatgttattattctttagccttccagaaagttaataaccgcaatgctttgagcatcccaaaaawctgtcactgtgacctttgctcttgagggatccactttttccttgactggaccacgttcctctcttggtagcccttgctttgattgtgctcaggattatacatactggtaacgccatgttttatctcctgttaggagtctttgaaaacaatgcttcaggttattgaccccacttttaaaattccctttggaagctctgctctggttttcagctaacctgggtgcaacagtattggcatccattgagtgaaaagtttgcttaactttaatacttgggttagaattgtgtaaactgagacaattgagatgtctatggtgttggctatcatttctgctgttaattatcagcatctttcaattagggcacaagcaagagtaatacttttctcattaattgatgtggattgtgtgccactgaaggcttcatcttcaacatcatctcttccctttttaaaatgagttattcacttgcaaactgctcatttctttggagcattgtccccataaacttttg

SEQ ID NO: 664609 - DNA, 624 bp, Homo sapiens
tatattgccaggcaggtctcgaactcctaggctcaggctatcctcccccctctgcctccctaagagctgggattataggtgtgagctgccacacccagctagaggaaattgttaatctaacaatgaagattaaaacacggggaccctagaatttctatttaggtggtatatattaacaataatagaattgaagaggttggcctgctgatttcttcaaaagttatatttgcctaatgaccaaagargatcttagagtttcctttaacttcaagaaacttcaaacttcagacaggtagttttcctgcctctaggaccctaacttccttttacttagagcatctcctggagaaagcatataattgcaaattgtttctctgcccctttcagatgtaaaactttaaaaagcctctggccacatttaccactagggaagtctttcttgagaacttgtgaaccaacccattaaaatgtaaacattcaggaagacaaggtctttgtttctcactttctatggaaggataagtgcctgatttcagtgaagtgccttgctccaagttgtaaaactacttcctttcacgaaaatataagaaagtttacttttactctgagtaaagccaattagca

SEQ ID NO: 664610 - DNA, 428 bp, Homo sapiens
tgaatcatgaatgttcttaatgtcatctagaatggcaaatgctttccagaaggctttcaattgactttgctcagatctagctgaggaatcactgtttatgtcagctatagccttatgaaaagtatttcttaaataatgagacctgaaagtcaaaattactctggtctatgggctgcagaatggatattgtacgttaatctctttgtacatctccatcagaggttttgggtgattaggtgtatggtcaatgagcagtgatattcaggaagaaaccttcgcttttgagcactaggtcttcagtgggtctaaagtattcagtaaaccaagstataagcagatgtactgtcatgtagtcttcattgttctgtttacagaacacccacaaggcatattgagcacaattcttaagagatctaggatttttagaa

SEQ ID NO: 664611 - DNA, 502 bp, Homo sapiens
gttcaaaaccagcctggccaagatggtgaaaccctgtctctactaaaaatacaaaaattagcctggcatggtggcgatctcctgtaatcccagctactcgggaggctgaggcagagaattgcttgaacccgggaggcagaggttgcagtgggccgatacagagccactgtactccagcctgggtgacagagagagactctgtttcaaaaaaaaaaaaaaagttgaatgggcattggcttcaacttaaagtcaccagctgcattagtcccacagaagagggtcaccctgtcctttgaagctttgaagctaggcattgacttatcctctctggctagaaaagtcctggatgccatcttcttccaatataaggctgtttcayctacactgaaaattagttgtttagcatagcaaccttcatcagtgattttagctagatctgctggataacttgctgcagcttctacattagcacttgctgattcaccttgcacttcagtgtaat

SEQ ID NO: 664612 - DNA, 642 bp, Homo sapiens
gatctgctggataacttgctgcagcttctacattagcacttgctgattcaccttgcacttcagtgtaatggagatggcctctttccataaactatgaatcaacctctgctgttttccaacttttttctctgcatctttcttacctctctcaatcttcrtagaattagtgagagttagggccttactttgggttagcatttggcttaagaaaatattgtgggtgatttgatcttctattcaaccactaaaactttcttcatgtcagcaaaaaggtttttttttttttttgctttcttattatccatatgttcattgtaatagcatattgattttctttcaagaactttttctttccattcaccagttggctgattggcacaagaggcccagttttccgccttttttggctttctacattccttcctcactaagattaatcatttctaggttttgatttaaagtgagagatgtgagacattttctttcacttgaattcttagaggctatcttagaattattatttggcctgatttcaatattgttgtctcagagaatagagtggcccagcagaggaagagagattggggaatggctgtttggtggagcagccagaacacacatgacattaattgattatgtttg

SEQ ID NO: 664613 - DNA, 347 bp, Homo sapiens
tggtttggatctgtgtccccaccgaaatctgatgttgaattgtaatccccagtgttggaggtagggcctggtgggaggtgattggatcatgggagtggtttctcttgaatggtttctcatgaatggttaccatccccttggtctgtcttcctgatagtgaatgagttctcatgagatctggttgtttaaaagcatgtagcacctttcttttttgggtagtgcattagagttctctagagggacagaactaatagaatacacacacacacacacacacacacacacayatatatatatatatatatatatgagtttattaagtattaactcacacaatcacaaggtcc

SEQ ID NO: 664614 - DNA, 580 bp, Homo sapiens
gaaggttaaaaacagcataggttgctaaaattaaaataatcaagataacacaaacaagctcttcaaagcctaaattgatcaatagaaatgttttttcatttttttttaaaaaaaaggataataaagttcccaaatttttttttagcacattatttcaaaacgttttgaaatcaagtgattagaacataaacccctatgaaagaaagtagagtgagtcaagtcagaatagagaagattattattatttttttcaaatagtttttaaaatgtcattcaaattagcagtctctagtagttactagttctttttttaaaagaaatagactgatatcatatagcttttargtattacttttgataattctgtgagtatggttaaggtttctaaaattgaatgtgggcaaatagaaaatataggtgtgtttactaagtttggtaaccaaaaactaagttcagttaatcaatggatatacctgagctgcaaagctctaagcaaaaggcatcataatcatatgtgtaaaaataggaaaatgcaaggtaattgagttgtcatgatgaagtgaagtcaggaggtaagatg

SEQ ID NO: 664615 - DNA, 507 bp, Homo sapiens
gattggtacatcaacaagtatgggatccaagcagggacactgaaatagcataaaaggtttgcagagactgttggagagcatgtactttgttagcttgtttgtttgtttacatcgagaaggtgaatgagggtgctgttagcatgaaactgattttagccaccacatttatcctagatataaagtcaatgcagtgaaacttaaaaaaagaaattatgggatcacaagtattgatgatctcatttgaggttctgaattaaaccataccttgaaattttttgtcctgaactggttaatttatttcattactatrtaaaagtttgaacgggctttatcatttgcaaggaaatcaaaaggcttaccttataactctatatatcttgcaaattttaatttgcataatagtcaactcttgagaaagataaatgaaatagaaatatctctgtcaagactgaaccaaaagaaacgagaaaggagagaggaaggaacaatgggaagaaagaaaaaaag

SEQ ID NO: 664616 - DNA, 507 bp, Homo sapiens
gattggtacatcaacaagtatgggatccaagcagggacactgaaatagcataaaaggtttgcagagactgttggagagcatgtactttgttagcttgtttgtttgtttacatcgagaaggtgaatgagggtgctgttagcatgaaactgattttagccaccacatttatcctagatataaagtcaatgcagtgaaacttaaaaaaagaaattatgggatcacaagtattgatgatctcatttgaggttctgaattaaaccataccttgaaattttttgtcctgaactggttaatttatttcattactatgtaaaagtttgaacgggctttatcatttgcaaggaaatcaaaaggcttaccttataactctatawatcttgcaaattttaatttgcataatagtcaactcttgagaaagataaatgaaatagaaatatctctgtcaagactgaaccaaaagaaacgagaaaggagagaggaaggaacaatgggaagaaagaaaaaaag

SEQ ID NO: 664617 - DNA, 570 bp, Homo sapiens
gttttcacttgtgtgcaaattttggtttcagactgattttatactgatgtttgatttaaaaaagttaaagcttttcatctttttcattgcatgaaacaatttaaagcatatatatcattactgcttgcatcacaatttgaattaacttgcaaaataggatgattttttataattttattatttatttggtatttttgtctttagtattggggggtggtttgtattttccttttttttttttttgtttcctttttcatgttttgttttcctaaatgcagctatattttttcaatcttaraattgtattagtctgggttctccaaagaaacagacctgagagagtgagacagagtgagagcaagagcgagaatgacagagagagagagagacggagagagagacagagagagagagagagagaagagagaggaaaaaagaaaaagagatttataaggaattggctaacatgattacagaggttgacaggtctcatttagcaagctagagacccaggagaagtgagttcaatccagttttggaaccagtaagttttctgtacaaatataatat

SEQ ID NO: 664618 - DNA, 551 bp, Homo sapiens
aagaagatgtggagaaaagggaacctttgtacactgttagtgggaatgtaaattagtacaattacaatggagaacaggttgaaggtttcataaaaaactaaagatagaactaccatatgatctagmaattccactgttggatatatatccaaaagaaaggaaataagtataccaaagagatatctgcattcccatgtgtgttacagcactgttcacaatagtcaagatttggaagcaacccaagtgtccattaatagatggatggataaataacacatggtacatatatacaacgtagtactattcagccataaaaagattgagagcctataacttgcaacaacatgaacagaactggaggttatcatgttaagtgaaaagccaggcatggaagacaaaatttgcatgttctcacttattagtgtggtctaaaattcaaaactattgaattcatggagatagatggtagaaggatgatagaaggatgggaagtgtagtggcagtggggggcaggtagggatggctaatgggtacagaaaatagaaataatg

SEQ ID NO: 664619 - DNA, 635 bp, Homo sapiens
tacaaacttacaaaaactatgcaataatagtaagagaacacccatatatattttaccaagattcactaatttttactttttcttagtttgctttatcattgtctcctctctctctctctctttctcccccagtctcttttattctctccctttcactttatgtctgttggtagtagttatcttttgtagtttaacagattacgtccaaaacttagcagtgytgtacatttcaatatcatttagttttatctagcttaggatttcatatgaaaagaaacatatagtatatattcactattgggtagtaaatcactccaaaacctggcaacttaaacaactttcaacatatcacaccatttgcaaggattaggaatcagggggcacctcagctgggtgtcttgcttaggatctctcttaagattctactcaatatgtctgcagagtgtagcctgaagatcctgcaagtctaagagatggtaaggctacactcactcttacaaactacccttgaaaacacataccatgtctctgccttctagtcctgaaaagcaagtctccaaaatccagcccatgaaatacctcaaggcagggatcatgggagcccttcatggaggctaccttctaaaaaatatgta

SEQ ID NO: 664620 - DNA, 585 bp, Homo sapiens
aatttgaaggtaaaatatactctttatacttttctcactttaaatttatctacaatataactgcttaaagcagtaataagaacaatatattgggtaattatgtcatatggatagataaatgatggcaatgaaataatgaataggagggagaaattggagatacattgttatgaggtacttgcaccatatgtaaagtcatatagtgtatttgaaggcagacaaattattttaatagggatgttktacactcaagagaaaacaaaattaaaagaaccataaatggcatgttaagagaagagataccattaagtcagattaaactcttaattaaaactaggtaagaaaaagatttaaaatagaaatgagaaatgcaggaaagagaaaacaattataacatggtagatcctaatctgactctattaatgaggactgtaaatgtgagtgatctaagtatagcagttaaaagacaaaaattctcagagtagataagtgagctctctacaaaagaattaaatataaaaacttaggtaggttaaaactaaacataaagagtgataatggcatatcatgttaatactattcaaa

SEQ ID NO: 664621 - DNA, 585 bp, Homo sapiens
aatttgaaggtaaaatatactctttatacttttctcactttaaatttatctacaatataactgcttaaagcagtaataagaacaatatattgggtaattatgtcatatggatagataaatgatggcaatgaaataatgaataggagggagaaattggagatacattgttatgaggtacttgcaccatatgtaaagtcatatagtgtatttgaaggcagacaaattattttaatagggatgttttacactcaagagaaaacaaaattaaaagaaccataaatggcatgttaagagaagagataccattaagtcagattaaactcttaattaaaactaggtaagaaaaagatttaaaatagaaatgagaaatgcaggaaagagaaaacaattataacatggtagatcctaatctractctattaatgaggactgtaaatgtgagtgatctaagtatagcagttaaaagacaaaaattctcagagtagataagtgagctctctacaaaagaattaaatataaaaacttaggtaggttaaaactaaacataaagagtgataatggcatatcatgttaatactattcaaa

SEQ ID NO: 664622 - DNA, 585 bp, Homo sapiens
aatttgaaggtaaaatatactctttatacttttctcactttaaatttatctacaatataactgcttaaagcagtaataagaacaatatattgggtaattatgtcatatggatagataaatgatggcaatgaaataatgaataggagggagaaattggagatacattgttatgaggtacttgcaccatatgtaaagtcatatagtgtatttgaaggcagacaaattattttaatagggatgttttacactcaagagaaaacaaaattaaaagaaccataaatggcatgttaagagaagagataccattaagtcagattaaactcttaattaaaactaggtaagaaaaagatttaaaatagaaatgagaaatgcaggaaagagaaaacaattataacatggtagatcctaatctgactctattaatgaggactgtaaatgtgagtgatctaagtatagcagttaaaagacaaaaattctcrgagtagataagtgagctctctacaaaagaattaaatataaaaacttaggtaggttaaaactaaacataaagagtgataatggcatatcatgttaatactattcaaa

SEQ ID NO: 664623 - DNA, 538 bp, Homo sapiens
tgtataataacacataagatcacaactttcatcattgtcacaaatagcatagccaattgtgttgtctttatatagatacatatacatatctatatatatattatgttcaatataatataaataaaaatctatctacctaccaaggttttttttacaagtttctttttaaaaatacttttttatgcctctccccttttatttttaattaacacatgataattttacatatttatcagatacagagagtgttattttaatacttacatataatgtataattgwtcaaattagagtaattaacatatccatcacctcaaacatttaccatttacttgtgttgtgaacattaaaatctcttctcctagctttttgaaaatatacaataaattagttaaccatatttacccttcagtgattcagaacactataactcattcctcctatgtacctgtaattttgtatttgttaaccaacctctccctatcctcccctcccctcttttcttctcagcctctaatacccaaattctactctctgct

SEQ ID NO: 664624 - DNA, 540 bp, Homo sapiens
aatacccaagtcaggagggagggagggagaggcatctgagatgctattgtagtaatccagacatgatgatttgcttaaatagtgtactacagtggtaatcacgagaagtgtccaggcttgagatttctacaggatgttggaacatagagtttgatgatacttataatgcataacatacatgagggaaaactcaggggcaacttcttagtttttgtttctgaagtaggggagctgccagtatttctcatgagaaaaggaacatatagcaaacataaatgtttgaggaactatgttgacttcatttttggacatggaattttgaaatctagctggacctagttctttacgctctcygaacctcattatgtgtttttcacaaaacattacatataatagaatctcccagcttttttgttgttgttgttgtggtccaaatttgcttattctagagcctgttagtagagagcccatgtggcaaagaagtttggattttgacatgcaaagtacctgagtagatggacaatgatgtaggttggaggc

SEQ ID NO: 664625 - DNA, 495 bp, Homo sapiens
ttctctcttgctccatctctcttgctcccactctcaccatgtgatatctcctgctttccctttaccttctgccatgattataagcttcctgagacctcaccagaagaagaagccagctccaggcttcctgtacagcctgcagaaatgtgagccaaaataaacctcttttctttataaattactcagtctcaggtattcctttatagtgacacaaaagtggactaacacagccccaagtcctttttctgtcattttcttgctgtgtgatcttaaatgaaacactttgcacttaaatttccttatttataaattggagacattaaaacccatattagcataattaacatttggtatggttgtttctttttttttttttttttttgkttttttgacacgggattctgctctgtctcccaggctggagtacaggggcacactcatggctcactgcagcctcaacctcctgggctcaagcgatcctcccacctcagcctc

SEQ ID NO: 664626 - DNA, 590 bp, Homo sapiens
agtgaatacctatattaacactttaagtgttaataaattttagtaaataggatttattctgtggattgtcrggtggtctaatgtctgtaaagtatattaatatcatctattatattacaaagatcacaggaaaaagtatcatcttagtactaaaatgtaattaaatataaaaattatttcttatttaatttagaattttaatttaaaaatgtatgataaaagtaaattccttgtattttatttacttatttcaattgttcatttctgcagccaggggaatgttttttaaatgataaaggttattcgtcttaatcaaatagccaccattggctcagtggcagaacactacattttaccaccagggacgtggataaaatatggatgtctgctatccccagcttcttcagcattaccttagagcttctatctcatataattagagaataagaattgcaaagaagaaaataaatttatcataatttgttaattgtatggcctaacttaaaaataactgaaatagccaactgataaatattgtagagatttgaatggtagctgattgtaaaatttattttagaaagtaaattctc

SEQ ID NO: 664627 - DNA, 590 bp, Homo sapiens
agtgaatacctatattaacactttaagtgttaataaattttagtaaataggatttattctgtggattgtcaggtggtctaatgtctgtaaagtatattaatatcatctattatattacaaagatcacaggaaaaagtatcatcttagtactaaaatgtaattaaatataaaaattatttcttatttaatttagaattttaatttaaaaatgtatgataaaagtaaattccttgtattttatttacttatttmaattgttcatttctgcagccaggggaatgttttttaaatgataaaggttattcgtcttaatcaaatagccaccattggctcagtggcagaacactacattttaccaccagggacgtggataaaatatggatgtctgctatccccagcttcttcagcattaccttagagcttctatctcatataattagagaataagaattgcaaagaagaaaataaatttatcataatttgttaattgtatggcctaacttaaaaataactgaaatagccaactgataaatattgtagagatttgaatggtagctgattgtaaaatttattttagaaagtaaattctc

SEQ ID NO: 664628 - DNA, 590 bp, Homo sapiens
agtgaatacctatattaacactttaagtgttaataaattttagtaaataggatttattctgtggattgtcaggtggtctaatgtctgtaaagtatattaatatcatctattatattacaaagatcacaggaaaaagtatcatcttagtactaaaatgtaattaaatataaaaattatttcttatttaatttagaattttaatttaaaaatgtatgataaaagtaaattccttgtattttatttacttatttcaattgttcatttctgcagccaggggaatgttttttaaatgataaaggttattcrtcttaatcaaatagccaccattggctcagtggcagaacactacattttaccaccagggacgtggataaaatatggatgtctgctatccccagcttcttcagcattaccttagagcttctatctcatataattagagaataagaattgcaaagaagaaaataaatttatcataatttgttaattgtatggcctaacttaaaaataactgaaatagccaactgataaatattgtagagatttgaatggtagctgattgtaaaatttattttagaaagtaaattctc

SEQ ID NO: 664629 - DNA, 453 bp, Homo sapiens
gtccagcaaatgagagtgggggtgatcaggttctaagtgcccaggagactcatgttacatacccaatgtagtcagttgttagcagaggggaaaaaaaagaaaaaaagcacgttaccttagcaaccaatactcaaaccraaaaaaaattatgtcaccaaaagatttttgaagtgattgtacatatggtccagaaactaaatgtaaaaaatacttcactagactctaaaggggattttaaatatatgaagttattagagacttacttaatatcttaaaagtatacatgtctggatgttattttacttatataaatacatattagccatattttagggtttgagcattacgataatagctggttaaccttaatttttcaaaaaaaaaaattgactgttatatctgaacatgttatctagaaacatatatcagttgcagtagtttttaagacacaat

SEQ ID NO: 664630 - DNA, 593 bp, Homo sapiens
ttctggagctagaggtgctagttcaaatatcctgttttaaagactgctatgtgtcttgtatttttatttttgtagaatattttttgtttttttcttgaattaatttgttatattttacatttatatatttcagatttttatatttaatatatatcatattgcatataagtttatggaatattatacatttaataaatattatatggattctatttatatattttcaccaacttgtggtataatttcatgttaatctacctctcatgggatgagaagacagcaaacaagtcccaattgtgttaataacaaggatctaaagttaaagcaatttgttctctgaaaggattttctatgtgtgataaacactaacttaagacatgaacttcstgacaactattctggcctttttatctgggtgttgggggctatgtcttgtttcttcatttgtgtaaatgagaatggtggaaaagtaataataattgacaagttattttatagctctagaatccacgttaccataattagcccagtcagctgcaaagtgcctgagtttactgttcaattccaatattatctatctacttttattttct

SEQ ID NO: 664631 - DNA, 605 bp, Homo sapiens
gaacttcgtgacaactattctggcctttttatctgggtgttgggggctatgtcttgtttcttcatttgtgtaaatgagaatggtggaaaagtaataataattgacaagttattttatagctctagaatccacgttaccataattagcccagtcagctgcaaagtgcctgagtttactgttcaattccaatattatctatctacttttattttcttccctctgctttatttggatacctatatattttaaagtaaagagctgagcatagcattatgctccttaggtgagggattattttcctttttccacaatatgctaatagattgatgttcttaccgggttttgttgttgttgttgttttaacaggggctattttgttgtttttgcaatcatgaaagaatgtcttaaaatttgttactcaatatttttttttctctggaaaattcaagttactttaaaacggactcaggcattttccatcaatatctagtcttcttattataaaaagcatcaaactattatctcacaaagcaatgatataacagttgctgtgccaaattackatttgggtaaaggctcaaaatacacttcaggggaaagtgact

SEQ ID NO: 664632 - DNA, 628 bp, Homo sapiens
aatataaaattataaggcttctaaaaaaaacactggagaacgcttttaagatatttaattaagaaaagatttcttcgccagtatatcaagtcagaatgtatacaagaaaaacataaactttagtaaaatttaagactcctggtcttccaaaaacagtaaagagaataaaaagacaagccacagactgggagaaaatatttcaaatgacatttctaatgtgggacttgaatacagaatacataatgaacctccaaaacttaataaaaaacaaacaaacaatttttttgtaaatggataaaaggtttcagcagacatttccaccagagaagatakatggatggcaaatataaacatgacagatttcaacatcatttgttagcagaaaaatgtaaattaaaaccataatgaatgtggcatcaaaatagctacactgaaaaagactgaccatatcatgtgttgatgagaatgtggaggtgctgtactaggactctcatacactgctgatgggaatgtaaaatcacacatttttgaaaattgtttttgcagatttctaaaatctacatgcatacctaacatatgacccatccattctacccctagatatttacccaagaataaagaaagcata

SEQ ID NO: 664633 - DNA, 394 bp, Homo sapiens
acagtctaatttgatttataacatttttggttaaaggaaatgaaagaaaaaatataaatcatctcttcatcttagagtctttgataagcattttttcttccttgtttatagcctgagtgcgccagtggtatttaagtacttctgaatcacttgaatcactgtmtttactaattcatatactgggcaacaaggcttccataatttgtataactttgttaatagatagaggaaatatattttagtaacaaaaattcaccctggatgtaagacaatattaattatacagtatatcaattaagtaaaatcaactgttaccccagaatatcatgaatcttttatttatcaatggtcaatagatattcctgatcaatgccctcaactcttgtacttgtaa

SEQ ID NO: 664634 - DNA, 591 bp, Homo sapiens
tggatttgcaaagaagatacggatatggataaactgatggaagaacttttcttcttcttctaattctccttctctgtctccttctcctcctcttgctcctgttcctgcttttgtttctgagtttttgagaactgtttaacaatttaatactgtattttaacccagaaaaaaattatattctttttttttcctgaaattcctacsaataaattcatttgtatactggtatggactgaatgtttatgtcctccccaaattcctattttgaagctttaatccctactgtgacggtgtttggaggtggggactttgggaggttactttggtttatatcaagtcatgaggatggagtccccatgatgggattactggtcttataagatgaagttaccaaagttctgcctctccaccacgtgagaatacaaggagagggcagctgtctgtgaactaggaggaggatgttcacccagaacctgaccatgctggcatcctcattttggacttccagcattcagagccgtgagaaataaatgcttggttgttaagctccccagtctatggtatctgtaataatagactgaccaaactaag

SEQ ID NO: 664635 - DNA, 529 bp, Homo sapiens
catacatcttgggttataatatagtcctaggagtaggaatcacatatgggtggaaccaaatgttagatggagtaaggatgtctaacatctctgaaatatcatttcatattcctttcagagagatttccactaaaaatttttgatcttgaaagaaagtaaactcctaccttgtttaatcaattattccacagaaccaaacgttatcttaacttataagagtgataataatgcaagcatgttacaagtacatgtctgtgctttccagcatgayagccactagccacatgtggctcttcaaatttaagtgaactaaagataaatataatgtaaaatgtagtttctgagatactctagccacatgttctgtgctccataatccctatggctactttgttggacactgaagaaactgtagaacaattcattgcagaaatttctatcgaacagcactgatctagagggcaaggcctaggttagccttcattgtaaccaaatagatatacactaaaagtttttcatttctttatct

SEQ ID NO: 664636 - DNA, 474 bp, Homo sapiens
cctgcacaaggcacacagtcaataagaagggtatctgggttccagccaggttggcgacaccaatttccaacttagccaatttacctcttattttgtgtgtgtgtgtgtgtgtgtgtgtgtgtgtgtgtgtgcacatgcaccagaatttctggacctgaatcctggcttatcagggtgatcagcagtgtgattttggcacattatgctaagatttctgattgactttatytgtaaaatagggataattagaacacctacctcgtggagttgtaagatcaacaaatgaaaaacacagaatggagtccactatctggtaagtgttataaaagagttgtcatcatgatttttcaaccggtttatcagaatggaagttctatctaacaaccactcatagtttttctgttagtgttttattgcttcaccacttcccacctgtatcctccctaccaccttgatgagcatgtaggtgggggc

SEQ ID NO: 664637 - DNA, 559 bp, Homo sapiens
acacacacacacacaccccaaatagaaatataataagcattataggtctctaaagaacgtgcctgccatatcatatttatagggtgagactctgttgtctcttcttaggtcttctatcttctgtttctggcagatgaggctgactcactgtgacagacaatttagagcaatgtgaggctgaggctctgcaatctttcacacgtctcctattggctcccccaaagaagctttgcctattaacatgtctggcagggttctgacttgagtgctcagctagactgtaaaagacactcatactgggcgacaagcatgggaatggcaggttccgctgcttcactaagacgactcaggttgcctgtggagtaacgtggctcttgggagtgataaaagttgtttctttgaaccaaagctagacattcttagggaatgtacaatgttttatagcaatgtctcccaratttataaagacaatgatgtctttatgtgtcataccttctaggatatttttacctgctgttctgaaatgattcaggcaaccaagatgatatcctggccctat

SEQ ID NO: 664638 - DNA, 557 bp, Homo sapiens
aggtcctcagttgtgttgcctttttttttttttttttttttgcatatgtcaataattcctgtttggaaccaggaatggaatcctctgaaatacccaaatacagtaaaaaggatgccattgttctctagatcaaagaattaaatgagatctatgagttctgaaaagttcttcatcttatgagatttgcaggctcttttcctgaacaaaaccttcagcaaaagatgaaaattactggatgtgcttactttaggatgaacttgacaacttctttttgacattattttataaaaagacagacactaaacatagcaggccacagagttaagagtaaagcctccaaacccaratatttaaaacctagctactcaagaagccacagaaataaagtgtagttttctagtgaaatccctttggcattatcttcctgatgaatgttttcaaaacacactgagcagtctatatccctaaggattgcttttctctagttgatttatatgtttacacatgtttaactactcattgtattgtctggtaaagagaaaattcataccatgcac

SEQ ID NO: 664639 - DNA, 311 bp, Homo sapiens
actcaccagcctcaactgttttcctcaccaccagctgtgcacagtcaactttcgtccacaccrttccctaatcacaatcctgatccgcagctcctgtgcctcctaaattaattacagacggccacttcatttaggagtgtaattgctttcagtacttaacctttctgcagttcaagtggggtgcaaagagaaatgctcaacctcaacgtggtcctgggaaccccagagagctctgtccaacaggtagaagcctctgtaagagctccatgttagagaggggtgtggagaggcatcaatagtcattcagcctt

SEQ ID NO: 664640 - DNA, 535 bp, Homo sapiens
ataagtattgtttaacaaatatacattggatagatggatagatgaatagatggatggataaatgaaaactttcatcctctcccaccctgtatatataccagtatcccagagtggtcatcttatgtgatgtaagtattggtatctctctgtattggattgaacagtgcctctccaaaatttaggtctatctggaacctcacaatgtggccttatttggaaacagggtctttgcagttataatcaattaagttaaaatgaggttatactgaattacagtgaagagacacacaaagggagacgccatgtgaagatggaggcagagaatgaagccaaggaacaccaaagtttaccagcaaccacaaaaaaagtgaggaagaggcaaacaaaacaaaacaaaaaactatcctctatcacagtcttcagggagaatatggccctgccaacaccttgwattctgactttgggcttccaaaactgggaaagaataaatttctgatgctttaagacaccaactttctggcactgtgtcattaca

SEQ ID NO: 664641 - DNA, 632 bp, Homo sapiens
ttggtattttttgcaataaataacagctcacatttatcctaagaacagaaaagttcaccagaacctgcttacattgtctgctttaagaaatacagacctgttaaaaactatctagaacaatgtcataggaacattagcaataatgcaagccctcaactatttgatcagcattggcctgtccctgtggaaggcactagggttatacagagaaataagacacatgccttgccttcaacaagtgcatagcaggtatgggtcctggaagagatgtcactgcagaatagaaagagcaattgctttggaatcagagagctgtgacttcaaatgctggctttgtcccattcggctgtaagaacttgaccaagttttataacaattctcagcctcagtttccttaaagtaaaatgaaaatattaatgtctcttattcagggtcttgggaatgaggaaataaatagaccacccaaagaagaacaatcagaggctattgattcagaacttgctatagcaaaggactcaggcaccatcgcttatggcaggcaggggaatggaggagstttatagtcaaaacagggatggcttaaagtgtgtcctgattggagactgtttgcaatggggagctcaaataaacta

SEQ ID NO: 664642 - DNA, 488 bp, Homo sapiens
agaactttgtagaaaacaggctcagccttacccttatgattccatttcaccatgctargcagctttgggagcctagggtaaactgataatctcggctaggaaaattcttaggtacctttatttatacaggttttgtagttattacaaattacattcattattagttgtgtagttattcagtgttatcattttccatgtgccatgcaaccctctaatattttatatcttgcttgtattcattctgttagtctacttgtcttaggtcatttatgctgcgatgacagaggtcctgaggttaggtaatttataaaaaacagaaatttcgttctcacagttctagagcctaggaaatccagggtcaaggtgtgttcaggtctggtgtctgacaagggcctggtttccacatttgaggtggttctctgaatggtacatcctccagagggaagaaatgctgttcctcctatggcagaagagcagaagagagcaaa

SEQ ID NO: 664643 - DNA, 488 bp, Homo sapiens
agaactttgtagaaaacaggctcagccttacccttatgattccatttcaccatgctaggcagctttgggagcctagggtaaactgataatctcggctaggaaaattcttargtacctttatttatacaggttttgtagttattacaaattacattcattattagttgtgtagttattcagtgttatcattttccatgtgccatgcaaccctctaatattttatatcttgcttgtattcattctgttagtctacttgtcttaggtcatttatgctgcgatgacagaggtcctgaggttaggtaatttataaaaaacagaaatttcgttctcacagttctagagcctaggaaatccagggtcaaggtgtgttcaggtctggtgtctgacaagggcctggtttccacatttgaggtggttctctgaatggtacatcctccagagggaagaaatgctgttcctcctatggcagaagagcagaagagagcaaa

SEQ ID NO: 664644 - DNA, 488 bp, Homo sapiens
agaactttgtagaaaacaggctcagccttacccttatgattccatttcaccatgctaggcagctttgggagcctagggtaaactgataatctcggctaggaaaattcttaggtacctttatttatacaggttttgtagttattacaaattacattcattattagttgtgtagttattcagtgttatcattttccatgtgccatgcaaccctctaatattttatatcttgcttgtattcattctgttagtctacttgtcttargtcatttatgctgcgatgacagaggtcctgaggttaggtaatttataaaaaacagaaatttcgttctcacagttctagagcctaggaaatccagggtcaaggtgtgttcaggtctggtgtctgacaagggcctggtttccacatttgaggtggttctctgaatggtacatcctccagagggaagaaatgctgttcctcctatggcagaagagcagaagagagcaaa

SEQ ID NO: 664645 - DNA, 488 bp, Homo sapiens
agaactttgtagaaaacaggctcagccttacccttatgattccatttcaccatgctaggcagctttgggagcctagggtaaactgataatctcggctaggaaaattcttaggtacctttatttatacaggttttgtagttattacaaattacattcattattagttgtgtagttattcagtgttatcattttccatgtgccatgcaaccctctaatattttatatcttgcttgtattcattctgttagtctacttgtcttaggtcatttatgctgcgatgacagaggtcctgaggttaggtaatttataaaaaacagaaatttcgttctcacagttctagagcctaggaaatccagggtcaaggtgtgttcargtctggtgtctgacaagggcctggtttccacatttgaggtggttctctgaatggtacatcctccagagggaagaaatgctgttcctcctatggcagaagagcagaagagagcaaa

SEQ ID NO: 664646 - DNA, 588 bp, Homo sapiens
aaaacttacattctcagccacttgtccaggttctagaaggtttcaaaaatagtgggaaaaagaggaatcacaatatagctgggcctcatgatccagtgcttccccagagactaagcattctctctatgcctcagcagaaggaacttgtacaccaagactctatgggacctaacaattatctttctgcaagccttccctgtgccagttacctctatctcagcctctctaattctaatccaaacccaaaaatttgacaagcactagttgcctctatgccagcctctccaattctaatccaaacctaaaaagttgatgggtacatgattgcatgattgcaggtaggccaaactcttaggtcaccagtcacccaaagattgtctggaaggaacaagccactattccctcttgagtccatctttgtcctgagttcctgggtcacataggataggrcacaatatctatctatattcattcaatcaactgtcattcatcaatcattaagcacttccccagtactaggtactgctccaaaagtaggtcatgagtaaaataattaaagatctttccatgtagtagttactgtgaaat

SEQ ID NO: 664647 - DNA, 634 bp, Homo sapiens
tactagactccattgccatcctttctccatacaccatccagaaagatattttttgaagacataaatcacagtgtatcactgtcctatttaaaccctttaaaagcttgctattgtggtaagagtggtatccacattccttgccatgcaccacatggccctaacagacctggcctttgcctttctttctaaatgtaccttcttgctcatgatgatgctgtatccacattagatttcttttcttttctttcttctttttatttctttctctttctttctctttctctctttctctcttttttccttcttccttccttccctccctccctctctccctcccttcctcccttccttccttcctttccttcttttcctctctttctttcttcctttctgtctttcttttctttctttcctttctttcctttctttctctctctctctctttctttctttctttcttycttccttccttccttccttccttccttccttccttcctgtctgtctgtctttctttctttctttctttctttctttctttctttctttctttctttctttctttctttctttctttctctcctgacagagtctagctctgtctcccaggctggagtgcagtggcccagcattg

SEQ ID NO: 664648 - DNA, 628 bp, Homo sapiens
tttctttccatgttcaaatgtacatgcatcawaaataatacattttcatttggatagcatgtcaatgtaaaaatataacatggggattataagagtacacacagttgttagagtttcaccagaaaatacatgacacaccaaaactgcgagaatttcaggggagtttagtgttgagacagtttataaaaagtatgcttgctttgggaaaatcatgaagtgatgttgaagcacctggtcttgaggctatggaaatcctggagcaccctagagttggataagtgcatgtcaggaggagttgccagatcctggcaggaggccatacaaagggggatgcagctggaccctggtaaccctgcaaggatggagctggcagactaaacattacacaaattagtctcctttgtttcagaagacttattagagttcccatcttcacttcctctgcctcttttcctccttccccatacctctttaatatggatggtggctattccttgttctgattcatgatgaaatttctattttggaatctgagaaatcaatactttcctgctgttgcattctgatctgatattcttgcatcctgttataatggaaggactgggaagcagaatgtgagttcttcttt

SEQ ID NO: 664649 - DNA, 628 bp, Homo sapiens
tttctttccatgttcaaatgtacatgcatcataaataatacattttcatttggatagcatgtcaatgtaaaaatataacatggggattataagagtacacacagttgttagagtttcaccagaaaatacatgacacaccaaaactgcgagaatttcaggggagtttagtgttgagacagtttataaaaagtatgcttgctttgggaaaatcatgaagtgatgttgaagcacctggtcttgaggctatggaaatcctggagcaccctagagttggataagtgcatgtcaggaggagttgccagatcctggcaggaggccatacaaagggggatgcagctggaccctggyaaccctgcaaggatggagctggcagactaaacattacacaaattagtctcctttgtttcagaagacttattagagttcccatcttcacttcctctgcctcttttcctccttccccatacctctttaatatggatggtggctattccttgttctgattcatgatgaaatttctattttggaatctgagaaatcaatactttcctgctgttgcattctgatctgatattcttgcatcctgttataatggaaggactgggaagcagaatgtgagttcttcttt

SEQ ID NO: 664650 - DNA, 595 bp, Homo sapiens
tggagtgtggtatcaccctcaagaaactgatatgctagtggccaggaatgtacaggcgatgctatgaggagtkccgtgaaggaaataagtgggacccagagggagtgacggaagctggtcagtaggctacttgattcagaaggtctctccaaggtggcgctcttttaaaagagacctgcaggatgaaaggcaaggcctgggcaaaggggccaaggtaagaaacagcctggcagtctcagggaacaaagtgagtggaattgcagaaagttggagaagtacatagcagagaccaggtgccgtatcctgcaggtccctgtgcatcacaatgagggctttgagttttactcttactttcctgggaaaccattggagtcttttggtttgttttagtgatttacggatttttgttgttatctttgttgttctttttctttgtagagacaggggcttgccctattatccaggctgcagtgcagtggaaggatcatagctcatggcagactcaaattcccaggctcaagtgatcctcctgcttcagctgcctgggttgctgtgattatagccatgcaccactgcacctggctattttttaatt

SEQ ID NO: 664651 - DNA, 595 bp, Homo sapiens
tggagtgtggtatcaccctcaagaaactgatatgctagtggccaggaatgtacaggcgatgctatgaggagttccgtgaaggaaataagtgggacccagagggagtgacggaagctggtcagtaggctacttgattcagaaggtctctccaaggtggcgctcttttaaaagagacctgcaggatkaaaggcaaggcctgggcaaaggggccaaggtaagaaacagcctggcagtctcagggaacaaagtgagtggaattgcagaaagttggagaagtacatagcagagaccaggtgccgtatcctgcaggtccctgtgcatcacaatgagggctttgagttttactcttactttcctgggaaaccattggagtcttttggtttgttttagtgatttacggatttttgttgttatctttgttgttctttttctttgtagagacaggggcttgccctattatccaggctgcagtgcagtggaaggatcatagctcatggcagactcaaattcccaggctcaagtgatcctcctgcttcagctgcctgggttgctgtgattatagccatgcaccactgcacctggctattttttaatt

SEQ ID NO: 664652 - DNA, 502 bp, Homo sapiens
agagcctcgtacttaagtgcgtggtcttgagctggagtgtctgagtttgcamcccagctccacaacttattaggagtgtggccttgggcaagttacttatgccgctgtgctgcagttttctcatctgtaaaatgggaggacggaaaaggaagagttcagattaaatgattttgcacatgtcaagtgattagaagagtgcctggcaaattgtaggtacaaataagcactagcaatgatgcacactggtcgtgtcagtggcattttgagacttcccatccccattaagtgtcagcatgactcatctcttctccatacctgtacatagatgtctcagccagttctgtcctgggcagcaatccaatggctctctcttcaacattccacattgtatttggactggagaagctgaggttggaagttgtaatgtggctgggtcaaggtgatagagtaagttggtatcactcaagggataaaaatctggaatctgtaggagatgctggca

SEQ ID NO: 664653 - DNA, 693 bp, Homo sapiens
gagaggaaactgaagagagaaggcactggggagaagcagaggttggggtgatggcagaagtatttactagtcactgaaaagtcagatgcttccctttgtaggtaggcagggccatgggactatttctagccaataggttgcaagtagaagtgttgtgtttcacttccaggctccagcatttacaagctgatgtgaaaatctcaaccctctaccccctgctactccaytcatggaggccacatatggagatcacagcagcctggatcactgagtcactgcatggaggacattttccttggagagtctcccaatgtgcataagagttgggttaagccattgagatgctgaggtttacgttatgactggagcctagtatagtctattctaactagtgcagcaggtattgggattctaatgagtttgacattgccaaagataaaaagtaaggcagaggaagaagtacctgaaagcgccttacctaaattccagcttcttgaactcattacttcccaactgatgctaaaattccctcttcatcctccccatagagaagaaatgatgtttgaagcatctgatgaagcaatttcagcaaaactgaaaaagtgcaccacttatttccagtttctttttctcccgcatcttagcctacaaatcttagtcagacccatagttgggcctgagccttagccagac

SEQ ID NO: 664654 - DNA, 597 bp, Homo sapiens
gatgatatattatgacaattgcattcactcattcaataagtgtgtatccatgcttcttaaaggataggcattagagatatgagagagtgatgcagtgactctgatccccaggctgctgacagtcccaaagaggtaataattagagccagggccctggactcagactttgtaggttcaaatcccagctctgccacgtgttacctctgtgcatatggagagagtctttggactatttctgtcatgttgtagaactgttcctataggaagctcaagctggcgggtgttgtgttcttatttgcagagtaatgatgggctgtaatttagcacacaaaggcagcgccagagrcaatgtttttagaattaattttgaatgttcatacaaaagacatttgcagacacgaggccattctagttaaaggatgaggaaaatggtcctgtgagaaggatcagtcctcagaaggccagtggcccacctatccaacctctttgtgtttcagttttctagactgaaaaattgaaattacagtattttccttgttctgaaatatgttatcatcagaatttgggcataaactatcattattcttgcactttaca

SEQ ID NO: 664655 - DNA, 575 bp, Homo sapiens
catctatagaactttttttattagtttggtttgtttgaacccatgactgttgtttgcaaaacctttacaattttcaattacaattttcaattttttcccatctttagtcatctattcctcacaagaaccctgtaggatggaggtggttgttatttttatttgmgctttgcagggaaagacactgaggcatgaggagtgcaagtagcaagttcaaggttactggagctaacgcagatcctatgtattaggacctcttcatatccacaaccatcacctccatcttcctctgagatgcaaccagctagaaaggcagagccacaccttcctgggttcataacagttatacttggcagcagactgctcattcctttaaccttttccagcttatgcagtccattcttttcttcctatatttaatctgttactgtctttgcatttccattgcttttcttgctggagccccctactgcattctctggttgtttctgatcatttttctccagatacttttgtttgcattatttccaagctgcatctcatttttaactcataattctagttttgatgagttccct

SEQ ID NO: 664656 - DNA, 586 bp, Homo sapiens
ggcaagggtgcagagaacggtccgcactaaggcctggcatgcgtcagcaatgtgctaggtacaccacgggctttgcctcattaaatttccaggcattttttcccaagaaagcagtagttcctttttgcatgtgaggaaattgagactcaaagacctgggtcacaggtcaaagttcatactgctatttggtagccaagaaggaattcaaatcctggtcccagcctaaactctttaatttttcctatgaaaccgcatgtctctctttacatgcttgcctgtgcttttgattactttgggatatattctagaaatgctgagcagaaccacgagggaggggtttagggtcaagaagcagctcaccagccacaagcatcacttttctctgggctaggactagattctgtaagtaaatacccaagtgaaagagaaygcttttcttggaaaatgttggtaacttgatgcatgtaaacaaactcttttgtaagagcctctgtcacatgggggcctgcgggcaaattctaccaagcagagaacagttttcactgcaaaaactcaaaggaagacaagcttggtaatgagagctagc

SEQ ID NO: 664657 - DNA, 623 bp, Homo sapiens
tttgtgtcatattgccacttcccttaccgtacgcattttccagaaatctagaatgctccctttaggttgtaaaattaacagaatgaagataatacagccagactgtggactayttcaaggcagttactgtgccttactccttgtcctgttcctggactaaactcagagcttcaaggtatcagacaagtgaatgaagaagtgaggatggaatccttcctatgatcgtaaatgacccttaatatttgcagtatattttccaagtttcagaatcttatcacatactctagcatgttttattcttgtacatattctgtgaataagaaagtgaggtatcatttttataatgaaattcagctttcaccagcctaaatgcagagacctggaagaggccaggtttggacttgatctctgatctgcctggcttttgattctacacagattcccctatatcacctgaggaattagagttgagtattattattactataactgaatatttttcatggattattaatcttttttcctgagttgcaattcatggattattagtctttttactatttgtgataattagcatatggtaaaagcaaaagaatgttcagacaaaatgacttcacttgatt

SEQ ID NO: 664658 - DNA, 520 bp, Homo sapiens
gtttctaggtgttccaaccttatataggaatatcttcatcatgttctgcttctcatttccatctctgtagttgaatgtggtcttctcttcctgggggatgaaggattaactgtacacatttactttcttgagggccttttaactagttgcctggcttagtctatctttttaatgcctctgattactggggtaggggataggaattttggtcataagatgttctaaggacatacttctatctgcataaagtatttctaacatgtagagcttaaataaatatccttcttctaagtcctcatgtcctcatgtctacactgactatcgatrtaagacagccatgggaaatatgactagaaaggcaagtagaggccattactcaattgctaatgatggaaacacacaaacttgtctgagatctggactcagtaaatagcatataacatggcattctagatgattttcttcaaatgatagtctgagcattttcacatggcatcatgaattctcaaagtcataacat

SEQ ID NO: 664659 - DNA, 589 bp, Homo sapiens
ttacaggtatttgtacagttttcaaagtttctcttgatattgatttctaattttgttcyattgtggtatgaaaatatacttaataagatttcaatttcttgaaaatttgttgagacttgttttgtggcccaacatatggcttatccctgagagtgttccatatgctcatgagaaaaatgtgtattttgtatctgttggataaaattttctgtaaatatctgataggtccattgagtccacactgcagtttaaatctgacatctatttattgattttctctttagatgatattttcaatgctgaaagtaggtttttgaagtccaaaactattattatgttgagatatatctctttagctctaataatatttggtttatatacctgagtactctggtgttgggtgcatatctatttataattattatattctcttgctgaatggacccctttatcatttcataatgaccttgtctctttttatgtttttctcatttaaagtctattttgtttgatgtaagtttagctacttctgcatgcttttggtttttgtttggctggactatcttttttgatcccctcactttcagtc

SEQ ID NO: 664660 - DNA, 616 bp, Homo sapiens
taaatatgtaattaccagatgatccagcaattgcaatgtttagtgagcaatttatatcagagacatgagcaatttataccacagaaatggagacttaagtttacacaaaaatctgtacacaaatatagcagttttatttatagtagcaaaaaaattgaaatagcctagatatcattttatgagtaaattgttaaacttcaatgcatccatactatggaatactactcagcaataaaagggaactaatttgatttatacaatgatcaggatggatttcaaaagaattatgttgagagagaagagtcaatctcaaaatgttggmcagcgtgattccatttatataccattcttgaaataagaaaattgtagaaagggagaagagagcagtggttaccatgggtttaggacgggtgagggcagagggaggtggacatggctattaaagggtaaccagtgggaacctcatgttaatggaagtgttcagtgtcttgaccacacctctgtcaatatcctggctgtgatagcacactagagttatgacggtactctttacaatttctcacaacttcctgtgaatctagaattatcttaaaataaaaagttaattaaacaaaca

SEQ ID NO: 664661 - DNA, 511 bp, Homo sapiens
ttatgtacaaaggtacatgcttgtgggttgtgcatggtggatgaagtttgcattgcacacaatctgattcctcctggaggtgacaataggtggttgctaacgctggaatcaatattgttctctgagatttaaaataatcaaatccacacataatgggtgtgttagccctctgtgggctccaacctagcaaacgatttctcactgtgcattgaagtgtgggtacagcttaaatcccaatccgggggctcaacaataatgtctgagaattagaatcggaatgaggatatcatgtaagaartagatacctttgttatgcttatcaggagaaaaccctttatgagcagccaaggccacaaaaacgggacatccagccatctagacctgacagtgcccaaaaagtgtccaagtaaaattagtccctcacacagagtctttctggtggtgatgcaggtgtggagttatcctagccaggtgtcagaaccacgtctccactttctgggccctgatgctc

SEQ ID NO: 664662 - DNA, 626 bp, Homo sapiens
caggctggtttcaaacccctgacctcaagtaatccacccatctcggactcccaaagtgctgggattacaggcgtgagccagagccgagccagggaattcatagagaggtaacattggaagtgtgggtcaagaatgatggcatgaagagtacatttgtttaaatgctgacaatatatttggtgaaacatcaaatatgttatcaatgaacagtccaccagtcagcttggacaaagggccaactagaaaagtgtgttcaatgaataagtcatctcttgtgcatttctcttgagtttgggctctgcaatggcayagagattgaggacatcattctggccttgacttgctttgagttctttcaggaattcagacattggtttgtaaatccagagtttaagctcaattcaattttgaagaaaacacaaaatgtgacctcagcatcaacatgatccttgtagaatttcctaacacaaactaatacctatctagaaaatcacaaatgcgtacttttgttgaggtgcttattcttaaacaggttgttatatgcatttgaacatgagatacaattataatatttctttataattctaagtctctaatggtttatgtttatcaagcttgttcaacgt

SEQ ID NO: 664663 - DNA, 626 bp, Homo sapiens
caggctggtttcaaacccctgacctcaagtaatccacccatctcggactcccaaagtgctgggattacaggcgtgagccagagccgagccagggaattcatagagaggtaacattggaagtgtgggtcaagaatgatggcatgaagagtacatttgtttaaatgctgacaatatatttggtgaaacatcaaatatgttatcaatgaacagtccaccagtcagcttggacaaagggccaactagaaaagtgtgttcaatgaataagtcatctcttgtgcatttctcttgagtttgggctctgcaatggcacagagattgaggacatcattctggccttgacttgctttgagttctttcaggaattcagacattggtttgtaaatccagagtttaagctcaattcarttttgaagaaaacacaaaatgtgacctcagcatcaacatgatccttgtagaatttcctaacacaaactaatacctatctagaaaatcacaaatgcgtacttttgttgaggtgcttattcttaaacaggttgttatatgcatttgaacatgagatacaattataatatttctttataattctaagtctctaatggtttatgtttatcaagcttgttcaacgt

SEQ ID NO: 664664 - DNA, 626 bp, Homo sapiens
caggctggtttcaaacccctgacctcaagtaatccacccatctcggactcccaaagtgctgggattacaggcgtgagccagagccgagccagggaattcatagagaggtaacattggaagtgtgggtcaagaatgatggcatgaagagtacatttgtttaaatgctgacaatatatttggtgaaacatcaaatatgttatcaatgaacagtccaccagtcagcttggacaaagggccaactagaaaagtgtgttcaatgaataagtcatctcttgtgcatttctcttgagtttgggctctgcaatggcacagagattgaggacatcattctggccttgacttgctttgagttctttcaggaattcagacattggtttgtaaatccagagtttaagctcaattcaattttgaagaaaacacaaaatgtgacctcagcatcaacatgatccttgtagaatttcctaacacaaactaatacctatctagaaaatcacaaatgcgtacttttgttgaggtgcttattcttaracaggttgttatatgcatttgaacatgagatacaattataatatttctttataattctaagtctctaatggtttatgtttatcaagcttgttcaacgt

SEQ ID NO: 664665 - DNA, 532 bp, Homo sapiens
atatctggcaaatgatagcataaaatcatttgtttatagyacaccatattaagaagtgttttttaaaagttcaaaataaaaacaggaattatggccatgaaagaagagcagacacatcatttatgagttttccctgtgtttgcactaaaaaggcaagatgattcattttccatgcaaaacatgcttgagattgagaagaaagttactgccagcaatttctgaatcttctctgggtaatcaatcaaggtatagaatttagaaccaggcggctccctccccagtggaccaaccttcatctgtatctgcccttgtcaaaacagatgcaataccaaaccggaaggcaagatcctgggcaccattccaggtgagtggagtggaattctatgcactgagttttgaccctcagcttcaccctcatgtgtaaaacggagataatatagtctcttgtctatgtgtgcatgttaaccaagtgaaggcatggctcagagtttctctcacactaataatagctttcagagatggagagagtata

SEQ ID NO: 664666 - DNA, 532 bp, Homo sapiens
atatctggcaaatgatagcataaaatcatttgtttatagtacaccatattaagaagtgttttttaaaagttcaaaataaaaacaggaattatggccatgaaagaagagcagacacatcatttatgagttttccctgtgtttgcactaaaaaggcaagatgaytcattttccatgcaaaacatgcttgagattgagaagaaagttactgccagcaatttctgaatcttctctgggtaatcaatcaaggtatagaatttagaaccaggcggctccctccccagtggaccaaccttcatctgtatctgcccttgtcaaaacagatgcaataccaaaccggaaggcaagatcctgggcaccattccaggtgagtggagtggaattctatgcactgagttttgaccctcagcttcaccctcatgtgtaaaacggagataatatagtctcttgtctatgtgtgcatgttaaccaagtgaaggcatggctcagagtttctctcacactaataatagctttcagagatggagagagtata

SEQ ID NO: 664667 - DNA, 532 bp, Homo sapiens
atatctggcaaatgatagcataaaatcatttgtttatagtacaccatattaagaagtgttttttaaaagttcaaaataaaaacaggaattatggccatgaaagaagagcagacacatcatttatgagttttccctgtgtttgcactaaaaaggcaagatgattcattttccatgcaaaacatgcttgagattgagaagawagttactgccagcaatttctgaatcttctctgggtaatcaatcaaggtatagaatttagaaccaggcggctccctccccagtggaccaaccttcatctgtatctgcccttgtcaaaacagatgcaataccaaaccggaaggcaagatcctgggcaccattccaggtgagtggagtggaattctatgcactgagttttgaccctcagcttcaccctcatgtgtaaaacggagataatatagtctcttgtctatgtgtgcatgttaaccaagtgaaggcatggctcagagtttctctcacactaataatagctttcagagatggagagagtata

SEQ ID NO: 664668 - DNA, 532 bp, Homo sapiens
atatctggcaaatgatagcataaaatcatttgtttatagtacaccatattaagaagtgttttttaaaagttcaaaataaaaacaggaattatggccatgaaagaagagcagacacatcatttatgagttttccctgtgtttgcactaaaaaggcaagatgattcattttccatgcaaaacatgcttgagattgagaagaaagttactgccagcaattyctgaatcttctctgggtaatcaatcaaggtatagaatttagaaccaggcggctccctccccagtggaccaaccttcatctgtatctgcccttgtcaaaacagatgcaataccaaaccggaaggcaagatcctgggcaccattccaggtgagtggagtggaattctatgcactgagttttgaccctcagcttcaccctcatgtgtaaaacggagataatatagtctcttgtctatgtgtgcatgttaaccaagtgaaggcatggctcagagtttctctcacactaataatagctttcagagatggagagagtata

SEQ ID NO: 664669 - DNA, 591 bp, Homo sapiens
gagctgggatgaagctggatatactcatattatatataaaaacattttctttaacctaaaagttaatttttttcttctgattttaaaagaaattaaaacatcttcgtggacccctaaaagtcttgtgggccctgggcagtatgcctcctacgttaatggataagtcagtcytgcactcactaaatgcaagtcacagaatcccttcctggaaaggagactgagaaatgtaaagatctttcccatcagccagcacataagaaagctggagagaaaggatgcactttttttcaggagtagtggatctgcttccttcagaaatggtaaagactggcatttactaaaataaaaactgtgctagtcacagatcatttcctccatcagtgtctccccactaaggaaacccagatgcaaacattttggttgagtcacgcctgtaaattctcctgccctcttttgcccaatcatttctaacaacagccaaccattccaggggctgaaataataagcccatcttcagcgaggtaatatcttatttcactccatcatcagttatatgattggtgtcatctttcttaataaaaagccattgct

SEQ ID NO: 664670 - DNA, 536 bp, Homo sapiens
aactattgtccaagacatttaaactgttttataaagagatttgtatatatcatatgaatacacaattttcctatcccttcaattagaactgaatattatcatcaaagtttttccaatttaattagcaagaagtgatattaacacttcagtttgtatttctttgagtagtgaggctggccatttgcatacatttatttacctattataattcttcttttaggaattgtgtgtccatgtcttttacccatttgccctttgatattttgccttatttcttgtcaattttatggtgctttatgtaataatacaattttcaattgcctatacatcttttaatagttttttttttagacggagtctcactgtcacctggctgcagtgcagtggcacgatctcggctcactgcaacctccacctcctgggttcaagcaattctcttgcctcagtctcccgagtagctgggattacaggcrcacaccaccacgcccagctaatttgtgtatttttggtagagacggtgtttcaccatgttggcc

SEQ ID NO: 664671 - DNA, 608 bp, Homo sapiens
ttcctcactctgacatactggccaccacttggtggatctgatacaaatgagtcttgcagcacctcccgggggggcagtgatgcctaacttcagacctaaagtccatttttgccagtgagtttttcataaagagaaaaaagagtaaatatacctttttcaggcaagcaatacctaccccattaggactccaacataatgactgctttagtcaaccatctgcaactaaaggaatcatagatactaatacgtaattcttatatttatgaccaaatatttacgtggatgcccctccaaggagtaaatgtatatgcagatgttcagtgccatagtttcaactcagctgctatgctacaaatccaatcagcttgctgtgctgtgtccayactgtggttgctctcacagctgaccctgaacttggtcatcctcacagcctctttcttcttcttttaccatgatgtcaagcatacatgtcaactcacagctgaaaattgctccccttccagaagcctctccagcaacttcctcttattgctacagaacatagatcagcaggtcagtgctgcattattctgcacttgtttttatatcacttctcggttaaacaagat

SEQ ID NO: 664672 - DNA, 587 bp, Homo sapiens
gccactcatgaccaggaattcgtcttcgttttattaatcaaaaacaaagtcccctattagcaagctcagcataagcacatgtgaagcaaacatcagagcagagtaggtgttcagaagaaacctcttgatcagacaagctccaaggcctggttgactatgctacccttcctagcatttaaatcccttgtctcatggctgtagttaggttaaggagggggtctggcttcttttcaggaggatgtggacaccctccaagggtgacactgggtctggttcaggttagaagcctagaaaccatctcagcttctcctgagcacctgggacatggatttctgagactcttgccctccaackgtttcctgccaaacttccctttcaaagggagcacagccatggcagaaaaggcccctgggtttcctgatctgctttttcaccctctcaaagcagactcttttactagtgctggtcaggtgtccacacatgagccccactgctccaggccagaacatcctcttgcgcctgtcgctggtcaatacaaggagactttcctaccttagagtgctgctttactctttctgtttgaaaaa

SEQ ID NO: 664673 - DNA, 587 bp, Homo sapiens
gccactcatgaccaggaattcgtcttcgttttattaatcaaaaacaaagtcccctattagcaagctcagcataagcacatgtgaagcaaacatcagagcagagtaggtgttcagaagaaacctcttgatcagacaagctccaaggcctggttgactatgctacccttcctagcatttaaatcccttgtctcatggctgtagttaggttaaggagggggtctggcttcttttcaggaggatgtggacaccctccaagggtgacactgggtctggttcaggttagaagcctagaaaccatctcagcttctcctgagcacctgggacatggatttctgagactcttgccctccaactgtttcctgccaaacttccctttcaaagggagcacagccatggcagaaaaggcccctgggtttcctgatctgctttttcaccctctcaaagcagactcttttactagtgctggtcaggtgtccacacatgagccccactgctccaggccagaacatcctcttgygcctgtcgctggtcaatacaaggagactttcctaccttagagtgctgctttactctttctgtttgaaaaa

SEQ ID NO: 664674 - DNA, 551 bp, Homo sapiens
ggttttgttttgtctgctctacacacctgtattgtaacctgtgaagcatttctgtgtargtatgtgatgtgtgccctgtgcaaaaagagcacagtggaatgagtcacttgtttgttgttatggggcacaggtagggaggcaggcacagctgcatcactatcttggcagactggtggtgacactccccatgcccatgtccgggctcctactctcaccccactcggtcctcgctctggcctggactgagattttcccctgccctccaggactgtgcacactcacaagaggggcttcacctgctctcgggtacatttcccagcctgctgccaacttttcttcttcctctccaggatgcggctctgagaaccaggctcctggaatattgcctcccggcagccccctccccaccatgccctctgagataccccctgggtgagcctacaaccctgactgctgtctacccagcaggggtggcttctgctcgccctgccatccaagggaaggggctgcaggcaccaacgtcagacagaggcctgagcagaaatgtgagt

SEQ ID NO: 664675 - DNA, 558 bp, Homo sapiens
agaagtaaggtgacggtgtttattattacattgcagaacttgttttaaatacattttgaaagtgctgaaaggactgtcagggctcatctgtcagagagagatcttccacccagattttctcttgtttacttcaccacaacccacacatgcaaagatacacatgtatgatctctttctctttgggcaaactgggccctggaatagtttatttgtagcaaacaaaggggaaaaaaggctcaatttcctttagctactaaacagtccatttstaggccattctcttcaacatctgctcagagagtgaaatcttctctggtgtctgtcactctggacttgcctccagtctctcggtagcccactttggcctctgtagcttatgccagtcactaatttcacagtagctggctactgattgcacctgtaaacagattcattgtttcataaaaagtaaaatgtctcagctatgtttcctttcatgatatcaattactatcttagaaactaaaatctcaatctgcagcagaacgaagaaagcacacaaggtatttcattataaaat

SEQ ID NO: 664676 - DNA, 653 bp, Homo sapiens
tcattgtttcataaaaagtaaaatgtctcagctatgtttcctttcatgatatcaattactatcttagaaactaaaatctcaatctgcagcagaacgaagaaagcacacaaggtatttcattataaaattataaagattttgacttaaaaaaattcatgtactttaattttccaagattctaacataaccagcttttttctgggactaaaaaaaataaaaccaaacaaatctttatgatggaaatgatggaaatgccaagatctttcttaaagttatgtaaatgatttcttaagaaaggcgattaagagagtctggcagactttgaggttcccaaacatgtttggatggtcagatgatattctttgaatagcttaccattcttttccaaaccccagctataagaaaatgcaaacttttttgccaaatgctttttcaattttaaaactgagtaattgaaggaagatgtttgtgccactattcctttctacttaagtcattcaatgttgtgcaccataaagccttggatatgtttggaagccatttgtaaggcttttctaagcccttttctcaggcacagaatatttttattttaagagtaaattaaacaytgaaagtttcctgttcaggtggaaatgctgaacccaggggttttg

SEQ ID NO: 664677 - DNA, 676 bp, Homo sapiens
aaacaatgataaactagaataacaatttgttaatttagaagagaaatcagttttgtatggggactataatatatcagtccaggtggcctagttaaattcacaggcatctgagccaaacagacctgggttcaaatcccagcctttgcaatttattactgggtgaccttggctacaccttgaccccaaggtttaagccttgcttatttctcctgaagaaaaattgataagaataccaccttattgaggggtttgcattaaattagatactacgtattaaccatttggaacattgcctgacatatggtaagagttcaataagtgctagccattattatcttatgttgcagataaagctcagaaaaagtggaaaaatttgtccaaggtcccagatatagaacayagatgcaaatccaagaggcctggctcttcatatacagatcatagatgaagagacgagagaaagtaagaaggtccacgtaactggaaagagatacaaatgccttctcgtttctgcaatatttataagcaattctaatccataacaggggaggaaagagaagtctctcctttgtcatctgaagctgcccaaagaaaagctgccatgattagttgtgccctgcacaactcttcagggtttcattcatgtagacagcagtccagacctgcagagccatta

SEQ ID NO: 664678 - DNA, 215 bp, Homo sapiens
gcatggcaaatgctctcacaaatatacataatttcaacaaattaaatgatwccctgtgcacatcttacctctcccagtccccccaaaataactgataacctgagagcagtcccaatgaggtgatatttcattggtatttgaaatgtgttagtgcctaagtccagaagcaggttagatgtgcctctggggtaataagagccccagtgggcacctct

SEQ ID NO: 664679 - DNA, 215 bp, Homo sapiens
gcatggcaaatgctctcacaaatatacataatttcaacaaattaaatgataccctgtgcacatcttacctctcccagtccccccaaaataactgataacctgagagcagtcccaatsaggtgatatttcattggtatttgaaatgtgttagtgcctaagtccagaagcaggttagatgtgcctctggggtaataagagccccagtgggcacctct

SEQ ID NO: 664680 - DNA, 533 bp, Homo sapiens
ccattttacaatctgcctttgccgcttgatcaaaaaaggcaagaaaagccttcttgctttctcatttataactttactgatgatccaggggtgtaaaaacctctgagtcaccaagcaaagttagggacattagtgtaggcactgagaaaggaaatgatcctgatgactgggtagcaatttctttctcatgtcaggtggttttcaattcttagcttttaaacgaagactgaatctagttgtcacctcatatattgttaaaaataattttggataatagatcattatgtgattttttgttttacaaataactcagacggatgaacacaattgggaactctattacagcaaacctctttctattccatctacttattcagcactttgcttaaatacttggagaaagttattatrtgccagggacaggtttaagccctttacaagcattaacccatttaatactcacaagaaccccataaggtaagttttattatcatccctgttttacagatgaaaaagaaagctcagaaaggtta

SEQ ID NO: 664681 - DNA, 666 bp, Homo sapiens
atcagggtggctccactaattcaagcagtgagcttcagaaatctcacacagagcatgttgagtcttcattaccctacaagagccaaactcctatataccactgtctgagttcaagatcccatatayaccagtggtttcagcccctttcatcacttagtgattctttcccaaatcttaagttatgtttgttttatttttgatcctatgtcattttgcttttctttctctctttacattaccagactggaccatatgaaattgctagtttcttggtaaaatgataaaatatcagcagtcttatacagttcacattaataaacccatttttgccatgtgttttgcatgagtacatcaaagtataaacatatgtgacattatgactggaggtctctatacactctttaatccttctttatttcaccaatcaactcacctactcaccaatcaatcaaccaaacagacacagactagaatccatacacagttccatgcagagactccccagcctgccccataaagggccttttaaattttggaaggctgcagagaggtagggaggaggcagtgggagttgataaacaatgaacgtttgagaaagaactttcagtctacctcctccaaactgcagtattcttctttctgtcatcatctaaaggtttaaaccaa

SEQ ID NO: 664682 - DNA, 666 bp, Homo sapiens
atcagggtggctccactaattcaagcagtgagcttcagaaatctcacacagagcatgttgagtcttcattaccctacaagagccaaactcctatataccactgtctgagttcaagatcccatatataccagtggtttcagcccctttcatcacttagtgattctttcccaaatcttaagttatgtttgttttatttttgatcctatgtcattttgcttttctttctctctttacattacyagactggaccatatgaaattgctagtttcttggtaaaatgataaaatatcagcagtcttatacagttcacattaataaacccatttttgccatgtgttttgcatgagtacatcaaagtataaacatatgtgacattatgactggaggtctctatacactctttaatccttctttatttcaccaatcaactcacctactcaccaatcaatcaaccaaacagacacagactagaatccatacacagttccatgcagagactccccagcctgccccataaagggccttttaaattttggaaggctgcagagaggtagggaggaggcagtgggagttgataaacaatgaacgtttgagaaagaactttcagtctacctcctccaaactgcagtattcttctttctgtcatcatctaaaggtttaaaccaa

SEQ ID NO: 664683 - DNA, 593 bp, Homo sapiens
gagactccccagcctgccccataaagggccttttaaattttggaaggctgcagagaggtagggaggaggcagtgggagttgataaacaatgaacgtttgagaaagaactttcagtctacctcctccaaactgcagtattcttctttctgtcatcatctaaaggtttaaaccaaatgaatttttattgaatctaagagctatgattgttttgctttcatttttcagagggaagaactagaaratatgcatagtaagagagaaaataacatattcatatttcatttttattattaaaatcttgacttacagccactatcagcaaacatgtgaatagcctagctgatacaatgaataaaaagccgtgggtaatggaaatgtctactgtgtgcatttttggaacttgatttttacgagagacaaagcagagaaagctggaacacaaagtttttcaaagaagtaagagaccaagtattcaccatgatgaacaattcgatagcttcctctcaaacatacgaagtttaggaagcactgatatctgttagcctcaaaagattcaggatccctgaattcttgcttccaccctgttacatacc

SEQ ID NO: 664684 - DNA, 542 bp, Homo sapiens
ctttttactgacagagggttttgcttcagtgttgatagctgctgactgatcagggtaatggttgctgaagcctgggatagctgtggaaatttcttaaaataaagacagaaatgaactttgccatattgatagactcttcctttcatgaaagttttctctatagcatgaaatactttttgagagcatttaacccacagtagaacttttttcgaaatggaggtcagtcctctcaaaccctgccactgctttatcaactaagtttatggracattctaagtcctttgttgtcatttcaacaatgttcacagcatcttcaccagacgtagattccatctcaagaaaccactgtctgctcatccataataagcaactcttcattctttaaagttttattagagattgtagcagttcagttacatcttcaggctctacttttaactctagttttcttgctatttctaccacatctgcagttaatttctccatatgaagccttgaagcccccaaagacatccattgatttttttacctcctcccattaa

SEQ ID NO: 664685 - DNA, 600 bp, Homo sapiens
tccaaccttctcacccacagtctgggttctggagtccatttccactatgtgggatgcatcattgctattaatatttatctttcttgggatcttattaatgagccaatagactgataaacacactcaatccatgcaccatattctttgatatgataaagctaaagaagcaacatactgttacttggctagaggctgctgtgctctgccacctaaatgtgcgccaacatttctccatggctaaattaaatgactagygggaatgagagtccattcacgtttggctccccccatctctttttcttagtagttacatctttttaactcatttctccctcaaacaagtgaattttcctttctattgcaggtaatctcttgagttcactgttatgtccattttaattcttgcattcccttatgagatattcattctaaatgaattgctatcctgtcagttacatagcttggctcctggcatgggaattgtatttctttaatggctttattcatctaaacatattctttttagagatctccattataccccagtccttggagggagacctggcaattgtagaatagggcctttggctgccaagaggc

SEQ ID NO: 664686 - DNA, 644 bp, Homo sapiens
atagcaaaaaggcatcctttgtgaataggtgagatcacaaaacacagattgcartgtttagtattattatccacttactcactctttcagccagtggttactaagtgttatgtgacaagtgcgttgatacgataaaagctggaaatactaagatgacaaaacattgccccctcatatagggaaagagaagcagattagcctaaatttaacacaatatcatgaaggctgaaaatgtataagaagctatacagaggagaaaaaaatataaactaaagttatttgtaataatgccttatatttgaatagctctaaatgattgggccaaaatagcagcttggtgaaaactatgctagatggcccagtactttaatcaaaatgacaacttagttaaagaaataataattattaatgttttaaataatggcaatgttgttgcaccaagggtttgtttgcagttctttatatagatttttaatatttttgcccattttcagagcttttccttcagtcttttaaatttctaatttattttagacaactcctttaaaaagtaagcttcatgaggtcaggacatatctcctttttgtttacaattttatttctgatacttattgcagttcctgacatatagtagtttttcagtg

SEQ ID NO: 664687 - DNA, 547 bp, Homo sapiens
gggtgtatagctatggaacagacaaggatggcttatgaatcctgagagcaagggtgacctcgcaactgagtagagagaaaaataacaccacagtggtgcctgggctacccctagatggtagaagggaattttcaatcctacattcgccttcccaaaacttgctgattgactcctgttttgctatggaattttactgcgaaaccaaaaacgtatgtgcttattttccttttggactataattatagcagaaaatgctcscccatctcttgcaggcatacccccccaatactcatgcaactgtaccagaaattggagatgacagccatggtcgaaggattgagaaggaagagaggggggaaaaaagcccatgttactaagttaataaccagaagaacatctaaataggggcagctctcttgcaatcccacgtactatttcttaaacagagtcattttgtggtttgtaatcaagtgtctgaattcagaatttataggccccaggatggtaagtgtggttatatggtatttagcaattttatgtggtgttg

SEQ ID NO: 664688 - DNA, 615 bp, Homo sapiens
caatgttaaatctgtgcttgtgatgtgaaattgacaactactccttccctttccctgccccaaagttcctggccttaacactgttcagtacctgccctgaggatgatgcagaagttgggagttcttccattgggtgtttcttgcttgtgtggctgctgtctttccagtgttctrtcccctgggttccagaggacaggaggaacttctgcctgccctcagtcctttcctgtccatctttcctggattacagatagagccctctcattcttaaggcgacgtgtcttcatgtttttttttttcatctctcacaatcaccatcacactcgtggtcaccatctgcttttcctgtgacctccatgacattttctttgctgatcagtcattctggtctccccttcacttgctccactcagcctcttcccgctgtctttcttcatggaatgtatcaaagtcagatgacccattgtttgaaatctgccacattttgcaacatagcattctaaatgatgtgagtgagaaatatgtaaaagttttggataatataaaaagtgggaaaacaattagtttggcctagacagacctatgcagatttccagaggagctaggacttcaaca

SEQ ID NO: 664689 - DNA, 536 bp, Homo sapiens
tctccttattgaccagcattaattgaacaatagtgtccacaaaaaactcctacatatccttcaaatctgctcaacattaccttctccctaaaatcctctctagtttcattctcagcctcctcctacccctagcagagcatcagcttttctctctctastagttaaaatttggcccatgttcctttgcacacgttactccaaattgcatatgttataccaaattgccattattatcagtttgtttacatgtcagtctcttgaaaccctgagctctttgagggaggaagtgtttctctttgctctcagtgtctcttagaatctacatgactggtgcacaccagatgcttgttggaacagtcacaggaatctcattatatcaccctaattgatggctatttagccctaacctaaatgttttcagtaacagggcactcactcctttttgagacaccccatttcaagtttggaacgttgtaattattgggaaagtcctccttattgagcccaaattattgagcccaaaatattgagcccaa

SEQ ID NO: 664690 - DNA, 600 bp, Homo sapiens
agcctgccctggcagtgagctttttttcaacatagaagtagactcactttccctcctcctcagtgtagaagacacccacatccacagtaggaagaaaaaaaaagacaggatcccctgcataaattgttcagctattaaagggacaaatagtttttattcaaacttcagtagtaagcttggagaagtccatgtatgttttatttttattgcacacaagttccattccaggaagaggaggrgcatcatttcttcacattcctgtgcaagagagagggcttcctcctgttacaatgctcaagaaggcaaatatatgacagtcaccaaaaatgctcaaatgcctgagccttgctggcccacagaaaggggattagtaaagcaccattaaccctgcaatgaaaacacatcagtttagcgtattctttcatcctaaatccagtttataaacacagccttatcacagggagaatgtttatcttcatgtataatatgtagattcccaaaaagcaacagtagctaatgaaattaaatataatgttggaaaatatacgttatccttttagcaaaaatggcaaagttaacagttacgccagcatgtttaag

SEQ ID NO: 664691 - DNA, 551 bp, Homo sapiens
gaaatttgatgaaaaagcatgaaaatgaagggagaaataaagagcagagaatgaaataattatgtcagtaaatttaattgaatactgactctttcaaaccataaccaacaaactagtagaaaagaaaagaaaataataaaaagtgcttcattaatcaaaaaatgcaaaaaagacaaaaaagattatgaattaggacaaatagaaaaccaatagaaaaatggtagatataagaccagatatataagtacttacattaaatgtaaaataagtcaataatctaattaaaacataaagattttaagaccaaattaaaacaccaaaactgaagtatatgytactttaagaagacatatcttaaatataaagaaagagaaaaattgaaagtaaaataatgaaaaaatatacatataatgttaacattaatcagtaggaagtgttgcagctataatatttttttaaacagaccactaagaagcatgactaaagataaaacagatagagggataactaatatatatactaaagtgtcaattcacaaggaggatattaca

SEQ ID NO: 664692 - DNA, 614 bp, Homo sapiens
tgtatttccaactgaggtacccagttcatctcattcagactgattaggcaatgggtgcagcccacagagggcaagcaagagcaggtggggcatcgcctcacctgggaagtgcaagaggctggggacctccctctcctagccaagggaagccatgagggactgtgctgtttgacccagatactatgcttctcccacactttttgcaacccccagaccaggagattcccttgtatgcctgcaccatcaggggcctgggtttcaagtacaaaactaggcagctgttttggcagacaccgagctagctgcaggaagttttttttcataccccaatggcgcctggaaccccagcaagacagaactgttcactcttctggaaagggggctgaagccagggagccaagtggtctcactcagcagttcacactcccacagagcccagtaagctaagaaccactggcgtgatatgcttgctgccagcacagcagtctgaagttgaccggggatgatggagcttggtggggggagggacgtccaccatcactgaggcttgrgtaggcagttttcccctcacagtgttaaggaaactgccagaagtttggactgtgcagaattca

SEQ ID NO: 664693 - DNA, 512 bp, Homo sapiens
cccacctcagcctcccgagtagctgggaccataggcatgtgccaccatgcctggctaattctttggtatttttttcatagagatggggtttcgccatgttgcccagtctggcctcaaactcctgagcttaaacaatctgcctacctcagcttcctgaaatgctgggattaaaagcatgagccaccacacccagcctgtattgtcattttaatggttgcctaatattccattgcaagttattctggggattaaagagacaaaacatatgaatataactggcatctagtaattgttaaaactataaagagaaatggtgctgaaattcrtatttcatagagtcaacctgctggttgaccttttcacacctatctttgctagccagccattatcttgcatgcaggcagtctcctcctgccttaaagcaagacctccaagacctctgcaggaattgcttcatacatcaggaccaggaatcctgtgtctcagtcactgtaggcaccagaaagaagatg

SEQ ID NO: 664694 - DNA, 574 bp, Homo sapiens
accttcattaatcaaagacttttttttttttaagtgggaatgtgacttgttataaaagcctcatttcctcagactcccttgcatctaggtacgtccatatgaccgagatgtggtctatgatggttacagggttccgctatgagacacacttttgttttattacataaaaggaacatgctctgctggcacacactttttcctcttttccsctcttctttctgactgcaggtagagcagccttcttgcaactttgaggatgaaagctacaagttaaagtggtggaaaaggaagccagaaggagcttgtgactttcttgaacatctgcaccagctctggtctcctttctctggaattcttgttacatgaataaattaatatgtgtttggttaagcaactgtagtcatatttctgctgcatgaaatcaaaggaaaacctaatagtaacatatatgcatagttattctccacaataatgaatattgtcactacaattagtggggatggggcactgagttggtactcttgattgcaaataacaaaaaacctaagctggtttaaagaaaaaagggaattca

SEQ ID NO: 664695 - DNA, 574 bp, Homo sapiens
accttcattaatcaaagacttttttttttttaagtgggaatgtgacttgttataaaagcctcatttcctcagactcccttgcatctaggtacgtccatatgaccgagatgtggtctatgatggttacagggttccgctatgagacacacttttgttttattacataaaaggaacatgctctgctggcacacactttttcctcttttccgctcttctttctgactgcaggtagagcagccttcttgcaactttgaggatgaaakctacaagttaaagtggtggaaaaggaagccagaaggagcttgtgactttcttgaacatctgcaccagctctggtctcctttctctggaattcttgttacatgaataaattaatatgtgtttggttaagcaactgtagtcatatttctgctgcatgaaatcaaaggaaaacctaatagtaacatatatgcatagttattctccacaataatgaatattgtcactacaattagtggggatggggcactgagttggtactcttgattgcaaataacaaaaaacctaagctggtttaaagaaaaaagggaattca

SEQ ID NO: 664696 - DNA, 574 bp, Homo sapiens
accttcattaatcaaagacttttttttttttaagtgggaatgtgacttgttataaaagcctcatttcctcagactcccttgcatctaggtacgtccatatgaccgagatgtggtctatgatggttacagggttccgctatgagacacacttttgttttattacataaaaggaacatgctctgctggcacacactttttcctcttttccgctcttctttctgactgcaggtagagcagccttcttgcaactttgaggatgaaagctacaagttaaagtggtggaaaaggaagccagaaggagcttgtgactttcttgaacatctgcaccagctctggtctcctttctctggaattcttgttacatgaataaattaatatgtgtttggttaagcaactgtagtcatatttctgctgcatgaaatcaaaggaaaacctaatagtaacatatatgcatagttattctccacaataatgaatattgtcactacaattagtggggatggggcactgagttggtactcttgattgcaaataacaaaaaamctaagctggtttaaagaaaaaagggaattca

SEQ ID NO: 664697 - DNA, 590 bp, Homo sapiens
tgtgtcactcccttagttgtagctcaatactgtttaaatataggatcttcagccaggcatttggagctaccacaatatgaccccaatctgtcacttcaattttctttcstgtgattcctttacagatgccttatagtacaaccaaattgggctgcttgttctttgagtatttcttgaactttactacctctgtacttctcccattcagttactttgctcaggaatgcccatttccagctgtttctgttggtatttgcttttgtgtagctaataatattcatagatgactattttaaaatttatccatttaaaaaattgacattgtggtcagatgaggatttagctcttttatactatcacacttcacctctgtgccacacagcttctgtttttccctccggttcctctgtcctatatgggccacatcaacagcttctgtgcctctggctccttgctgggtttggacagtggcatgttcaagggagggaggtgaggcaggtgacggaggtgagggtgtttattaccccaactctcttccactgtccctcaaacgaaggttattgttccattcaatacggcctccttttcac

SEQ ID NO: 664698 - DNA, 559 bp, Homo sapiens
aaaacaacaagcaaaattaaaagtcagctatcactgagatttggggctttgactgccaagtgaaacccaagtgaagatttttgcaggctctgggctagagagtcccaagttgagcagatctcctgacaaacttaccctgggtctttcttgatcctggcatttgttccttagttttcctctgtggtcaccttgttctttcccattggataccctttctctatgtctccatttatgtaaagtcaactcattttggggacctccttaaagtattgaaaagccttttttcccctgattttttttyatttcaataatgtctgtattacttgccagtttttattttttgtttaaactttttaactgaagaagaatttacattaaaaaacatgccaatatcttacatgtatagcttcaaggattatttagaaatataacacatctctgcaagtagcagccatgtcaaaaaacaaaatattacctgcactcgaaagcacctgtatattccgttccagtcactacatattcccaaggtaaagggaacaacggcctttgtttctaacat

SEQ ID NO: 664699 - DNA, 608 bp, Homo sapiens
ttattcctagaatctcaaataaaataccttcaggtctatatatgaatttttcctcttagggctaatattttctatacatttaaattaaatatataatcatgatgtttagaaaataagctgaccaatgaaaagttaaaagctatttggaaataaaatggtaatattaattgaggagtaattgagaacatgtatcctacttgaagaaatactgaagtatttaaaaataatagtcattaaaattattacaatamatgagaagataaaaatcctgaatattaaatagaaaaatgctaaaaggtatttttaatatgccattaattacttttttaagttgctgagttaaaaaacactggcaggaaaaaaaaagaaaataccaagatgctagaatggatggttgagggaaaaaaattataaatgctcttcttccttttctttttctggctgtgaccctatcaattaaaatttcttttctttttctcttttttttgagatggagtttcactcttgttgcccaggctggagtgcagtggcatgatcctggctcagtgcagcttccacctcctggattcaagtaattctcctgcctcagcctcccaagtagctgggat

SEQ ID NO: 664700 - DNA, 550 bp, Homo sapiens
ggagggtcaaactggggagaatgtgatgaagaacaagagggcctggtggaaggaagagagtgagagcaatggaaagaagagaaggaaatataaaagaaatgtggrccgggcgcggtggctcatttctgcaatcccagcactttgggaggccaaggtgggcggatcacgaggtcaggagatggagaccatcctggctaacacacagtgaaatcctgtttctactaaaaatacaaaaacttagccgggcgtggtggcgggcgcctgtagtcccagctactggggaggctaaggcaggagaatggcgtgaacccgggaggcggagcttgcagtgagccgagatcgccccactgcagtccagcttgggagaaagagcgagactcagtctcaaaaaaaaaaaaaaaaaatgtgctggagggatggatttgatcaaaattctctcctctctttccctcccctcctttcccccttcttccttcctctccttttctcctctcctctctttttcagtttttcttaagacacagttttgtagaaagattcagctgcttaa

SEQ ID NO: 664701 - DNA, 550 bp, Homo sapiens
ggagggtcaaactggggagaatgtgatgaagaacaagagggcctggtggaaggaagagagtgagagcaatggaaagaagagaaggaaatataaaagaaatgtgggccgggcgcggtggctcatttctgcaatcccagcactttgggaggccaaggtgggcggatcacgaggtcaggagatggagaccatcctggcyaacacacagtgaaatcctgtttctactaaaaatacaaaaacttagccgggcgtggtggcgggcgcctgtagtcccagctactggggaggctaaggcaggagaatggcgtgaacccgggaggcggagcttgcagtgagccgagatcgccccactgcagtccagcttgggagaaagagcgagactcagtctcaaaaaaaaaaaaaaaaaatgtgctggagggatggatttgatcaaaattctctcctctctttccctcccctcctttcccccttcttccttcctctccttttctcctctcctctctttttcagtttttcttaagacacagttttgtagaaagattcagctgcttaa

SEQ ID NO: 664702 - DNA, 550 bp, Homo sapiens
ggagggtcaaactggggagaatgtgatgaagaacaagagggcctggtggaaggaagagagtgagagcaatggaaagaagagaaggaaatataaaagaaatgtgggccgggcgcggtggctcatttctgcaatcccagcactttgggaggccaaggtgggcggatcacgaggtcaggagatggagaccatcctggctaacacacagtgaaatcctgtttctactaaaaatacaaaaacttagccgggcgtggtggcgggcgcctgtagtcccagctactggggaggctaaggcaggagaatggcgtgaacccgggaggcggagcttgcagtgagccgagatcrccccactgcagtccagcttgggagaaagagcgagactcagtctcaaaaaaaaaaaaaaaaaatgtgctggagggatggatttgatcaaaattctctcctctctttccctcccctcctttcccccttcttccttcctctccttttctcctctcctctctttttcagtttttcttaagacacagttttgtagaaagattcagctgcttaa

SEQ ID NO: 664703 - DNA, 248 bp, Homo sapiens
ggctttttcactgaataatttactattgcatgcatttactgtgatgttttaaaatcgtctgtcttcttatatctttctacctcaagggtatagattatgccttgttaactacttgatctcagtgtctgtcccagaatagcwgctccatacacattgtcaatggaaggaagaaataaatgaataaatggccatagattgtcacatttttgccttgcagctaattataaaaatgacctcttagtttccca

SEQ ID NO: 664704 - DNA, 585 bp, Homo sapiens
ttttaaaatcgtctgtcttcttatatctttctacctcaagggtatagattatgccttgttaactacttgatctcagtgtctgtcccagaatagctgctccatacacattgtcaatggaaggaagaaataaatgaataaatggccatagattgtcacatttttgccttgcagctaattataaaaatgacctcttagtttcccaattcacttgtacccttctcagaaataaatttcatgtatgagaaccaagccaccaaactaaatgagtagacaattattccatgactgcattttaaatattcctgaaatagtattcttccaaatggtgtatgcttcagccaaaatagttcaaaagtgacttctactttttcaaaattaacaaaaagccattagagatggaaaacattagaagacaaataaacctcaccttttcaagtattttattttccaaatagacaatctrgaggcatcatttttcaatttacggtagacctcattatctacatgtgcattaaaaaatgctccaaatgtagcagcttaaaaccgcaaacatttaattttaattttaattatttatctcacagt

SEQ ID NO: 664705 - DNA, 629 bp, Homo sapiens
gtgtgtgtgtgtgaaagagactgagagagacctgagagagaacccacagtcttttataatcttatttttgaagtagaatatcatcatgtccttttattggtcctagtacacttctttgaaggggattcacataaaagcatgaagatgactagggggtgatgttgttggctgccattgtggagtctaccacaagaaaaattctgaagaagtgtatggcatgatctgacttatgtttaattattctggatgcattgtggaaaaaataatataaagaatcaagagtagaaacatgtagaccagtacgaagccattgaaataactgagaaaatagatgttagattgttggtcacaaaaggatggtagaagtagtgatattgagaagtggtcaagctctgtgtatattttgaaggtagaaacaagaaaatttactgagggtttggatatgaagttgaggaaaatagaaaaattaaagacaaagccagaatttaagaaactggatgaatggtggcaacrtgtattaagaagaagattgtgacagaagccaatttggtgagtgggagagggaataaaaaaatctggttgaaacgcattattaagtttgagatgcctactagacatacaagtagcaa

SEQ ID NO: 664706 - DNA, 479 bp, Homo sapiens
tggaatctccacaagtttcctttaaaaaggggttggtgggaattgatgagtaaagagatgtatagcctttctcagagatccaaacattgtsactaacctaaattgaattttaacccaaatgtgatatatttgttcttactggcttctgaaataaaattgagggttaaatatgtgatatggagtgacactaatttcaggacttcagttacatgatgtatacgtacaagagtgaaaacaggactgggatcttaaaagagaattctgcaaaaaaatgatgctttgttatgacccagatgtttgtttttgaaattgaatcccctattaaaattttctggtatgtcttttataggtgacagcggtcaggacgggtacccctcatactggcttcttacttccacctcttgtggcccaaccctgtcctccagagcctagcttctcccttgatccttcccttttctccccaacttctacttttggac

SEQ ID NO: 664707 - DNA, 479 bp, Homo sapiens
tggaatctccacaagtttcctttaaaaaggggttggtgggaattgatgagtaaagagatgtatagcctttctcagagatccaaacattgtgactaacctaaattgaattttaacccaaatgtgatatatttgttcttactggcttctgaaataaaattgagggttaaatatgtgatayggagtgacactaatttcaggacttcagttacatgatgtatacgtacaagagtgaaaacaggactgggatcttaaaagagaattctgcaaaaaaatgatgctttgttatgacccagatgtttgtttttgaaattgaatcccctattaaaattttctggtatgtcttttataggtgacagcggtcaggacgggtacccctcatactggcttcttacttccacctcttgtggcccaaccctgtcctccagagcctagcttctcccttgatccttcccttttctccccaacttctacttttggac

SEQ ID NO: 664708 - DNA, 514 bp, Homo sapiens
gactttacttacttttcctcacagaaaagcacccattctttacaatctaactcagaatacatcatatttgaaacgttggctatttagccagggtttttccagagaaacagaaccatatttttaccataaatctacatatttgtaagcattggtacacatgattatgaaggctgacaagtcccaagatctacaggatgagtcagaaaactggagatctaggcgagctaatggtttagttccagtttgagtctgaaggcctgagaacaaagagagctgatgctgcagttccagtctgaaggctggcaggctcaagacaaaggaakgattgatgtttttattcaaatccaaagttaaggacaaaaatgcctatatcctagtttgaaggccatcagacaggaagaattttatcatgcttgggggaggtcagactttttgatcttctcaggccttgacctaattggatgaggcctatgtacattaaggagggcaatcggctttatacagcatactgatt

SEQ ID NO: 664709 - DNA, 514 bp, Homo sapiens
gactttacttacttttcctcacagaaaagcacccattctttacaatctaactcagaatacatcatatttgaaacgttggctatttagccagggtttttccagagaaacagaaccatatttttaccataaatctacatatttgtaagcattggtacacatgattatgaaggctgacaagtcccaagatctacaggatgagtcagaaaactggagatctaggcgagctaatggtttagttccagtttgagtctgaaggcctgagaacaaagagagctgatgctgcagttccagtctgaaggctggcaggctcaagacaaaggaatrattgatgtttttattcaaatccaaagttaaggacaaaaatgcctatatcctagtttgaaggccatcagacaggaagaattttatcatgcttgggggaggtcagactttttgatcttctcaggccttgacctaattggatgaggcctatgtacattaaggagggcaatcggctttatacagcatactgatt

SEQ ID NO: 664710 - DNA, 608 bp, Homo sapiens
cataataggtttttaagtcaaagtttatgtgacataggaggtttcagaaatgaagacccaaaaccaggggaaaactgaatttttatgcaaagtctgatgaaaaaagtagagaaacatgcttggagaaaaagggtatgatctattggtaataaactgaagggggaacacagcaaggcctgtctgttcagattcttcttggcctccaagtatagagtgggactcatctggaasaagggtcttacaacctacttgcaggcaagacaagtcagagaattcctatatgaccattttccccaaagaaaggcaggggaaggtcagaaattgacctttctaggttttatggcttgccttggggagagaaattctagtttctatgtcctgcataaaagggagaagaaaggatgagggagggtgggagagaccttgcttctgaggtcctccccatctccttcagtgcaaagtactcagctggtcaatgcaccatagtctggagtattattgtgttctcagccctgacaatctcatccagaaacgttctcacagatacacccagaagaatatttgaccaattcctgcatacctcatggcccagtcaatctgatacataa

SEQ ID NO: 664711 - DNA, 608 bp, Homo sapiens
cataataggtttttaagtcaaagtttatgtgacataggaggtttcagaaatgaagacccaaaaccaggggaaaactgaatttttatgcaaagtctgatgaaaaaagtagagaaacatgcttggagaaaaagggtatgatctattggtaataaactgaagggggaacacagcaaggcctgtctgttcagattcttcttggcctccaagtatagagtgggactcatctggaacaagggtcttacaacctacttgcaggcaagacaagtcagagaattcctatatgaccattttccccaaagaaaggcrggggaaggtcagaaattgacctttctaggttttatggcttgccttggggagagaaattctagtttctatgtcctgcataaaagggagaagaaaggatgagggagggtgggagagaccttgcttctgaggtcctccccatctccttcagtgcaaagtactcagctggtcaatgcaccatagtctggagtattattgtgttctcagccctgacaatctcatccagaaacgttctcacagatacacccagaagaatatttgaccaattcctgcatacctcatggcccagtcaatctgatacataa

SEQ ID NO: 664712 - DNA, 608 bp, Homo sapiens
cataataggtttttaagtcaaagtttatgtgacataggaggtttcagaaatgaagacccaaaaccaggggaaaactgaatttttatgcaaagtctgatgaaaaaagtagagaaacatgcttggagaaaaagggtatgatctattggtaataaactgaagggggaacacagcaaggcctgtctgttcagattcttcttggcctccaagtatagagtgggactcatctggaacaagggtcttacaacctacttgcaggcaagacaagtcagagaattcctatatgaccattttccccaaagaaaggcaggggaaggtcagaaattgacctttctaggttttatggcttgccttggggagagaaattctagtttctatgtcctgcataaaagggagaagaaaggatgagggagggtgggagagaccttgcttctgaggtcctccccatctccttcagtgcaaagtactcagcwggtcaatgcaccatagtctggagtattattgtgttctcagccctgacaatctcatccagaaacgttctcacagatacacccagaagaatatttgaccaattcctgcatacctcatggcccagtcaatctgatacataa

SEQ ID NO: 664713 - DNA, 553 bp, Homo sapiens
gttttgtttcctactctctctcctcttcttctagccacattatcctcttaccataataaacccctgtatatattttttaaatccgttcaaaattacattatattagggttctccagagaaacaaaaacaataggataatatcctatattatatgataatagaatattatacatatatttgtatataggaaaatatcatatttatatatatacatatctatatattcatatakctatatatagatagatagatttctcatgcagttttggtttaaggaaccacagaagtctcatgatctgctttctgcaagctggagacccaggaaagccagtgatgtagttcgaaggcttcagattcagagatctagtagtatagattcctgtctaggtctgaaggcctgagaaccagaagtacaaaaggcagaagaatggtgtctgagctcaaaatgcaggcagagagtgagttcagccttcctccatctctttgtgctattcaggctttcaatggattaagtgatgtccacccacttgggaactgcttgactcagtttccc

SEQ ID NO: 664714 - DNA, 646 bp, Homo sapiens
gagtttcaccctgttctgttgcccaggctgttcgcaaattcctgagctcaggcaatccacccacctgtctcccaaagtgctgggattacaggcatgagccactgtgcctggccaaaaatatttttaatgaacatttaatttgttttctgctcaatttttaaaatagcatcctttctgtattagcaaaaggtaacatctgtttgagtaagttgtaagcatgagtcccaatcaaatgagcttttttctgagttaaatacaaaacaattaatctcttttatggttcaggtttctagaaaaataatagtgctgttagtcttaattattggatgttgtgtgcctttactggttgcaattttattcactcrtatcgaattgggcttgcagtttttattctgtgttgccccctttcattagaaacactatgactaaggtttaactaaagtagcttcaggctgcaccagcaaagttgaattgactttgcacagcttgacttcttcaagtctttggataattagctatgaacagctagttcctggggcttgtggtccatcaggctatttttaaaggtgcttatgtttcaaaggaaaacaccatggggtatagcccatgcattgccttctaccattttgtgtttccccagattttt

SEQ ID NO: 664715 - DNA, 646 bp, Homo sapiens
gagtttcaccctgttctgttgcccaggctgttcgcaaattcctgagctcaggcaatccacccacctgtctcccaaagtgctgggattacaggcatgagccactgtgcctggccaaaaatatttttaatgaacatttaatttgttttctgctcaatttttaaaatagcatcctttctgtattagcaaaaggtaacatctgtttgagtaagttgtaagcatgagtcccaatcaaatgagcttttttctgagttaaatacaaaacaattaatctcttttatggttcaggtttctagaaaaataatagtgctgttagtcttaattattggatgttgtgtgcctttactggttgcaattttattcactcgtatcgaattgggcttgcagtttttattctgtgttgccccctttcattagaaacactatgactaaggtttaactaaagtagcttcaggctgcaccagcaaagttgaattgactytgcacagcttgacttcttcaagtctttggataattagctatgaacagctagttcctggggcttgtggtccatcaggctatttttaaaggtgcttatgtttcaaaggaaaacaccatggggtatagcccatgcattgccttctaccattttgtgtttccccagattttt

SEQ ID NO: 664716 - DNA, 473 bp, Homo sapiens
agcctgtgaataactatcacaggaggcagggaaattgctgcataccaagtagaaaacacataaagaggcacagggtcagcttgcaacaaccgcacgttcatttgtgagtgaagaaatccagggaaatttgtcagtgccttgtaatattttacaaaaatcatcacttgatggcatggaagatacaaaaatcaaatagaatcttatttctccatcatgatgtgttccacataatttgactcatcagctggctgaagrttactatcttgttataaaactttaaataattagcattttctaaaacatattttctaaattctattggtctttctcctgctttcttaaacagaatttacagaattagaacctaccatgaaattctccagaacaagaacttaagctagactatgctcagaggaaagactctttcttctactgaatcttaaggcgttaagtagccagtattcctgaagtac

SEQ ID NO: 664717 - DNA, 563 bp, Homo sapiens
tcagctggctgaaggttactatcttgttataaaactttaaataattagcattttctaaaacatattttctaaattctattggtctttctcctgctttcttaaacagaatttacagaattagaacctaccatgaaattctccagaacaagaacttaagctagactatgctcagaggaaagactctttcttctactgaatcttaaggmgttaagtagccagtattcctgaagtactgttggtgtggccggccctgtatacatgcaaagctctttaacaagttgggtggaacatgccttagcgatccattgtttgcagtggtcttctttaggccatagcagcctgtcttgccattctgcacatgcaagtctgcatactcatttttgttgaggtctcccacaggggcttatctcgatctcctacttggcctctttccatcccagatttttaccttgttggtttcccttattcatagctcctttaagctgatcatgtttaccccttgtctccttggctaacttcctgactttgacacagtaatcttaccttaacctctctatgaattg

SEQ ID NO: 664718 - DNA, 533 bp, Homo sapiens
ggataaccaccatccaagtttgcaccaacccagtagaaagttatcagtacctaagaggcccttcatgcccctacataatcactagtccctctatctcccctacaggtcattaatatcttaatttgtagcaccctatatggtatttgcctggattcaagctgtatataaactgggttcgcatataatacacattatattgttttggcaatttttactcacattataattgtgatttttttttttttaagatggagttttcactctagtcatccaggctggagtgcagtggtgcgatcttggcttactgcaacctcyaactcccaggttcaagcgattctcctgcctcagcctcctgagtagctgggattacaggtgcataccaccacacctggccaatttttgtatttttagtagagttcgggtttcatcatgttggtcaggctggtctcaaactcctgacctcaagtgatttgcctgcctcagcctcccaaagtgctgggataacaggtgtagccactgcaccagcctaatta

SEQ ID NO: 664719 - DNA, 533 bp, Homo sapiens
ggataaccaccatccaagtttgcaccaacccagtagaaagttatcagtacctaagaggcccttcatgcccctacataatcactagtccctctatctcccctacaggtcattaatatcttaatttgtagcaccctatatggtatttgcctggattcaagctgtatataaactgggttcgcatataatacacattatattgttttggcaatttttactcacattataattgtgatttttttttttttaagatggagttttcactctagtcatccaggctggagtgcagtggtgcgatcttggcttactgcaacctctaactcccaggttcaagcgattctcctgcctcagcctcctgagtagctgggattacaggtgcataccaccacrcctggccaatttttgtatttttagtagagttcgggtttcatcatgttggtcaggctggtctcaaactcctgacctcaagtgatttgcctgcctcagcctcccaaagtgctgggataacaggtgtagccactgcaccagcctaatta

SEQ ID NO: 664720 - DNA, 469 bp, Homo sapiens
  misc_feature 157: n = A,T,C or G
atatcattttacttatatgtaattaacctggaaaggttgaacttctcttttgatttttctagctcttctcatatggttggtttgatgagcaggacagcccttgcaatgatgttgagtaaattataaacattgaaaatgtcaaacttacctaattatntctacccttctcattttttaaagcgaatgagttatttttggcattgcccaagaacaacctgggaacccaaagataggtgaggtgcaaatgatattctgttactgtgaatttggaggctgaatttgaaaactgtaatatcaaatagaattgtcaaagcagaaaaagcatgaacataagttckaggcatataaaggcaaaaagtttgaagtaatattcaaacatagaaccaagtggcaaagatttttaggatcctttgctttttcaagagtgacttctcaaaaaaaaaatcaggaatatgcacaaaagtcacaa

SEQ ID NO: 664721 - DNA, 469 bp, Homo sapiens
  misc_feature 157: n = A,T,C or G
atatcattttacttatatgtaattaacctggaaaggttgaacttctcttttgatttttctagctcttctcatatggttggtttgatgagcaggacagcccttgcaatgatgttgagtaaattataaacattgaaaatgtcaaacttacctaattatntctacccttctcattttttaaagcgaatgagttatttttggcattgcccaagaacaacctgggaacccaaagataggtgaggtgcaaatgatattctgttactgtgaatttggaggctgaatttgaaaactgtaatatcaaatagaattgtcaaagcagaaaaagcatgaacataagttcgaggyatataaaggcaaaaagtttgaagtaatattcaaacatagaaccaagtggcaaagatttttaggatcctttgctttttcaagagtgacttctcaaaaaaaaaatcaggaatatgcacaaaagtcacaa

SEQ ID NO: 664722 - DNA, 551 bp, Homo sapiens
ctcttgctaaccttcaggctctgacgaaagctaaaagtaaaaagtaaaggcaaaatttcaagctgcttacctaagcattgaaggcctatccaaactgtatatagaagctctcagcaaaggctgggaaatttatagtttcaaaacatgtaaggacatgtctgaccaatcattcactgaccactgaccaaagactttagtggctacatgtgacaaaaaacacagactttatggaagtagttcaggaaattcactaaacaaatagcaatgacaaaaacaaacatcaataacaaaaactatatatattgtggaaataatctgactttmataattatcacattatattatttaaaatatctagtttttaacaaaaaattataagacttttttaaaaacagtaaaatatagccccaacacaagaaaaatctcaggcaatagaaattgttgctgaggaagcctacattaggcataactagacaaggacattaagtcaattattttaaaacatgttccaagaactaaagaaaataatgcctaaagaaatataaaaaaag

SEQ ID NO: 664723 - DNA, 574 bp, Homo sapiens
gatttatatctggattatttacaaactaactggttgtcattattttcttctggaaaaagattgcttctgaggtatttttgcttgaattgtgttaactctctgatcaggtaaagcttcatgttttctcatctcaatccttaataacrtgttttacagtcagacataaaatgttgactttgcagtagaacctgcatcatactaaagtccctctacctaacatgcccgggaaatttagagtgtactattggggggaaaaaatgaaaaaaaaaattcttttagaattatttatcgtgatgttcatctcagagtaaaatacagcttacatgttatttatttctgcacaaaacataagttgtatttttctgtacccaaatgcatgaattattagcaagctgggaactggatcattgttaagatattgcagatgaacctaataatcttgtttcaaacgccaaaccccattataaacagatgtactggagctattttctagtgtttggctcatttgtataatggcaaacggggcttcccctgacaatccagtttcatctcagtaatttttattcaaccacgt

SEQ ID NO: 664724 - DNA, 574 bp, Homo sapiens
gatttatatctggattatttacaaactaactggttgtcattattttcttctggaaaaagattgcttctgaggtatttttgcttgaattgtgttaactctctgatcaggtaaagcttcatgttttctcatctcaatccttaataacatgttttacagtcagacataaaatgttgactttgcagtagaacctgcatcrtactaaagtccctctacctaacatgcccgggaaatttagagtgtactattggggggaaaaaatgaaaaaaaaaattcttttagaattatttatcgtgatgttcatctcagagtaaaatacagcttacatgttatttatttctgcacaaaacataagttgtatttttctgtacccaaatgcatgaattattagcaagctgggaactggatcattgttaagatattgcagatgaacctaataatcttgtttcaaacgccaaaccccattataaacagatgtactggagctattttctagtgtttggctcatttgtataatggcaaacggggcttcccctgacaatccagtttcatctcagtaatttttattcaaccacgt

SEQ ID NO: 664725 - DNA, 576 bp, Homo sapiens
tcagtcagtttaaccaaatcagaagtcaacaaactatagcctgaggcctaatcctgtttcgtgaataaagttttattgcaacacggccatgcctacttgtttacatattatctatggctgcttttgtggatttgcatcattatagctgtctagcatgaaaagcctaaaatatttactatctggcactttactccaaatgtttactgatccctgaactataagataaattatggaaaaggcatcggattacctggaaaagtcacatgaagataataattgagctcttgataattaattaatgctttttaagcaatggaggcccattgcaaggtgcagagaagtagatggtgtgattagaactgagccttactaatactagtttggtgaaagtacataaaatgcattggagggaggaggcrcttaaccataaactccaacgtggagaataataaccaaggagcttgtgacacatgcagatttccagccctgcctcagacatgctaatacatcagagatcagggcattctcacactgcttgttcttaaagtccagacttttagaaaggttgaactaaat

SEQ ID NO: 664726 - DNA, 618 bp, Homo sapiens
caggcttgtttagcacgtagaaaaccccaatcaggacacttcactgatatatacgtctgcattgatttttgtgtttttcttaaatgcttatttctgatgaaatctgtcctattggctccactcctgggatagaagctgagctctgcattcttcccagcagctcagggtgaaataaacgcttgtctaatgctgtatggctcaatgcccctgtgtcatatctatgcatgccataaaagcagtgataaacatgatatatttttatgactctgaatgctctatgtgtcaataaaatattttttaaactggatgaaggctgcagtgaacctgcctccctgctgaagcactgagtcccagtatcccgggcttgattctgcccggatggcagaatcatcaatcgtctgtgatgaaattaggtgtctagtgcttgyggcatatgcaatgctttagtcctaatggcctaagagtttttttctctgatacacattgagaagcgtttcccttgcttcttgtaggggaaatggatcacagctataatcgaccagatgagctaaatgacctttccttatttgaaatgccctgggattttacgagaggaaaagatccatatatgcaagagaa

SEQ ID NO: 664727 - DNA, 581 bp, Homo sapiens
gcaatgaattgactaaaaacactgattttccagaataatccttagggttgaggaaaaaatgtttttcttcaggttccttctcctcttctgtctctcactggtcagattggtccrtgtagctttaacttcctgcaaatactccctggctcttctgggcacttcctagggactccagatgccgcaacagtagcagaaactacagcatgaaccatactttggggtgagcaagccagtggacatgagccagcaatcatcccaatctgcaggatctaactgcaaccacccaggcttaacgaggcaagccagtgtttgcacatagatgcaagaaaatctcaaagtatcaagacctggcaaggagggaaactcttattctgtgttggtgggattggtataactactatggagattgtaactactgtgaaaaacaatttttcatcattttgttaagttgaacatttgtatatgtcttgaccctgtttgcaaatgtaaaattacttgtttttaaacagccagaacaatgacaaagattgctcataagagaagttttcacaacagcaaaataacggaaacaattcatgatg

SEQ ID NO: 664728 - DNA, 581 bp, Homo sapiens
gcaatgaattgactaaaaacactgattttccagaataatccttagggttgaggaaaaaatgtttttcttcaggttccttctcctcttctgtctctcactggtcagattggtccgtgwagctttaacttcctgcaaatactccctggctcttctgggcacttcctagggactccagatgccgcaacagtagcagaaactacagcatgaaccatactttggggtgagcaagccagtggacatgagccagcaatcatcccaatctgcaggatctaactgcaaccacccaggcttaacgaggcaagccagtgtttgcacatagatgcaagaaaatctcaaagtatcaagacctggcaaggagggaaactcttattctgtgttggtgggattggtataactactatggagattgtaactactgtgaaaaacaatttttcatcattttgttaagttgaacatttgtatatgtcttgaccctgtttgcaaatgtaaaattacttgtttttaaacagccagaacaatgacaaagattgctcataagagaagttttcacaacagcaaaataacggaaacaattcatgatg

SEQ ID NO: 664729 - DNA, 527 bp, Homo sapiens
cgaaaaagaagagttatgatccttgatccttctggtctctataatctagaaaatatttttctggatcaattcatggcattacctctataccttgacttcttcattactgcaagcccaggggcaataaataggaagctgcctctcccatgctggcccctcacattatgckctatagatattcttaaggggccaatctgtggtctcaaaatgcactttattactgacaaatacttgcactattgtcatgtctctgtaatatatgaatccgagcaatctcttaaattgaagatcaaactgagtttgaccaataattgtataaatgtcactaacgtttttattttctttgaggttttattttagttgattgttctttcaagaagctgaaatgatttaatgtcaagttcacatggcttttcaaaaggaagatagaagattatattcttccactcacaaccccaagttttttaacatgattcacatgttaaatttccggtctgatatcaactgtaaactatataggttctgct

SEQ ID NO: 664730 - DNA, 527 bp, Homo sapiens
aatttatgtagaaaggcacaggcccaagaatagctaaaacaaccttgaaaaagaagaacaaagtgggaggaatcactccactcaatattaaacctaaccatgtagctagagtgatccagacagtgtgatatagtctgaggaacggctacattgaccaatggaacagactagagacccagaaatcagcccatacaaatatgcccagtgattttggtcaaaggtgcaaacacaattcagtggaaggggaattgccttcttgacagacggtgctgcagcaattggatggccagaggcagaagaaaacttcacagcttaatcaaagaccaactcaaaatgtgttatggacataaatgtaaacatgagaaactgtaaagcttttgggggggagaaaaaaagaaagagartatcttcaggacccaggactaggcaaagagttcttagatttaatgcaaaagtataatatataaaagaaaaattgagaaattatacttcatcaaaattataatcttttgcttcatgaaagaccc

SEQ ID NO: 664731 - DNA, 479 bp, Homo sapiens
tatgtttgctacaatgtgttcatccttctataaagctgtaagcttctacatcttgttgccattagttcatcatagtaagtgctccgtcagtattctgtaatccctgaatgaataaccaaaggataagcatgaatacattgcatggcctttacctcaagggagtgagattaataggcagaagcaacacctgtacaggtaatgacagggtgatgaagccatgtgagaagtgtatacagactttgagacttggagtctgtacaggagagaaaaatcctggttcacactaataagtagttgcaaatggtaacaagttgtttggggtttcagcaactcacctaatatgcttragatccttttttttttttcttagaaaaccccagcacaattatttatgaaactttttaattaaatggacttcttaaaagaagtgaggcatttttgtttcaaatttgagtcactaaagttatttaacaccccaa

SEQ ID NO: 664732 - DNA, 629 bp, Homo sapiens
ttttattttaattttttttgatggagtctcactctgtcgcccaggctggaatgcagtggagtgatctcagcccactgcaacctccacctcttgggttcaagcaattcttctgcctcagcctcccgagtagctgggactacaggctcacaccaccaygcttggctaattttcgtatttttagtagagacagggtttcaccatattggccaggttggacttgaactcctgacctcatgatctgcccacctcagcttcccaaaatgttgagattacagtcatgagccaccacgcccagcctgttctcactttggtaataagaacatacttgagactgggtaatttataaaggaaagagatttaattgattcacagttccacatggctggagaggcctcacaatcatggcagaaggtgaaagagaaggaaagtcctgtcttccatggtggcaggcaagagagtgtgtgcaggggaaacactatttatgaaaccatcagatctcataagacatattcactatcatgagaacagcatggaaaagacccacttccattattcaattacctccaactgggcccctcccatgacacgtgggaattacaggagctaccattcgagatgagatttgggtg

SEQ ID NO: 664733 - DNA, 629 bp, Homo sapiens
ttttattttaattttttttgatggagtctcactctgtcgcccaggctggaatgcagtggagtgatctcagcccactgcaacctccacctcttgggttcaagcaattcttctgcctcagcctcccgagtagctgggactacaggctcacaccaccatgcttggctaattttygtatttttagtagagacagggtttcaccatattggccaggttggacttgaactcctgacctcatgatctgcccacctcagcttcccaaaatgttgagattacagtcatgagccaccacgcccagcctgttctcactttggtaataagaacatacttgagactgggtaatttataaaggaaagagatttaattgattcacagttccacatggctggagaggcctcacaatcatggcagaaggtgaaagagaaggaaagtcctgtcttccatggtggcaggcaagagagtgtgtgcaggggaaacactatttatgaaaccatcagatctcataagacatattcactatcatgagaacagcatggaaaagacccacttccattattcaattacctccaactgggcccctcccatgacacgtgggaattacaggagctaccattcgagatgagatttgggtg

SEQ ID NO: 664734 - DNA, 629 bp, Homo sapiens
ttttattttaattttttttgatggagtctcactctgtcgcccaggctggaatgcagtggagtgatctcagcccactgcaacctccacctcttgggttcaagcaattcttctgcctcagcctcccgagtagctgggactacaggctcacaccaccatgcttggctaattttcgtatttttagtagagacrgggtttcaccatattggccaggttggacttgaactcctgacctcatgatctgcccacctcagcttcccaaaatgttgagattacagtcatgagccaccacgcccagcctgttctcactttggtaataagaacatacttgagactgggtaatttataaaggaaagagatttaattgattcacagttccacatggctggagaggcctcacaatcatggcagaaggtgaaagagaaggaaagtcctgtcttccatggtggcaggcaagagagtgtgtgcaggggaaacactatttatgaaaccatcagatctcataagacatattcactatcatgagaacagcatggaaaagacccacttccattattcaattacctccaactgggcccctcccatgacacgtgggaattacaggagctaccattcgagatgagatttgggtg

SEQ ID NO: 664735 - DNA, 547 bp, Homo sapiens
aataagggatttaagaagattttcttaaagagcactcagcttaattaaaagtggatatccaagttataagtctatttaaaaggcctttttgtttttctcttcttagatcttgttttgctggaaaaaaaaawtttttttttctcagtagactaaattatttttctccatttggccttgcaactcttcatgcatgcatgagaggccctaagataatttctgatggcctgggactcccttggaagaaagaacaggagccatgaattacattttgggagaaacttctgttttcctcatggaaccccaggaattaagagcagataggtacctctcaaaatctgtttttgtcttccagctatacctgtttattaggccctagaaactgcatgctttgctagccctgctcttactgggtcccactcagaggccagtagtccaattaggagattggaaaccagaaaatcttataactactgtatctgcttctgtttgtatgtgtggttatatatgtgctgtgtgtggtgtctataataaaagagagctctaataa

SEQ ID NO: 664736 - DNA, 547 bp, Homo sapiens
aataagggatttaagaagattttcttaaagagcactcagcttaattaaaagtggatatccaagttataagtctatttaaaaggcctttttgtttttctcttcttagatcttgttttgctggaaaaaaaaaatttttttttctcagtagactaaattatttttctccatttggccttgcmactcttcatgcatgcatgagaggccctaagataatttctgatggcctgggactcccttggaagaaagaacaggagccatgaattacattttgggagaaacttctgttttcctcatggaaccccaggaattaagagcagataggtacctctcaaaatctgtttttgtcttccagctatacctgtttattaggccctagaaactgcatgctttgctagccctgctcttactgggtcccactcagaggccagtagtccaattaggagattggaaaccagaaaatcttataactactgtatctgcttctgtttgtatgtgtggttatatatgtgctgtgtgtggtgtctataataaaagagagctctaataa

SEQ ID NO: 664737 - DNA, 494 bp, Homo sapiens
cctcctaaccagtggtaagtaaagaatgttactttctaccaggcccaggaacccaatattcttaggacctcttgaaaagaggagtttacccaactctcatgtatttgagggtacaaaaccatggctaggctcagctttagaaagtctgatctgagattcattgtggaaaagaattccatcaaagccaatataagaagcctatgtaagaataattattcttcctgcactttatgcaaataattaggcgaagtataagactaaagtctattttgcaaacaactcagtcttatcatgattggtttttaacaaaaatgagaaccggagagagacaaattatgttttaaaaattatayatttgtcactgaattttagacttatgagttgcttttaagtttcttgcctacacctcaaactaaccctgcttattcctgtgaaccaagcatcaatctttagctgcatctcaaaaggaacaaaagggatgggtgatgtaaaaa

SEQ ID NO: 664738 - DNA, 597 bp, Homo sapiens
actgcccaattttgttctgtttttgtcaataaccctgacaacaaaacctgaaaggaacatgaaataagggataaggatccaagattaaaggtcaagctcagtaaaaattctaaacaaaatattgtcaaactaaatctggcaatgtataaaaggaataacaacacacacacacaaacacacatgaataacacatcaaaacaaaattagatttttgcattaaaagtttgcttcaaatttagacaaataaaagcaaagtaacaaaaataggacaaagattaaatattccaaataactgtgttaacaaatgcagggaaaacatctcatttcacatataattatgattaaaaccattaagataataggaatcagaaagaaagtcattcatctcattaaggatgtctgtaaaatgtcaatagcaaatttttatttaaggtraaatagtcaaagactattcattattaacactactgctcatcacactgcagattttaattagtataatgaggcaagaaaaacaaattaaggaaattaaagtttgaaaaaaaaatcacaattaaccaatgacatacatgacttttaccttaaaaagttcaaaaa

SEQ ID NO: 664739 - DNA, 642 bp, Homo sapiens
atgaggcaagaaaaacaaattaaggaaattaaagtttgaaaaaaaaatcacaattaaccaatgacatacatgacttttaccttaaaaagttcaaaaatacagaagacattagggataatatgtgatttttaacttgttttctgaatttgtgttaaatatttaaaaatttatttgtgtgtacagataattttaatagataaaaataagttagcatttgcaatattatsaaaaatacagaattcccagtaacaaatcaaacaaaatttaaaatacctctacacaaaaactagttttacaaaactagaagataacatcaaaaaacctcttctggacataggcttaggcaaagaatttattgctaagacctcccaaaagacgtaacaaaaaaaaataaataaaggcaacttaattaaactaaaacatctctgcacagcaaaagaaataatcagcagagtaaacagataacctacagaatgggataaagtatttgcaaactatgcatgtaacaatgaactaatatctagaatctacaagtaactcaaagacatcagcaagtaaaaaacaaataatcccatcaaagagtaagtaaagggcatgaatagatatttctcaagaaaagatagtaaaacagccaataaacat

SEQ ID NO: 664740 - DNA, 642 bp, Homo sapiens
atgaggcaagaaaaacaaattaaggaaattaaagtttgaaaaaaaaatcacaattaaccaatgacatacatgacttttaccttaaaaagttcaaaaatacagaagacattagggataatatgtgatttttaacttgttttctgaatttgtgttaaatatttaaaaatttatttgtgtgtacagataattttaatagataaaaataagttagcatttgcaatattatgaaaaatacagaattcccagtaacaaatcaaacaaaatttaaaatacctctacacaaaaactagttttacaaaactagaagataacatcaaaaaacctcttctggacataggcttaggcaaagaatttattgctaagacctcccaaaagacgtaacaaaaaaaaataaataaaggcaacttaattaaactaaaacatctctgcacagcaaaagaaataatcarcagagtaaacagataacctacagaatgggataaagtatttgcaaactatgcatgtaacaatgaactaatatctagaatctacaagtaactcaaagacatcagcaagtaaaaaacaaataatcccatcaaagagtaagtaaagggcatgaatagatatttctcaagaaaagatagtaaaacagccaataaacat

SEQ ID NO: 664741 - DNA, 594 bp, Homo sapiens
taattataaattaaagttcaaattttcagataattattagcttagtaaaaatgcactatttatttgaaatctctcttgtaaatttaaagtatttaataagaatctaaacttaagttttgtaatgacaggactgcttcaagcctgttgcatttttcagttataatggaatacattcaaatgctacttagcatattaaatggcagatcactttgctatatatttagtgttatccaaggttgagaagacattttgtaaatatttaaaaattagaaacaagggactggtgtgctaattccttttcttctctactttatgccttaataattcatgttcttgactctttaaattggtttgtcctcataagtttgttatgaggagaaaagaaggagatagttttgctgataaaaatgatagcacttcctttcaacttagttaagctgcattagccagagaggctaaggccggaagtcctaaactgaatgawgaacaagtgagctcagaggaaaggcagcccactaagatattccctgtgtatagaatgctaactagaggcatgttcagcctaaatctatcatttctgtctgagactcttgc

SEQ ID NO: 664742 - DNA, 594 bp, Homo sapiens
taattataaattaaagttcaaattttcagataattattagcttagtaaaaatgcactatttatttgaaatctctcttgtaaatttaaagtatttaataagaatctaaacttaagttttgtaatgacaggactgcttcaagcctgttgcatttttcagttataatggaatacattcaaatgctacttagcatattaaatggcagatcactttgctatatatttagtgttatccaaggttgagaagacattttgtaaatatttaaaaattagaaacaagggactggtgtgctaattccttttcttctctactttatgccttaataattcatgttcttgactctttaaattggtttgtcctcataagtttgttatgaggagaaaagaaggagatagttttgctgataaaaatgatagcacttcctttcaacttagttaagctgcattagccagagaggctaaggccggaagtcctaaactgaatgaagaacaagtgagctcagaggaaaggcagcccactaagatattccctgtgtrtagaatgctaactagaggcatgttcagcctaaatctatcatttctgtctgagactcttgc

SEQ ID NO: 664743 - DNA, 549 bp, Homo sapiens
tgcaaattaatcaaatatcaaatgtaaataactttaaacctagagaagcaaaakaataatccgatatttaataaccaaacgagattttcctaaaataaatattgaattagctaaataaattgtggaaacttaaagcttctgtcattgaaatgttatagaaataaaatagtttcctaagtatttttactataatgaactccttttcccattggctgatggctctagggcattgcacaacaacctgtgaaaatgttgatttagataatcattaattattttgaggatcatatattaatataaaatcagttgtttattttttgatgtctttatgttctgtagtcatttgcaaattgtagtgtggattctcatgatggttttactgatggaggaaataaggagcatatgtggttatcatagtctctaaggctctcactgagcttgccctttcctctctctcatcacgttttctgcgaccactgtcatttctcactgcactaaaggctttttcacctctttgtagatctgcattcagaaaacaaaaggattttt

SEQ ID NO: 664744 - DNA, 417 bp, Homo sapiens
aacacctcctaccaggccccatgtccaacatwgaggattacatttcaacatgagattcggtgggaacacagatccaaaccatattaccaatctatttatttttatgtaaatattatttttaagtattgttaacaaatcctgttgtcatatacaatgaatggtgatgtaacatgccaattttaaaaatgtataaaataattatatggaaagatagaatattgtggaacattgtatattttgaataatattttgaactttaaaattttttctaattaaattcatcgaaataaaactgatttgtgaaaatattttccatgtcaagacttctgcaaatttcgcttacctaattgagaatatataaatcatattttaccatctaatttagtaaataatacagtgcagtagcaacagatttcc

SEQ ID NO: 664745 - DNA, 605 bp, Homo sapiens
ttttaattcaatttttatttttcaaaaaatggattataattttatttccaaattaaatttttaaaggccttctattcttagggcaattttaggttcacagcaaaattgagaaggtacagagatttctcatacacttctgcccctatatatttataayctcccccattattaacaccctccaccagaatggtacatcagctacaactgatgaaactatcttgacgcacattctcacccaaagtccatagtttacatgtgagttaatattagtgtcatacattctacaatttggacaaatttataaagacccacattcaccattgtagtatcatacagagtagtttcattgctctaatattcttctctgctgtgactattcatccttctcttcctgcctcctagtacctggcaaccactgatctttttactgtcttcatagctttgcctttttaggaatttcgtatagttgttatcttacactatgtagccttaagattcccttattttacttagtaagatttcatttacatttcctccatgtcacttcatggcttggtagaactcatttatttttaacactgactaatattccattctctggatgt

SEQ ID NO: 664746 - DNA, 605 bp, Homo sapiens
ttttaattcaatttttatttttcaaaaaatggattataattttatttccaaattaaatttttaaaggccttctattcttagggcaattttaggttcacagcaaaattgagaaggtacagagatttctcatacacttctgcccctatatatttataatctcccccattattaacaccctccaccagaatggtacatcagctacaactgatgaaactatcttgacgcacattctcacccaaagtccatagtttacatgtgagttaatattagtgtcatacattctacaatttggacaaatttataaagacccacattcaccattgtagtatcatacagagtagtttcattgctctaatattcttctctgctgtgactattcatccttctcttcctgcctcctagtacctggcaaccactgatctttttactgtcttcatagctttgcctttttaggaatttcrtatagttgttatcttacactatgtagccttaagattcccttattttacttagtaagatttcatttacatttcctccatgtcacttcatggcttggtagaactcatttatttttaacactgactaatattccattctctggatgt

SEQ ID NO: 664747 - DNA, 602 bp, Homo sapiens
aaatggtttgtgattgctaatttgatatataaccttaactgagctaaggatggatagatggttgataaaactttgtttctgcatgtgtctgtgagggtgtttcttgaagagattagcactgaatcagtaggctgactaataaattctactgtcaccaaggtaggcagacattatccaatccaccgagggtatgaataggacaaaaaggcagggacagggcaaattctctctctctcttttcttgagctgggacatttatcttctgcttccatgaacattggagctcctggttcatggatcttcagactctggactcacaacattggccccaattgttctcaggcttttggacttcgatcttacaacactggctttcctggttctctagcttgcagaaggcaaatggtgaaacttctcagcctccataatcatgtgagccaattcatgtgataaagagagaggaatatatatatatatacacacacacacacacatatatacacacatgtagatgaatatacatacacacatacaggtgcatatatatacacatgtgtgtgtakatatgtatatacacatgtatatatgcatacatgtatatg

SEQ ID NO: 664748 - DNA, 563 bp, Homo sapiens
gtatgtaagaaaaaaaaatgtaactggtatgtaagaaaaaaaaatgtactgggacatttgttaagaacagcaaggaaaactttcttcaagactattgcaataggggagaaagattgaattcaactttgctgaaacaaaacttcaatgctgggatgaactaatgaaaaattcctgaagcatgttttgaggaggttggtcaatatgattaggccatttaggccgtctctgtttgctgattgtcacttgtaaaagttatattcctgactttccacagaggctgggaaacagaggatccctctttcttgattattagatttcaaagtgatgacttccatgtctttgagaaagatattcctgtgttgtagaagatttacatcttaaaggtcagaagaagaatgtcctattgtaagttttataaagtaaatactctaasaaaagagacatcagggtcctatagtcaggaagaaacttatctaaagtttattcaagctgagaacaacattaaaactgccttggtcaagtaggacctttgtaatttagaaatctttttcttcacaaagcct

SEQ ID NO: 664749 - DNA, 563 bp, Homo sapiens
gtatgtaagaaaaaaaaatgtaactggtatgtaagaaaaaaaaatgtactgggacatttgttaagaacagcaaggaaaactttcttcaagactattgcaataggggagaaagattgaattcaactttgctgaaacaaaacttcaatgctgggatgaactaatgaaaaattcctgaagcatgttttgaggaggttggtcaatatgattaggccatttaggccgtctctgtttgctgattgtcacttgtaaaagttatattcctgactttccacagaggctgggaaacagaggatccctctttcttgattattagatttcaaagtgatgacttccatgtctttgagaaagatattcctgtgttgtagaagatttacatcttaaaggtcagaagaagaatgtcctattgtaagttttataaagtaaatactctaagaaaagagacatcagggtcctatagtcaggamgaaacttatctaaagtttattcaagctgagaacaacattaaaactgccttggtcaagtaggacctttgtaatttagaaatctttttcttcacaaagcct

SEQ ID NO: 664750 - DNA, 584 bp, Homo sapiens
taattattagttattgttaatctttactgtgcctaatttataaattaaactttatcacaagtatgtatgtatacaaagaaaacatagtatatatagttctttctgtactaaaagtttcaagcatccacttggaatttatcaccaataggtaaggaaggactactgcattctggctgcactaaataaactggtcatattagtctatacaaataagattaggaaggcgagtatgccatattatgtcacataatgatttcaacgtaaaacatgaatgacatttagagattaaacttctttggtttatttatatattagattcctatatttaacaatagtaactgagagccagcaatatgaaaataaactgtaattgtacaaacaaaaaatgtttttgaaatctctgccagaacatttaataatataggatgaaatttcttcacttctctttgggttygtttcagaagcaactagtttttctgattgttatttttgacttataattttcaaaataaacaataacttagggagaactactagacagatacaaatgtggaagtaaatcataattctatcttgaatattaa

SEQ ID NO: 664751 - DNA, 617 bp, Homo sapiens
acatcattacacacacaaatgaatggcaaaaacctggacataatgaatagatatattaaaaattaaaacagggaatggtgaatattaacaaaatgtgaagcaatgggaaatctcatacactagtggtaatactataaatgagcaaaatcctacaaagttgcaatgatgtaaactgattctacctgtttggaaaattgtattttctaaaactacgcatatcttagtactaaaacatttcatccctaaatatacatagctacaaaagtgtatacacatatyacgtaacacatatacaagaatgtttgtggcagcttgatttgtaatagctgcacattggaacccattcacgttttcatcaattgtaaaataaattgtgatatattcatagaataagtatactgtagctatgaggaaaataacaatgaatgaatctcaaaaataccatgtttgcaaaagatgcaaacacaagatacaaaagcatggtatatatacacaacacagtatgcttcttttttttttttttaaggaaatgctgttatttaaaacaaacaacatggatgaacctggaggacattataataaggcaaataaaccaagcacaaaaagacaaataccac

SEQ ID NO: 664752 - DNA, 617 bp, Homo sapiens
acatcattacacacacaaatgaatggcaaaaacctggacataatgaatagatatattaaaaattaaaacagggaatggtgaatattaacaaaatgtgaagcaatgggaaatctcatacactagtggtaatactataaatgagcaaaatcctacaaagttgcaatgatgtaaactgattctacctgtttggaaaattgtattttctaaaactacgcatatcttagtactaaaacatttcatccctaaatatacatagctacaaaagtgtatacacatatcacgtaacacatatacaagaatgtttgtggcagcttgatttgtaatagctgcacattggaacccattcacrttttcatcaattgtaaaataaattgtgatatattcatagaataagtatactgtagctatgaggaaaataacaatgaatgaatctcaaaaataccatgtttgcaaaagatgcaaacacaagatacaaaagcatggtatatatacacaacacagtatgcttcttttttttttttttaaggaaatgctgttatttaaaacaaacaacatggatgaacctggaggacattataataaggcaaataaaccaagcacaaaaagacaaataccac

SEQ ID NO: 664753 - DNA, 611 bp, Homo sapiens
ggaaatttggtccctcgggtgttctgaattataattatgtaaacaaatgtcattatattttaggagatcaaagatatttagagaaatgcattattagtgacttaaaaatataaaaataatagctactgtgatttaggattaaaaaattaaaaaatgaaaactcttaagttttgaaagtattgagaataatggaaattcattctagagtttatattataacaagaggaaaagaaaaagtgstatgaccttgaaacaagaaaattattggtgagacaggaaaaataatgaaatagaagagcagccagcatgtctcaggctcaatgtgaaatctagatgttgtaaattgtttcagtctgatgtataaactagcacaagagattcttgtaataaatatataagaaatcttaagtgtaaactgtcaaatagtctgttaggagtcaattaaaataggtttaataattactaaaataggtttaataattattaaaataggtttaataataggtttaataataattaattgaaaatattatttttccatataaataatttttattatggaagttcatatccaatgtggataattatgtgcttaactggatttccttttt

SEQ ID NO: 664754 - DNA, 533 bp, Homo sapiens
ataggtaggctaaaggttttattggattgggtaagattttgaaagagatgatgttttaatttactcgaagaacaaagaagattttttaaacaaagaaacaagaaaaaaaagcaggcagataagggtcacagtttctgattgttattaaaaacatgcactgaatgaaaagtttgagagatgtctaaggccctctggagattaaaaagaattataataaaagaaaacacaaacgtaagtgacttttgccctaccacataaaataaaatacactacatagcaacaaaacaggaggaaaataaccgcttccctggatatttcttttctcaaggttgcctaagatctttggtaggttgttgaagaaataatgaacttataamaaatacagttgacttcaattttaaatatttcaaggattttatttggcatttttttgaataatttttaacggaatttttttgcattccaatcagattttgaatacattttttgagtttgaacatcttatggtttttgagtctgaacttctggcataa

SEQ ID NO: 664755 - DNA, 560 bp, Homo sapiens
aagcttatgactttatttctaaggaatcagaacaagatcatgtgtgtggaaaaggaagccaaatacataacaataaatacaagtttagagtaacagttgaggagtagcattgaagcattcaactatttttccttggactgtttcttttttggggggaaatatgagcaaggtagatgatagatgtagtgtctcaaaggcatttcaaaatgattgtttaaaatacagcaaaattctggcatgttaacatgcatagtttgggaaagaggaagatgctgggtagctagaatttcagtgggaataaataaactaaaatatatatgggtaccagattgtagaagagcttggaatgcctttctaagatgtttatacagaggttagcaagtcttcagcaaatataagaagagcattgggcagaagcatactgaytctaggttttagaaaggtaattctaataagtgaaatttaaacaaaaatgcaagccctaattattttgttaaataataactctagcagagtcataagcttttatttttctaccatgagcatagataacagggaaa

SEQ ID NO: 664756 - DNA, 387 bp, Homo sapiens
ggcctgttgtggtggtagccacagagcgaggctcctctgactgcgtaaaggggagaaaagagtggtttgaatttcagatcagctgatatacaatagaacaccaggtagatttctaatgttttggggtccctggttcctcaatgacatctctggaccaacctggcacttagggaatttgccagcctgaagggaaggacgtaagtctgtctggctttaacatctgccggttgtagagcccttgggccttgagcaaacataggcagtagtsaggtaatggttacaatgggccttgggtgagaccctgtgctgtgctggctttaggtctgaccccagtgtagttccagtgatctaagctacaagtatatctgtgtcaccgtacccccagct

SEQ ID NO: 664757 - DNA, 599 bp, Homo sapiens
aatggaatgaaactagaagtcagtaacaggagtaattttggaaaatatataaatacatggaaattaaataacatgctcctgaataaacagtgggccaataaagaaattaagaagaaaattttaaaaatttataaaggaaatgataatgaaaacacaacatactatatctatgggatacagcaaaagaactaaaakaatattttatagatataagtgcctatatgattaaaaaaactgtaaatgaacgacctaatgatgcatcttaaagaacaacaacaacaacaacaacaacaaagcaagagcaaagcaaacccaaaattagtagaaaaaaagaaacaatgaagatcagaggtaaagtaaatgaaattgaaatgaaaaaaatatatacaaaagatcaacaatataaatgctgattttgaaaagacagagaaaattgacaaaatattagccaggactaagaagaaaagacagaagacccagaaaaataaaatctgagatgaataaggagacattacaactgataacagagattcaaagaatcattagtggctactatgataaactatgccaataaattagaaaatctagacaaaatgaat

SEQ ID NO: 664758 - DNA, 599 bp, Homo sapiens
aatggaatgaaactagaagtcagtaacaggagtaattttggaaaatatataaatacatggaaattaaataacatgctcctgaataaacagtgggccaataaagaaattaagaagaaaattttaaaaatttataaaggaaatgataatgaaaacacaacatactatatctatgggatacagcaaaagaactaaaataatattttatagatataagtgcctatatgattaaaaaaactktaaatgaacgacctaatgatgcatcttaaagaacaacaacaacaacaacaacaacaaagcaagagcaaagcaaacccaaaattagtagaaaaaaagaaacaatgaagatcagaggtaaagtaaatgaaattgaaatgaaaaaaatatatacaaaagatcaacaatataaatgctgattttgaaaagacagagaaaattgacaaaatattagccaggactaagaagaaaagacagaagacccagaaaaataaaatctgagatgaataaggagacattacaactgataacagagattcaaagaatcattagtggctactatgataaactatgccaataaattagaaaatctagacaaaatgaat

SEQ ID NO: 664759 - DNA, 628 bp, Homo sapiens
ttgtgcaactgtggttatggcctttaaaaacttctgaacgcatacttttcagaaggattcctatttaatttgctattcttaatacttgtttttggtataaagacatgcattctccaccaatccaccttcttcctgccaataacccctctctcactgtggtaatgggtagtaattatcctctgcttctcagagccaatcttcatctatcattctagcatgtgttcttacaacttttaaaagatgactagctacactgataatagaatacaatttattatcactcatagtaaacgtttaactctaaaaggagrattgatatttaccttactcagccttactggttcagaagcatgaacagatcctgcatgaacagatcctgcatcaacagctccttgtgttacaacatgtttctttctatggttctctttgtcaagagagacacttgaacagagatatgacattagttgttcagagaaacccttggcttattcaagttggaaggttaattcccttttaaatcccacataaaagaacgtttctaacattcaggtcctaagaagattgggagttgggtcactgctctatgtgtctttccatccacatttttattcctttttgaatgtgaaat

SEQ ID NO: 664760 - DNA, 561 bp, Homo sapiens
caacagctccttgtgttacaacatgtttctttctatggttctctttgtcaagagagacacttgaacagagatatgacattagttgttcagagaaacccttggcttattcaagttggaaggttaattcccttttaaatcccacataaaagaacgtttctaacattcaggtcctaagaagattgggagttgggtcactgctctatgtgtctttccatccacatttttattcctttttgaatgtgaaataatagtaaatgatataatcctaatttgactctatcatctttatttacgtaccattgagcatgggcaacaggamaaatgagtcagacacaattcagaattttctgctttgagtacttggatgatggatgttgctattaactggacatctttttttttttcaacttgtaaaatactcttaatttggtgtgatttgaggtggattttacaatcaattacattgagtgagacacttactaagcacaatgtgggcccaagctacacatagactttattacttggttggttaaacctaaacaaatagatttataatggttt

SEQ ID NO: 664761 - DNA, 514 bp, Homo sapiens
attatctacctaccccaaagtgcaatatcttttactatttgacatgacgttagaaccctaaatttccataaaataacttattggcccaattaaattgggtactcattttgacagagctttgcttttgaagctatagttgatgatagactttattctgtgaaaagtctactcagttttgtttacaaaaagaaagcttgttctctcttttgtcttatttgcagactgaaaaactattggattaaaaaagaaaatattcacatttctacttttcatcaagaggtaaaggattcatcttttcttctaggggttgtcatgatggaaagaacaattatggaataaagagttctatgaaatattaaatattatgaaaacctgatgtttakatgagtcaaagcatcactttcaattctatggtgtagcattgtattaaatgtgtacaactagccatatgagttatcatatggaaatcatgtttcatataatttaataatttccacacttccattttaaataa

SEQ ID NO: 664762 - DNA, 514 bp, Homo sapiens
attatctacctaccccaaagtgcaatatcttttactatttgacatgacgttagaaccctaaatttccataaaataacttattggcccaattaaattgggtactcattttgacagagctttgcttttgaagctatagttgatgatagactttattctgtgaaaagtctactcagttttgtttacaaaaagaaagcttgttctctcttttgtcttatttgcagactgaaaaactattggattaaaaaagaaaatattcacatttctacttttcatcaagaggtaaaggattcatcttttcttctaggggttgtcatgatggaaagaacaattatggaataaagagttctatgaaatattaaatattatgaaaacctgatgtttatatsagtcaaagcatcactttcaattctatggtgtagcattgtattaaatgtgtacaactagccatatgagttatcatatggaaatcatgtttcatataatttaataatttccacacttccattttaaataa

SEQ ID NO: 664763 - DNA, 615 bp, Homo sapiens
agatttcagattctttggcagcagatgccaagacaaaacatgaggtatgagatgtttgttgagaatcaacattatgaaaaaaaggaaaggaaaaaagattgctcagagacagaatgtgaacagacatgtaggccctccaaggcctcgaccaacccagtggtaaactctggagtgagtattgcccctgagtgttccatgctgggtaaaatgtacaggccattgtgtaactgccttgctcaatcacctgatgcagactgccctggtcagagtgtgaattccagggaagtgttctctgtagctaggaccctaaaggaaataatagctggaagctggctgctggctraattgccctcaactgagggctgaccaggaagtcctgggtggctcatgtctggtctattcctagtttgctgaacatttttttaaaaatgtgtgttgtagtttgtcaaatgctttttctatatacatcaaaatgcccatttaatatatttttctcaacctcttaatgtagtgaattacattaatttctgtattttgaaacaacctgcattccaacttgattatttgtgtcattctttatgtattgctggattttgttaattttttttaagaaat

SEQ ID NO: 664764 - DNA, 615 bp, Homo sapiens
agatttcagattctttggcagcagatgccaagacaaaacatgaggtatgagatgtttgttgagaatcaacattatgaaaaaaaggaaaggaaaaaagattgctcagagacagaatgtgaacagacatgtaggccctccaaggcctcgaccaacccagtggtaaactctggagtgagtattgcccctgagtgttccatgctgggtaaaatgtacaggccattgtgtaactgccttgctcaatcacctgatgcagactgccctggtcagagtgtgaattccagggaagtgttctctgtagctaggaccctaaaggaaataatagctggaagctggctgctggctgaattgccctcaactgagggctgaccaggaagtcctgggtggctcatgtctggtctattcctagtttgstgaacatttttttaaaaatgtgtgttgtagtttgtcaaatgctttttctatatacatcaaaatgcccatttaatatatttttctcaacctcttaatgtagtgaattacattaatttctgtattttgaaacaacctgcattccaacttgattatttgtgtcattctttatgtattgctggattttgttaattttttttaagaaat

SEQ ID NO: 664765 - DNA, 558 bp, Homo sapiens
ttttttttaagaaatgttgtctctatatawccataaatgatactgcttttacttccattatatttgtaatatccttttcaggttttgacataatgattatggtggcataaaacaatttctagatctaatttttaatatatatctttccccttaaaccaagtagactttagtttgagatacttggggtgccagcggcatggtctgaactttctcctctttcttaccagagcccaactccaaggttagggtaaataagggagccagagatattatataatttgttttctctcaatagtggtcttgatatatttggtgcatatgatttccttgaattttttagtttcagaccaacaagctccttaaatgctctaacattctaaaatgctgaagacattttagagatgggcaattctgtgtcctcggatccatttcttacatctgtgctccacgtcaggccacaggaattgttcgtttttctgtaacaaggtttcaggaaacaaatgttctattcttaatccatgtacgaggcatactctactatgcagccattcctcagtg

SEQ ID NO: 664766 - DNA, 558 bp, Homo sapiens
ttttttttaagaaatgttgtctctatatatycataaatgatactgcttttacttccattatatttgtaatatccttttcaggttttgacataatgattatggtggcataaaacaatttctagatctaatttttaatatatatctttccccttaaaccaagtagactttagtttgagatacttggggtgccagcggcatggtctgaactttctcctctttcttaccagagcccaactccaaggttagggtaaataagggagccagagatattatataatttgttttctctcaatagtggtcttgatatatttggtgcatatgatttccttgaattttttagtttcagaccaacaagctccttaaatgctctaacattctaaaatgctgaagacattttagagatgggcaattctgtgtcctcggatccatttcttacatctgtgctccacgtcaggccacaggaattgttcgtttttctgtaacaaggtttcaggaaacaaatgttctattcttaatccatgtacgaggcatactctactatgcagccattcctcagtg

SEQ ID NO: 664767 - DNA, 579 bp, Homo sapiens
tgttggattactttgagggaaacaataaaaacggcactgtaaacatgcttatgcatttgttttttttttgtctgccattraaagatgttgttaagttagtgtgctctgcctttggatgagctgaggagtccccaaagtgtacattatttttattttttcagctttatatcctagtggcaagttatggagaagagaaaaattcttaattagtgtgtgttacaataataagttgcagtttactaaatattttcatgttattttttcatgaaatcgtcacagaaatattgtatattagtgtcatcacgaatattattttgttacttaaactgaggaatcattgatgccgttgttattaataatgttctcttcgaagactagaagtgattttttttttttcagtgttaagtgcttctatataagagggcatgtatgatttatttggaaaatttaggctcctaggagtcttgctgtaaagcagtagtatacgatattttctatttcagttgcttccccaagagtcttataaattccattatctgatcattcagccatatggacaaatcaatttcctcccagaga

SEQ ID NO: 664768 - DNA, 579 bp, Homo sapiens
tgttggattactttgagggaaacaataaaaacggcactgtaaacatgcttatgcatttgttttttttttgtctgccattaaaagatgttgttaagttagtgtgctctgcctttggatgagctgaggagtccccaaagtgtacattatttttattttttcagctttatatcctagtggcaagttatggagaagagaaaaattcytaattagtgtgtgttacaataataagttgcagtttactaaatattttcatgttattttttcatgaaatcgtcacagaaatattgtatattagtgtcatcacgaatattattttgttacttaaactgaggaatcattgatgccgttgttattaataatgttctcttcgaagactagaagtgattttttttttttcagtgttaagtgcttctatataagagggcatgtatgatttatttggaaaatttaggctcctaggagtcttgctgtaaagcagtagtatacgatattttctatttcagttgcttccccaagagtcttataaattccattatctgatcattcagccatatggacaaatcaatttcctcccagaga

SEQ ID NO: 664769 - DNA, 576 bp, Homo sapiens
ccactgataaagaacgattacaaatattaatgaagcaaaaaaagtagaaaagtcagcaaaagaaaaaatacgtagagaaagcctaattatagaactaaaaatacaattaccaaaatgaaaacggcactaagtagctcaatgattggagatgacagaagaaagaatcggtgactttgaagacaattgaataaaaattacccaatctgacaacacagagaaaatagacagttacaaaatgaacagaatcttcmtgtaccaataggacaaaaagcaacatctagcttgcaaagcattggtgccccagagaaggaaaggagtgagtgccgaaaataaacataggacagaacatttcctaaatttggcaaaaggcttaaacctatagttttaagaagctgagaaaatcacaagcaggataaaccaaaataagtctctgtcaagagacatcataacaaacctctgaaaattagagacaaatatgtgtgtgtatttgtgtgtgtgtatagtcttaatatgcatattaagactagagagaagacatgcattatctaaaacagaatgtcaatttgaataacagaa

SEQ ID NO: 664770 - DNA, 576 bp, Homo sapiens
ccactgataaagaacgattacaaatattaatgaagcaaaaaaagtagaaaagtcagcaaaagaaaaaatacgtagagaaagcctaattatagaactaaaaatacaattaccaaaatgaaaacggcactaagtagctcaatgattggagatgacagaagaaagaatcggtgactttgaagacaattgaataaaaattacccaatctgacaacacagagaaaatagacagttacaaaatgaacagaatcttcctgtaccaataggacaaaaagcaacatctagcttgcaaagcattggtgccccagagaaggaaaggagtgagtgccgaaaataaacataggacagaacatttcctaaatttggcaaaaggcttaaacctatagttttaagaagctgagaaaatcacaagcaggataaaccaaaataagtctctgtcaagagacatcataacaaacctctgaaaatkagagacaaatatgtgtgtgtatttgtgtgtgtgtatagtcttaatatgcatattaagactagagagaagacatgcattatctaaaacagaatgtcaatttgaataacagaa

SEQ ID NO: 664771 - DNA, 590 bp, Homo sapiens
tatgttatatttgttgactgaacacaggcagcaataacagagtgctatagrtaatatgtgtcattcatattcaaatacctctcataaatgttatcttttagaaaatatgttattagccctcagaaataataaaggattacacatgaactctggatcccctcaacacagcttaataaaaagccactgtgctttttcttttaaaacagaaaaagaaacgtgtttggatatcaatgatcttcagtaactcatagaatagagcataggctgggcctgtgtaatggctcaggcctgtaatcccagctctttgggaggctgaggcaggaggatggcttgagcccaggagttcaagaccagctgggtcaacaaagtaagacctcgtctcaacaaaaaaattaaaaagttagccagatgtagtggtgtgtgcctgtggtcccatctactagggaggtgaggtaggaggatcgctcaggcctgcagtgagccgtgattgcactactgcactccagcttaggtgacagagacagcccctgtctcaaaaaaaaaaaagaatagaacattggctagtaatctaatcggtgctaaaggcattt

SEQ ID NO: 664772 - DNA, 590 bp, Homo sapiens
tatgttatatttgttgactgaacacaggcagcaataacagagtgctatagataatatgtgtcattcatattcaaatacctctcataaatgttatcttttagaaaatatgttattagccctcagaaataataaaggattacacatgaactctggatcccctcaacacagcttaataaaaagccactgtgctttttcttttaaaacagaaaaagaaacgtgtttggatatcaatgatcttcagtaactcatagaatagagcataggctgggcctgtgtaatggctcaggcctgtaatcccagctctttgggaggctgaggcaggaggatggcttgagcccaggagttcaagaccagctgggtcaacaaagtaagacctcgtctcaacaaaaaaattaaaaagttagccagatgtagtggtgtgtgcctgtggtcccatctactagggaggtgaggtaggaggatcgctcargcctgcagtgagccgtgattgcactactgcactccagcttaggtgacagagacagcccctgtctcaaaaaaaaaaaagaatagaacattggctagtaatctaatcggtgctaaaggcattt

SEQ ID NO: 664773 - DNA, 563 bp, Homo sapiens
aaacctttggatcctctcacaccttcaagggtcattaatgataaattggtaaatatacgcccccattttaagaacaacagatttttaaaaattgcatttcgctgatcaaactaggtgggcgctgcatactttggtaatcagataaggtgatggagtagtcacctttgagtgtagtggctgaaaatagagtaattattttaaaaatggctcattgaaaattctaactatgcatgttggtagctctgggtcttacactcaactgaagyctgattgtaaataacttcaattaactgatatgatgtctgtgttcttcctggatggccaaattcatttaaatgtgatgtgctgtgaaacacttgagggtgtttttttttttcttttaaggttataagatagaaccaaactcccttgaaagtaatttttaaaatcacttcacttgtaaacaaaagaaaaaataattttctgactgactttagtagttgaaatatctcctttttaaacttattactcataaattaaacactaattgtttaaagaaaaagaaaattccaaaatatttaaaa

SEQ ID NO: 664774 - DNA, 586 bp, Homo sapiens
aacctttggatcctctcacaccttcaagggtcattaatgataaattggtaaatatacgcccccattttaagaacaacagatttttaaaaattgcatttcgctgatcaaactaggtgggcgctgcatactttggtaatcagataaggtgatggagtagtcacctttgagtgtagtggctgaaaatagagtaattattttaaaaatggctcattgaaaattctaactatgcatgttggtagctctgggtcttacactcaactgaagtctgattgtaaataacttcaattaactgatatgatgtctgtgttcttcctggatggccaaattcatttaaatgtgatgtgctgtgaaacacttgagggtgtttttttttttcttttaaggttataagatagaaccaaactcccttgaaagtaatttttaaaatcacttcacttgtaaacaaaagaaaaaataattttctgactgactttagtagttgaaatawctcctttttaaacttattactcataaattaaacactaattgtttaaagaaaaagaaaattccaaaatatttaaaaataaagctaacctgaaggaagtat

SEQ ID NO: 664775 - DNA, 578 bp, Homo sapiens
catactccagaggcagagtagaatagttgtaacraagactatatggcctgcaaagcttaaaatattatcttatctttacaaaaaaagtttgctgaccgctccctggtgactatgatgacatcatgacatgttctgtgggtttcattgaatattgtgcattcctcataggaacagagaattattctgggtttggctatgttctctccaactccccaatctttgcaattgctgtgatcatagtcattttgcatcctgggggctgtcaatgtcctgtgctctgtggcagcagcagcagtgccttcggctctgggtctagttgaatagcctcttaatttttctgagtggtcccagaggtatactgctatcccagagtttctagaaactaccctatattttttcagttacttcctttttagattaaataaaccaaagtgattactttcaagtaagaattctggtacaaaaccaaactcacaagtaagtgaccaaaataggattatgaagatataaagttggtaaagtatttaagtggattaagtggatatacaaaaatgctgtgtcacatatgaaaaagccaa

SEQ ID NO: 664776 - DNA, 578 bp, Homo sapiens
catactccagaggcagagtagaatagttgtaacaaagactatatggcctgcaaagcttaaaatattatcttatctttacaaaaaaagtttgctgaccgctccctggtgactatgatgacatcatgacatgttctgtgggtttcattgaatattgtgcattcctcataggaacagagaattattctgggtttggctatgttctctccaactccccaatctttgcaattgctgtgatcatagtcrttttgcatcctgggggctgtcaatgtcctgtgctctgtggcagcagcagcagtgccttcggctctgggtctagttgaatagcctcttaatttttctgagtggtcccagaggtatactgctatcccagagtttctagaaactaccctatattttttcagttacttcctttttagattaaataaaccaaagtgattactttcaagtaagaattctggtacaaaaccaaactcacaagtaagtgaccaaaataggattatgaagatataaagttggtaaagtatttaagtggattaagtggatatacaaaaatgctgtgtcacatatgaaaaagccaa

SEQ ID NO: 664777 - DNA, 554 bp, Homo sapiens
aatcagccaactataggaaatttgagaatggcttttcaggcatgaaaagcataactatatgatatagtatagtatatgaatccaaaaattagtatttaaatatagtttttatttattgagagaggccaggacattagctgttcaggttgaagagataaacacattgagaaagtcagaccatcattgactttctgaattatttaagaggttgaactttatccattatggaagaggactttagaaggattttaatcaggataattaggtgagcagggctgtactttagaaaaaggcaaatatcctttgcaaagcttctgtctatatgaacaatttgattgaacagaatttytggtaagacatagttatttaaaataaaggagcgaaaatagatacttatgattgtgaggggaggcctcataatcatggtggaaggcaaggaggagcaagtcacatcttacatggatggcagcaggcaaagagacagcttgttcagggaaactccccttttaaaaaccatcagatctcatgagacttattcacgatcacaagaacag

SEQ ID NO: 664778 - DNA, 554 bp, Homo sapiens
aatcagccaactataggaaatttgagaatggcttttcaggcatgaaaagcataactatatgatatagtatagtatatgaatccaaaaattagtatttaaatatagtttttatttattgagagaggccaggacattagctgttcaggttgaagagataaacacattgagaaagtcagaccatcattgactttctgaattatttaagaggttgaactttatccattatggaagaggactttagaaggattttaatcaggataattaggtgagcagggctgtactttagaaaaaggcaaatatcctttgcaaagcttctgtctatatgaacaatttgattgaacagaatttctggtaagacatagttatttaaaataaaggagcgaaaatagatacttatgattgtgaggggaggcctcataatcatggtggaaggcaaggaggagcaagtcacatcttacatggatggcagcaggcaaagagasagcttgttcagggaaactccccttttaaaaaccatcagatctcatgagacttattcacgatcacaagaacag

SEQ ID NO: 664779 - DNA, 478 bp, Homo sapiens
agctttttccccatagtacttcacaatgtgtttagcttcattctttacttacaagcagcrggaaattagaattgaatataagtttatttttcagacagagaaaatgaaagtgtggattgcattttctcagggttcaatgtgggagaacttcctgtttctattcagtgtaaataatctagattattaaaccagctataaatctattaaattaactgatgagagagagagagaaaaaaaaactaggaaagcagttaaatgtccagcaaacagcagaaacatctgtaaatgatttagacctatgatagaattttgttaaaacatactcaggaatttaacagtgacatatattataatggggcaaaattgtgcaagtgagtaacaaggacgtagacaccaagaaaagtagacatgaacaggtgttggcgaagtaagacctgtgagccaaatctatattactacttgtttttgtgaataaaag

SEQ ID NO: 664780 - DNA, 478 bp, Homo sapiens
agctttttccccatagtacttcacaatgtgtttagcttcattctttacttacaagcagcaggaaattagaattgaayataagtttatttttcagacagagaaaatgaaagtgtggattgcattttctcagggttcaatgtgggagaacttcctgtttctattcagtgtaaataatctagattattaaaccagctataaatctattaaattaactgatgagagagagagagaaaaaaaaactaggaaagcagttaaatgtccagcaaacagcagaaacatctgtaaatgatttagacctatgatagaattttgttaaaacatactcaggaatttaacagtgacatatattataatggggcaaaattgtgcaagtgagtaacaaggacgtagacaccaagaaaagtagacatgaacaggtgttggcgaagtaagacctgtgagccaaatctatattactacttgtttttgtgaataaaag

SEQ ID NO: 664781 - DNA, 421 bp, Homo sapiens
aaaaagttaataggccaatcaagggctaggccaagaactagcatagtgttatttctaatatttagttttggtttgtttgttttaaatgtcgaacagttacagtggtggggggtgaaatacataaggtttgaaataggggcagaatggttaactgggaaatcatcaaagtaacagtctaccgcagatgtttagagaaatgaaggcagttattgagaagttgatcgagtttaccttttagttaattgtcatttcctttctaacatgtcatttcctttctaatgatcaaataccarctatttgatcattagaaaatgaaatgtgattctcctgtttgaaaataggcatagaaaacagcaaaagaggcaaatgaaaacaaaaagaatgtaaagtatgcagaagagcacatatacatgtgtgccca

SEQ ID NO: 664782 - DNA, 421 bp, Homo sapiens
aaaaagttaataggccaatcaagggctaggccaagaactagcatagtgttatttctaatatttagttttggtttgtttgttttaaatgtcgaacagttacagtggtggggggtgaaatacataaggtttgaaataggggcagaatggttaactgggaaatcatcaaagtaacagtctaccgcagatgtttagagaaatgaaggcagttattgagaagttgatcgagtttaccttttagttaattgtcatttcctttctaacatgtcatttcctttctaatgatcaaataccagctatttgatcattagaaaatgaaatgtgattctcctgtttgaaaataggcatagaaaacagcaaaagaggcaaatgaaaacaaaaagaatgtaaartatgcagaagagcacatatacatgtgtgccca

SEQ ID NO: 664783 - DNA, 622 bp, Homo sapiens
accagctgtgcttggcatgtaagagrggaatatagcaagaggctaaaaataattgtgagtaaataatcgacttaataaaattgtcctcgtgtgtactgtggttatttgaagctgtagatcagtggtattcaaccacagtggcatgaaaaatcacttggggagataaaaaatgctgtttcctggttatcacattgagagaatctgatttaatatgtttggagttcagaatggtcataggaattttaaaagctctccagggaattctgatgtgcagccaaggttgagcctagattcagaacttctcctgtatttggctatattaatgctgattgcagcatctccatgctgtcttgttttctaaatggatagattccaaggtaaacaaactgtgaaacagtaatatgtatttgagtttggacaatggggcacaccgtattgttatagcaaatgcagtcattgcaacaccactgtagcagtggtggacatgtaggtacctatgtctgctccaaaccaaaaaacacctctagaaatttagagatattcctttatatatatactgtgacccagtgttataaacagaattgtgtcccttccatatttatgtcttgaagtgctagccctt

SEQ ID NO: 664784 - DNA, 584 bp, Homo sapiens
tgactgttatgggacttcaggtgggctctctgctgcagcacctacacattgtctctttatgtggcttgggcatctcacagcatggtggctgagttcggagagggagtgtctcaagggcaaacatttcaagagacccaggctttttatgacctaatcccagaagtctcaaaatgtcactattaccatgttcttgtcatcaaacaaattactaaaatcagcccagattgaaagagagggaacttaggctgcasttgttcatgtgagaagcagcaagtaccaacagaactaaagaaattgaaagtggccattttctaaatttatttactacagcggctttatttgattaaatttggataaacagctttgtctagagagtgcccatattatttttcatccatactaggacatgttcgagagtagaatagacaataaatatgaatacgtatccttagcaaaactggggtgtattttagtgtgttgataactcagctactgcgtattcttattcgtgctttattctgcctgtgatgcttaggctctgccattagggggcacttgagggatgcccaaaggcaggtggagtg

SEQ ID NO: 664785 - DNA, 584 bp, Homo sapiens
tgactgttatgggacttcaggtgggctctctgctgcagcacctacacattgtctctttatgtggcttgggcatctcacagcatggtggctgagttcggagagggagtgtctcaagggcaaacatttcaagagacccaggctttttatgacctaatcccagaagtctcaaaatgtcactattaccatgttcttgtcatcaaacaaattactaaaatcagcccagattgaaagagagggaacttaggctgcagttgttcatgtgagaagcagcaagtaccaacagaactaaasaaattgaaagtggccattttctaaatttatttactacagcggctttatttgattaaatttggataaacagctttgtctagagagtgcccatattatttttcatccatactaggacatgttcgagagtagaatagacaataaatatgaatacgtatccttagcaaaactggggtgtattttagtgtgttgataactcagctactgcgtattcttattcgtgctttattctgcctgtgatgcttaggctctgccattagggggcacttgagggatgcccaaaggcaggtggagtg

SEQ ID NO: 664786 - DNA, 640 bp, Homo sapiens
gtagcaaacaaatacaaagtttgcaaatgaattttgggaatgtatattccacataaaagcttatttatagctagtttcagctattcaactcacacatgtgatctaagcaatggatgtattcttctgtaaagctaattatttgtgtttaaagaaccatggaaaatataggtgaaaattctaatgttacaattttttaaaaaattaatagtcaaatttagtaggtattcattgaaaaacaccactagaaatgcagcacctttttcattctctaaaatttttagtagcacacctgctttacctagtgcaaattccatgaattttaatggtagaaatttttccctctgagattgcatcctgatagcttttgggttttgttttctctcttctttttcaacacaacwagaaaacattctaagccaggtgactatatgattccctttgtcagagaggacacttagagtttgtgccatttttttccctcccctttgatggagccagaatagcactgcaaatacacaacaaaagtgttttgatgcctcttttacaaaaagtactatgcatctttcatatgagatctgcttatttaaaagcattttaaattgatattgtcaggggtcctactgttaaagtctaccagtta

SEQ ID NO: 664787 - DNA, 640 bp, Homo sapiens
gtagcaaacaaatacaaagtttgcaaatgaattttgggaatgtatattccacataaaagcttatttatagctagtttcagctattcaactcacacatgtgatctaagcaatggatgtattcttctgtaaagctaattatttgtgtttaaagaaccatggaaaatataggtgaaaattctaatgttacaattttttaaaaaattaatagtcaaatttagtaggtattcattgaaaaacaccactagaaatgcagcacctttttcattctctaaaatttttagtagcacacctgctttacctagtgcaaattccatgaattttaatggtagaaatttttccctctgagattgcatcctgatagcttttgggttttgttttctctcttctttttcaacacaactaraaaacattctaagccaggtgactatatgattccctttgtcagagaggacacttagagtttgtgccatttttttccctcccctttgatggagccagaatagcactgcaaatacacaacaaaagtgttttgatgcctcttttacaaaaagtactatgcatctttcatatgagatctgcttatttaaaagcattttaaattgatattgtcaggggtcctactgttaaagtctaccagtta

SEQ ID NO: 664788 - DNA, 632 bp, Homo sapiens
ttttgtctgcatcttatccatgattataatcacagattcaaatcttaaaacttaaaaaggattgaactsaagtgtagcaaacagggggctacattgaaacactgtgagttcagaggatacctctttgtagagcaaggactttacaacagtcaaaatttgttagttttcatgggtattttgtttggaattcctgttcaaatagcttcaatagaaggaacagcttttctaatttttttctcaataactggtcgggcctcgggccatttaaattaaacacttcaataatactaaaaaatccttttacttagagagttccactcaaataaagcaacaggtttagcttaaatttctgttcttcactgtgatacttagcttatggtacttcagaaaatacataaccacatgtgtccttctccatctgctcctgtccaccacccacaaaacatttttgccccatgtgttagtctttattcttagcctgttgctttccatcataatctattttcttaaactgtactagacagggattctattgctcccttctttggtcatacttttgtattattatcaagaccatgtagaaatggcagtgctgcaacatgaatttttaactttggggatttttcttaccg

SEQ ID NO: 664789 - DNA, 537 bp, Homo sapiens
aggacacttgtagctattgtaaacaggaggaacactggaacaaaaaagattctctcatattacaaaagagaaatcaggatgaaaaaagtctttttatagatcaaagagggtacttcaagaaagaaaaagagctcagatcctgccttacacttaaacaatcaaggtgaattaactataaacatagatggtcaaacttatcaatctctgatttataaaggtgtaactctttttatattaaatactgctatctttgttccacttcttactcaragtaagcataccacactgggtataggtatttcaaataaccaacagattttctctgtctcctaaccattaactatcaccctccagtccatgagtgaatatatttcttcctgctgtgtgatatcatacctaaaaatttaataaggaatggcttaagttgtaaacgaaattgcacatttataccagaaggactatttcttaagttttagactcaggattcctctactcataatcaaattgtcttctttgtacatatttttgtcttcacta

SEQ ID NO: 664790 - DNA, 593 bp, Homo sapiens
tgtttattttcaataatgaaatatgggtgacatatttattacagattaaacactgtcatcaacagcactcttttggtttggttcagtgtcaaataaacgttgatgtgtaaataatggggttattctatctatcaagtactgatgttctttcaggcttataattattagcttgaaaagcatcaataagtgggtaattttattatgcatttttagggcttttttaagatttattttctgtccmtcatatcaaggacagcaaagaaatcctggtcttcttcaataatcacaattttatcgctttgctacactttaaaatccaataaatcaaagacaccttcaagaagaaagagagaaagtaagttatgtctaaatttgctgtgtaaaaatttcatttaatttgaagaacttagaagtcatatatactatatctgcaatgttttactatttaacttttagatttcaaaataaagataagcaaaaataaaatgacctgcctatctaatagattaaatgcccatgccatgctgaagcacagaaactaggacatgtagttacttctgtggctgcgttgagatgacatggaatgacagagg

SEQ ID NO: 664791 - DNA, 617 bp, Homo sapiens
aaaatttgacgacttacatataatgttagaagttccaataaatataatggactgaaaacactgtagcctattctttctttcttaagtgaacaaaactaaagaaagtaattttaaaaaataaataatgcattgaaaaataagaaagttttctctactaggattcatgagggatagctgaaaaaataaaagaataacatagaaaaagaaagtaatggtccgaaacagacataggagaggaaagtaaaaaacgaggcaggagctactttgaataggaggttgttcaaatcaatggatagggcaattggttgtggcagcacgacagtggtagccaggaagtctgctgtttccttctccaccaggcatcaagctttaatcaaggtgcttttgtgcagaagcagtataactggatggtgaaattaaaatgttaayacagtgtctgggatcattggtgaccccagaagaaatagagggaagttttatatacaataaaacgccccatacttccttcattcctaccataggcaaacagtaatgtaagccttcctagctctttctgtccctcctatcaagttttgcagagattaaaaaggcatattagcattctaactacaaattgc

SEQ ID NO: 664792 - DNA, 427 bp, Homo sapiens
attaatgctgcttggaagtgaattcgtgtatatgagaaaaagagataagcagtaaatgattaaaatttgaggtttacgttttgatttccttccatgattcaggtttcaggtttcagacttaattatctgtcatttakatacataaggaccagccagtgtcagtgcatccttggggtgacctttctacacatatcaaggttattgggctgataacctccagcccagagaaggtgacatctactttagaatcggaagggagtcttttctcagatatttaactgtcttatttttacatcatgttgtaactaaaaaatacattaggtatttaaaaaatcaattataatttcaaagcatcagtgtaatgatgtttttgatatctttttcttaatggaatactcagggttatgaataaaacaccaataaagtg

SEQ ID NO: 664793 - DNA, 552 bp, Homo sapiens
gtctacctgtctcagaactttctctccgtatgcctctgcctgcccacacagatgatgtacttttctttgctctgccttgtgcaataagctaagagtaggcctatggttttgaagactttgtttactttcttaatcaagaaaatcccaacagatgaatcaaaatttcagattatgctgacattwaataaaaatgttactgagcattagccaaacatgatcctacaaggtggaaaattaataaaaaatcagctccgtcctgtgcattatttagattttggttttggtagacagcattatatctagtttcgataattatactttggaaagatatcatgtgtgaaacaacagggactctcattcactgctggtgggaatgcaaaatggtgactctggaagatagtttggtgttgtctcacaaaacaaaacatgctcttaccatgcaatccaacaatcaagctccttggtatttacccaagggagctgaaaactacgtccacacaaaaacctgaacacagttgcttatagtacctttattcataattgccaaaactt

SEQ ID NO: 664794 - DNA, 548 bp, Homo sapiens
aatgagctatcatgccgtgaaaacacgtggaagccaggtgtggtgactgatgcctgtaatcccagcactttgggaggctgaggcaagtggattgcttgaacctagaagtctgagaccaccctgggcaacatagtgagacctcatctctacaaataataaaaaaacaattagcaagatgtagtggtgcacacctgtagtcccagctactcaggaggctaagatgcaaagaagctaatctgaaaaggttacatattatgatttcaactgcatgacattctggaaarggcaaaactatggagacaataaaaagatcagtggttgccaaaggttagtggggaggagctgggagggagtaatgaacaggcagaacgcagaggatttttagggcagtgaaaataccctggatgatactataatggtggatacgtgtcattatatatctgtcagaacccatagaatataaaacaccaagaatgaaccctaatgtaaacaagaaacattgggtgataattgtgtatcaatgtagattcatcagttgtaaaaaaaag

SEQ ID NO: 664795 - DNA, 582 bp, Homo sapiens
ttttctgtggcttgccactgacagcattctccttgagatatatgtagacatatatagatatatatatattgtatttctctcccccaagtgctttaaggaatttataatttcactaggtctgcaaaaaatccagtgagccaataaagccagctgcacaactattaaatgaaaagaaaatatctaaaaatgccacaaagcaaatagcagcattagggtgagttatgtaatagataaagcrttgctgtgcagctgtgcgctctggtctggtccatcaatcatccactctgactgggctgggcttcgttccaattgcccagtgcccctgtcatgccagttgttcaatatttttcatatcatccttgaatcaatacagctgtaataaggttattgttatttttgtcatctaaaattactacatgttacagttccgaagtgttatttcttttgaaaaaacaagaatgaacttagacaaagtacttaaaatagtcaaattcattgcagcagaaaatagaatagtggttctacttaccactggaactggggttgggagaatgaggactttactagaatagagtttaatag

SEQ ID NO: 664796 - DNA, 572 bp, Homo sapiens
atgctttctgagtgacctaattttttttttttggagatcatttgtttyttggatagactggcttataaattttttcgttcaagtatcaatatcattggctagagtacatagagttcaagatgaactctcataatattcgtctctatgttgaataaagcgtggtgagatttctggttagtactattcagagctcagcataagaagaatctgcaaattggaacaagttatagctacaaaatgccttcactataatatctgtaatacccatgagactatgattgatgtccacacatctgtcattttctcttatcaatcaagccatttgattcataggttaaagaacaattttctttgcagattttgcatgtatggtaaaagcttgagcctccgagtttaacagtcctgggttttaattctaactgacacattgtgtgaccttgaatatgttcctttactgaaaatcgaattcctcatctctaaaatggagatgacacctacctccgtcgcattgttagagtatataggagatactcatggatgtataaaagtaattgttattaatatctcatgtt

SEQ ID NO: 664797 - DNA, 572 bp, Homo sapiens
atgctttctgagtgacctaattttttttttttggagatcatttgtttcttggatagactggcttataaattttttcgttcaagtawcaatatcattggctagagtacatagagttcaagatgaactctcataatattcgtctctatgttgaataaagcgtggtgagatttctggttagtactattcagagctcagcataagaagaatctgcaaattggaacaagttatagctacaaaatgccttcactataatatctgtaatacccatgagactatgattgatgtccacacatctgtcattttctcttatcaatcaagccatttgattcataggttaaagaacaattttctttgcagattttgcatgtatggtaaaagcttgagcctccgagtttaacagtcctgggttttaattctaactgacacattgtgtgaccttgaatatgttcctttactgaaaatcgaattcctcatctctaaaatggagatgacacctacctccgtcgcattgttagagtatataggagatactcatggatgtataaaagtaattgttattaatatctcatgtt

SEQ ID NO: 664798 - DNA, 564 bp, Homo sapiens
cattgcttcctactgataataattctttcaatcaattgccaatcagaaaatctttgaactgcctgtgacttggaagcccctgctttcaggtgtcctgccttttcaggctgaatcaatgtacatcttacatgcattgattaatgccttatgtctccctaaaatgtataagaccaagttgtggcctgaccaccttgggcacatgttctcagatctcctgagggctatgtcacargccatttgtcactcatatttggctcagaataaatctcttcaaatattttacagagtttgattcttttcatcaacaagttgatttaaaaaaaaaaatccagaaggcgtttagagaaagttagggaaataatctaaacacagcccagaaaacaaggagattgtgaactgagaccctcctagcctaggggaagaaatgtgtctagatcaattctcaaagtccactgtagctgaattcctgatttctgaccatttccaaaaaatgtgtttattctttcttcctcaggagccagcccaccatcatgactgttaagcatgctatatattaggtttaag

SEQ ID NO: 664799 - DNA, 594 bp, Homo sapiens
agagtttccccgtgttttcttttagtagtttcatagtttgaggccttagatttaagtcactgatccatctggacttgatttttgtatatggtgagagatagggatctagttttattcttctgtacatggatatccagttttcccagcaccatttattgaagagactattttcaaaaatgagttaactgtagatgtatggatttgtttctgggttctctattctgttccattgatccctatgtctgttttaggctagtaccacgttgttttggttgctatagctctatggtataatttatrgtcaggtaatgtgattcttccacagttttgatatttttgctcagaatagctttggttattctggatcttttgtggttccatacaaattttagggttgttttttctatttctgtgaaaatatcattggtattttgataaaattgcactgaatctgtagattgctttgggtagtatggacatattaattcctccattccatgaacatggaatatctttccatttttttgtgtcctcttcaatttctttcaccagtgttttatagttttcattgtagagaactttcacttatttggt

SEQ ID NO: 664800 - DNA, 480 bp, Homo sapiens
ctttagtgggcttccagtggtgggggttgggggcgttctctggttagcttggctgcccacactgtgcctatgtgtgctatgcactcacacgggcctcagtcctaatgagagttattggaagccgaaggcgcttctgagggaggatttctctgtacaaacagccacatttgctcgtatctgagatatacaggtgtggtcaggtctaargggaagaacatggataattttccagctcctttttagacctttgaaggcaggaaataattggggtttgtgtgtttgtatgtgtgtgatgagagagagagagaaaaaaataagaagataagaagaagagaagggaaactcatggcatttctaagcaaattgtttccacaataatgttgcccctcttaaaattagcatagttcgtgaaatgcagagctgtgttgtgactcagaaatatttcagacagcagtgtttccaccaattcatcagagatgt

SEQ ID NO: 664801 - DNA, 480 bp, Homo sapiens
ctttagtgggcttccagtggtgggggttgggggcgttctctggttagcttggctgcccacactgtgcctatgtgtgctatgcactcacacgggcctcagtcctaatgagagttattggaagccgaaggcgcttctgagggaggatttctctgtacaaacagccacatttgctcgtatctgagatatacaggtgtggtcaggtctaaggggaagaacatggataattttccagctcctttttagacctttgaaggcaggaaataattggggtttgtgtgtttgtrtgtgtgtgatgagagagagagagaaaaaaataagaagataagaagaagagaagggaaactcatggcatttctaagcaaattgtttccacaataatgttgcccctcttaaaattagcatagttcgtgaaatgcagagctgtgttgtgactcagaaatatttcagacagcagtgtttccaccaattcatcagagatgt

SEQ ID NO: 664802 - DNA, 450 bp, Homo sapiens
gctcgagataatgataaatcttgccagaggcctcaaggatactaagcatgaactctgggaaaaaaatttgtgtttgttttgtttttggagggtgtccctcattcccagccttgggttaagatgattctgcttttctcaaaatrtttgaatgacaggatgaacttcaatgtttgcatcatttcccctgttttatactctcctcgcatagaccacagctgagagttttagagaaaaggcgctttcggcaagtgcaaagtggtattgtcatgttgctactggagctgtctgtgacagccaagaaaataggacagaatcaaaaggaagtaaaataagtcatagtgaaaccttctcccttagaggaaggaaagcaaacattgaaatattgctttttttcttggctacttattaaaggggagatttgcctgctgtgctggaagagtcttttattca

SEQ ID NO: 664803 - DNA, 598 bp, Homo sapiens
ttgtttatatcactattacagcagcatcctgtagtaattaaaatacaaacacacttagcaatgccactctctggatgtgtgatcttgggcaagtacctaacctctgttggctttattgtcctcattcgtaagatggagacaatattagtatccacctgaacagagttgttttatgtattaaataaaataatccatgtaaagcacataatacagtgtctakaacatggtaactgtgctgactgctcaatggtacctctactatcatataataatctctttgtaggcctatctttgttagactctgagctatttcactgtacacacagtatctagcacaaagcccggaacacaataggtgtttaatatatgtttgttgtaaggaaagaaggaagcagacaaagtatctttcatgtatatttaaaaagaagagaaaatgttaaactatattatagttaggaggaaggttcattaactgtcctttctttcaccttttagttaatactcttagctcttcacttttaccagctataaaatgccagccccgactcccaaaaaagcttataagatataatattcaaaaaattacagggccttaaga

SEQ ID NO: 664804 - DNA, 580 bp, Homo sapiens
aagcagagatctttgtccatttagttcactgctatataccaagcacctagaacaatacatatagaaggcatgtaataaatatttgttggatgaacaaatgctgtttctctaaagattgttgtaataggtttgacctgtagacttagaatgcatctcagtatgtggtttatctttatattccttagcagtagttcctaagcttgttttccaaccatagcaaacagttcattttgatagtaattctgtagagctaaatgaagcacacaaattctaaaggttggaaggaagtgctgcagcaaagaaatggattttgtaggtrttatagtccaaccacccatctattctaatcccatcaactgcatccccatggggcattgtatctctccatctttacagaaagggagaagaggacagaggtaaaagaataggttctgtgatcaggaggccctgtcatgtaattcttgttccacccatgtctactgtgtgaccttgaacaagatactttagcctctttctgcctcagtttcctcatctgtaaaatggtgatagaaacaactgctacctcatagccggttttttc

SEQ ID NO: 664805 - DNA, 542 bp, Homo sapiens
accacctctgccctgggcttgagaccttcaggctatgccccttattcccagggcaacctaaccccccaggcttcagattgggaacttcctcccaaaacagtgcttggggctttttcatgtgaattccacagttaatgctgctgccgcygcctcaatgctaccctctgaggccaagcttgacatgctgttattgacctggcatacccaaatttcatttctggtaagagccatttctggtcacccaccagaatgggtgacccatgcagttgctaaatagtgccagagcgtggggaaatgcctgaagtactttggcgatgtccaggtatttcacatttgctttcattgtgattctgggctgaatttcagtgctcatcaacatgtttggcaatacagagacacagccttggcctagagaaggcttaagccatctgttctcttaagtgatagaaaggatgagacagaattagctagaaccaggaaaatacaagcaatgctttctgaagagcatgaccctggtagaaattttgctttgtgtgctcata

SEQ ID NO: 664806 - DNA, 647 bp, Homo sapiens
tggatatttgcatctcaatttcattcagttcttatctgattttagttatttawtttcttccggtagttttagagttgctttttttctagttcttctaggtgcaatgttagattattaatttgagatctttctaacttctcaatgatggcatttagcaccataaactttcctcttaacactgcttcagctgcatcccaaagattttggtaagttgtggctctattttcattaatgtcaaagaattttttgatttctgcctaaatttaaattttcacccatgagttattcaggagcaagttgtttcatttccatgtttttgtgtagttttgggagatcttcttggtattgatttctatttttattacactgtgatttgagagtatgcttgttatgatttcagtattttttaatttattgagacttgctttatgactgagcacgtggtcaatcttagaatatgttctgtgtgcaggtgagaagaatgtatgttttgtggttgttgggtagtattctgtagatatctattaggtctgatatggtttggctgtgtccctacccaaatctcatcattaattatagttccgataatccccacatgtcatgggagggaccaggtggagacaattgaattatgggggtggtttgcc

SEQ ID NO: 664807 - DNA, 592 bp, Homo sapiens
ggattgcaaaggttccagtgggaagtgtggatcccccaggaactcttattgtatcactctttccatgtgttaggaagcttctcctggctccccactagtcccaggtgggtggctgctcagaatatttagttcatttacatgtaacataattactggttttaagtayactgtctcattatttttttgtttagttgtagcatctgttttctgttcctgtttctccttttctgacttcttttaagttaatggaatgctttttagtattccatttcaattctcctactaatttttttaaagctatacgtgtgtgtgtgtgtgtgtgtgtgtgtgtattgttgttgttgtttggtttagtgattgctccggaattacaatatgaattcctaattttcacagtctctttggagtaatattgtacaacttaatgtaaaatgtgagaatcttatcacagtaaagttccacttttcatgcccttatcctttgtgctattcttgtcatatattttgtatctatctaggatataaattctatgataaagctatataatttttgctttaaacagtctgtggcctttcaaagaagttaaaggaaa

SEQ ID NO: 664808 - DNA, 581 bp, Homo sapiens
acccatttataaggctctgaaagtggcataaagaaaataaggcagggcctgagatcaagaggcttttgttgtatcaggaaagacaggtcacacatagaaaacgagttaaatatgaaggcaaggcagaatatgattrtatactaagcctggtcggaacaaatagatgaggcaagactggcttaccttccccttctagctggaggggcacctctgcatcaaacacgattccccacacacacccaagtcacagaagctggactaaaatcggatgcctaacccaaagggtaccaacctatagatagggcttaaccagtgagatttcccactaaggatttgaattaagaggctcagagattgcagtcagttggtagtagatgtttggccagtaagatcatgtcgagttggcaatggaatgggcactaggtcaagccaaagtcatggccaagttgtggctatgaaggagtaagaaccataggtgagcagtcttcagagagactagggtagatacaccaagagaaatagcaatattccagaggcagagggaaaactatagaattctacctgagaattttccagttcag

SEQ ID NO: 664809 - DNA, 666 bp, Homo sapiens
ttgttttcctgatttaattgaattgtctgtgttctcttgtatctcattgagtttctttaagattattattttgaattccttttcaggcattgtgtaaatttcctggggtcagttactggagaattattgtgttcttttggtggtgtcatgtttccttgtttcttgtgtccctgcattgatgtctgctcatctagtggtgcagttacctattccaaacttaacagagtggcttttgtaaggaaagacttttacctccagagggcctaagggtgtcacttgggcagagtgtggtggttctggctttgtgtaggttagtggtgtagtttcyttgtagcttcttcagttgttatttatgttaacaatgactgtgagtgcctcagatggcctaggctgcaagagtttgtggcagtgatcatggctgagtaggttattagggaaagtgcttcagggatccttttgtctagtcttcctcacagtaggaaatcttagctgaggggatctcttcatattgggtctggaagactcacaggcagccacagcagcactgcaatccagggttaggtgctccgagtgactgtggagctgggttcttggtctcaaggtcttgtgaaaccactgtatcacctgggacttgccgtgaaggttcactctccaaggcacgagccg

SEQ ID NO: 664810 - DNA, 571 bp, Homo sapiens
aagatgaagaaagagtccatgcatcaccttgggagcctactctgccttatatagagagaagcactaggaatgacctaagctgtgtctagtcaagggctttgctcaataaattctycaggccacttcctttctttgtttattgccaagtattctgaggtcttaaaagggtagagggagacttcacttccagtatctttaggtataaatcttatcccagtaaaacaaggcttgcacaatttataatgtggctattcatcactatttatgattcatatgtacttaacactttatgatgactctgaccacagccgtctctcatggaacatatgccagaggagtagagccttggggatgtctcctgttaatattgacaggattccttactgcatgacaactgggaactgagtgtctgtgagtgagcgatggcctccttcttgagattgatgtgtatgatgtacctgtggtgtgcttggtagggtacagaacctgaggagatcacagttttctttcatccttcctagaggtgatgataatatgaccccaccattatctggggtaaatgggataactc

SEQ ID NO: 664811 - DNA, 583 bp, Homo sapiens
gaatgtgatgcaggcttcagataagaggaggatagctaagataattctcatgttttccaggtgctttagggaatagaaacatgagctcaaccttagacttggcgagtactgaggtgctcatgggacataccagtgaagacagcaactctcccaggactggggctcagcagggagggctcagaygagttcaggatgtcaaatcatcgaggtgtatctggtggtgatgggaaccagccagtgagcaggaataatcagagaagagcagagggtcaaggtcagagtcctagagagctggtctgggaaggggaaactgaggaatgggcccccaggcgggagatataggaggagccacctagagtgagaggcagattaggaaaagcatcactaggacagatcagggaattcaataagagtggttttggtggaggaatggtggctagctggtggcagattgtggtagggtagtgatgaagatcagagaaggatgcagtaaggtggatgacgtgccagccttttaaaaagcatggctgggatctgggtgtggtggctcacagccataatttcagcactttggggggctgac

SEQ ID NO: 664812 - DNA, 457 bp, Homo sapiens
ttgtattatctttttctcttacttcattgacttgtagatgcccctggtccttgatccatctttgtgaacttaatgattcaaactctgttgtttatagcaggtttaaaagaacagctcttattactagatgttcagaaaaatataaattttatgtttctattaaatttagaagattctacccatttttagcattaaaaaatatgaaatgtttattcagataaaaatttagtccaatgtagatagatatacagtgtcttctaggtaaaaatgtttagtctcccagacacctttccttcttagtttttgtctccttaagatagtgcctattcatagggraggggttggggggataaatggaacttattttataaggtttcatggtggtaggggaagcaaacaaacaaataccttgagtgctatgtcctcagatttctacggtttccaaagaattggttat

SEQ ID NO: 664813 - DNA, 509 bp, Homo sapiens
tcagttctatttgaatttttcagttctatttgaattttaagatcgcagataagagattgtgagcacaataaccctctgtgccctgaggcatttgattttttaaatatttctcttctttctcctaggagagttcacacatttccataggaagagagccacaccgcacaaacaacaggtgtaattctaaggtgctgtttctccgaatgccacacatgtttaccactgctcatctcaaggaatcaaaacccagtttcaacttttatacaaaacccatgaaagacttaaccttctataaaaatatgtgaacaaaagtagactcscttctgggaggattgggagggatggaggaaattatcccagagagtgccggctcgggagtcgctctgaggtcagccccaatcctttggtttacatttgtagggaggatccacccaacagctgtgctttagtcatctttagagatactctctcccaccccctaccctaaaaaacacagagttgaatgtgct

SEQ ID NO: 664814 - DNA, 566 bp, Homo sapiens
acaggtgtaattctaaggtgctgtttctccgaatgccacacatgtttaccactgctcatctcaaggaatcaaaacccagtttcaacttttatacaaaacccatgaaagacttaaccttctataaaaatatgtgaacaaaagtagactcccttctgggaggatygggagggatggaggaaattatcccagagagtgccggctcgggagtcgctctgaggtcagccccaatcctttggtttacatttgtagggaggatccacccaacagctgtgctttagtcatctttagagatactctctcccaccccctaccctaaaaaacacagagttgaatgtgctgagaagtatacattatgctgcattgtgtgactgtgtaattactgtcctatacatgctggaccagagattgactgaagactggagaattaaacaaagttgtgactaattctggatcaaatccaataggcagatgaatagggcaatcctgatattttgccaaagccagggctgtagataactgcagtgggcaggaggtaagtgaaagaattagttgagtgaaagttttga

SEQ ID NO: 664815 - DNA, 562 bp, Homo sapiens
ttttcctggttaactggaagttagttctaaaggcttttaggcctgctataacaaaataccaaaaactggatgacttataaagaacagaaatttatttctcacagttctagagactagcaagtttaagatcaaggagcatgcggttttgatatctggttaggaccaactttctggttcatagattggccttcttgctgggccctcacatagtgggagagactagctagctctctggggcctcttttataagggcactaattccaatcatgagggctctgtccttatgatctaatgaccscctaaaggccccaccttttaataccagcacctttggggttaggatgtcaacatattaattttgggaagacatacacgttcagcccattgcaaggtttagttagattcaggttcaacttctttttttaaagactatttcataggcaataatgtgtattcacatcccatcattagtgatggtgagatgatcgcaaggttagggcgatcactgcctatctcctctgttatattcccccttgggtcaagccagtagtctgtgacgtga

SEQ ID NO: 664816 - DNA, 578 bp, Homo sapiens
ctgaaacatgtgctgtgtgcactcagggttaaatggattaagggcggtgcaagatgtgctttgttaaacagatgcttgaaggcagcatgctccttaagagtcatcaccactccctaatctcaagtacccagggacacaaacagtgcggaaggccgcagggtcctctgcctaggaaaaccagggacccttgttcacatgtttatckgctgaccttacctccactattgtcctatgaccctgccaaatccccctctccgagaaacacccaagaatgatcaataaatactaaaaaataaataaataaataaaaataaaaaaaaagatgaaagtaattaaccaaacatttcatcaaaatacattttaagaaaaaatatggaacaattagataaggaaattgatcccttcactactgtctgtgatcatacatgctttggaaagtctcaggataatcccagaggtatgagcagcccagttttaatcttagaacatctgagactcagttttttcaaatgtaaaaagaggataatagtgatatcctcacagagctattttatgacttgccaaaaaagtagactttt

SEQ ID NO: 664817 - DNA, 485 bp, Homo sapiens
actcccagactcaaggaatcctcccaccttggcctcccaagtagctaggactacaggcagacaacatcatgcccagcaattcagcaatttgttttttttttttttttttttttttagagataggatctgcctgtgttgggattacaggcatgagccaccagctcagtgaagacacccagctgtcttcaatttttctatgtgcactgtgaattcatacaagactatattgtaggcagttttcccttaaacttatttgataaggaagttttgttgcarggtctcttgaatttctgtttcaggctgcagtctggggagtccggtatcaactgaacactgaaattaaagttgggctcttctgtacagtgccttgaatagccatgtttaaaacacattgatgttacaacgataacaatgatagcttgaactaattacaagaagctaggttttttttttttcattcttatatatcctcagggctgaaagca

SEQ ID NO: 664818 - DNA, 578 bp, Homo sapiens
ataataaaaatattggaattttcaaactaaccaccaaatatgtcaatggccagcaccctgaacaaaccagtgaagatgaggaagagattataacaattaaattttattgttcattttactttgtcaatccttagaatttaataactccaataattaaatactaacaggaatgttagyatacaaatctaatattttagtatgttcatttaaaataatgaatacatgtttaaatataaattactaaacatgatatagaattctatattgatttaaaattatatgcctgataccacataatagtgcacttatttttagccatgtcatcactctttttctcttggagtcttatatttcctgtattttggttctgttaattggtagtttaccaactgtctacattgtattttttcatgagctttataaacatttctatttggagatagcatcatatgatgttcacttacaaatgtgataaaataaatggatacgttgtgcaatgcattgaacctacatgggatttagtagttttaaagccaaagttatttgtgttccacatgcagtgaaaagggatgtttcaa

SEQ ID NO: 664819 - DNA, 590 bp, Homo sapiens
tcgtgaataagtctcatgagagctgatgactttacaaggggcttcccctttcactcagctctcattgtctcttgtctgctcccatgtaatgcatacttttcaccttctgccatgattgtgaggcctccccatccacatggaactgtgattccatgaaactctttttattcataaattacccagtcttggatatgtctttatcagcagcatgaaaatggactaatgcaagcagaataagcagaattcttcgatactgactcagcaccccacacacgttggttccaagatgtagaaatggaagcttcaaggcttttaacatctggacatcaaaactggaagttttactttcactgtattttattggtcaaagcagtcaaagagcccacccaggttcaaggagaaagaatatgtccccacgttttcaatgggatggtgccacaaaatttctactcatcttaattcaccacagatagaaatatgaagagctcatttgttatgttatttgtgaatgcagactaaagatatttgttggtttatatagtagtgggaaaatragaacttttaaaatattcaacttttagcccttgaca

SEQ ID NO: 664820 - DNA, 306 bp, Homo sapiens
gagtagttagcttggaaggcaaatcaacttcaaagagaaggtaaatgttttaggtttagtttagaaatatattggtgaaagcaagtgaattcaggagaacatctataggccaawaataaatcatagagaagaataagataagaagttctatattgcagaagtatgcattcttgcaaccacaagagtaaaagccctgaaccagactgtagtgtttcatggtggttttttttttttttttttaactagaggtttcttttgttggtcatccttatgataggctgtcttcctcatgataatcttactgag

SEQ ID NO: 664821 - DNA, 556 bp, Homo sapiens
attgcaagtcttgggacttaaaatttgctattataatatttaaacattacaagggtagaagagatgttatagagagggaccaagttcagtctaaactgaagtgcctgaacctgatttagattataagcctttagaaaatattatagggtatatctacataattctccttaagtgmccttttgcaaagccaagtacattcagagacctaatcaacttgtcatgctcttgcagcttatcagagaattctaacttcaatggctaaatactgggcccattgctaggggtagagatacaaataagacatgctctgacttcaaataattctaagtctggcatgggggaaatgagaaatgcttgcaacttgctatgatgcagaggtatagatgcctccttgcagaatgaataaagaggcatcacaggaaaaagagattcactcttcttggaggtgctgaggaatgctcaatggagaagatgacttttgaagtagatcttatagaaatggctatttttgtttcttctgagttaagggaaggacaatgggaattctagatagaaa

SEQ ID NO: 664822 - DNA, 507 bp, Homo sapiens
ccggcggctaattttttgtatttttagtagagacggggagsgggggtaggtttcacggtcttagccaggatggtctcgatctcctgacctcgtgatccgcccacctcggcctcccaaagtgctagaattacaggctttgtttgctttttgagccagggtcttgttctgtcacccaggctggaatgcagtgtcacaattacagctcagccactaccttccaggctcaagtgattctcccacctcagcctcccaagtagctggaaccacaggtgtataccaccatgcctagctatttttgtttgtttttaatatcaaagaatgattcaatattatgtgaattcagggttgagaacaactgatttaggcaaaaaaaaaaaaaagataaaaaggctaagaaattttaaaaatgggattctttttaccagagtgtggcaaaccccagtggaggaccctaaaagtgcttgggaatactagattgagtagaatgtatatctgggtgaatgatga

SEQ ID NO: 664823 - DNA, 507 bp, Homo sapiens
ccggcggctaattttttgtatttttagtagagacggggagggggggtaggtttcacggtcttagccaggatggtctcgatctcctgacctcgtgatccgcccacctcggcctcccaaagtgctagaattacaggctttgtttgctttttgagccagggtcttgttctgtcacccaggctggaatgcagtgtcacaattacagctcagccactaccttccaggctcaagtgattctcccacctcagcctcccaagtagctggaaccacaggtgtataccaccatgcctagctatttttgtttgtttttaatatcaaagaatgattcaatattatgtgaattcagggttgagaacaactgatttaggcaaaaaaaaaaaaaagataaaaaggctaagaaattttwaaaatgggattctttttaccagagtgtggcaaaccccagtggaggaccctaaaagtgcttgggaatactagattgagtagaatgtatatctgggtgaatgatga

SEQ ID NO: 664824 - DNA, 598 bp, Homo sapiens
gtgacaagtgaagctattttagaggtgcctggggtcgtaaaacattttgaaaattatttggttgtcgaagtcatgtcagagtagatctgcatgaagtttctgtggttctgaagtgaacatgaggtgcctttccgcttgtgctctggagagagctgccatgataaacggagccatcatcagtcactttgctgcatgccagagaggcctgctctgagcccactaacccagtgcattggggactcactcagcagctctgatgaagctttgcaaccaagaaggcytagaaggatccaggaataggaaacaaaaagtctctttccatgaaaagatactttttttaagtgtcagaaatggatgtcttttttcaacaggagagatcccaaaagcactgagacggattatccatcccgtactttctcaaagaatggtgtagaaaagttgcaaaaatcagaattgaaattctctggccatttattctttcccaccagtttgtgcattgagcctagctgccccctttaaataataataatacatccagtgaacacgggaggagactgacaaaatattgatcatttttcttagcagcttcaaaccagta

SEQ ID NO: 664825 - DNA, 599 bp, Homo sapiens
ggtcatgacatactaccttcatggcaaatttgcttgagttttgttcacttgtgtaaaatctgttccgaatgctgaaataatgatggaagtaactcatttaaattactgggatcatgtaaaggaagaatgtgttcattctggcagctctgagcaattctgaaaatcatcacgcatcatcttarcttactgaattggaaaaatagggtaatgggctggggcattccataggaatgagttgtattgtaataatcaatgtaaagaataaattttattagataaatgtaacttcttgctgtgatctagtaagaaagactgtgacttaaaaagataaagcggaataaaattgatataatttaatataactttagtgaaacttctgaatttaaattatataatttggtcatcagtaaatcttggctagcacgtacatctgtgggagataaagagtttcttaaggccatgcatggtggctcatgcctgtaatcccaggactttgggaggctgaggcaggcagatcacctgaggtcaggagtttgagaccagcatggctaaaatggtgaaactctgtctctactaaaaatacaaaaattagccaggca

SEQ ID NO: 664826 - DNA, 583 bp, Homo sapiens
cattgcctatgacttagctgtgattccagccctagggtaaagggtgaggtgatacagtctatgctattggcacatgaagctagcagaagtagtctaaagccaagtgcaagcaattgtttaagtttaacattttagattccagagcttaagaagaaatccaggctcctcaactggcctgaggtaatccaggctcttcaactggcctgaggtcttctgttgagaatttggaggcatcatacagtgtcacatgaaatagatgtcatggttgcctaccaaagagtaggtctccaattcttccatttttcctttcttctattggcaaacaactgagcagctgaaactggattctctccagaatgctctgattgatctaatccaagtgagattatggcttctttcttgccatggtgaatggttcaggtaagggtatataacctatttctaatccaagcagcccayggctttcctctggccccaaggattgcttcagatgcaagtacatcatctaagatgccccaatcataataataaagctctagactttaataaatgcgggaagacattctgtctcttcccttggcta

SEQ ID NO: 664827 - DNA, 655 bp, Homo sapiens
tacatttagttcaaatctcactttgctaatcattcaacctcatagtgattcattctctgtcctttcctcagaattacttattagcaaaactttgctttccaaatcttattccaggcactgttcaattccggcctcttaaggaattcccatggtgcctgcctttcaccattaatcctgtgtctgaatttcctgtagctccaggatgtcaattagttaaatctggaaattcaatctgtgtttagttgctgtgagaagagaaaagacaaggcaagaaaattaggtgaaggaattaagtttctgccaaacttgaaaccagacaaaaagtaaatccttatttctcagctttgaatcacttggtggtctggaattcgatctgcatattscaatgttcatgtccatcagtgtacacatgcactcaagtgtacaaaacagaaaaagcaatcttaaggaccaaaattgccgtcaatataaatgggctggctcatctgaataaataattactatcctataatatacttctctcaaatctatgccaactcagcatttattaactgagatacatcaaatcacagtattctttcttgtggagtttctgtaccttcttccctgttccactaaagaagatttaattccaaacacaggaggaagaaaagga

SEQ ID NO: 664828 - DNA, 655 bp, Homo sapiens
tacatttagttcaaatctcactttgctaatcattcaacctcatagtgattcattctctgtcctttcctcagaattacttattagcaaaactttgctttccaaatcttattccaggcactgttcaattccggcctcttaaggaattcccatggtgcctgcctttcaccattaatcctgtgtctgaatttcctgtagctccaggatgtcaattagttaaatctggaaattcaatctgtgtttagttgctgtgagaagagaaaagacaaggcaagaaaattaggtgaaggaattaagtttctgccaaacttgaaaccagacaaaaagtaaatccttatttctcagctttgaatcacttggtggtctggaattcgatctgcatattccaatgttcatgtccatcagtgtacacatgcactcaagtgtacaaaacagaaaaagcaatcttaaggaccaaaattgccgtcaatataaatgggctggctcatctgaataaataattactatcctataatatacttytctcaaatctatgccaactcagcatttattaactgagatacatcaaatcacagtattctttcttgtggagtttctgtaccttcttccctgttccactaaagaagatttaattccaaacacaggaggaagaaaagga

SEQ ID NO: 664829 - DNA, 634 bp, Homo sapiens
tgtgtcctctgcctcctgggttcaagtgattctcctgcctaagcttcccaagtagctgggattacaggcgcctgccaccatgcctggctaatttttrtatttttagtagagacggggtttcaccatgttggccaggctggtctcgaacccttgacctcaggtgatctgcctgcctggccctctcaaaatgctgggattacaggcatgagccaccatgcctagccttttcatttttagtagactttatgtgtttttatcagataatgaaaatagaacgtgctcattgtaaaaacaacaaaaacacagacactacaaaatgtttccaaataacaaagtaaaaatcatctagaaaatcatcgccagaaataaatgcagttagcaacttgatacagatctctccagcccctttctaaacatattatgtattaaaaataaagctgcatagctgtttataacctgctttttatacttagcaataacataagaattttcttccatgttaatacatgtttctgattcatcattttaattttcacagaatataaaaattctgtgtgttctattgcatggtgaaacataattcatttaagtagtctcatcctcatggacaaagaacatgtattttatttttaaa

SEQ ID NO: 664830 - DNA, 625 bp, Homo sapiens
acataggcaacacctgggagcttgtgagaaatgtagagtttcaggccccaccttaaacctgccagatgatatgcagaggtacacaggtgatgcagatgcatattacagctgggaaggcactgggtttttatttttaatactgatggttgatataacttccaagtcaattaaatgataatttctgttttcttttttttttctttttttcagacagagactcgctctgttgcccaggctggaatgcagtggtgcgatcgcagctcactgtgtcctctgcctcctgggttcaagtgattctcctgcctaagcttcccaagtagctgggattacaggcgcctgccaccatgcctggctaatttttgtatttttagtagagacggggtttcacsatgttggccaggctggtctcgaacccttgacctcaggtgatctgcctgcctggccctctcaaaatgctgggattacaggcatgagccaccatgcctagccttttcatttttagtagactttatgtgtttttatcagataatgaaaatagaacgtgctcattgtaaaaacaacaaaaacacagacactacaaaatgtttccaaataacaaagtaaaaatcatctagaaaatcatcgc

SEQ ID NO: 664831 - DNA, 474 bp, Homo sapiens
tttacataaatagatattcagatctaaatcaattttctgaccacaggtataagataaagatcgatattactttgtatttaaaatattgccttggaaaataaaagtcactgcagcaattttgtatataactagctggtgtttatgaggcaggccccatgaggacagtataatcacaaacccctttttattagggagaaatgatgattaaaaccaaatgaggaagaattgtatgtgccaaatgcaatgtaaaagatataatgaataacaaatatttaggaacgattatactgaccttttttgcacaaaaaataaaatgtaagcttgggcaactgcccaggtagcaaaattctgwataaagtcaaaaatggatgctcatgtatttaagaaaatatacgtgcaaacttctgttaaacttgctaaatcattgcacaaatagtctataaaaatactcagaaattaggacccatataaatg

SEQ ID NO: 664832 - DNA, 508 bp, Homo sapiens
cttaatctcataactataaatagataagttacaatgtcccaattatttccagataatttggtgataatcaaataatgaaatggcactttcttaaaaaaaaaaaccttcaaaaatccagcagtaaacacaatcattgcacaaatacttgggaagggtcagagactgggccaaagaactgtaaacgcagtaactaagtaggattttcgcaaatccccaagtaactgtttatgccttcaaactcctcaattcaaagaacaacttggaaagatgaggaggtgaggggaagtttcaytggctcctagaaactgaactcggggggtgaaaagcaactatcaccaggtaatatacagtacatgacatcttctgtggctgtacctcacacaaactgagttacagctggtgggtgaggaacaccagtgactacagcaaaacaggaagaaaaggtgattttaaactttggtttgaaaattgcagttacaaaacccaaatgagaggacacggacaaaaa

SEQ ID NO: 664833 - DNA, 285 bp, Homo sapiens
accctcgaggggtgcccaccagggaggytgacaggaagtctggaggcagtagggacgtttcttcatttattaaatgggagagttcaccagtctttatgctggtatcaccaatcattttggcttttcaaaagtttattctccagtagatttcttaggcagggctcataggaacaataatccttatttatatttgcagggtagtttgactggattttaaattcttgccttgaattttcttttctagatgatcttaaaacatattactccatgtcttatggcctagta

SEQ ID NO: 664834 - DNA, 620 bp, Homo sapiens
gtatgggtgtttactatactcttcttattcaaacgatgtctgaaattttccataataaaaggttaaaaaaatctacttccattatggattttaaaacactaaaagaaaataaaggtggctctatacgttgcaaaacaaagtcaaaataagggctccttttctgtaacattaggtactaaaatgagaattgcaggaggcttcaccatagttggtcagtttttccattgatggaacattccaaatctttataaaccatctgcagaggaaggatttggatagattttcattccactgtaataayaagactttttttgagaaagaatttcaaaaagaacagcttttattttgattctatgcatacactggaaactaattaataaaacacttaaagcaattctcatcccaattacaaaatgtagacacatgaaataatgtaaacaatgtccaattattctgatcatatattacatatatataacacaaccaaaattattactttgacagcatcttggttatatggttatgacataatttttccaactacttactttttagtaaccagataaccaaagaagaaatattagtaatgaaaaattatcttttaatattcagcaataaat

SEQ ID NO: 664835 - DNA, 470 bp, Homo sapiens
ttttgcattcccaccagtaaccataaaggccctagtttctctacctcttcatcagcattcgttattttctgttcatttgatattaattatcctaatgggtgtgaagtaaggagacttgcattcttgacatacccagcaagaaccttcagaactacgcaaggctcatggtagactgcttccctcaatcagtagctagatttagttagtagcagagtttaaaggttttctggggaagtagccaacaaaagattatataagcaatgatgttgttttcctagaagtgccaygtgttgttctatactaatgacactcttgtcaaagaccctatgcagagtgagctgagggaagtctgctaagactttatcagctgggctaccactataactaaacaaagtgaataaaccgtagtcacaaggtcaagagaaatgttaatgtaggtaatgagcttgtgatcaatttttaaaccataa

SEQ ID NO: 664836 - DNA, 483 bp, Homo sapiens
tatctctttctgggttacatttgtcctaaatcatgttatttcctttattcctgtaaaatgagttaatgtaatagtgaacaacaacttcctggccaggtaattctttcttatgtttagtccaaattcctccccataaaacatatgtacgtctaatttttcctctgtccatggaaactgagaacagttgcctagaatagacatgactctcatgaataagacacattttactgcatgttacaagacatttttgaaagtttgaaattatgaagtccctacttagggcttaagtcattaagggccacaaacactaataaaattattttccwtaaactcttctcattttctatcatatgttatttaaagtgttatccaaaaaaaaaaagagaagaagaagaagcctaacaaacgcgccaaagttaaatcagtatctttgccaattttctaactgtagaagtttggagccttaggccagtgctggacctg

SEQ ID NO: 664837 - DNA, 584 bp, Homo sapiens
ttaaaaatgattgttacactggggcacagtggttcatgactgttatcccagcaccttgggaggctgaggagggagaatcacttgagcccaggaatctcagaccaacctgggtaacatagtgagasttcatctctataaaaaataaaaatttttctggccatggtggcacatgcctgtagaccctgctactcaggaggctgaggtgggaggatggcttgagcccaggaggtcaaagctaagtgaactgtgatcatgcttctgcactccagcctgggtgacagagggagactttgtctcaaacaaacaaacaaacaaacaaaaacaaacaaactccactctgctccctgtaggtgggtcgggaagacaaaaagttccaaccctctaatcacaaggttgatttccttggcaaccaacctccctcctgaggctatataggagcgccatcagtcatctcactagcacatgaaaagatacttatcattttggagattccaagggttttgaaagtgttgtgccaggaaactgggatgaatttcatatatatatatacatgaatatatatacacacacacacatatatatat

SEQ ID NO: 664838 - DNA, 568 bp, Homo sapiens
atttttttctatataaggaatttagtctcaaataagcattcctcactttactggcctagactgaacaaggcaatggctagtggcaatctagtccacaattaatgaagatcatatttttgccgactccttggaccctgggttcatgaagataygaagaattgaggcaacaacaaaaaaatacattaacaaaaagaaagcaaacattaaagcacaaaagcaccttcatcaatgttctcaccacctgtggttcccaacataaagaattttccatctctgttagctataacactctagagctaggaaagtaactagtactttacaaatatttttcctttcaaatgctttattacagttagaggaaaaaagaacgtaatgaacaaaaaaaagaaaaccacaaacattttatatacatgcaaaagggcaataaagtgacaaaatgtttagaaaaagcatgtgaaaaagtaaaatcatttagtatatgtaaaaaaataattttacttgccttgggtaggtgtttaatttttttctttcctttgtgagaacaccgactaaactagaatgaccagag

SEQ ID NO: 664839 - DNA, 628 bp, Homo sapiens
ttttgtgtaaccaaatgtaatacattgtacttttaaaaaaccttgttattggttcaaaacactgttatgtcttatttcataaaactgtttctgaaagttctgaaaggctgcaagtgcattgaaaatttcctaaattcattataggtgaaatctgacacaaattttattgtcttcaaaagatttcyattttaaaaagtatatatttaatttgtcttttgtgttacattttcacatttgatagttgcatagtaaagaaaggcagttcttaatcaaacttggtgattatatggaaacaagtgtctattaggcctcattttgagggcaggaaggtggcacagactaatggttaagcccatgggtttggaatcaggctggtcctagcacttaccacctgaatgaattaaaatggggcagttacttaacctgtttgcctcaattttacctttgtaaaatgggatactaacagtacctacttcataaaattgttgcaggcttaaacaagttaacatatgtaaagtgcttagagcagtgtctgccacttactaagtaccacatgattctgcttttatggccactaatatattttaggacagcaattaacaagctattagtgtagaactcgataaat

SEQ ID NO: 664840 - DNA, 517 bp, Homo sapiens
tttgttggtggaaatgcaaattagtgtagctaccatggaaaacagtataaaggttcttcaaaaaaactaaaatacaactatcttatgatccaaaaatctcactgctgtgtatatataagaaagaaaatcaatgttttagagatatctgcactcctatgtttattgcagcactattcatataatagccaaaatatagactcaatctaaatgtccatcaatggacaaataggtaaaaaatgtggtacatatacatactggaatactattcagccatgaagaatggaatcctgtcatttgcagtaacatagatggaactggaggatatcatatgaagtgaaataagccaggcacagaaaaacaaatctctcatgtgcaaattatctcatggaggtagtaaatggaatggtggttactagtgacagggaaaggtagtgggaagaggagatttwaaaaaaggggggttagttaatgggtaatacagttagatagaattaataaattctagtgtccaatagca

SEQ ID NO: 664841 - DNA, 580 bp, Homo sapiens
atacctagaacgccttcccaaggactggtacaaacaagcccagactacaaagactacaataaatacttaactcttcaatgcccagatactgacaaacatccacaagcatgaccatccaagaaaacrtgacctcatcaaacaaactcaataaggcaccagtaaccaattccagaaagacagaggtatgcaacctttcagacagaattcaaaatagctgttataagataacttagtgaaatttaagataacacagaaaaggaattcagaatcctatcagataaatttaacaaagagattgaaataattaagcagaaattctggtgttgaaaaatgcaattgacatactgaagaatgcatcagcgtctcttaacagcagagttgattaagcagaagaaagaattagtgagcttgaagacagcctatttgaagatacacagtcagaagagacaaaagaaaaaaataaaaagaaatgttgcacacctacgggatctagaaaatatctctaaagtttaaatctaagagttattggccttaaagagaaggtaaagagagagatcagagtaggaagtttattcaaaag

SEQ ID NO: 664842 - DNA, 580 bp, Homo sapiens
atacctagaacgccttcccaaggactggtacaaacaagcccagactacaaagactacaataaatacttaactcttcaatgcccagatactgacaaacatccacaagcatgaccatccaagaaaacgtgacctcatcaaacaaactcaataaggcaccagtaaccaattccagaaagacagaggtatgcaacctttcagacagaattcaaaatagctgttataagataacttagtgaaakttaagataacacagaaaaggaattcagaatcctatcagataaatttaacaaagagattgaaataattaagcagaaattctggtgttgaaaaatgcaattgacatactgaagaatgcatcagcgtctcttaacagcagagttgattaagcagaagaaagaattagtgagcttgaagacagcctatttgaagatacacagtcagaagagacaaaagaaaaaaataaaaagaaatgttgcacacctacgggatctagaaaatatctctaaagtttaaatctaagagttattggccttaaagagaaggtaaagagagagatcagagtaggaagtttattcaaaag

SEQ ID NO: 664843 - DNA, 573 bp, Homo sapiens
agaggctaagtgagtgctgaggccaagtgattcactcaattatcaggaacagggtttagctagartcccttttcagttcctattaccgcttgagttcctaatttttaggttaatttctcccatcgtgaggattttctgcaccaaaccaaggacttgccagtttatggatccctgtttcacaggactcatcccttccatgcaaaacaaaatggatcccgatcatattagaactgcaatgcattctgcttctctatgaaaaaattatcacactcatgtatttttcctgcaaagtatagtttagttttgtgttttgaagacgtattagaaccatgatgaagtagcaatcaaaagaaatcttaaatgaagcagataattttgaaattgctttactatgttcagtgctgacatcatatgtgacataaactaggtgcttaatctatatttgagagtggatgcacaaagaggatcttggttttcatctatcgtaaacgtcaatatgattttgcccattgaggcaagaaactattactggacatctgagagactgaatacacaaacagatgatggtcagac

SEQ ID NO: 664844 - DNA, 600 bp, Homo sapiens
ccttgaaaatgaatttgaatgtcagtgtgaataaattagaagataactgtggaaaccttacataccacaggcatctaataacttttttctttttgaaggctcaggatatctgaatgcttagcaaatcctggcatggtatttggaaatccttgttttccaacttacatatttcagctgtcttacatttttttctaaagtccagtggcckgttaggactaagctagctcagattctcatggaaagaagacagttctggcttgctttacactgcaagaacaggcatgcaagaacaaataaaatactgatgtccactaaaaaggaaaatttacggatccaaaatccaaagagcctcagggtgggcacaacgtggccccttgtcccatgctctgagaaaggtgagggccctgacccatgtgcataaggccacacccagcttccttctctggagaggcccctgagaccttgatctctcaggagatgccaatgtcttgacctttcagtagaggattcaagagcacagcattcttgctcagaatgaatcagtccagcaaagggtttatttcttgagcagttaaatctcgtgatcagacaagataccag

SEQ ID NO: 664845 - DNA, 617 bp, Homo sapiens
gaatctataagaaataaacaaatttacaaacaaaacacaatcccattaaaaagagggcaaaggacatgatcagttctcaaaagacacacacgtggccaacaaacatatgaaaaaatgctcaacattactaatcagagaaatgcaaatcgaaaccacaatgagataccatctcacaacagtcagaatggctactattaaaaagtaaaaaaatgacagatattggcgaggttacagagaaaagagaatgcttatatactgctggcgggaatgtaaattagttcaaccatcatgcaaagcagtttgagggtttctcaaagaactcaaagcacaattactatttgactcatcaatttcattattggctatatacccaaagggatataaatcattttatcataaaaacatatgaacacatatgtttatcacagtactattcacaatagcaaagacatagagtcaacctaaatacccatcagtggtagaatggacaaaaatattgtggtacatatataccatggaatactatgcagccataaacaaagaacaagatcatgtcctttgcagcaacatgatggagccrttatcctaagtgaaataatgcaggaagagaaaaccaa

SEQ ID NO: 664846 - DNA, 597 bp, Homo sapiens
cagcctggaccctaaaacacttcctgcaggatcctccacatactctattgtctgccagtcagacgcagaggatccagtggaatgctcttgggtgttgaggaatggcaaagccactacatgaaagagcctgagtccctgaggaactgaataaagcagatatacctctccaacctgcacccccactcacaccaccaacctccaaggacatcagcctgcattggacttgatgtaagtgagaaccttgattaagccattgggattttaggcattgttacatatcccccaaagttggcataccttaaaaaagagggaaaaaggaaagtgggccactcttgacaaatgttaccacaggacagcaagatttgaggaaaaaaaaagaatgcgcagaattttcaaggacaaatcagcagagcttcatgattgactygcattatgaatcagagccttctgcgttctaaaacataaatgacacatatggactgtttacatagcagtgcctactcaacagttgagcttttatagagctgggcaaatgtatttgaaaaatggagctctttgcatagctgatcttaaagaaggaagatggacaggcagtca

SEQ ID NO: 664847 - DNA, 495 bp, Homo sapiens
ttgcttctttgtcaaagatcagttgactatatctgtgtggatctatttctgggctgtctatctgttccattgatctatgtgtttattcttttgctagtaagacactgtcttgattactgtagctttatagtaagtgttaaaattgggtagttgctagctagattaacaaagaaaaacaaagaagatccaactaagtataaccagaaatgacaaagttgacattacaactaatcccacaaaaatacaaaagatcctcggggactataatgaacaactctatgcaaataaattagaaaatatagaggaaatgaaaaaaaaattcctggaaacacacaacctcccgagattgaaccataaagaaagtgaaaacttgaacagaccaataacaagttccaaaatggagtcagtaataaaaaacttactgaccaaaaaaagccctggrccagatgggtctacagctaaattctatcagatgtacaaagaagaaatggtacc

SEQ ID NO: 664848 - DNA, 495 bp, Homo sapiens
ttgcttctttgtcaaagatcagttgactatatctgtgtggatctatttctgggctgtctatctgttccattgatctatgtgtttattcttttgctagtaagacactgtcttgattactgtagctttatagtaagtgttaaaattgggtagttgctagctagattaacaaagaaaaacaaagaagatccaactaagtataaccagaaatgacaaagttgacattacaactaatcccacaaaaatacaaaagatcctcggggactataatgaacaactctatgcaaataaattagaaaatatagaggaaatgaaaaaaaaattcctggaaacacacaacctcccgagattgaaccataaagaaagtgaaaacttgaacagaccaataacaagttccaaaatggagtcagtaataaaaaacttactgaccaaaaaaagccctgggccagwtgggtctacagctaaattctatcagatgtacaaagaagaaatggtacc

SEQ ID NO: 664849 - DNA, 495 bp, Homo sapiens
ttgcttctttgtcaaagatcagttgactatatctgtgtggatctatttctgggctgtctatctgttccattgatctatgtgtttattcttttgctagtaagacactgtcttgattactgtagctttatagtaagtgttaaaattgggtagttgctagctagattaacaaagaaaaacaaagaagatccaactaagtataaccagaaatgacaaagttgacattacaactaatcccacaaaaatacaaaagatcctcggggactataatgaacaactctatgcaaataaattagaaaatatagaggaaatgaaaaaaaaattcctggaaacacacaacctcccgagattgaaccataaagaaagtgaaaacttgaacagaccaataacaagttccaaaatggagtcagtaataaaaaacttactgaccaaaaaaagccctgggccagatgggtctacagctraattctatcagatgtacaaagaagaaatggtacc

SEQ ID NO: 664850 - DNA, 607 bp, Homo sapiens
tattgtgctggcaaatagctccaaaataagtgtaaatactaatgrtggtaaagaactaccttgtcctatttctgacattgatggaaatgcttcttctgttttcctgaaaagtatgatgctgcattttaggttgggatatagcctttgtaccattgaataagtatgcatttttatttatttattttttgttgtttttttgagactaagtctcgctctattacccaggctggagtgtggtggtgtgatcacagctcactgcggcctccattcctggactcaagtgatcctctcacctcagccacctgagtagctgggactacagatacgtactaccacacctggctaatttttgtattttttgtagacgttgggttttaccatgttgttgaggctggtcttgaactcctgagctcaagtgatctgcgtgtttccgcctcccaaagtgattacaggcatgtaccaccacacctggcatattcttattttaaaaatagttttcttgggttttggattttccaaacacctctccagtgtttatagggatgagcacatgatttttcttttttgatctattaatatgatgaattatattaaactgtatgtgaaa

SEQ ID NO: 664851 - DNA, 399 bp, Homo sapiens
tatgccacacccccaacattggggatcaacatgagatttggaggggacaaacaaccaaaccacagcagaaggcaagaacctttcaggctgaggaagaacatgtgcagagggtataaggagagagggaatttggaaactgaaaggctgaagatcagggaaccgtgaggagagaggtagaatgaaactggagtggggcaaaggccttgtgtgctgtcttaaggattcgatctttatcctgagaataaataggaagcaatgataagcttgtgttttaaaatttcaatctggctgtagtgcaaatcttgggtgggaggccagttagagtgggtataaggacaccaggggtgagttargaattaactgcacaagtttaagtgagagaagaaggtggcttgttag

SEQ ID NO: 664852 - DNA, 598 bp, Homo sapiens
tttttgtatttcctgtagagacggagtttcgccatgttggctaagctggtctcgaaytcctgggctcaagcaatcctctcaccttggcttctcaaagtgttgggattacaggcatgagccaccatgcccagctcctttattatacttttttttggtgagggggagactggagttttattattagtctagtcagtctccccaagcattcaaggatcagagtttttaaggacaacttggtgagtggggggaagccagtgagctgggagtgctgattggttaggtcagagaagaaatcacaggaagtagaagctgtcttcttgttttgagtcagttcctgggtggggggccacaagatcagatgagccagtttatcgatctgcgtggtgctagctaatccatcaagtgcaggatctgtaaaatatctcaagcactgatcttatgagcagtttagggagggtcagaatattgaagcctccagctgcatgactcctaaaccataatttctaatcttttttttttttttttattttgacagagcctcactctgtcgcccatgctagagtgcaatcatgcaatcttggctcactgcaacctctgc

SEQ ID NO: 664853 - DNA, 634 bp, Homo sapiens
ctaagtgtgggctggtatgatggtctrcaattggagcctcagccacagagaacttctgtagccaccaaccttctctttcccaagaatcttcaccaaggactcatgggaaagatggggcagagatggggcagaaccagagatctgagagagagcccctgaggtgtgctggcttgatgaaatctgaagacagggcatgaaacctgagagtcatgtatctgaggtttttattattttttcctcttgggaaacaggtgagattaacagaccatgaaagataatggctccagttctcactttgtcttatccatgtgcttttccatacaaccttatgtattcccatttatgagtgacactctcatgctctctttcagctgctacccttttctcttccccctcgaaagtaactgatagcctgacctctaatactacgtttagcttttctatcaaaattatatacgtaaatcacatagcatgtattcttttgtgtctgatttctttcacccaacattatactcatgagagtcatttgtgttggtacaaaaggctgtaatttgtttatgtttctatagcgtatacatgatatggtttgactctgtccccacgcaaatctcaacttgaattgtgtctcccagaa

SEQ ID NO: 664854 - DNA, 557 bp, Homo sapiens
caatttacaggcacaaacagacctgcacacacaaaaagactaaagacagcaatctaattgtcaaaacggaaaactctgggaaaaaaatacaatctatggagtatgacttctttttcacttggaatcccatggggatcatacttattgaaaatcctttgttgattaacatggcaatctcttttgaatcagtatgcaaaacacaccacacagccttcatccggaatcttcaagtgttttgataaataacgtcctttgattgtgttttgaaaaggggggctaactagggaatgagagcagaatggtgactaaactggaaagaaccgtacaattatcaaacagcaggcagcctccatataaacgatgtgcgtttctccaccactcaggctttgacagctggtatctacttcactctagcaagctgaggtctctcctcctgattaggtcagctcccttgatratcataattcttagtgtcacaacaacacagaaacaacaataaagcaatgataacaacaaagtattctgagcattgacatacctttcatctctgcaagttg

SEQ ID NO: 664855 - DNA, 576 bp, Homo sapiens
ataaggttatacccttaaaagtgcaagttcatagtcttgtgggagttgggaatatatgtgtacaaggtagggcaaaatagcaaagacttcagagatgatttgatgttaacaaactacagtatctcctggttgattacaaggattcctattcatttgaacatgggcttttataatcctacatatatattaaaacaaaaatagatacattttctcttttagatatgcattatgaactccaaccactgggaatcaagtaactcaatgggtcaggtacccaaagtctagagtcacacagaattgggttcaaatccaagctctggttttacttatgattgacctgtggcaaaccacattcctatctaagcctcrgtttcttaatttataaaaggagatgtgatttagtctacagggttatcataagcattaaataatgttaacatacattaaataatgtacacactacatatatagtatatatattggatatctctattgtatatatcatatatgtgtatatacacatatatctatatctataacttaattagaagatcctccaagctaagtgctgcattt

SEQ ID NO: 664856 - DNA, 576 bp, Homo sapiens
ataaggttatacccttaaaagtgcaagttcatagtcttgtgggagttgggaatatatgtgtacaaggtagggcaaaatagcaaagacttcagagatgatttgatgttaacaaactacagtatctcctggttgattacaaggattcctattcatttgaacatgggcttttataatcctacatatatattaaaacaaaaatagatacattttctcttttagatatgcattatgaactccaaccactgggaatcaagtaactcaatgggtcaggtacccaaagtctagagtcacacagaattgggttcaaatccaagctctggttttacttatgattgacctgtggcaaaccacattcctatctaagcctcagtttcttaatttataaaaggagatgtgatttagtctacagggttatcataagcattaaataatgttaacatacattaaataatgtacacactacatatatagtatatatattggatatctctattgtatatatcatatatgtgtatatacacatatatctatatctatamcttaattagaagatcctccaagctaagtgctgcattt

SEQ ID NO: 664857 - DNA, 581 bp, Homo sapiens
tcaatgggtataatgttttagtcattacagatgaaaacgttctggagatctgctggacacactgtacatatagttaacagtgctgtactgtacacttcaaaatttgttaagagggtagatctcatgttatgtgtgtgtatgtgttttaccacagtaaaaaaagaaagggaaatggattctggatagcaaacaacaggtgtatacaacaattgttaatactattgcctataataccaaatcttgctctacccaagttttgttttcttagattttctaactgattagattatatttatgtataacgatatactatgaccaaaagcccccaaaacaaacttaatggtaatcgttacactatcacaatattccttaccttgacccatttgaccagacaagatggaaagattttttgtttgtttgtttcttgttttttagaatctagcttgccaatcttagcattgctaaggcttcagcatccaaagtggtgttttaaagatttggtayttgagtgttgatttctacagtattactgggtttaacatgtcctttcttcctacaatgacctgtcaccaatctaacca

SEQ ID NO: 664858 - DNA, 633 bp, Homo sapiens
tggaatagatgtatcatacatttttaatatattcttataattataaaaagctagattatttctagtatttaagtttttataatcaatgctacttttgaaaattaatcatacatctttatgtgtttcagttaacattttgtgattcttacgcatatacagagaaacttaaagctttatatagcaaatttgattttacaaatttttctcttacaaacaatgtttcatggaaatccttacagataaactgctacatatttgctgaaggattttctaaattttgaggtgaaaaagtctcaacaattatagtcaaatttattatttgcttgtatttttttgttaaacastttatagcttgattttttagaacatttatattaattgaactacaaaacttagatgaaaataagccttgaaaaagaggaaaaactcaatgccactttttctcaatgatattttggagaaatataaaattgactcaaaatcacaatttaaatccagtatctaaaatgtgaaaagtttcctaaatgtttttattcttttattttttaaaagcaggctattattaagtttatttttattatcaaagtaaaacatattcaagaacataaatttagaaaaataaaagaacacaca

SEQ ID NO: 664859 - DNA, 607 bp, Homo sapiens
cattctcctgcctcagcctgccgtgtagctgggactacaggcgcccaccaccatgcccagctaattttttgtatttttagtacagacaaggtttcaccgtgttagtcaggatggtctcgatctcctgaccttgtgatctgcctkcctgaacctcccaaagtgctgggattacaggcgtgagccaccacactcagtcaataacattattatttatggaccaacaaacagcataagcaacagggtatcagttgtccttgccctggattcccacgggaaggacatggatggactcagatggatgaatgcacatgcattacgggataggagccctgagctcagggaatgcaaatcccttgtaaagatccctaactatgcctagtctttgttccagaaggagataccaacatgcttgaaaagatggtcaaaacaaagggcagtctgtgtctgctcgtaaagtgtgcagaaatgtgagggactcatgaaaacatgtcacacaatactttcctcttatagtagacaagtgagtctgtatgcacatggggtactggatgaaatactttatcaaaactggtcagaaattcagacaaaaatttaattcaatcaaaca

SEQ ID NO: 664860 - DNA, 607 bp, Homo sapiens
cattctcctgcctcagcctgccgtgtagctgggactacaggcgcccaccaccatgcccagctaattttttgtatttttagtacagacaaggtttcaccgtgttagtcaggatggtctcgatctcctgaccttgtgatctgccttcctgaacctcccaaagtgctgggattacaggcgtgagccaccacactcagtcaataacattattatttatggaccaacaaacagcataagcaacagggtatcagttgtccttgccctggaktcccacgggaaggacatggatggactcagatggatgaatgcacatgcattacgggataggagccctgagctcagggaatgcaaatcccttgtaaagatccctaactatgcctagtctttgttccagaaggagataccaacatgcttgaaaagatggtcaaaacaaagggcagtctgtgtctgctcgtaaagtgtgcagaaatgtgagggactcatgaaaacatgtcacacaatactttcctcttatagtagacaagtgagtctgtatgcacatggggtactggatgaaatactttatcaaaactggtcagaaattcagacaaaaatttaattcaatcaaaca

SEQ ID NO: 664861 - DNA, 622 bp, Homo sapiens
ctcagtcaataacattattatttatggaccaacaaacagcataagcaacagggtatcagttgtccttgccctggattcccacgggaaggacatggatggactcagatggatgaatgcacatgcattacgggatasgagccctgagctcagggaatgcaaatcccttgtaaagatccctaactatgcctagtctttgttccagaaggagataccaacatgcttgaaaagatggtcaaaacaaagggcagtctgtgtctgctcgtaaagtgtgcagaaatgtgagggactcatgaaaacatgtcacacaatactttcctcttatagtagacaagtgagtctgtatgcacatggggtactggatgaaatactttatcaaaactggtcagaaattcagacaaaaatttaattcaatcaaacaactgcatgtaataaataatattttcgtgtggctaccagtgactcacaagtccagctgcttcaaaaaacatcctaattctctagccccatcacagttcaattcaatataatctgtggggaggggcctggcctcagtatttttaaagctttccaggttactttaatgagtaatcaagtcagggctgacaatcactaagccaaaata

SEQ ID NO: 664862 - DNA, 554 bp, Homo sapiens
acttcagatttccttactacagctaacacaatcctaaatttctagtgtggctttcagggattaccaaagacagaatgttgaatgcattgtatggtttctgtcttcagtcataggaaccattctttgctctaggagtagcaatgagatccaaatccaggaaatatggcaatatcttcgatttacatcattagccctcagtatttttttttttttttgagactagaagcagaaggctgcttcatgcctggctgcctatcaaaagaagcaattttcataaatctatagctctgaacaatgaaaacggttcctttcacctctgctgaatcagtgtctggagcatcagggacaggggaaaagttctaacattagcttttttcttctacctgctgctaatcagagtgcaagcgagaagttgtattcttctcagggccagtaaagcagggaaagaaatcactagtgctcctctccrgtctgaggatcaaataaacagcctttttttatcatccagctgctaggggtatggcttgagctacagacagctcattagaaagaac

SEQ ID NO: 664863 - DNA, 573 bp, Homo sapiens
cttgccctctccctccccgcccctccccatatgcagtgctttcccaggctctccggcagccctgctcacttcctcagtggctggtctgccagtcatcagctgagagcagaccctccattcacctggtttcctgtactatgctgtaccatggaacatgcaatatatgtgtgtgtgtgtgtttgtgtgtgtgtatgcacaaatatcagataccccacacagttcaatttaaagaagattatttcttttgataaatactacacattaaaagaaaactcatataaagggtattcaaatttaggttcactagattaattgttatttaccaggttaattagctattatagcctggaaccacacaaaggggtcagcatcctgctccccaaccttcmaagcaggtgtgaagggatccgtggggagattcctgccaggtttcctaactggtgaggtgggggtggggcgaggggcagagaacggcttcccaacagacagccaggcacctgggggaccgccaggtgggagtctgtgctcacaaagaagacattccaggttggcctcagcaacactcatagctcc

SEQ ID NO: 664864 - DNA, 483 bp, Homo sapiens
cctccttccaggacggttaataggaagcccgagggctttaaagatacggtttgacaaccctcaaagtctgcctgctgtctataccagaccccagaccccaaatacctcactcccatttgtctttccccaccttccaaaccaaagcttcagagctggagaactagtgaagcccaggaagcttcctcmatgccagagaagaaaaaggcctgaggtgggaccctatctccttccatgttaagaagtggtacttttccctctgttactcttaaattgatgttcttttgccttctttagaggagccccacgggttcctaagatagggatacattttaatctcagggaccagcattattctttgtgcctctgaactccctttctgagatcagcctgccagcactctttctactcacaggcccatgttcaaggagacagagcatacagggaagtgggataggagagcttctgcccagaatgggggaaatg

SEQ ID NO: 664865 - DNA, 572 bp, Homo sapiens
agttaatcccttgtctctttttttattagaaattcgattttgactgaaacatttacagaattgaaacctcctgagattcttctctaaaacttaacattttcagatgaggtccacatggatgaaattgcttttccagatctcttgatatccctccatttcattttccactactgtattcttccacaatatgcatctttacccagctgaaacatttttttcagtgtcacattattatcccagggaactcamaattttgtgatgttcttggttacattattttatgaagtccttactaggtggtttttcatttaatctgctgaagtaggaattttcaaaagaaagcgtcattcagcatttctagggcaactaaagagaatagttctcacagtggactaccatttatgcattttcaaactgattgctaggagcgactggtgtgtgtttgtgtgtatgtatgttgatacatttagattacatttatattgttcaaatgattgttcatgtgctgattcttggtaaaagtggaatttatgtggctaaatgacatttattaatgctatcagattaacatt

SEQ ID NO: 664866 - DNA, 579 bp, Homo sapiens
tatacttaatttggccctggagttgagtggaggttggcaaggtgattatatgcagcagyggaagcacagaagtagaagaacttttaacgtatttgcaaaataaagctggagaagctaatcaatctgaccttagagaaaagtgtactacattctctgagctataagatctataaattttgagggattttaaatagagagtgacatgatatggaggactagagctcagaaacattaagtcatggggatattggtaagattcaatttttagaaaatatttccaaaagattaaggcaagagtctcttttttatgtcagaaagtaatatgatgatctaatttgtcctgttatgtaatgctatgagataataacatatttgaaggggactattaataataatattaatatgaatattaatagcagatattaatagtaatgacttaatatttattaaatattgcaaatcatttttgaatcgttgtcctgctatttaactgtgacaagttaattgtctaaattctttcacctatttaagtttggctgttatttttactttcaaagtggggatattaacagtaacttt

SEQ ID NO: 664867 - DNA, 540 bp, Homo sapiens
tcttcattctgtgactcttgggatataccagttgtaagacgtaacgagtggctgaagagttagatctctcaccaaaataaggaatagaaggggaggggtggatgctctctagggaaataaatgattgatttagtctgccacacatgtcggtgagtgaaataacagtgctacttttatggaaagaatagaaaaacaaatgatgttgaaaaattattttaaaatatccagggtaaagacaggagagagaygatgtgtttgttggggagtgacatttttatagagagtgttccaatatggggatttgagtgaaggaaacaagtaagccacagagttgtgtcaggggaggagccatccgggtatagaaaataggaaatgaaaggccctgagctaagcacatttttggcctggtcagagaaaagcaaagacgccactgcagctgcactgaaggagcaaggaaatatagtaagcgatgagttagaagaggcagtcatttgtcagaataagcactgggggcctattgtaatgttgaattttatttcg

SEQ ID NO: 664868 - DNA, 473 bp, Homo sapiens
agtgattccaaatattctagatacaggacatacaatggccatggagagtaaaggtaggtgctctttacagagatggtaagaaagttaatgtgattagactgtcgaacatcagaaagactttgtttcttaaaatgctgattcctaggcaccatctgataactaagaatttaaatatttgtagrtaggtcttgggaacccgaattttagtaaaatttgcaggaaaatttaacatggaagtatcatggaactgtcacagtttcctaaccacagagcactataatcttgtgtgtgtgtatgtgtgtgtatttaatcagtgtcatgtgaatccagaaatgatataatagaagaaagactggggattggaagcccagttaaaacattatattttcaaaatagtcccagtaagcaataatgaaaatggatactgcatttgtggatactttccacaacacaatttctgacagccacactga

SEQ ID NO: 664869 - DNA, 559 bp, Homo sapiens
gactagtgtggtcccacctggataagacaggacactctcctcttgtcaagatccttaatcacatctgcacagacctttttgtcatataagatcacatatatattcatgggttctggggattgggacacggacatcttttaggagacagtattcagctgtccacagcaactgaggttaggaccaaagagtaatagcagctaatctcaatgtggcatctagtacggggcaggcgctgccctgagggtgtcacatccaccctccctgattttcactgcagccccccgtagtagatcttaggggcaccccagttttatggccaaggaaccaaacttagagagttgaagtgccatgcccaaggtcatattgctagtaagtgatggagctggrccagtctctctggccccagagcccatgtttttggccgttggtctggactctactgcttcggtagtgcagctcaggttggtaagaaacttcaatcttcaagacaagtccttctgggctttcttctctccctacttcccaccctgccttcatccagaccccactctctgtatgc

SEQ ID NO: 664870 - DNA, 553 bp, Homo sapiens
tatatgaagggagcctgtcaacttattagagcactgggtaagtattagctgattagaaaaaaaattttattagaagtgagcttagttatgtttttgacttgctcagctggggcttagttaatatgaaatatagtaaagtcagatggttttaattttacatttcatttttgtggaattgaattcttgtatctgaatacaaatattttaaaggttgtctggttggtattatcaaagagtttttatcctagatatcttttgcttttaaagcatctaggtagatatgaattgcctttcagaaattgctatgattacaaatcagacatgagtgatttgaagtatttgagtgaacttyagaaattaatactagaattctgacactgtcaaagtgacctacggaatttcagtctttgagagttcctcaaaattgtttcctgcttttccataccagatgctctagaaagagagttttgttgtagagagggaagaaaatctcttgattctgtgctaaaatacataaacaatccttttgctaacttggacttatgacaacata

SEQ ID NO: 664871 - DNA, 615 bp, Homo sapiens
actcatttggctgggaatattcatagcaactctcaaggctagacgtgtttttgtggctcgtctcagtcattgctttcctcccattgtattcccaatctatcattaaataaatgtaattcatctctaaatgaatacagaaaaaagaatctagaatctaaagcttatttctttagcaatttctttatgttgatctcattcagaaggtcacgtggtatatggctgaattagtttcccagctcatatgccacttggaagactgagagtgagacttaggttgattaatgaagaaacattatgagaacattctccagaaccattgtttagatagcaggactaatctactttgacacataattacacatttagaaaaccccgctgtaactgtacacatgagattttcttgaatagaaaatttgactaaatcawataattgataaagagaaaaaagaagcagcaagtgaacctctgtctttttgaagttggactttctgtttctccaaagccaggagctctacttgtaacatgcctacctcattctttttactattattatactttaagttctggtacatgtgcacaatgtgcaggtttgttacatatgtatatatgtgatat

SEQ ID NO: 664872 - DNA, 652 bp, Homo sapiens
gaccttctgttatccagaattttatgttatattctaacagcctatgtaagtttgcatggttcatcttaaagtaatagaaaataaagtacccacatttataaacagcaacattgagggaagggatctttgggttgtgtctttcttagtcacctaacaccaagtgtccstgatacataagaattgatttgcaaagctggagatttgtttatgtttatctcctcttcttattgaagaattgaggcaatagtctttggcaagttaaaagtcgctctcttaatcaagaaacattatgtcattcagaatttataattaaattggattgcaaaccataaaaggagggagtgatctaaaagaaaaaaaaggaacttgtgaacagtcttcattataactattttgaatcgtattaatgcaccactaattattccctaactttcaaaagccaaagatacattttggaagatgataatggatattaccttctttatcatctttctcaataggcaaacctgtggcaactagaaaattctgataatttttgttttcatttccttgctttttccaaataggcaaacttgtagcacgtggagaattctgggacatagttgcaataacagcggctgatgaaaaacaggaacttgcttacaaccaacag

SEQ ID NO: 664873 - DNA, 534 bp, Homo sapiens
tttctcaatcttgaggagaatctgtactattttgaaattgtggttgaatgggagcaaagactgaactgaaacattatttcctgtgatgtttcctgtgtgggccagttaagaacacttaatttttaaatgaaaggattgggtacctttatattcatgaggaatgattccaagttcatgccttcacagctatggttaccaccacctaagtgacctcacctttgttcactgacaagaggcacaaactggaaaggacaaagtctgttggtccttggktttttgtgccctctgattgacctctgactgcacagaggccctcggactctggttctcctttcccactcctaccccatggccagatatggcacttggtgctggagatacaggataacagaaaagattatcatctgaaaggagttgtagagtttattatggatgacagtcacagcaatatacaaatacagtgcaatgtgctcttttctataatagatggagaacgtgcacaaactgtaggagttaggagtgtgccaaaaactg

SEQ ID NO: 664874 - DNA, 594 bp, Homo sapiens
tttagaattaaatagatgggtttgtagactgatcaagagagaattggaggagaatgatgtcagcaggatggccaactaaaagcttctagcgctcatttttccaacaaagatagccaaataacacacaaacaatcatgttttaataaaaacaactaaagaagagtggctgagtatggcaaaggagtaatagaaaccccagtgaacacggaaactgaggttgaccacacagasagcaaaaggaaacacctggtcttcaccaccccacctcccaaccagaatcagctagaaaccaggaggaacctctttttatggtgcaaaggtagacaagaggatcccagtaactgccatcaactctttggacacctacacttctcatcactggggtccccctgaagtcctcacatgcactaagtccagctgagggagctgcctggagtctgcaaatctgtgttccccccagagaaggagctgccactaggccccatcccctgtggcctgcatagctactgtcttaccccatttcggaactggaactactgctggagtgtcttgctccaagggagagtagccatggctcttgtccatccctgaggc

SEQ ID NO: 664875 - DNA, 523 bp, Homo sapiens
tgtctagtttttctatgaagctattccctttactaccataggcctcaaagcgctccaaatctccacttgcacattccacaacaagagtgtttccaaactgctctatcaataggaatgttcaactctgtgaggtgaatgcaatcatcacaaagcagtttctgagaatgcttctatctagtatttaggtgaagatatttccttttccaccacaaaccacaaagccctccaaacgtccacttgcagattctagaaaaasagtgtttcatagctgctctttccaaaggaaagttcaactctgggagttgaatacaaacatcaccaaaaagttcctgagaatgcatctgtatagtttttatgtgaagatgattccgtttccaacgaaatcttcaaagaggtctacatgtccccttgcagatgccacagaaagagagtttcaaaactgcgctctcaaaaggagtgttcaactccgtgagttgaatgcagtcatcacagagaagcttctgagaatgcttctgtctagatg

SEQ ID NO: 664876 - DNA, 571 bp, Homo sapiens
acctctctttcattctgaggttcagcgtaattacaacctctctcacagatgggagtcagctgacaggaaaggataccaaaggcctccaagagggagcttcccttagggaaggttgaaagagtgaggagctggacatcatgccaggaagcagagtttgtgctgctgtcccctgcccccgacaacacctgggcacggcagacgttcttaggattaggaacagtggctgcagatgggaccagagttttagatactgcccctttgggaactcagaggtagtgcatcctgtactgaggtctctgcaactttctgaactactttcacaatattggaccaaagatcctttggatttgtgagaccagtttgcagctttaccacaatcaaatctgaacactaagacttccctgtgtaccgacagattttgcatttcactttcagtaggcatttrgaagcagaacggcctctttggactgaaaaaatctaggttacctgacaacaattgtgaggcagatgctaaggtctctagaaaaatactaggcttcttgctcacctgacacaggtaatttgaaatgtt

SEQ ID NO: 664877 - DNA, 509 bp, Homo sapiens
cacgcctgtaattccagctactcagaaggctgaggcacgagaatcacttgcacccatgaggcagagattgcagtgagctgagatcacaccattgcactccagcctggrtgacagaatgagacaatgcctcatagaattaaggacctattctcatgccaccattttcccagaattctgttagaagacttaggggaaaagcagttttctgtaaatagaaaggagaagcatgattcagcagatatcagactgaagccacctcaaagagcaggcgtcatcaggtggtgcacatgcttgcataggctttacacactttgaccatgggtaaaaacccttggcaaaagctgctgtaaaccaacaagttcaaaagtttgggtaatgtcattttaaaaaggagttgtttgtcccagcatacaaggacaacatttatttgtccagtgggtatgaatcgaggcatatagctccagctgtattgaggtatctgagcacagatttgagctccctaaaacagc

SEQ ID NO: 664878 - DNA, 523 bp, Homo sapiens
ggctggtgaaattttctttctttgaactgttgtttggagttgtctgaatcttgggaaggttgaagcttttactccctctttggagaccttgggatagccaagaagggctttttggttttgttctcatgtgtacttatttctttttgtttggacttatgtatttaggtatacctttgacttaaaactttggtttgtattttgtgtggaataacaacttgytttccattgttttgtttcctatccttgattggaaagacacacttcctgccactgctgagaactgactggtgagtggatgaggcaaacatcttcccaggtcatgaggggaaaggctgctggtaagacaccattccctaggttccggtgaaaggctgactgctcatgggacagagcttgctgtgtgtatatttaaaatatttttaagtgagttgtacggtcaaaagttggcttaactaaaagctgatatttaggtcataattttttaagggcctttctgctttttctctcttgtatcctgtttcac

SEQ ID NO: 664879 - DNA, 622 bp, Homo sapiens
aacatgtgaattaattaatataaatcagaaaaaccaggatcatgagcttgaatattcagttcaaattagctggcaaaactaatagagtccttgtgagggttgggaattctttaattattcgttttagttgtacctttgaccatggttaataaaccaaagcaggttatccttcaccagacacctgctgttcacaaaatggagccaaaacagcaggtgtcggagaaggaggaggaacagaaggtacaaatgggcaaggcagtccagaccatgaaggataaagagaagaaggagctaaaggaggaggagaaattttagcagtctttttaaatacaggaattgttttaggtcatctttttttgtttccttcctgaagagaaaggactttatcagaaccccttttggaagtttccaaataccrttgaaaacaattttcacaattgttctatttcagagtcagctttttctaattgagcatgcaagttaactaatttaggcattaaaggtagtgcattttggccgttgtaatttggggtcatcaggagttatgtgtgatcaattttctaaatatttgcatgaaaatacactataggtgttaaacacaaatctagctgatgtttctaat

SEQ ID NO: 664880 - DNA, 550 bp, Homo sapiens
caatattacagcactagtatttataattctagcaaccctagctattacctcctgcccatcattgtttgtaagatgaggatatttgcattcctacacttctcaacatcctttaaatctcccagctatatattcatgtttgaaatttgacatttgttctctaaatataatgaagtcacctttgctttgtctattgtgggaatcaaaaactcaaatgcctacaaaggcaatgtagtaaacacaaataagtggacaatggtagaaataagaaaaaatgcttggtggggtggctcattcctgtaattccagcactttgaaaggctgaggtgggaggaccacttaaggccaactgaaaccagcctgggcaacatagtgagaccctgtctctcaaaaatatgtttaaaaactagtcaggcatggtgatatgcatctttggttctaggtacttracaggctgaggtgtgtattagttcattttcattgctgataaacacatactcaagatggggcaatttacaaaagaaagaggtttaatggacttacagctccactt

SEQ ID NO: 664881 - DNA, 467 bp, Homo sapiens
taaatttgaataaatgcaaaatcataaagctcttctttaaaaagtacagggaattgaagttatacacaagactcaaaaatattttgatgtttgatttctcaagggatggtagtgactcatataatttcctttttacaaagcactatttattcttggtaatcaaatcaacatatggtacattattaaaatagtttttataaagctatttgtcttacactaataaaacatttaaatatgatttatttgtgtaatatctttcctagctaattcttacagtatttagtatcatccatgttttgtatatttcactaatcgaaacatgactaacagtgtgcagtatttatcaaagcttaatgttgtagcaaacacattctatagggaatrtgtccattttataagttctcatacataacattgcaactaaaatgatagattttacgtactatttgttttcccatataacctaa

SEQ ID NO: 664882 - DNA, 574 bp, Homo sapiens
gtttttcaatttgttgcaaatctcaaaaaaaaattctaatatatttgttggaaaaaatctgcaaataaacggacccacgaagttcaaacacatgctcaaggacgctgtacctattttacagataagttagaacctgatcaggattccttatttaagacatacttactttatttcttaattatgaaaacagtatttgccrtaagttgatttcatttgttcagatatcagtgtgttgtaaaattattcttacccctagaaacaagaatttaagagccatctcctatcaattacatgaaaacccaggaaaaatcataagcaaattcccgctgctattattaacacctctcattgatctaacgagtattatctactgtaacatgtccccctcctgcctcaagcttctgagctgtatcctgcctccaagagcgtatgtcacattgagaaataccaacagatttaaacagatttaacaagacttaattaagaagttcgaaagtctttcctaaaatttagatgctgtcttccaaagtcaaaccaaaatcattgctcatgtctgtactgatgactttctcac

SEQ ID NO: 664883 - DNA, 605 bp, Homo sapiens
ctttttgtcactaaaaagattttgttaaatgttaatactgtgagtttaagattttaatatttactaaataaatattaaataaatattccatgttaggaagtagaataagaaatacagaaagaaagaagcaaaatgtatgtacagaaaatcactaatctaccaaaccataaaatatcaatgacatgggggcatatgaatggtggtaaattttttatatagaacctatataaattttaagtcacttctattactcctattttctgcatcctatcctccctgctctatttaatgaacttgagaacttacaatcttccccatgagttagtcaaaataacttagtctatgtgtgcacatgtattcaattcattattcatcaaatatgtgagagcgcttttggtaagcactagatatgaatgaagaatcaatattgttgcctctatattgktctagctaaatgaaataaaactttcatctgtatcaaaacccattcttttcaggtaacatttcttttaaagacctttatcaatacttcagcttttttccaattggaagcataatgccagaaagcactttgtacaacagccttttgatgattgtgtttgtta

SEQ ID NO: 664884 - DNA, 548 bp, Homo sapiens
gaggtaccaatgaaagatacccagcatgccagtgtcagtgaaactctgtgcctgcttccaggacagcggaacttcaaaggtgcccctaagagctgaattccacgtttttttttttgctttccaaagagtgccacctgctggtcctggttgtctcggtgcttcccagctgttactatggggcaacccagatgctgaatattggtctggttttaggtcctgtctactgcaagaactgttgtactgaggcacatggtactctggaaaccccgagtccctagcgaggcacagcttcttgcatgcgtttctatagtcactcaagtccagatcacccccagattctggacagcatgtactgtaagtctcaaacagaaatggcagygctcctgtatgaagctgaccatttccacagcggttaaacagagctcagtgacgagcaccttaatgcgcacaggcacttccctgggaggcaaatcatccacaaagatggctgggttgggacagatattcacataccaggagcctcacagctctgatatgtctaattgaga

SEQ ID NO: 664885 - DNA, 449 bp, Homo sapiens
aacggtaatcatctgcattttccctaaaaatgactctgagaggcctggcatggtggctcacacctgtcaccatcacttcaggaggtcaaggtgggaagatcacgtgaggccaagagcctgagactagcctgggcaacacagtaagactgtctctacaaaaaataaactagccaggtatggtggcactcacttatagacccagctactcaggaggctgaggcaggaggatcgcttgtacctaggagttcgaggctgcagtgagctatatctagccactgtgctccaggctaggtgacagagtgagacyctgtctctaggggggaaaaaatagattaaattctctgagctggctcacaggttctctgatcaaatcaggcacggtgacttcttggtctgtgcacttccttcttcatcatggttttctcaccaagggccttaggaccagctcc

SEQ ID NO: 664886 - DNA, 449 bp, Homo sapiens
aacggtaatcatctgcattttccctaaaaatgactctgagaggcctggcatggtggctcacacctgtcaccatcacttcaggaggtcaaggtgggaagatcacgtgaggccaagagcctgagactagcctgggcaacacagtaagactgtctctacaaaaaataaactagccaggtatggtggcactcacttatagacccagctactcaggaggctgaggcaggaggatcgcttgtacctaggagttcgaggctgcagtgagctatatctagccactgtgctccaggctaggtgacagagtgagactctgtctctaggggggaaaaaatagattaaattctctgagctggctcacaggttctctgatcaaatcaggcacggtgacttcttggyctgtgcacttccttcttcatcatggttttctcaccaagggccttaggaccagctcc

SEQ ID NO: 664887 - DNA, 577 bp, Homo sapiens
ccaaaggcacttgccccagctcgtgcacttgctcacctgtgtacccctatcccacaatgggtttgagtggctgagtaaatcagccaccctgaaggtatgtattacagcactgaatagataagaccaggatctagttacttgagttcacataaagaactggaccagataagaggaaggagcctcactcgtagagcttgagtagaaattcagagcaaaaactacagacactcagactaagcattaactagcatggggtctttagctgttcctagtttcagaacaagaatgatcccatagcattgggcagagctaatcctctaagtggacgttaaattagggaaaaaaaaaacaaaaacatagacaagagtcaaatcagtcatcattgccaaagattccacttgctgaagttgtaaagttcttaagaagtgcaatagaatatatcaatcttattatttatatactgttatggactaaatggttgtgtctcctcaakattcatatgttgaagtcctaacccccaacaagactatatttgtatatagggcctctgaggagatgataaaggttaaacaaggtc

SEQ ID NO: 664888 - DNA, 610 bp, Homo sapiens
catcccttgtaagctagattcgtaggtattttattctcttcaattgtgaatgggagttcactcttgatttggctgtctgtttgtctgttattggtgtataggaatgcttgtgatttttgaacattgattttgtatcctgagttcttgaaggattctccacactgttttccatagtagttttacaaatttacatttccaccaatagtgtaaaagtgttctcttttcagcacatccatgccaatgtctattatttttttattatggccattcttgcaggagtgaamgtggtatcacactgcagttttaatttgcatttccctgataattagtgatgttgaacattttttcatatgttcatcggccatttgtatatcttcttttgagagttgtctattcatgtccttagcccaccaagaacccaaaagcaaaagcaacaaaaatgaaggtaaatatatggtacttaaacaaaaaagctcctgtagagcaaaagaaataattagcagagtaaacggcccatggagtgggagaaaatcttcacgacctgtgcttctgacgaaagactaatacccagaatctacaaggaatttaaacaaatcagcaagaacaaaac

SEQ ID NO: 664889 - DNA, 610 bp, Homo sapiens
catcccttgtaagctagattcgtaggtattttattctcttcaattgtgaatgggagttcactcttgatttggctgtctgtttgtctgttattggtgtataggaatgcttgtgatttttgaacattgattttgtatcctgagttcttgaaggattctccacactgttttccatagtagttttacaaatttacatttccaccaatagtgtaaaagtgttctcttttcagcacatccatgccaatgtctattatttttttattatggccattcttgcaggagtgaaagtggtatcacactgcagttttaatttgcatttccctgataattagtgatgttgaacattttttcatatgttcatcggccrtttgtatatcttcttttgagagttgtctattcatgtccttagcccaccaagaacccaaaagcaaaagcaacaaaaatgaaggtaaatatatggtacttaaacaaaaaagctcctgtagagcaaaagaaataattagcagagtaaacggcccatggagtgggagaaaatcttcacgacctgtgcttctgacgaaagactaatacccagaatctacaaggaatttaaacaaatcagcaagaacaaaac

SEQ ID NO: 664890 - DNA, 610 bp, Homo sapiens
catcccttgtaagctagattcgtaggtattttattctcttcaattgtgaatgggagttcactcttgatttggctgtctgtttgtctgttattggtgtataggaatgcttgtgatttttgaacattgattttgtatcctgagttcttgaaggattctccacactgttttccatagtagttttacaaatttacatttccaccaatagtgtaaaagtgttctcttttcagcacatccatgccaatgtctattatttttttattatggccattcttgcaggagtgaaagtggtatcacactgcagttttaatttgcatttccctgataattagtgatgttgaacattttttcatatgttcatcggccatttgtatatcttcttttgagagttgtctattcatgtccttagcccaccaagaacccaaaagcaaaagcaacaaaaaygaaggtaaatatatggtacttaaacaaaaaagctcctgtagagcaaaagaaataattagcagagtaaacggcccatggagtgggagaaaatcttcacgacctgtgcttctgacgaaagactaatacccagaatctacaaggaatttaaacaaatcagcaagaacaaaac

SEQ ID NO: 664891 - DNA, 610 bp, Homo sapiens
catcccttgtaagctagattcgtaggtattttattctcttcaattgtgaatgggagttcactcttgatttggctgtctgtttgtctgttattggtgtataggaatgcttgtgatttttgaacattgattttgtatcctgagttcttgaaggattctccacactgttttccatagtagttttacaaatttacatttccaccaatagtgtaaaagtgttctcttttcagcacatccatgccaatgtctattatttttttattatggccattcttgcaggagtgaaagtggtatcacactgcagttttaatttgcatttccctgataattagtgatgttgaacattttttcatatgttcatcggccatttgtatatcttcttttgagagttgtctattcatgtccttagcccaccaagaacccaaaagcaaaagcaacaaaaatgaaggtaaatatatggtacttaaacaaaaaagctcctgtagagcaaaagaaataattagcagagtaaacggcccatggagtgggagaaaatcttcacgacctgtgcttctgacraaagactaatacccagaatctacaaggaatttaaacaaatcagcaagaacaaaac

SEQ ID NO: 664892 - DNA, 590 bp, Homo sapiens
ttgcagtccccttcaggttagttgtcctcctcacacaaatcactcaaaaagtgaagtgagagacaagactgggtgggtggccagagactctcaggatccagcgtgatgagttgccactgcctactgcttcctggattgcaagagagcctctacccscaacacccatcccggcttttggcaccaaaatgtaagagttaaagaaacacaaaaagcagttcagcagtcaaagacagatttattttggcgaataaacctgagagggcttctggctgatttcagccaggagcactctctcttacagattaagagtgtttaaggtttcagggcaagagaacttatcacaggcttggaatgttttgtgtggagaagtttattgtggggctggcatgtctctggtcagggaggggtttatcttagggttggaatgtttctggtggagatgtcatttgtggtttatggtcatgctgaccttagccattaggctgatgccctttggatttaggtggtttttgatcaaggagaactttaaaatggaggtgcttgtccaagatggcaatgctactgctctgtcagatggggctaggagcagg

SEQ ID NO: 664893 - DNA, 445 bp, Homo sapiens
tggtgcacagatattctactgatttttatacattcattttatatcctagaactttattaaagtcgtttatcaattctaggagtcttttggcacagtctttagcatttcctaattatagaattatatcatcagtgaagaaagatagttttacttctttttttcctattttggtgccttttatttatttctcttgcctgattgctctggctaggacttccagtactacgttgaataggagktgtgagcatgggcaaccttgtcttgttccagttctcaagggggatagttcgagctttcactctgtcagtatgatgttggctgtaggtttgtcacaaacagctcttattatcttgaggcatattttcaatgcctggtcttttgagaatttttatcgtgcatcttatcgaatgctttctctgcatctattgaaatgatcatatggttt

SEQ ID NO: 664894 - DNA, 595 bp, Homo sapiens
ttgtggagatggagtctcgctatgttgcccaggctggtcttgaacttctggccacatgctatcctctcacctcgaccccccaaagtacttggattatcggctcaagtacttagatgtattaaccaggatcacagagagcttgattttgtaagtttgagtyagcatgtaataactgcagttgattttgatgcatgtatttaatgagaatcattgctttagactatatgatatttaaaacaaaagagcaataggactgcatggcacaatataaagtctgttatgacatagtgactttaatatattttaattaaaattataatagtaaaagctaaaaatgacaagacaattgttagaaatcatattacgacagcataatcatgtatccacaagtgattgatacaataacatgaactgacttttttctgcaatattaatcagttaatacaggtttttaggtttcagttaactggttaatcataaaatattatataaaatattatcaaattgtgtaagtcatctcactgtattctaaaatttatgttaaaaaaaatatcgctaatctatgttttgcagagatccagaactttaaatccgt

SEQ ID NO: 664895 - DNA, 595 bp, Homo sapiens
ttgtggagatggagtctcgctatgttgcccaggctggtcttgaacttctggccacatgctatcctctcacctcgaccccccaaagtacttggattatcggctcaagtacttagatgtattaaccaggatcacagagagcttgattttgtaagtttgagtcagcatgtaataactgcagttgattttgatgcatgtatttaatgagaatcattgctttagactatatgatatttraaacaaaagagcaataggactgcatggcacaatataaagtctgttatgacatagtgactttaatatattttaattaaaattataatagtaaaagctaaaaatgacaagacaattgttagaaatcatattacgacagcataatcatgtatccacaagtgattgatacaataacatgaactgacttttttctgcaatattaatcagttaatacaggtttttaggtttcagttaactggttaatcataaaatattatataaaatattatcaaattgtgtaagtcatctcactgtattctaaaatttatgttaaaaaaaatatcgctaatctatgttttgcagagatccagaactttaaatccgt

SEQ ID NO: 664896 - DNA, 595 bp, Homo sapiens
ttgtggagatggagtctcgctatgttgcccaggctggtcttgaacttctggccacatgctatcctctcacctcgaccccccaaagtacttggattatcggctcaagtacttagatgtattaaccaggatcacagagagcttgattttgtaagtttgagtcagcatgtaataactgcagttgattttgatgcatgtatttaatgagaatcattgctttagactatatgatatttaaaacaaaagagcaataggactgcatggcacaatataaagtctgttatgacatagtgactttaatatattttaattaaaattataatagtaaaagctaaaaatgacaagacaattgttagaaatcatattacgacagcataatcatgtatccacaagtgattgatacaataacatgaactgacttttttctgcaatattaatcagttaatacaggtttttaggtttcagttaactggttaatcataaaatattatataaaawattatcaaattgtgtaagtcatctcactgtattctaaaatttatgttaaaaaaaatatcgctaatctatgttttgcagagatccagaactttaaatccgt

SEQ ID NO: 664897 - DNA, 577 bp, Homo sapiens
ccctggaatctcatactatttggagaatcaagatcagtaagtgtaatgaaaacagtgtggtgctggcataaagacagacatagagaccaatagaagagaacagaaagccaagaaataaaacctcacatagaaggtcaaatgatttttgacaagggttaaattcagtggggaaaagacagtgtctttagcaaacagtgttgggaaaactgaatatctagatgcaaaagaatgaaattggacccttacctaactccatttacaaaaattacctcaaaatggctcaaagacctaaccatgaaacttacaactacaaaacctttgaaagaaaacacaaaggaaaagtttcacaatactgaatttagcaacaattttttggatatgataccaaaagcacaaacaacaaaagtaaaaatgcgtaaatcacactatatcaaaatttaaaacatctatgcatcaaaggacatgatcaamagagtaataagtggtaagaaaaaatatttgcaaatcatatattataaggggttaatatccagaatatataaagtattcttacaactcaacaagaacaagacaaccc

SEQ ID NO: 664898 - DNA, 493 bp, Homo sapiens
aaatacagatgctagctctgaagtgtgtgctcctaaccatcrcattaggccacctctcttgaagccattactctttacaaagaagtattctagggattatatagagcatctccatctaaaaaagtttttgttcaagtgttacatgtataaagctacacaagatacaggtgtacagtttgatggattttattaaatagacacacttctgtaaccagcatgcagatcaagaaagataataattaccaaaccaccaggggccccacttaagccatcttatggtttttaaacctcccaaagggtgatctctctatagatgtctaacactacagattattatataataattttgtctgtttgaacttttcataaatagaataattttgtacgtactcttctgtcttcttctctcaataccattggtttgagatttgtccatattgtgtgtagttgcattttgttggttctcattgctgaatactattgcattgtgcaa

SEQ ID NO: 664899 - DNA, 493 bp, Homo sapiens
aaatacagatgctagctctgaagtgtgtgctcctaaccatcacattaggccacctctcttgaagccattactctttacaaagaagtattctagggattatatagagcatctccatctaaaaaagtttttgttcaagtgttacatgtataaagctacacaagatacaggtgtacagtttgatggattttattaaatagacacacttctgtaaccagcatgcagatcaagaaagataataattaccaaaccaccaggggccccacttaagccatcttatggtttttaaacctcccaaagggtgatctctctatagatgyctaacactacagattattatataataattttgtctgtttgaacttttcataaatagaataattttgtacgtactcttctgtcttcttctctcaataccattggtttgagatttgtccatattgtgtgtagttgcattttgttggttctcattgctgaatactattgcattgtgcaa

SEQ ID NO: 664900 - DNA, 581 bp, Homo sapiens
ataggcacgtatcaccatgtccagattattgaaaaaaatttttcttttgagatggagttttgctctgtcacccaggctggagtacagtggcttgatctcggctcactgcaacctctgccttccgggttcaaacaattctcctgcctcagcctcctgagtagctgggactacaggcatgtgtcaccacgtctggctaattttttgaatttttggtaggaacagggtttcaccatgttggccaggctggtcttgaactcctgacctcaggtgatccacccactcggcctcccaaagtgttgggattacaggtgtgagccactgcgcctggccgaaagtttttttgtagagatggagtcttgctatgttgcccaggcttgtctcaaactcctggcctcaagctatcctcttgcctcagcctcctgaattgctgggattacaggccgtagctcttggctgtgtctcttctacataatgtatgtttgggatgtttckttatcacgtctgacaatatttttttcttgtaattactaatatacttaggtttgtatctatgatatgattattcattttgtatttcactc

SEQ ID NO: 664901 - DNA, 475 bp, Homo sapiens
gcatttcttgtaagacaggtctggtggtgataaactccctcaactttaatttgcctgggaaagtctttatctctcttttatctctgaagaatagcttttctgggtaaagtatttttggttggaagtttttttttttcccttcagcactttgaatatatcatcccactctctcctggtttgtaaggtttctgctgagaaatccactgttagccttactggaacttctttacatgtgatttgtttcttttctyttgcagcttttaggatcctttctttgtctttggtttttgacaaattgattatgtctcaggagtagtcttgttttgattgaatcagattggagatctttaaccttcttgtacctggatatttatattgctccccaggtttggaaggttttctgctattatttctttaaataagtttccttcccctttatttctctcttcttcttgaacttctataatgtgaacat

SEQ ID NO: 664902 - DNA, 602 bp, Homo sapiens
gcttacacctataactccagcaccttgcgaggccaagacaggaggactgcttgaggcaaggagttccagaccagcttgggcaacatagtgagatcctgtctctacaaaaaattttttaaaaattagctgggtgtagtggcctaagcctgtagttctagctacttgggaggctgagataggagggtcgcttgagcccaggagttagatacagtgagacatctttatgccactgcattcctgcttgggtaacagagtgaaatcccatctcaaaacagacaaacaaaaatggaataaaaaaataattcattcaaaagtagatagtcaaagagaaaaaggcatatagrtcaagtgaaagactgtaaagaattattaaacccaaatatgtcagtaattactaatatattttaaaccaaatatatcaataatcacgttaaataagaatagccagggactactaataaacatcgaaaaacaggaatcagatatatcctaccacctgaatcatccaaagaatggacaaaatatatgaaatgatgagagaatcaggcaccaaaggatagtcatgtttgagacatgagaaataaatggggcaaaccctatta

SEQ ID NO: 664903 - DNA, 602 bp, Homo sapiens
gcttacacctataactccagcaccttgcgaggccaagacaggaggactgcttgaggcaaggagttccagaccagcttgggcaacatagtgagatcctgtctctacaaaaaattttttaaaaattagctgggtgtagtggcctaagcctgtagttctagctacttgggaggctgagataggagggtcgcttgagcccaggagttagatacagtgagacatctttatgccactgcattcctgcttgggtaacagagtgaaatcccatctcaaaacagacaaacaaaaatggaataaaaaaataattcattcaaaagtagatagtcaaagagaaaaaggcatataggtcaagtgaaagaytgtaaagaattattaaacccaaatatgtcagtaattactaatatattttaaaccaaatatatcaataatcacgttaaataagaatagccagggactactaataaacatcgaaaaacaggaatcagatatatcctaccacctgaatcatccaaagaatggacaaaatatatgaaatgatgagagaatcaggcaccaaaggatagtcatgtttgagacatgagaaataaatggggcaaaccctatta

SEQ ID NO: 664904 - DNA, 468 bp, Homo sapiens
agagagttttaaaggaaatttacttcactgatttttcccactcctcacaccagaattttgattgtaatattgcaatagggtcgacataagttattcataaataaataacaatgtttatggggtttctttaycaagggactttatgaaaatgacaaacatgcttgcttgcaaacaactgaacatactctttaaaagagttatacattcttaattcatataacaatgattttaactgagttacaaacacatatgtaaacataaatgacactagagttcggataccaagtttcaaatgcactaagaaatcagtaagaatctccaccagattcttggtgagacccaaatggtattcatcctacaggccctagaacctctactccactgcacgttgtcgtaataccccataatggtagcaactattacgcatcccctaatggcataaaatcatggattttacttgttaatcac

SEQ ID NO: 664905 - DNA, 464 bp, Homo sapiens
cccaaaattaaatttaactatggaacatttttttccacggagtgtcttataggactagtgttctaagtaatgcactttgggaaataaatacatgtatgtttttaggtagtaaaagctgagcctcaggctagatccaagttgttgatagctctcagcatgagacwgcatttctaattttcttcacaacctgtatgaggtcaattacattaagctctcaacatccaggtgcttaaaggcagacagatcatctatttgttggaatgcaattacaaaatttaaaatcctcttttatatctttcttagcactcctagatcttaaacatttttggtgcctcatccttgattcagaatgagaagatctgacagaattagttatttaaagacaagttttagccacttgaccttctgagatgtccatagttattcactcagttcaggtaaagtaagcacagaagaacccatta

SEQ ID NO: 664906 - DNA, 528 bp, Homo sapiens
tcaggaccctgtaagagagctaagacaaatgggagacactatgcctccccaacttctcctctgatctaagggtcaccatcggccttctcaaggcagaggaaccattgtaccaccaagcagcactccagtctgcgctacaggacactgttgcctgccaaccccatgacacctaccacagttcctaccaagcagtagtaacacctggcagaggcatgaacctgacagaatagtggggactctggctgaaaakgcagagtttcagcagggccctggatatgtcaacttattgcaccatttataagaaatgtcctaggaattcctacatgtgcctgaaggaaaggtacttatcatccaaacagagacagaactgagagtgtagggggttgttataaataagcaaatttaaataattttaaacttttttatggacaaataagttgattttgtcatagagttgttcttataaaacagatcaattaaaaaatatttccaaaaggaaaagttttcttaaaaaatatacattcctca

SEQ ID NO: 664907 - DNA, 590 bp, Homo sapiens
ccacttctattttacatagtactagaagtcctggccaaagcaattagacaaaagaaaaaaataaaggtcatccaaattggtaaagaggaagtcaaactgtcactgttcactgatgatatgatcatatacccagaaaaccctaaagactcatccaaaaagctcayggctctgataaatgaattcagtaaagtttcaggctacaaaatcaatgtacacaaattagtaacactgctacacaccaacagcaaccaagctgagaatcaagtcaagaactcaaccccttttacaatagctgcaacaaaaaataaaatacttaggaatatacctaaccaagaaggtgaaagactttcaccaggaaaactacaaaacactgctgaaagaaatcacaaactacacaaacaaatgtaaacacgtcccatgctcatggataggtataatcaatattgaaaaaatgaccatactgccaaaagcaatctacagattcaatgcaattcccataaaaataccacatcattcttcacagaactagaaaaaccaatcctaaaattcatatgaaaccaaaaaagagcctacatagccaaagcaagacc

SEQ ID NO: 664908 - DNA, 543 bp, Homo sapiens
ctgactttagggagattatcttggattgcctagggtcaatgtaaccacaagagttcttaaatgtacaagagggaggcagaagaggaatcactatggagtgacttaatatgataaagacgtggcccacagttggtagttttatttttgtttttgttttttcctcaacttttattttaggctcaagagataaatgtgcagatttgttacacggcaaattacatgtgattgagactttgtgtatgaatgatcctgtcacccaggtagtgagcatagttaccaataggtagtgtttcaacccttgccccaaccccaatagtaatcccctgtctctattgttcccatctttataagcatgtgtacccaatgtttagtttccacttataagagagaacatgcagtatgtggttttctgtttttgcgttaattcacttgggataatrgccccagctgtttccatgtcactgcaagggtataattttattcttttttatggctgtatagtgttccatggtgtatatgtaccacattttctttatcctgtct

SEQ ID NO: 664909 - DNA, 364 bp, Homo sapiens
tccattgtttattccaaatttaacttccacctatactctcattctgttttatagatgccaaatccatgtttgattctatttttcatattaatcctgaaatwctagacaccaaatatcatctcttcctacttagtaatttcctcctttataagaccaagaagcacagggtaagcatacctatgcctgtctattatcttggcccatcctacacattctgattatttactatactaatttgttgatgcatccatcaaatgtgtgctgagtggctaccagcttccaggccaggaagagagaccagatccctgtcctcataaagcctaaattctagtgagtcaggcaatgaacaaatgaacaagtaagt

SEQ ID NO: 664910 - DNA, 364 bp, Homo sapiens
tccattgtttattccaaatttaacttccacctatactctcattctgttttatagatgccaaatccatgtttgattctatttttcatattaatcctgaaatactagacaccaaatatcatctcttcctacttagtaatttcctcctttataagaccaagaagcacagggtaagcatacctatgcctgtctattatcttggcccatcctacacattctgattatttactayactaatttgttgatgcatccatcaaatgtgtgctgagtggctaccagcttccaggccaggaagagagaccagatccctgtcctcataaagcctaaattctagtgagtcaggcaatgaacaaatgaacaagtaagt

SEQ ID NO: 664911 - DNA, 575 bp, Homo sapiens
attatgtgggatattttacacgcattttttattcatttcagaccagccaatctccctctcaggattaaatgaggcaccctatttgacagatgagtttcataaacagtaacaaccccacctaatcatamtatgggcagggccaagggaggaaatacaggagtcttggaggtgagagatacagcttgtttccgcagagagcaacgtgttcaaaggcctagagtagagggtgagtattttgagaattgggacctaaaagaagcctaatattgatgggacagaaagctaagagacacagacagcatctttctttgccagagtgctaggcagatcttaaaaagctttaaggttatctcaatctcttaagttgtgaggccattaacctaaaggcaaatggaagtcactgaggtttttaagcatgagagaaagatgatcatatgtgacatcaaagatcattctggctttggagacagaatgaacgggagaggaataagaaataaaggcagggaggtgattttaggaggtgatttttagcaggccagtaaaaagataatgatggtctaaattaggatggtggc

SEQ ID NO: 664912 - DNA, 575 bp, Homo sapiens
attatgtgggatattttacacgcattttttattcatttcagaccagccaatctccctctcaggattaaatgaggcaccctatttgacagatgagtttcataaacagtaacaaccccacctaatcataatatgggcagggccaagggaggaaatacaggagtcttggaggtgagagatacagcttgtttccgcagagagcaacgtgttcaaaggcctagagtagagggtgagtattttgagaattgggacctaaaagaagcctaatattgatgggacagaaagctaagagacacagacagcatctttctttgccagagtgctaggcagatcttaaaaagctttaaggttatctcaakctcttaagttgtgaggccattaacctaaaggcaaatggaagtcactgaggtttttaagcatgagagaaagatgatcatatgtgacatcaaagatcattctggctttggagacagaatgaacgggagaggaataagaaataaaggcagggaggtgattttaggaggtgatttttagcaggccagtaaaaagataatgatggtctaaattaggatggtggc

SEQ ID NO: 664913 - DNA, 585 bp, Homo sapiens
gctttggagacagaatgaacgggagaggaataagaaataaaggcagggaggtgattttaggaggtgatttttagcaggccagtaaaaagataatgatggtctaaattaggatggtggcagtggcaatgaagagacataaatacgtttgagagatatttagaagtcatcatgtatgagatttttgttataaatcggatataaaaaattagggaaagagaagtgtgatgaataactgccaaggctttaactggggaaactaaatgttcctaatgacacagggaaatgtgccatgggggcaaattcataggaagagggaggagaagggaaatgatgatgagttcagtcataagcaagctgatgttgaggctcctgacaaaaagtatgcaaataagatatcaagagagactggaatatatgggtatgaagctcagccaagatacacatgagggtaaatcagcatataaatagttattgaggcagtgaaagtaaacgagattgcctgaaatcctaygtagtttatagaacatcatagagcctaggagacagcccaaaagaacactaaatttggggtgtgaagggaaggag

SEQ ID NO: 664914 - DNA, 606 bp, Homo sapiens
gaccctcctctaagtgagagagaattcctccagcctgcctgcctgccttcaaactgtgatatcagtttytttcctgccattagactcaaactgaaacattggctctttccaggtctcaagcctggcagccttctgactagaattacactattgtctctcctgagtctccagcttgctgactcaccctgcagatcttgggacatggcagcctccataatgccataagccaattccttgtaataaatctctttctatatatgtatatcctattgcttctgtttttctggaaaaccctaatacaggcattgattcacaaagtgtggtcattgaacaagcagtgtcagcatcacctgagaacttgttagaaatgcagactctctggcctcacccaggccaaccaaatcagaaactctgggggtgggccccagggttttaaaaaactacctgaaagtgattctgatgcaaacttatgctttagcaccactgctctagagcaaggtgcctgcaggcaggagggtttaagagagaacaggtggagggcttgccttatacaggaggagatacattttgcactacaaaagaagcaaagaagagaagaaatgggtt

SEQ ID NO: 664915 - DNA, 391 bp, Homo sapiens
ttttatttttacaaatccatttaagtctacctttctctgaaaaatgttataacccatctctggttatttcactgtttcaattgggggtaggagagaggcaggtatttccccctctctctcggtgcctcaagagtgccatatgtatatagttgaacattaacaagtgattgtggatgatgactccatttccccccgaattccctgtgcctggtataaccatgtcctcacagcatgtgcttyctaagcaacgttccctcttctcattttccctaatctgggatcattctttctcataacaaaaaaaaaagttagaattataactgtgcccaggaaggacacatatctgagtctcaaacatcagtaggtttttgtcactagggatgaagtgtgt

SEQ ID NO: 664916 - DNA, 391 bp, Homo sapiens
ttttatttttacaaatccatttaagtctacctttctctgaaaaatgttataacccatctctggttatttcactgtttcaattgggggtaggagagaggcaggtatttccccctctctctcggtgcctcaagagtgccatatgtatatagttgaacattaacaagtgattgtggatgatgactccatttccccccgaattccctgtgcctggtataaccatgtcctcacagcatgtgcttcctaagcaacgttccctcttctcattttcccwaatctgggatcattctttctcataacaaaaaaaaaagttagaattataactgtgcccaggaaggacacatatctgagtctcaaacatcagtaggtttttgtcactagggatgaagtgtgt

SEQ ID NO: 664917 - DNA, 558 bp, Homo sapiens
aaaggcagcagaaacttctgcagagttaaacatccctgtctgacaactttgaatagagcartggttatcacagcatggcatttgagctctgagaacaaacagactgcctcctcaagcaggtgccagacccccatgtagcctaactgggagacacctcccagtagggtccaacagacacctctgttggtgggtgcccctctaggacaaagtttccagaagaaggatcaggcagcaatatttgctgttctgtaatctacgctggtgatacccaggcaaacagcttctggagtagacctctagcagactccaacagacttgcaaccgagggacctgactgttagaaggaagactaacacacagaaaggaatagcatcaacatcaacaaaaaggacatctacaccaaaaccccatctgtaggtcaccaacttcaaagaccaaaggtagataaaaaccacaaagatggggagaaaccagagcagaaaagctgaaaattctaaaaaccagagtgcctcttctcctccaaaggattgcagctcctcgccagctatggaacaaagc

SEQ ID NO: 664918 - DNA, 579 bp, Homo sapiens
cataatagcatcaaaccccacaaaacatgtatacataaacctaacaaattagacgcttatatgttgaaagctatacaactgataagagaaatgaaaaactcaaatatagagatacaccatgttcatgaattggaagatttgatactcttaatattacaatagtcatcaaacttattcatagatttagcataatcccaatcaaaatatcaggtaattctatgtagcaactgacaagctaattcaaaaatatatagaaaggcagataactaaaatagccaaaacaattctgcagaagaacacatactaattaacttcaaacattactgcaaaatcagtgtggtattggcaaaataataggcacattgctcaatgcagcagaataatccagaaatttttcacccacacaaatatggacaacttaattttgataaaggtgcaaagacagttcaatgggaaaataatagccttttcaaaaaatggtgccrgaacaattggtccctatatgcaaaaaagtacttcaacccatatacaaaatttaaaatgtatcacagacctaaagttaaaacctaaaactataaa

SEQ ID NO: 664919 - DNA, 404 bp, Homo sapiens
ctgacaaatgacttatccagaatataagagccttccaaactcaataacaaaaaaatacgaaaaatgggcaaaacatttgaacaaatacttccatcaaaaaagacaggcagatggcaaataagtacatggaaaaaagctcgacatcactattcatcagagaaacgcaaattaaaacaagatacgaatacatatcgtctaaaaagcaacattttttwaaaaaaatcaacaataccaaatgttggtgaaaacgcagaactggaatattcacacattacaagtgggaatgaaaaatggcacattcattttaaaaaccagttcgtcaattttctgtacagttaaaaatatattactatatagcacagtgatcccatttctaggtgtttatccaagaaaaatgaaaactg

SEQ ID NO: 664920 - DNA, 533 bp, Homo sapiens
gaccttttggtctcatgcagttaagggatgagtagagtgttagagaaataaaaaggcagttgtccctgccccagtctagataaatatcctcatttcaccacgatttaagagaaaagtacatgacaactcattattcattcatgaactgaataactaagctccatttatccaattacactgttagccagatacagacccatttagattgctgggaaagcctgcacagacacacccactacccacacctgcacttagtttctcaaacatgcaacttcttctttctcaagacccttgactctactggaaacttttctcttcaamgtcttggcctcgttttaaatattacaacctcagaaaggtgttccttgacagtgtcatctaaagaatttcccaatgattttctctctcagcccaatgctctcattataaactttcatgatttgtaactgcttccaatatttacttcttcacttgttagtgttccatacgagattctgaaggactaaaaagtttccattcaaaatgctgtataa

SEQ ID NO: 664921 - DNA, 387 bp, Homo sapiens
aaatataaagcagacagaaaaacctgaaaagactagactggcctagcctaccagcctacatctttctcccgtgctggatgcttcttgccctcaaatattggactccaagttcttcagtttttggagttggactggcttatccttgctcctcagtttgcagatgacctattgtgagacattgtgatcgtgtgagttaatacttaayaagcttccctttatctgcactccagcctggcagcagagtgaggctgtctcaaaataaataaacaaacaaacttccatatatctattacatattctattagttctgtccctctagagaaccctgactaatacacacattaaaaagtccactaaggcaaaccttctcaaactttaatgcacatt

SEQ ID NO: 664922 - DNA, 597 bp, Homo sapiens
atataaaaataggataaagggtatgtcaactctaaactccagagaagaatgtgtttatatgtcacaaaacttttcaatgattctactgaagaagtttcagatacaccaacagaaagttgaaacttgttgcagacaccatgtgcccacctactgttacgtaattctcttcttcaccctcacctacagactctagatggtggtgtactcagctcaaaaatgaacaatgataaaacccttatatatttcccagatacyctctcttgtagtcaagagaagcaacattacccattctggccaacagattgaagcaaaagcctactggaaatttctggaaaattcttgctttcctgacagggcctctactccctcctccttgactccatcctctctggcctgaagtatatttttgtgactgcagtggacccagccctaagatccttgagtggcacatactacagagcatttacgagatattagttcatatttttattgctaagaaaatatagggagaaagcttaataacactggatttggtaatgatctcctggacatcacaccaaaagcacagacaacaaaagaaaaaaatagatgaattac

SEQ ID NO: 664923 - DNA, 403 bp, Homo sapiens
gctatagttaattccctaaactgacataccagcagagaaccacacacggccacacacaaacacatacacactgcttgggtttacgttcatacattgtggagtatttaaagctgacacaaactgactcaggggaaaccagatttttctctacctgtccactttctcttaggtaccaatgagtttcaataataaaataggtttgagccatagtaggagctgtgtttttctgagactagatattttgttttccaaattttatgggaggagaggggcattgtcatayaaggtgggtaacttctgggtctccacctatcatgaaccagggtcccagacaaattccctatcatgtgaatttagaaacagatgaataataaaggagatactaacatagaccaagaaccaa

SEQ ID NO: 664924 - DNA, 630 bp, Homo sapiens
accaaaacagcatggtactggtwtaaaaacacacacatagaccaatgaaacagaatagagaacccagaaatataaccaaatatttacaatgaactttgggacttgaggagaagggttggggtggggagggcatgagataaaagactccaaatagggtgcagtatatactgcttgggtgatgggtgcaccaaaatgtcacaaatcaccactgaagaacttactcatgtaaccaaatactacctgtaccccaataacttatgaaaaaataaaagaagcatatatgtgtttgttttttatgtattttaatttttcacactttaatagaaaaacatctttaagactgtccacttctatattccagaaattgtgtttccttaataataatgtttctacattccactgttgctccctggtttgttccctcaatatttttttcatgaatattgcagtggatttcttcttaattgatcttaatgatctttaccacacttcttcatttaagataattgccattaaaatagcatttcctaagtcattttccacagaagtttccataaataagtgtgataaacatcaagttaacaaaacagcaaaaaagttatgttctctgcagcccttctcagagccttt

SEQ ID NO: 664925 - DNA, 558 bp, Homo sapiens
taattctatttcaaaagagatttttcatggcttaccaacctcaaaagcactgtattttggcttttctcaaagaaaccacttcaccagatgtttgaggttttttgtgtacacatttgtgcctttggagataaatttattgactgcatttactggaagacagccctttcacaaagggaatgtaaattttatgctgaaaaatttatcacacatttttttccctgaggaattttagtactaaattaattctttattgattaaagtagcaaagcttttttggcatagtttctaaatatcccttacctaaaagaccattttgataaagccaaaatataaaacttaggccaarcaaccactaccacaatgccccaaattgtgcataagtggatggaaaccactcagtatttctgcatgactatgcacggcctgcccgcttggtatgcattgctccacagaggcattttaagactcaaaggctcttagcccagtgatagcctctctgtggcatgttttccagatcttgggaatgagcaggaatatttacaggcaagtcatagcata

SEQ ID NO: 664926 - DNA, 586 bp, Homo sapiens
aaacttaggccaagcaaccactaccacaatgccccaaattgtgcataagtggatggaaaccactcagtatttctgcatgactatgcacggcctgcccgcttggtatgcattgctccacagaggcattttaagactcaaaggctcttagcccagtgatagcctctctgtggcatgttttccagatcttgggaatgagcaggaatatttacaggcaagtcatagcataacatggcaataaaaaaacatacttaatggaaaaataccaaacacamatctggcatcttctaaacctgttttcctgacagaaaactcaaacacagtaatttttagttaaaaatcagacatttacaaaccccaaatttataaaccaacatgtcattttactaataacaggagatactaaaatgtcaaaatacttcccacatctgaattataccttccctaaactaggaagtagtactcccagatgtttgtttgcataaagagacccagagaaggatgcaaagcacaaaagtccattatttcttctgagaattaaatatatgaaaagacttagtaaactaacttgcccttaacttaaaaacac

SEQ ID NO: 664927 - DNA, 566 bp, Homo sapiens
gaatgagcaggaatatttacaggcaagtcatagcataacatggcaataaaaaaacatacttaatggaaaaataccaaacacacatctggcatcttctaaacctgttttcctgacagaaaactcaaacacagtaatttttagttaaaaatcagacatttacaaaccccaaatttataaaccaacatgtcattttactaataacaggagatactaaaatgtcaaaatacttcccacatctgaattataccttccctaaactaggaagtagtactcccagatgtttgtttgcataaagagacccagagaaggatgcaaagcacaaaagtccattatttcttctgagaattaaatatatgaaaagacttagtaaactaacttgcccttaacttaaaaacacattgtttgcctttctcatatcattgaggcttctcatttgcaaaattatggaaatgtaattacagaagacagaattttcaaagraagtagtgtggcgcagaccagctcctagaggatgcttaataagaagtatatgtggctgtttgggggtggatatgtccatctttctc

SEQ ID NO: 664928 - DNA, 597 bp, Homo sapiens
aattctaattaaggtaacttgatattaaaaatagatacagtcatgtcattgattaacaacaggtatacctcctgaggaatgtgtcattaggtgatttcattgttgtgcaaacatcagagtgtattcacacaagcctagacagtataacctactacacacctaggctgtaaggtatagcctattgctcctagactataaacctgtacagtatgttactatactggctcactgtccaaaccacccaaagtcaggtcacagggccactgtttaagaattccacttgtcacaaattcccttattaagaagtatgtaaaagagagaaagttataaatttttcctattataaatttcagatattctgaaatagaagtgagttatgcaaatgtttaaaagacacttgatggaatagcaattaataggaatacctactctttttttaaaacattttgacgaattgagccttatatcatagtacagktctgaattcaatggatctttaagaaaaacttagtaaggtgactactaaattatttagttgcaccaaaataatttttattataatttcatgctagtcatcgatttctgacttatgtcatt

SEQ ID NO: 664929 - DNA, 574 bp, Homo sapiens
ttcttgttgtgacagtacttttgattgtgttctagacatttttgatattattttaggrtaactagggttttatttgcatcttttgttttagcaaggctcccttgacactgtgccagaagagtatggcaggtacaatcttattactgccaggttgtgggggaagtccaattccccactcagtttccattgccattttaatagggaggtgcaattcattgctggatggtatggaatttcaggctcctcactaggcctctgctgacttcacttcagtagtaggggatggaatgccttattatggctgagaggggttgaaagtctgggtttaccaagtgctctctactgataggagattgctgatacctggcagaactcaaagtccagactggctaatagtctttcaatgatactgctccaggggcagggtgatgggtattgtatgtgtgtgcctggggcagggagggttttctcttattgaggggtgatgagggttgaagtatagtcttccctctggggctttgggtcacagttttttccatggtgtgaggttgaagttactctctcaaagtttttg

SEQ ID NO: 664930 - DNA, 578 bp, Homo sapiens
tctctctttggtttgtagatagccatcttctctctgtatcttcacatggtctttcctttgtgtgcttctgtggcataacatcttcttattataaagacaccattcatattggattagggcttacccatttaccttaattgcctctttaagggccctgcctccaaatacagtcacattctgaggtactaggagttaggacttcaatacacacattttggggataaacaattccgttaataataccttctatttctctggccggctctttctataagttgcttggttgggatgatttgtttgagtttttgtttaccatttcacttttggatactgtctttttcatgaccttttgctccaaagtttgagttgccagccattctytcttccctgctatacccgctccccacatttaaccctctgcctggtccatactcccaggagtctttcagaaaaagcggttcaaaggaaagactattttcatgcttggtatgctcataatcctgtagacatatcagtttggaggctaacatgtgtcaactgatggacaattagcatacagaaaaggattagttaattaa

SEQ ID NO: 664931 - DNA, 644 bp, Homo sapiens
caaaaccttcctgacatttactttgtgtgccaatctgtatcttggcttttcatttgtcttttctgattttcacagcagccctttgtggtagtaattttatctctattttaaggatgaagaaactaaaggttggagaggttaaattatttacctcaagacacacagctactacgtaaaaagcagaccctcccaatactttattcgcttgcttgaaaggccgtagatttgtaggaagagtttggaattatcagattatgggaggaaatttaaatcttcctattgtgttggctgaaatttacttaaaaatgcttaaactttgacagtgtggtattattgatttatttgaattattccttagtctagaaggcttccctcatctggaattcacatcccagttagtgaccagctagaatcctagtcactttggaggccactactacaaggattctcttattggtggcaagattcccccccacttcccaccccttcagcatttataattaatagagagaacattagaactggackgtcattggggaaattagtgaaatttgagaaatatttttatatctcttttagaaatactaaatctgcctgttttaaagatactcctcacccttgaggaatcatatgatctatagtac

SEQ ID NO: 664932 - DNA, 557 bp, Homo sapiens
tgatataaatattttcatatttgmatcataaatgagaatttgcattttgaatattttataaatattaatcaattaaacttcagtgatcaagatattataaatcaaccttctggatgagtattaaaatttgccagcccatagagaaattctctgccttctgtattctaaaatagcatccagataggagtctttaatattaaatggttttttaaagtttctctcactttctttttgcttataaagaaatattttaaaatgtgtacttaaaaatcaaaggaaggctcaggcagtttgtatctgtggacacagctgatgtaatcatttggacaggattgaagtcaatttagtcaaattcgcaaccagctcaattaaaaacaacaccaacaagaacagcagtaacagtggcttctgttttggtcagaattatcaatctagtggtgtttgaagacaataaaaattacctgatgatttgctttaagttgagaagtctaatagctaagtaaagtgacacagtgtcatatgtaatgatatgtaatattcatcaaaagcacaaatat

SEQ ID NO: 664933 - DNA, 557 bp, Homo sapiens
tgatataaatattttcatatttgaatcataaatgagaatttgcattttgaatattttataaatattaatcaattaaacttcagtgatcaagatattataaatcaaccttctggatgagtattaaaatttgccagcccatagagaaattctctgccttctgtattctaaaatagcatccagataggagtctttaatattaaatggttttttaaagtttctctcactttctttttgcttataaagaaatattttaaaatgtgtacttaaaaatcaaaggaaggctcaggcagtttgtatctgtggacacarctgatgtaatcatttggacaggattgaagtcaatttagtcaaattcgcaaccagctcaattaaaaacaacaccaacaagaacagcagtaacagtggcttctgttttggtcagaattatcaatctagtggtgtttgaagacaataaaaattacctgatgatttgctttaagttgagaagtctaatagctaagtaaagtgacacagtgtcatatgtaatgatatgtaatattcatcaaaagcacaaatat

SEQ ID NO: 664934 - DNA, 557 bp, Homo sapiens
tgatataaatattttcatatttgaatcataaatgagaatttgcattttgaatattttataaatattaatcaattaaacttcagtgatcaagatattataaatcaaccttctggatgagtattaaaatttgccagcccatagagaaattctctgccttctgtattctaaaatagcatccagataggagtctttaatattaaatggttttttaaagtttctctcactttctttttgcttataaagaaatattttaaaatgtgtacttaaaaatcaaaggaaggctcaggcagtttgtatctgtggacacagctgatgtaatcatttggacaggattgaagtcaatttagtcaaattygcaaccagctcaattaaaaacaacaccaacaagaacagcagtaacagtggcttctgttttggtcagaattatcaatctagtggtgtttgaagacaataaaaattacctgatgatttgctttaagttgagaagtctaatagctaagtaaagtgacacagtgtcatatgtaatgatatgtaatattcatcaaaagcacaaatat

SEQ ID NO: 664935 - DNA, 503 bp, Homo sapiens
ctctgtcacccaggctggagtgcagtggcaaaatcataggatcactcctgggcttaagtgatcctcccaccttagcctccaagttgctgggactatagacacatgccaacatgcctgcctaattatttttattttttaaagtagggatgggctctccctatgttttccaggatggtctcaaacttttggactcaagtgatcctcttacctcaacctcccaaagagctggaattaaaggtgtgagccactgcacccagcctcatatggcatttatacattgcttcaagtctaacagaatgagacttatgtctattatgacatattcctttgctcagtaatgcatctcttaacaacaaggatacattctgagaaatgtattgttaggcagttttttgttgtgtgaatgccatagagtgtacttacacaagcytagatggcatagcctaccacacacctaggctgtatggtatagcctattgctcctaggctataactgtacagca

SEQ ID NO: 664936 - DNA, 503 bp, Homo sapiens
ctctgtcacccaggctggagtgcagtggcaaaatcataggatcactcctgggcttaagtgatcctcccaccttagcctccaagttgctgggactatagacacatgccaacatgcctgcctaattatttttattttttaaagtagggatgggctctccctatgttttccaggatggtctcaaacttttggactcaagtgatcctcttacctcaacctcccaaagagctggaattaaaggtgtgagccactgcacccagcctcatatggcatttatacattgcttcaagtctaacagaatgagacttatgtctattatgacatattcctttgctcagtaatgcatctcttaacaacaaggatacattctgagaaatgtattgttaggcagttttttgttgtgtgaatgccatagagtgtacttacacaagcctagatggcatagcytaccacacacctaggctgtatggtatagcctattgctcctaggctataactgtacagca

SEQ ID NO: 664937 - DNA, 580 bp, Homo sapiens
tcattattacactgagttttaaatataattcatttataaccatataatagacacataatattactgtgtgacaagaaatactcttagatgtagcaagaaaaaatggaaattacaaacatatgtgatttcaaaataattcttaacatttcttcaggggttattacaaagcaaatgaaaggartttttacaaggtgtagttcagttgcagtttccctcctctgtattcacattattgccacagcttacgaatgacaaacatttgtggactatggcagcaatctgttgggtgtttcaatctattttgagctgaaattgattagcactttatgaaaagtgtacagaaaattaccatgcttatcaaggcaaatcaagccataattctgcctttttttttctacacctgcagctatgaatattttttggtgggtacattgagacgtgctcaagaatatacatattggactgcatatcatgcaatttattctgatcttactgacagtttgcaaacaaaaactcaaaacaagatgcaactgtgtgcagctcctgaactgtaggttctgattttggcatccatgaatgc

SEQ ID NO: 664938 - DNA, 545 bp, Homo sapiens
tttttttttttggtctgaaatatcagcaatatagcttctaaatttttatggctgcttttctgtatcactttatcttatgtgaaatttcagaatgatttatctgtaataaacatcatcatctgacatggctgaaaacagtactttttgttcattttgatttttggataatgcaaaattatagattttttaaaaattatattcaaagaatactgagtgcaagacaatctttctaggttaaaaaatatcttataaacctgaattgtcaattattattgtatcccagatgtatggaagttaatggatagtcagtaacatacaggactagcagaaggtttgttgttataggtaatctggagagaagccaggtaagtggaatttgggatttgctgctgttgccagaaagcagcacagagacatggtaagtggcaagacccagrtaactaaaacaaccatgtcttagtccttttatgctgctgtaacagaatatcacagactgagtaatttataatgaacagaactttatttgtcttctggttctggagact

SEQ ID NO: 664939 - DNA, 613 bp, Homo sapiens
gtcagttgctcctggagtcaaataacctaaatttgagtcaacttattatccagtgcccttaggaatgtcatttaaattatttaagtatctgtttccttatctatgaagggagaggaagaacacctacttaaaaggacaggaggtaatattttaaaggcagttcctaaattgtacatgtttaaatacacataggtatgtttattaagtgaaaaggcatttgcaatacatggaatcttaaaattatatcagtaatttaaatttaatttctaaagttatagctgtaaaacaagtatcttcctgtatcagctctgggcaacaacttccccaggtgatatttgagctgaatgagctcaagtttgaattaacgtgatatctcaatgtagtgtttcttgggttgattgcagcaactctgagtagctggttctcaggcaagacctctttcttatcttgcagcttttaccattaggagatakatcacctatcttgccttacattaagaagagtatcttcatgtccctttctgagctacacacgatgtgatttagtttggatttcattctttcagaaaagtgtagccatttgcttgctgcaatagaacttttttccctccgca

SEQ ID NO: 664940 - DNA, 459 bp, Homo sapiens
tcactgtggtactatgataggagactccactctggttcttaggaggacagaaccaaggaaaatgagagaaaatgtggagaggagtcttttgctgtagaattggcagtcatcttttagggagatttttaaataagctagttttggtttcacattcttctatcagattttcaccaccttagacttcccctgtttcccctcrctgcctttttcagtcctcctttctcctccccgcagcctgctttactcataaaaagtgctttgtggcattctagcattttcttagaggggagcagtttgactgaacaacttcttctaagtgtatgaatgagacataatataagcataaccctaacctgaacgaaggtatttgcattttctgaagaggacacttgaatcactaattgctggcattttgagctacctgaaaaagctatgtgaaaatcctcagagaatgtagag

SEQ ID NO: 664941 - DNA, 459 bp, Homo sapiens
tcactgtggtactatgataggagactccactctggttcttaggaggacagaaccaaggaaaatgagagaaaatgtggagaggagtcttttgctgtagaattggcagtcatcttttagggagatttttaaataagctagttttggtttcacattcttctatcagattttcaccaccttagacttcccctgtttcccctcgctgcctttttcagtcctcctttctcctccccscagcctgctttactcataaaaagtgctttgtggcattctagcattttcttagaggggagcagtttgactgaacaacttcttctaagtgtatgaatgagacataatataagcataaccctaacctgaacgaaggtatttgcattttctgaagaggacacttgaatcactaattgctggcattttgagctacctgaaaaagctatgtgaaaatcctcagagaatgtagag

SEQ ID NO: 664942 - DNA, 601 bp, Homo sapiens
attggcagtggtgctcaggttgctgtatttggaatatagaatgatctgcttgtctcaagtgaaaaactccttgtagacttggaaaaagagtttgcctttgactgcataggctggtacctattttttgattttctagcatttttccaattggcccattcaacttcctttataccctttgtgatgtgaggtatcggatgcaatattctttgtatggtgccatccttcatccagatgcatatgttctagtgaagccaaactgaaggaagagaatgactctattatgatggattagtgtgcatatattagtctattttcatcctgctaataaagatgtacgcaggactgggcaatttacaaaagaaagaggtttaatgaacttaacagttccacatggttgtagaggcctcacaatcatggtggaaagcaagaaggaacaagtcacgtcttacatggatggcagcaggcaaagagagagagcttgtgcagggaaactcccatttttaaaaccatcagacctcatgagacccactcaccatcakgagaatagcatgggaaagactagccctcatgattcaacagtctcccactgggtcccttccac

SEQ ID NO: 664943 - DNA, 264 bp, Homo sapiens
tgtttcatctgacaaattgataataattttatctattttgcagtattgctatgaagattggatgagtaaatagcaygctgtctatttgttgaattattaagataaatattttcattttctcagtataaatatactgtaaattgtgttatcactgccaaaataattaagcttcaaaaaggaaataaatagctcctctcactgtacctagaattaatgtcaggaatggtacaggctgtaaaacaatagaaatgtgcagatgcccat

SEQ ID NO: 664944 - DNA, 520 bp, Homo sapiens
aagctggagaaaagaagaaagattagcaacgagtcactcctcatccaggcacatattttacaaaaataggtcagagaccaaactcagttattcctggttggaaaattattatcaattgctttatgatgttgctttgatgttgcaatgtatttggttacgtatactttgtatttctggtgcttatatatacttccaataaacagtaaatctgtgtataaatgcatctgctatacaatgctgatactggcaaaacacattttattagctattcagacaactaatgcagtttctccctgaaatcatcttcctcaatggattagtgcatgattaatttttccttggacttctttctcagacataaatgttttactcaaattcttacaatcaaaaatgagactatgtagttggaacaggcagagtttacatgrccttaatttaaagaggcattgtctttggtcaactttttaaaaattacatttggtctaatcatctttacaaatgcttacattcagtaggcaaa

SEQ ID NO: 664945 - DNA, 430 bp, Homo sapiens
caatgcatgaaaagaattataacactgtctttgacactgtcctaggtgcttgtgacaagtacagaagaaacaggtatgatctggcctttaaagagcttccattccagttgagccctgagtaccaagaaattctaaagaagaacaaaaatagcaatcacaagttatagttaactgctaattagtgtggaggaaaacagttgtcaaatttaaatatatatggcttacaaggctctctataatatggtctctatatatcccaacatcctcagttcataagtctccactggggctaggagcagtggttcatgcctctaatcccagcactttgggaggcccagggaggatgatcacttgaacccaggagttcaagtcsagcccgggcaatatagtgagaacccatctctaaaaatgaaaataaaaatgaagaaaa

SEQ ID NO: 664946 - DNA, 563 bp, Homo sapiens
tcaggaatttaggggaataaatgtaatggtgaatgggaaatgaagataaaggaaaaggatgctgactgtggaaatgataaagsgaaactccttaagtaaagaaaaagtgagtggagaaacttatggccaaagggtcaaaattgccacatgtgaaacatttccaaactgatttcttattactaaatgtgaaataatttgggtgtggtttttgggtgtattaaattgttttctctctgtggcaagactttggaattcctttcatttttgtaggaactgtgatgttttccagtgttgtcatacattgaattcattgttctgaatttcttgcaaggacttgtgactaccatagttctaagaatttcagatccccctaaaaactatcacttgttaaccttgactctagattctatataatatatattctatatgatatattatacatattatatattatataaaaacaaaaaaaaaggataaaaaatgacaggggatacggggtatagtattatttgggatattggatatatatcacatagaatatatatgtatatggagagagatac

SEQ ID NO: 664947 - DNA, 632 bp, Homo sapiens
gttcgttaattccattgcactttaggactaccwtgaggaagaattggcggatagcttctttctttttacatacatggaaactcacatcttagagaggagaaatcagattggggtcacacagctagtaggtaatagaactggtggtttccacaatttacttaatttggaaacgttattaaatactgcttaatgtttaaaagattcttactttccagtgagtgctatgagtcagttatctataattatactatagaactctgtagagtaaacaaaacatggtttgaaatactgtcttcatatcagaatcacctacaaatctttagtagattaagactctttgagagtcgcactaagacccttcccatgtacagtccagaattttaagtcagttaactaaataagagttcatagcaacattttattgtatggtcataccataattcattttccttcctgaaaaaaatataaataacactattggaagtgggagatatggagtaggaggaaaagattggcaatctaattgaaatagcaagaataaaatctatcttgaattggagaagcatatttatacttccactaaaatttatcaagcattttgagaatgaatgatgacagcagtattaacagtt

SEQ ID NO: 664948 - DNA, 613 bp, Homo sapiens
aaaacatggtttgaaatactgtcttcatatcagaatcacctacaaatctttagtagattaagactctttgagagtcgcactaagacccttcccatgtacagtccagaattttaagtcagttaactaaataagagttcatagcaacattttattgtatggtcataccataattcattttccttcctgaaaaaaatataaataacactattggaagtgggagatatggagtaggaggaaaagattggcaatctaattgaaatagcaagaataaaatctatcttgaattggagaagcatatttatacttccactaaaatttatcaagcattttgagaatgaatgatgacagcagtattaacagttgacatataaataatatgctgtaagaatttagcttgaaaaattattttatgagttttcttgcattcaaggtttctgacatttacagtaaatcttgggatacatttctcattctttattttcctgttttcattkttaaacatcatggatatttgagccactacattatgattcacagtaattcctgttagatttcttcattgcaaagctgaataaaacaagtatttcttttgaattcttttaaataagtgaaa

SEQ ID NO: 664949 - DNA, 313 bp, Homo sapiens
aactttgggtctgtgctaaaggggagctgtagaggaagtataggtcctatctccaagtggtcctgattagggcaaaggaactggaatactaatgttcttgcctctgtctgatacttattaagagatgcacgtggaagaaatgtacatatacaagcttttycatattcacagaatttcaggaaaagtacactctggaagtttgttggcagtcctcgaacaaagggagacatagccatggctattggtactgaaagcatagtggccaagggatccacagggaagtggcaagagcatctttccacaagtgacccta

SEQ ID NO: 664950 - DNA, 557 bp, Homo sapiens
tttgtatagttccaggtcttagatttcagtccttaatccatcttgagctgatttttgtacaaagtgagagatgaggatccagttcaacccctcttacaatagctgcaaaaaaacaaaaacaaaaacaaacaaacaaacaaacaaaacccttaggaatatatctaaccaaggagttgaaagacctctacagggaaaagtataaaacactgctgaaagaaaacataractacacaaacaaatggaaacacattctgtgctcatggatgggtagattgaacatggtgaaaatgaccatactgacaaaagcaatctacaaattcagtgcaatctccatcaaattaccaccatcattcttaacagaattagaaaaaaacaattctaaaattcatatggaactaaaaaagagcccgcatagccaaagcaggactaaggaaaaagaataaatctggagtcatcacactacctgatttcaagctatactataaggccatagtcaccaaaagagcatggtactggtattaaaataggcacataatccaatggaacagaagagagaa

SEQ ID NO: 664951 - DNA, 557 bp, Homo sapiens
tttgtatagttccaggtcttagatttcagtccttaatccatcttgagctgatttttgtacaaagtgagagatgaggatccagttcaacccctcttacaatagctgcaaaaaaacaaaaacaaaaacaaacaaacaaacaaacaaaacccttaggaatatatctaaccaaggagttgaaagacctctacagggaaaagtataaaacactgctgaaagaaaacataaactacacaaacaaatggaaacacattctgtgctcatggatgggtagattgaacatggtgaaaatgaccatactgacaaaagcaatctacaaattcagtgcaatctccatcaaattaccaccatcattcttaacagaattagaaaaaaacaattctaaaattcatatggaactaaaaaagagcccgcatagccaaarcaggactaaggaaaaagaataaatctggagtcatcacactacctgatttcaagctatactataaggccatagtcaccaaaagagcatggtactggtattaaaataggcacataatccaatggaacagaagagagaa

SEQ ID NO: 664952 - DNA, 576 bp, Homo sapiens
tgtaaattaattacttatgaaaatgtatgaaaygtgtatctaccacttttcttattgtgggggctgaagctattgaaatttcctttgcaaaattatgactgagatagtgaaagagatctaacctaaccaactccatcttggttctaaaccttaagctatccttgtttcttcctggacgtaggctgaactaactttgagagggacttagtttaaagtttaaaacaaagacaataaaagccttttcccaaaaggaacctggagactagactgcttttgtaggactaacaagatagctgcaagattagaaattatggcataagagtcatgcagctggaagctacaagattctgaccctccctaaactgctcccaagatcaatgcttgagatattttgcagaccctgcaatggatgtatcagctggcactgcccagattgattaactggctcatttgatcttgtggcccccacccaggaactgactcagtgcaagaggacagcttcaattccctatgatttcatcttctacctaaccaagaagaactcctggctcaccggattcccctcacccaccaagt

SEQ ID NO: 664953 - DNA, 576 bp, Homo sapiens
tgtaaattaattacttatgaaaatgtatgaaacgtgtatctaccacttttcttattgtgggggctgaagctattgaaatttcctttgcaaaattatgactgagatagtgaaagagatctaacctaaccaactccatcttggttctaaaccttaagctatccttgtttcttcctggacgtaggctgaactaactttgagagggacttagtttaaagtttaaaacaaagacaataaaagccttttcccaaaaggaacctggagactagactgcttttgtaggactaacaagatagctgcaagattagaaattatggcataagagtcatgcagctggaagctacaagattctgaccctccctaaactgctcccaagatcaatgcttgagatattttgcagaccctgcaatggatgtatcagctggcactgcccagattgattaactggctcatttgatcttgtggcccccacccaggaactgactcagtgcaagaggacagcttcaattccctatgatttcatcttctacctaaccaagmagaactcctggctcaccggattcccctcacccaccaagt

SEQ ID NO: 664954 - DNA, 600 bp, Homo sapiens
tgaaacccttgggtggttacacttttgacttcctaaagttttgctgaaaagcactgacatgaggcaaattgaataatcgcagaaaaggcataccaatttatttaatgggtatacatagaatgaagaccttcagaatgaagacccaaactcccaatgaggaacagaagcttatataccaccttgaggttacagaaagaatgggggcttggatgctggtaaaacagaatwtgggaagggagagaagaggaattctgttgaagggccataaatgattactatctaacagaaactgacttgtaaatagctctctttagatttgaaatgatcctcagaaatagtcattatcctgaaaacaggtctgttcaagtgtggttacatttgtcatcttctttcttgtaatgaaaaataagacaaaagggagggaaataagaataatttttctccttggtgggtgagttctccctttatgtagatggggaaaagtttcttttgtcacttattgatctcttaggatttttcatttaaaatactcattataccagggagacatattttgggtgaaatattttgatttccttcattattaatgacctctggaca

SEQ ID NO: 664955 - DNA, 652 bp, Homo sapiens
ggattgcagtaatgaagacagtgattaattgtgcaagaatagacaaaccatccaagaaaacaaaatagagagctgaaaagcagacccaggcttatattgatcagtgatataggtggcataacaggagggtgacaaaaagacagttatttccataaattgtacttcatcaattgtatatctgagagagagagaaagagagagaaattgtttttattcatagtataatatataattgcttctattcatagagagaaagacagagagataactgtttctattcatagtataagcatcttaatttcaggtggtttttagatttttatgtgaaagttaaaaatagtaaatcctaagagaggataatatagaggacgttttcaccacatggggtatataaagattaataaaactggacacaaagtctctgattataaaaaaaattgacaaatattttgactgtaagagattatattaataaatacacaatacaattttaagagaaatgaaatgagaaatgaaaagagcagcagtagagtgggatgtcamagtacatatgactgacaaaaaattacaaaatcaagactaaaatggcataccactagagcagctataaatacaaagagtaaaaatgctcttctgtttggaggacgtgaag

SEQ ID NO: 664956 - DNA, 559 bp, Homo sapiens
tgcactgtgatataaaagtatagcacatgcaattagtacagtacatatttgataataactatgttattgtactttttatagttattttagaatatactcctactgtataacaggttagctgtaaaaacaggagttcttcagctccatcaggatcttatgggctcaccgtcatatatgcagtccattattgactgaggcattgttatgtggtgcatgactctgtctttctgaacttaaaataagaattttaaattggatgtcggtagcaggaatgtgtctgaggcttgcaaaatggggccrtgcttcttatggctgcggagctgtaagcctgaacaaactgttttcaagctgttgtgccgcccagaacacccactgctaattatgggatgtgcattggagtgcccaaatggaccattcttaagcatcacttccttcttttgtcttctaaacaggttctagttgaagaataccaaggttattcttgttagctaaaagaagtataatgagttctttcttgcctaatttcaggtttgaacttaagcttacatcagaatttcct

SEQ ID NO: 664957 - DNA, 635 bp, Homo sapiens
gccgtgcttcttatggctgcggagctgtaagcctgaacaaactgttttcaagctgttgtgccgcccagaacacccactgctaattatgggatgtgcattggagtgcccaaatggaccattcttaagcatcacttccttcttttgtcttctaaacaggttctagttgaagaataccaaggttattcttgttagctaaaagaagtataatgagttctttcttgcctaatttcaggtttgaacttaagcttacatcagaatttcctgaggtttgcttaaaatgcagactccttagctgygtctacagaggctgatgttgtaattttctaggtttctctccatgaattttcactttggacagacaacctagatgatgttacaggtgatccatgttctatactttgataaattcttcttcggctaaatgattgtattgactgtatgcctctgctgtgcaagttactaaattcccattgtgctcattggttttggcacatccaatgtggtttcctgggaacttgaggcatgtggccccacatggagatgggaatggatggcctagccaaacaagggcccttcctgccccgtcagtctagctgcgattttctcttaggtgaatggatctgactctcttaact

SEQ ID NO: 664958 - DNA, 635 bp, Homo sapiens
gccgtgcttcttatggctgcggagctgtaagcctgaacaaactgttttcaagctgttgtgccgcccagaacacccactgctaattatgggatgtgcattggagtgcccaaatggaccattcttaagcatcacttccttcttttgtcttctaaacaggttctagttgaagaataccaaggttattcttgttagctaaaagaagtataatgagttctttcttgcctaatttcaggtttgaacttaagcttacatcagaatttcctgaggtttgcttaaaatgcagactccttagctgcgtctacagaggctgatgttgtaattttctaggtttctctccatgaattttcacyttggacagacaacctagatgatgttacaggtgatccatgttctatactttgataaattcttcttcggctaaatgattgtattgactgtatgcctctgctgtgcaagttactaaattcccattgtgctcattggttttggcacatccaatgtggtttcctgggaacttgaggcatgtggccccacatggagatgggaatggatggcctagccaaacaagggcccttcctgccccgtcagtctagctgcgattttctcttaggtgaatggatctgactctcttaact

SEQ ID NO: 664959 - DNA, 525 bp, Homo sapiens
aaaattgaaatggcaatggcaggcatcttttagaaagatcagagaagatgggaagtcaaggaccactctcatcataataaattgtatcttatcacacatttgtttcttagtgaagcatccactatgagaagggaatgaaacaattcccctgattcttcattccttggtttatttttttgtgttgcatcaataattatttttcttttgaagatgtattcatattcgtttgtatccaccattaartttatttcataatttaaagtattcacctattttatttctcttcactgacaatgtacagttgaagcgtaggttcaaggtatttctaatgtttattttatgttttccaaaactctgccatctgataaaagaaaaacttcagcagaattaaatttaaaggagtttaattgagcaatgaatgatttgtgaatcgggcagcccccagaatcacagtagattcacagactcctgcacagccatgtggtggaagagagttgtagacaaaaaagggaagtgacatacaga

SEQ ID NO: 664960 - DNA, 543 bp, Homo sapiens
attccgggcccacgaacatatttgacagagatgtttaaccaggaggatttgtgggttaaagttatcttaaggttcacatgaagggatttgttcagtgaactagaaaaacaatgcttttctagagataaaagaggttagaagagtaacaggtaggaaggtagctgaaaacttccttaatgtgattaaaccaactcaagcagtaaattaaacatactttattgttaatgttgaaaaatgtttatttcattgggtttgattagaagcatgaattrattctaaatgttatcacatttttcagagaggcctttttatgctaattatgtgttagtgaactggagatcttaaagtataaattcatctttgtaaaagggctacaataatgaaaaacattaattattaaaccacaaatgatatttattgcctgtcttgctctctgcattttcaaaagtgcaaaacagttgcctttgtgagttttaaatagtctagaaagtctagaaagatgaatatgtgttcattctttggaattgaaaatagggaaatagt

SEQ ID NO: 664961 - DNA, 543 bp, Homo sapiens
attccgggcccacgaacatatttgacagagatgtttaaccaggaggatttgtgggttaaagttatcttaaggttcacatgaagggatttgttcagtgaactagaaaaacaatgcttttctagagataaaagaggttagaagagtaacaggtaggaaggtagctgaaaacttccttaatgtgattaaaccaactcaagcagtaaattaaacatactttattgttaatgttgaaaaatgtttatttcattgggtttgattagaagcatgaattgattctaaatgttatcacatttttcagagaggcctttttatgctaattatgtgttagtgaactggagatcttaaagtataaattcrtctttgtaaaagggctacaataatgaaaaacattaattattaaaccacaaatgatatttattgcctgtcttgctctctgcattttcaaaagtgcaaaacagttgcctttgtgagttttaaatagtctagaaagtctagaaagatgaatatgtgttcattctttggaattgaaaatagggaaatagt

SEQ ID NO: 664962 - DNA, 495 bp, Homo sapiens
aaagtggccttcatccaaggccattcctakcccaatgactgcaatcacaccctgagagaggcaagcccttctgagactatctgatacgcttgctgtccacagaaattgcttggaggatttcaggagcagctcctttgctgccatcacaggagtttggggacatagaggacatctactacctggagagggtgaggaagcagaaatcttgtgagtggccacatctcagcctgcccaaagggtgtgtaatcccagcaggttaattttctagaacccaagaagcaggatgcattacaggccctctgttttcctctgggagcttttacaaggccaaaacatctgactgaaacgattacaggctcagcagctccctgattacactctatcctggagctcagaacccatttctataggacccatgactggatagtctagcaaacactcccccagaaatgtacccccaacccatcaactgatgatgggatacatgagaagggc

SEQ ID NO: 664963 - DNA, 495 bp, Homo sapiens
aaagtggccttcatccaaggccattcctagcccaatgactgcaatcacaccctgagagaggcaagcccttctgagactatctgatacgcttgctgtccacagaaattgcttggaggatttcaggagcagctcctttgctgccrtcacaggagtttggggacatagaggacatctactacctggagagggtgaggaagcagaaatcttgtgagtggccacatctcagcctgcccaaagggtgtgtaatcccagcaggttaattttctagaacccaagaagcaggatgcattacaggccctctgttttcctctgggagcttttacaaggccaaaacatctgactgaaacgattacaggctcagcagctccctgattacactctatcctggagctcagaacccatttctataggacccatgactggatagtctagcaaacactcccccagaaatgtacccccaacccatcaactgatgatgggatacatgagaagggc

SEQ ID NO: 664964 - DNA, 495 bp, Homo sapiens
aaagtggccttcatccaaggccattcctagcccaatgactgcaatcacaccctgagagaggcaagcccttctgagactatctgatacgcttgctgtccacagaaattgcttggaggatttcaggagcagctcctttgctgccatcacaggagtttggggacatagaggacatctactacctggagagggtgaggaagcagaaatcttgtgrgtggccacatctcagcctgcccaaagggtgtgtaatcccagcaggttaattttctagaacccaagaagcaggatgcattacaggccctctgttttcctctgggagcttttacaaggccaaaacatctgactgaaacgattacaggctcagcagctccctgattacactctatcctggagctcagaacccatttctataggacccatgactggatagtctagcaaacactcccccagaaatgtacccccaacccatcaactgatgatgggatacatgagaagggc

SEQ ID NO: 664965 - DNA, 495 bp, Homo sapiens
aaagtggccttcatccaaggccattcctagcccaatgactgcaatcacaccctgagagaggcaagcccttctgagactatctgatacgcttgctgtccacagaaattgcttggaggatttcaggagcagctcctttgctgccatcacaggagtttggggacatagaggacatctactacctggagagggtgaggaagcagaaatcttgtgagtggccacatctcagcctgcccaaagggtgtgtaatcccagcaggttaattttctagaacccaagaagcaggatgcattacaggccctctgttttcctctgggagcttttacaaggccaaaacatctgactgaaacgattacaggctcagcagctccctgattacactctatcctggagctcagaacccatttctataggacccaygactggatagtctagcaaacactcccccagaaatgtacccccaacccatcaactgatgatgggatacatgagaagggc

SEQ ID NO: 664966 - DNA, 553 bp, Homo sapiens
aaggcatttattgtcttgctgctcctcatattaccctgcaaagcatgcagaagggggartgagcccatgatagtatataattaataacaacagcaacaatagcagctagcacttcgtcagctcttgctttgttccaggcaccgatgaacacaactgactcatttaagatagagtaattgctcatcactggggctctggaatcagaatctgccctggaatctcagggggtctgcttcacagctgtgtggccttgggcaacttacttaacctttctgtattcatttcctaaagctgctgcaacaaatcaccaccaacttggtgacttaaaacaacagaaatttattctctcccacaatactgaaggttagaatgtggagtcctgatgataagtaagcaataaggaggaaggggccccaggtaggggagggccccagaggggaagaacaatgaacaattgttctgagagaccagctaatcacaaataaactgcaggcaccacaactaagttctgcaggtagcccttttggcacagccccgtgaaacttccctccag

SEQ ID NO: 664967 - DNA, 619 bp, Homo sapiens
tccactgctctctgctgggggttagggctggcacacctgggtaataatgtttaccactaattttgcaaatgggwttccattaattagccagcctgttgctgtcagctgcctggctggaattctttcagcagctggctttttggctgttaaaatgccacagggacttgttgcttgatgcatttcctcagggggtttgctctgtcaagaaggctttgccaaaatagagaaagctaaaactcctgttaacaaattgcacctaatcttatctccatgtaggcttccctagctgatttgtcctgggagttgggggagcttgtgggaacacatatgtatgcactggaagggggggtgggggctgctggcataatgtgggcaagtttgggcagagccaggcccaggcaggttgtggtagagacagaggtcagctcagaggtcagctcagatggggctgtttggctcttgtcccaacacccatctgtatcaccctccctccatggcctcagttctattctcttgcatttccccatacacaagccactggatcagactcaggtctcaggaaacaggcacaaaacagacatggcccctgaaatctcagctcggacaggggttaaggcaa

SEQ ID NO: 664968 - DNA, 601 bp, Homo sapiens
cttggctcactgcaacctctggctctagggttcaagtgattctcctgcctcagcctcccgagtagttgggactacaggcacacgccaccacacctggctaattttttgtactttttagtagagatggggtttcgccatcttggccaggctggtctcaaactcctggcctcatgcgatctgcccacctcggcctcccaaagtgctgggattacaggcgtgagccaccgcacccagccaatcattactttataatgtgattagaaaggaagaaagctaatagtcaatgacaagggaattctgttgttatgggttgaattgtgtccctctccaaaagacatatcttgacctcaagtacctcagaatgtggccttatttggaaacagggtcattatagatgtaattagttaaaatgaggtcatattgaagtggatggacccctactcccatatgactggtgtccttcatttttaattttttttttttgaggcagagtctcactctgttgcccaggctggagtgcagtggtgygatcagcatgcaccaccacactcagctaatttttgtatttttagtagagacagggtttcgccattttgaccag

SEQ ID NO: 664969 - DNA, 436 bp, Homo sapiens
gcttttactttttttttttaccttaattgaattttgaaaaaaaatacgtagttgacagcatatacataaaaggctgggagactatgggcctgctcttcatgggctgagtgaagtgttctgtgggggtggactgggaccttggcagtccctagtagctttattcctagccccaaggacagcagagagcctgggattggtcccagaatctgccccagaaattacaagcacattaacagaggtctgaaatgatttaaaggaactagaccaaatcagctgtgagtttcactggcctccaagccaatctcattcgccgttggttctcgatccactcatcagctcccagactcgggctgaacaccratcagataacttcaggcttgaagcacagggaatatattacgtattgaaaggtaccacctgtgactgtcagtttcat

SEQ ID NO: 664970 - DNA, 626 bp, Homo sapiens
atatactaagtgcagaatagcatctaacttatgatcctgtttgtgtaaagcaaaagcaaaagcagtggtgatggtgaaggcatgtatttgcatatgcatagaaactgtgaaactgttagtataaaactgtkagcaatgtttacttccagagaagggaactagagatggaagtggggacggaactttaactttccatttgtggttcagccgaatctcctttcaaaaactccagggtgcaaaacaataaaatgagcaaaatagtgagactgtccttttaaggataggacagtctcactatgttgctcaaataaactgtccttatttttctgtttatttttggcttgagatctcttttaaaaaaaatctgagtcaattctgagtttccccactcctttccttgggggcttatatagggcaacgacatgagcaaagtgtattgggcacagaagccatcattttttacgtgtttgtcacactgacgtccagtgagatattgttgtcctttttggccctggattgttagtcattcaggtcttcttggaagtgttctgtacttttgtccctaagctttttcacactaagtttaggtggttgacttaacaatattattcccaaaatatttacat

SEQ ID NO: 664971 - DNA, 594 bp, Homo sapiens
tggccgattttctctgacacctattcttctttcccctcttcccatcctatttctcattttttcccccttaccttagataatcttttgtctctttccccggagagggattcgccctcaggaagcataggaatctgccttggctgggtcatcacctttcaccacttcattaccacctctaaaacatcaggccagcccacagatggagacatacctcctgtccactattattagaattccctgggagacaacactgttcctaagaggttattgctggaagtgagtcagaggtataagggatatattgaatcagggacgtctaggaggatactaaagtggttgcctgtctgtgaaaacaggaaggataaagagaataaagamagaaagaacaggaaaatgcaagccaggtcagagtaaagcaaaccgttcttcccttcagtctcccatttatgtatgtccctgacttgggtctataatagtctaggaatgtgaagcagagaaaaactctaggggaaggaaatctcaaaattcagtcacacggtgaatccttacagctatgttctcagattcctcttctccctatgcatgactaactac

SEQ ID NO: 664972 - DNA, 543 bp, Homo sapiens
ttgcagcaggaactggagagagatgaattggttgcgttatgttatgccgttattatccyttaggaaggatctgtgtttcctctagaaggtgagggcagaggaggaagagaaaggaaagaaaaggaagacaaagtggctcgagaacatatcgggagactggatccggaacagggaaaaatgccaagggacagacagactgagagaatacataatatgtatgtagagagagcttatatctatagagtgccatatatgtgtgtgtgtgtgtgtgtgtgtgtgtgtgtgtgtgtgtgtgtgtgtgtgtgtataaatttagtgtagagaaaggatctcgctttgttgcccagactggtccaaaacgcttaacttcaagtgatccacccacctcagctaccaaagtgctgggattacaggtgtgagccaccacacccagctaacaatattgattttttagtatgcctagcaggatataaatccctccatgccaagcttgtctaaaccgcggcctacggactgcatgtggcccaggacggctttggatgt

SEQ ID NO: 664973 - DNA, 527 bp, Homo sapiens
gctgttaagtgtgaaagaacacatctgggctgtggcaagagtgaaaagtgaaaagaagcacrtgaggctgggcatggtggctaacacctgtaatcccagtactttgggagtctgaggcaggaggactgactgagctcagggggttgaggccagcctgggtatcagagtgagaccccatttctacaaaaattttaaaaatgagctagttatagtggcacatgcctgtgattccagctactccagaggctgctgatgtgggagaattgcttggacctgggaggttgaggctgcactgagccaagatcatgccactgcactccagcctgggtgacagagtaagacactgtcaaaacaaacaaactagcaaacaaaaaacacaagggttaattttatgtgtcaatttgactgggcctatagatgcccagacagctggtcaaacattctttctgggtgtgtctgcaagggtgtttccagaagagattagcattagcaccagtagactgagtaaagatctgccctcaccaatg

SEQ ID NO: 664974 - DNA, 591 bp, Homo sapiens
tagtcccagctactcaggaggctgaagtgagaggattgtttgagaccaggatctcgaggctrcaatgagctatgattacaccactgcactccagcctggaatacagagtgagaccgtgtctcttaaaaaaacaaaaacaaaaacaaaaacaaacaaacaaaaaacagatgtcactgtggctgatgaatttcaagacaagttggatggacagatgtgcaaactcaagcaacccacatattcgaaagacaggtctccttaaccctggctttaacttctactcaagagaatgactaaataaagggaatttgctgctttataggaatcctggacataaagcttcctgtatttgtatttgaacttcaagaacctttcaagaggaaggctttatttcacatggttcttctccatttacagttgtctggagggatccctccatattatgtgaatcccttctcctaagccttgaaaaggacatatacatagagacgtttataaaagcatctagcaaggggcctagcacactgcagataatcaatattattttctcctcttcccctccatccttcatacaatatttacctttcaattttt

SEQ ID NO: 664975 - DNA, 595 bp, Homo sapiens
ctcaaaagttagtttccctttcttaaggatgctttgaagctcctaaaagcattaagagagttgcaatactcacgagactgggggaaaagtttaattctaaaaagtgaaagcagccttccagcacatccttatgatttaaaggagtgcagtttgcatgacaaaaccccaytagtgatacaagctgattaagccccagagacactcagtttagtcagatgatgctttctaatttgtaagaattaaacttgatatctcttcatagtgtcacaccattatctagaaaagacattacaacaccccctgcttctaaagtacctttaggatttaattgtatctccattgcagtcctgatctaaaaagctgcaagcagcaaaaaaaaaaaaaaaaaagtttcaaagaagttttttgttgttgttttaacgtgttgctatttctacttcttcctccattatcatcacaatgatttaaggccactaaaagccccacacttggagcagaagtgtctactttcatgtaattagacagccctgcagagctcaactgctttcaaaagggaaggttccagttccatacaaagaatgtaggtttttaggag

SEQ ID NO: 664976 - DNA, 562 bp, Homo sapiens
taaattagaagcagtgaggatacagaagctgcaaattgaattaatgatagaaagtgtagcaaagcctcttactttttttccccccaactrcctctataccctttttctcgaaaagagaagcctctcaaaacacattttctggtgtcccttgtgattggctgttgggtgctacttccgttctgaccatagtgtctaaggcagaagcacaggtgtaatcctagaaagtatctttaaagaaagaatgcatgtcttaatatttccacttccctgctggctgacatgcaaggagtatgaacggaaatagagacttagagatggtccacactcagcctaacagagcaacaaaatgaaagccaactgggctgaaaagtgtggggcttccataccatccttgagagggttatgctggacttgctggatgaaagaaaaatgaactgctctcttgtttagaccactcacacatttcaactttcgttacagaacccagaacttttattttaaatagtgtatcctaatatgcatagagatatatctgaaattatattcaaaatatattcatgat

SEQ ID NO: 664977 - DNA, 562 bp, Homo sapiens
taaattagaagcagtgaggatacagaagctgcaaattgaattaatgatagaaagtgtagcaaagcctcttactttttttccccccaactgcctctataccctttttctcgaaaagagaagcctctcaaaacacattttctggtgtcccttgtgattggctgttgggtgctacttccgttctgaccatagtgtctaaggcagaagcacaggtgtaatcctagaaagtatctttaaagaaagaatgcatgtcttaatatttccacttccctgctggctgacatgcaaggagtatgaacggaaatagagacttagagatggtccacactcagcctaacagagcaacaaaatgaaagccaactgggctgaaaagtgtggggcttccataccatccttgagagggttatgctggacttgctggatgaaagaaaaatgaactgctctcttgtttagaccactcacacatttcaactttcgttacagaacccagaacttttattttaaatagygtatcctaatatgcatagagatatatctgaaattatattcaaaatatattcatgat

SEQ ID NO: 664978 - DNA, 599 bp, Homo sapiens
gtttgtttttgagacggagtctggctctgtcgcccaggctggagtgcaacggcgtgatctccgctcactgcaacctccacctcctggttcaagcgattctcctacctcagcctctcgagtagttgagattacaggcatctgccactagcccagctaactttttgtatttttagtggagatggggtttcatcatgtttgccaggctgatctcaaactcctggcctagtgattcgcccrcctcggcctcccaaagtgctgagattacaggtgtgagccactgcgcccagtcataatagttaattaatagtatagttaacgtttttatacatcagaataggaattggcaaggtatgtgatgaaagtataagactatatccagtattatatcattaaggactaattattaaaaggccttcaacttttacctttcaactagttgggagtataaattcctttatagcttttttatttatgtaaacagaatctgtttaaatatctaattattccttttatataaggaccatataaagaactcaaaatggacaacatgcttgtcagtagcaaatgaagaaaactattaaagaatcaccagaattacg

SEQ ID NO: 664979 - DNA, 599 bp, Homo sapiens
gtttgtttttgagacggagtctggctctgtcgcccaggctggagtgcaacggcgtgatctccgctcactgcaacctccacctcctggttcaagcgattctcctacctcagcctctcgagtagttgagattacaggcatctgccactagcccagctaactttttgtatttttagtggagatggggtttcatcatgtttgccaggctgatctcaaactcctggcctagtgattcgcccacctcggcctcccaaagtgctgagattacaggtgtgagccactgcgcccagtcataatagttaattaatagtatagttaacgtttttatacatcagaataggaattggcaaggtatgtgatgaaagtataagactatatccagtattatatcattaaggactaattattaaaaggccttcaacttttacctttcaactagttgggagtataaattcctttatagcttttttatttatgtaaacagaatctgtttaaatatctaattattccttttatataaggaccatataaagaactcaaaatggacaacwtgcttgtcagtagcaaatgaagaaaactattaaagaatcaccagaattacg

SEQ ID NO: 664980 - DNA, 266 bp, Homo sapiens
ctctctatataaaagtaaaagaaaaatatacagcccatatatattacagaaaaagaaaatatttaagtttggaaatttttgaataaaatcatgatagatttacaatgtctcattattcctagcatacaaaagtgcttttattcttggttgccaattttgtgagaatcaagcaatcctcacgttttagagkttgcaaagttttcgaacaagtgtttttactttatcttaaagacagggttaccaacattatatgggtcactacagtg

SEQ ID NO: 664981 - DNA, 606 bp, Homo sapiens
atccatgctaaatgtgtcctccctggaggcctggccgaataagatcagatacaaggccaaaatgaatttttttcccattagtgagtatgtttgctacgtggaggacactgtgtgggcttgaggtcatggatgcagatgtaggaagttgtcaaagggataaaacagatttcattagctagaagtggctgaaatttctctcattacaatcatagcaaggtcacaagcgtgattaagaatgcatattacatattggttaggtttaattataaaaggtagtttgtcaagtcactggaaaatgttaacaaatgccatcactacttgtaatgacattgcaaaacctcgaaatatttgcagttgtcatccacmtggatcttgtggtcaccatgagaaatattaacacacactcattggagaagaaaaattgattactagtgtatgtaattaaataattaggcagattaactatttttctctttcatggttaaaaaaggttcttacaaaaacaaatttatttgtatttcactgaacttcacactgctgaggaagaaaaagatcaaagccccacatccataccctacaatagtgaaaagagattatgtcattgga

SEQ ID NO: 664982 - DNA, 604 bp, Homo sapiens
ttatcaattgcaaacaaatcatttaaatgaaatctggccatgtcaccagtatgttttgtttccaaaattaaagtctaaagattaccccaattmtggtaattccattcccttctcgatggactatgccttgttttgttggaatggttgaagtaaaagcttaactgaagataaaattaggaagtaaagcagagactattacttggttgagaaaatttttatttatttttgtaataatttcaatacttattttagattcagggcataaatgtgcaagtttgttacatgggtttattgtgtgatgctgagggttggaatatgattgatcctgtcacccaggtactgagcagagtccccaaagtttcattttttaacatttaccaacacctgccctctggtagtccacagtgtctattattgctctttatatccttgagacccaatgtttagttcccacttagaaatgagaacatgcagtatctggttttctgttcctgtgttaatttgcttgggataagggaccacagctgcatccatattgttgcaatggacatggttttgttcttttttatggctgtgaagatatttttataaagaggagatgaat

SEQ ID NO: 664983 - DNA, 471 bp, Homo sapiens
tgtctcaaactcttgagctcaagtgatccacctgccttggcctcctaaactgctgggattmcaggtgtaagccaccatacctggcctctattttgaacagatgctgtaaggatcagaattaacataagtaaatccttttgaacaaatgcccaaataacgattgtgattttcatgtcatttaacagagtatttattgagtgcctactctatgagataataccaggtgccagagaaatgagatgaataagactgccatgtaaaagaaactcatagtcacatggggagaaaacatataattactatatattgcaatgtgataccttctttaagaggtaacatgcatcctcccgaggtgcatgaacctggctcttagcttctgtttggtagcaacagtgatacctaggcagaagagcagtaaggtaacccactttatgaattgtatgagtttccatgtggtggtaatgggatgac

SEQ ID NO: 664984 - DNA, 471 bp, Homo sapiens
tgtctcaaactcttgagctcaagtgatccacctgccttggcctcctaaactgctgggattccaggtgyaagccaccatacctggcctctattttgaacagatgctgtaaggatcagaattaacataagtaaatccttttgaacaaatgcccaaataacgattgtgattttcatgtcatttaacagagtatttattgagtgcctactctatgagataataccaggtgccagagaaatgagatgaataagactgccatgtaaaagaaactcatagtcacatggggagaaaacatataattactatatattgcaatgtgataccttctttaagaggtaacatgcatcctcccgaggtgcatgaacctggctcttagcttctgtttggtagcaacagtgatacctaggcagaagagcagtaaggtaacccactttatgaattgtatgagtttccatgtggtggtaatgggatgac

SEQ ID NO: 664985 - DNA, 471 bp, Homo sapiens
tgtctcaaactcttgagctcaagtgatccacctgccttggcctcctaaactgctgggattccaggtgtaagccaccatacctggcctctattttgaacagatgctgtaaggatcagaattaacataagtaaatccttttgaacaaatgcccaaataacgattgtgattttcatgtcatttaacagagtatttattgagtrcctactctatgagataataccaggtgccagagaaatgagatgaataagactgccatgtaaaagaaactcatagtcacatggggagaaaacatataattactatatattgcaatgtgataccttctttaagaggtaacatgcatcctcccgaggtgcatgaacctggctcttagcttctgtttggtagcaacagtgatacctaggcagaagagcagtaaggtaacccactttatgaattgtatgagtttccatgtggtggtaatgggatgac

SEQ ID NO: 664986 - DNA, 474 bp, Homo sapiens
ccttctcttgtctttctttttcacctattttattccccaccatcacccttatctttatctctctaagaaagaatacaaatccttgttatttcattataaaatgcattttaacttactaaaatggaacttctaccatgctccagaactattttaaaagttgctatagttctttgcaaacagaaagctcatctatcctgggtttcaaattgtctttttttttttttcttaagtcataccatgctccacatttctaaraaagtgtccttcccatcagttcagatcccagagacaatacgtgggtgtggaaagatttctttcatttacaagaatccaatatatgtgtgtatgctaatggtaacaactcaacacttgtagagagcttgcaggatgccaggcatggtgcccagtgatttacttgcctcaaattgtaaatccttgcaaaaagctttggagggaaatgctattttttttaat

SEQ ID NO: 664987 - DNA, 557 bp, Homo sapiens
aactcttgggctcaagcgatctacctaccttggcttgtcaaagtgctgagatgacagacataagccacagcacccagcctcctgcaggcagctttctaactagctcaacaatctgctatcttatcaatcaaattttctctctgctttgttatccccatcagcatttgaacatactgtaatattcccttagtttctgtgtctcctacttgttctctgctgttaatctgttctcatttaaagtagaactccatgaatggtttgtctatactagctgctkcaattctctcatctatcattcttgtcttggttcactgtactcaggctcttaatccctcctcattactatcaaagctatctatgacctccaatctgtgccatcagtttggttcttgttttggtttctgtttttttcttgctatacctgtgtagcaggacaagctgcagataaaacccctcaaacactgagttaaagaaggaaggtctttatttggccgggagcttctgcaagactcatgtctccaacaactgagctcccagagtgagcaattcctgtccct

SEQ ID NO: 664988 - DNA, 597 bp, Homo sapiens
ctccttgaatgagattttaatttcatcttctttgctttcttaagggctggytgcccacccaatgagacctttgccaccttctctgcagccagaaactcttgatgctatgccctgtctttatacctaagcctctcctttttgtatgccacttaataaagaaagccccactcacatgtgcttcaaacataaaagtataagagctaagatcaaaaaagagctaatactggcaacactgtagggactggcagaaaataatagaattgatttacatagggaaataggacaaattagccctggtaaggagaccatgcatttctgcagaaaaaaattcagtatacaacacaggaaccaaaaaagcagaattaaggtaaacaacaacaataacaacacttcccattagtaaatttctctcttcagtcacttgtcccttttcatatgtttgttgaggccgtttcagtattattaattgctttcccagttttattaggtgtattttatatgctctgtggtagtgggtatgtattaattagtgggttgattagtttatttcctttgatagagttgtatgcgcaacattgactaaacagcagctgagta

SEQ ID NO: 664989 - DNA, 597 bp, Homo sapiens
ctccttgaatgagattttaatttcatcttctttgctttcttaagggctggctgcccacccaatgagacctttgccaccttctctgcagccagaaactcttgatgctatgccctgtctttatacctaagcctctcctttttgtatgccacttaataaagaaagccccactcacatgtgcttcaaacataaaagtataagagctaagatcaaaaaagagctaatactggcaacactgtagggactggcagaaaataatagaattgatttacayagggaaataggacaaattagccctggtaaggagaccatgcatttctgcagaaaaaaattcagtatacaacacaggaaccaaaaaagcagaattaaggtaaacaacaacaataacaacacttcccattagtaaatttctctcttcagtcacttgtcccttttcatatgtttgttgaggccgtttcagtattattaattgctttcccagttttattaggtgtattttatatgctctgtggtagtgggtatgtattaattagtgggttgattagtttatttcctttgatagagttgtatgcgcaacattgactaaacagcagctgagta

SEQ ID NO: 664990 - DNA, 601 bp, Homo sapiens
acgtcaataattaatcataattaagttggtcaaaaccaataaagaaagtgttataaggggtaaagaaaaaaagatgtggaagtgtggaggaaaaaagataaggatgacagcagatttatcataggaaatgatgtcagtgaggagacagtggagcaacacctttaaagtactgaaaagaaaatactatccacccagcattctacacccagagattttcaaatgtttcaaatgtgaaggagcgataaagttgatttcagacwtacaaaaatccaaaataatttattattagtgactgacactacaggaaatgttaaagaaagtcctttaggcaaaatgaaaatgataccagatggaaatgtggatcaactcaaaggaatgaagaagacaaaaaatggtaactacatgggtaaatatagaagacggtttattattatttcaatctctttaaagatagttggctgttcgaacacaaattataacaacgaagtttggggtttatgagataagtgtaaattacatgtattaaatagcatcaagattgagttaagagaaatagaagtaaagttcttctatgtgaaatggtattatttgaaggtgataa

SEQ ID NO: 664991 - DNA, 577 bp, Homo sapiens
ctggatttttatctattttctggcatcttggggaataaacaagggattattacagctctaactcattgcctctgcttatgaaggctggtgctggcctagtctcttccacagcttccccttgcaattcttgggaaggccaaagattccagtgcacacctgaactggacagagggaatgcacacagggctcctttagagatgcaaatggttcacttctctgtcccttttttctgagcagcaggagggtggcatctgggatggatggaggtcatgcttcctggctcctggctctctatcatcttagctgtttctgcatcttcccaaaggaagccttgttcaagcccttgttggagacctctccctatcyctctatttactgagtcctgtatttaccgaacatctttctggggccaggcgtggcactgtgcactaggcctaaaagatcaggcttcccaaagcatcccaggagtgacccagggatgaagagtcactcatctcagaccaggccgatagtgagtgccaggcaggcaggtgtctcagacccagccgcaggatcccagaaagatgtccagggggag

SEQ ID NO: 664992 - DNA, 585 bp, Homo sapiens
gtatgcaaatggaattatatagtaaatattttttgtgtgacttctttcacatggcatatttattttgatattcatctatgctattgatggcagctagcctgtccctgctcccagcacttgctctgatttcagagcaaagttgaagccaagcccaggcacagccacaacccagcctggagcacgcatgcttggggtggcactgacacgccagcctcctgtgacctcagccccttctggactttgggcactgatgagcatgggagggaggccagtgggggcctgagggtggcttggcctgggcctgcagatgccccttggcacaaatagcctgggtgccatggatgacatgtagatggcggcaggaggcagatgggcttctgggtggaaaggggtgggtccctggtgaagccccaccttaaagccagggaagacctgaagcatgggggctgggctgtcagttccaggtggagtccacagtctggagtgagaacttatggtgctttttccacacccacccatggctgcccrtgaaccaatcagcacacacttcctcccttctgaagcccataaaaacctcagactcag

SEQ ID NO: 664993 - DNA, 528 bp, Homo sapiens
cttgaacctggcaggtggaggttgcagtgagctgaaatcacgccattgcactccagcctgggcaacagagtgagacttcatctcaaaaaaaaaaaaaaaaaaaaaagaaagaaagaaagaaagaaagaaagaaaagaaacccttaatataatccgtctaatttagccaatctagtggatatatcatggkatctcattatggttttcttttgcatttccataataactaataatgctgaatatattttaatgtgcttgcttgccatcttttttgataaagtatgtaactaaatattttgctcatttttaattggatcattgaactgtaggagttctttttacattctagattcaagttcattcctggatatatgctttttggatattttccccctatatttggcgtatcttttaaactttataggtctattttgaagagcatttttttaatgcaaaaaggctccaatttgtttatttttttcttttacatttcatgccttgtgtggtatttaagaaatatttgccaaac

SEQ ID NO: 664994 - DNA, 528 bp, Homo sapiens
cttgaacctggcaggtggaggttgcagtgagctgaaatcacgccattgcactccagcctgggcaacagagtgagacttcatctcaaaaaaaaaaaaaaaaaaaaaagaaagaaagaaagaaagaaagaaagaaaagaaacccttaatataatccgtctaatttagccaatctagtggatatatcatggtatctcattatggktttcttttgcatttccataataactaataatgctgaatatattttaatgtgcttgcttgccatcttttttgataaagtatgtaactaaatattttgctcatttttaattggatcattgaactgtaggagttctttttacattctagattcaagttcattcctggatatatgctttttggatattttccccctatatttggcgtatcttttaaactttataggtctattttgaagagcatttttttaatgcaaaaaggctccaatttgtttatttttttcttttacatttcatgccttgtgtggtatttaagaaatatttgccaaac

SEQ ID NO: 664995 - DNA, 595 bp, Homo sapiens
gggtcatatttttctattactttgcattcttttccattggatgccagcattgtacattttattttgtaggtgccggataaytttatattcctttacatgttcttgagtgttatccttggaagccattgtgttacttggaaacagcctgatcctttttgaggtttactttaaagcgttgtcaggggaaaccaggatggccattggtgtagggatgattttactttgctcttgtggcaatagccttctgagtactctacctgatgccttgggtattacaaagtttctctacttggactggtgagaacacaatctgttcctggcccactgagactcacacatttttctgcctgttcctttctggtgggagtttcctggccttggtagttgtcttgcaggcatacatccatcagtactccatggaagtctccaggggaagcctcgttgaactctgccctacaattctagctgcctgggcctccctgggttctcagctctgtctcctcctttgagggaacagcaggctctgtttgggtcagctttccctggaacgtagcctggaaaggatttctaggtggtaagtgaggaccgtggtaag

SEQ ID NO: 664996 - DNA, 595 bp, Homo sapiens
gggtcatatttttctattactttgcattcttttccattggatgccagcattgtacattttattttgtaggtgccggataactttatattcctttacatgttcttgagtgttatccttggaagccattgtgttacttggaaacagcctgatcctttttgaggtttactttaaagcgttgtcaggggaaaccaggatggccattggtgtagggatgattttactttgctcttgyggcaatagccttctgagtactctacctgatgccttgggtattacaaagtttctctacttggactggtgagaacacaatctgttcctggcccactgagactcacacatttttctgcctgttcctttctggtgggagtttcctggccttggtagttgtcttgcaggcatacatccatcagtactccatggaagtctccaggggaagcctcgttgaactctgccctacaattctagctgcctgggcctccctgggttctcagctctgtctcctcctttgagggaacagcaggctctgtttgggtcagctttccctggaacgtagcctggaaaggatttctaggtggtaagtgaggaccgtggtaag

SEQ ID NO: 664997 - DNA, 554 bp, Homo sapiens
tctggctgaataatattccactgtatggatgtaccacgttttgtttaccctttcatctgttgatgggcacttggttgtttctacctttttgttgtgaagaaagctgctatgaacacaggtgtacatatatctatgtgagttcttttctgttctttttgctatctatccagaagtggaattgctagatcatataataattatattatatgtcaactattttgaggaagtgccatactgctctccacagtggctgtaccattttacattcccactagcaatgcacaaagattccagtttctccatgccctcttcaatacttcttttatgttttttgatcgtagccattctaatgggtgtgaagtatctgcactgcaatctttaaactttgttctgagaacacaaaagaatgggctcccggtcaagcrgggctgggggatggtgggcagggcactttcccagggttggggtgattggagctgagtccagcactctgcaacattgctttaaatttactcaactgtgaactccctgcagccattgctgtacccagtgcc

SEQ ID NO: 664998 - DNA, 361 bp, Homo sapiens
cccagctacttgggaggctgaggtaggagaatcgcttgaacccaggaggcagaggttgcagtgagctgagatcgcgccactgcattccagcctgggtgacagaatgagactctgtctcaaaaaaaaaaaaaaaaaagaaagaaaaaaaagaaagtgtcacttctaccttttggcattgyggagaaggcgagttggattatagactgctgagttgttgaaacttttaagaagcgagatgctcaatgagaattcaagcagagcttagcagttgggagtttggcttccagaatgggacttcgtcaggtccagtgttggctcctcagctttgtgctgtgttgtgcaaattatttattattacccc

SEQ ID NO: 664999 - DNA, 361 bp, Homo sapiens
cccagctacttgggaggctgaggtaggagaatcgcttgaacccaggaggcagaggttgcagtgagctgagatcgcgccactgcattccagcctgggtgacagaatgagactctgtctcaaaaaaaaaaaaaaaaaagaaagaaaaaaaagaaagtgtcacttctaccttttggcattgtggagaaggcgagttggattatagactgctgagttgttgaaacttttaagaagcragatgctcaatgagaattcaagcagagcttagcagttgggagtttggcttccagaatgggacttcgtcaggtccagtgttggctcctcagctttgtgctgtgttgtgcaaattatttattattacccc

SEQ ID NO: 665000 - DNA, 550 bp, Homo sapiens
ggtggtggacgcctgtaattccagctactcgggagactgagtcaggagaattgcttgaacccgggaggcagaggttgcagtgagccgagatcgtgccactgcactccagcctggtgtcagagtgagactctgtctgaaaaaaaaaaaaaaaaaaaaaaaaaaaawgggatcatcagctgaattggatgcgtgcctcaccagtactccatccaggtaggggtccagggaggtagcaacactagagttcttatcccttctccagttttcaaacacaagtttagggagctgtaagaatcacttatatgtccatctctccctgtctaaatggccatggggaactggggtggagtgtgcaatctcttctctcaggtcctctctaccactagactcaaatgacttttctttcatttcctaaatgtttttggaatgaaaaactctgttccttttgcaacattgtcaagttatttgaaagtttcatcataagattcaatatataagtcttgacattataatattgacttttaaaaagagttgttacataacacaatta

SEQ ID NO: 665001 - DNA, 610 bp, Homo sapiens
gagtaaggcagatctctaaagaaggatgccacatttgtgtccaagttttgagaattttgtaaaccttgcagcaagcctgtggttcagttctaagaccctgagctacggggcctccagcatttttcaatagaattactgccttgtttaggaagaatctaattcttattatttaaagtgctgttggcagctgacacattgagaatattatcaaaatataatttaactgccattttggtagggaaaaaacacttsctcttcataagagtaacccacaaagaaacgtttttcatctgaaaaaaaaaaacactgagaaattgtgctttatctcaagacctttactctgtgaatatgtgtaatgcttcctaattatcaatttacattaggtgaaaaatgacaagagtacaagaattcctaacaaagtatcaccctgataaggtcctcaccaaatatgagaaggttctggtttgatctgtttggagggcagacaggagcacaccaatctcacattcccctacctcctggacagttcccctaggatgtcacctcaggcttcacctatcactgctccacctgcatgtcacctgccctccccaaacaaaccctccctctt

SEQ ID NO: 665002 - DNA, 610 bp, Homo sapiens
gagtaaggcagatctctaaagaaggatgccacatttgtgtccaagttttgagaattttgtaaaccttgcagcaagcctgtggttcagttctaagaccctgagctacggggcctccagcatttttcaatagaattactgccttgtttaggaagaatctaattcttattatttaaagtgctgttggcagctgacacattgagaatattatcaaaatataatttaactgccattttggtagggaaaaaacacttcctcttcataagagtaacmcacaaagaaacgtttttcatctgaaaaaaaaaaacactgagaaattgtgctttatctcaagacctttactctgtgaatatgtgtaatgcttcctaattatcaatttacattaggtgaaaaatgacaagagtacaagaattcctaacaaagtatcaccctgataaggtcctcaccaaatatgagaaggttctggtttgatctgtttggagggcagacaggagcacaccaatctcacattcccctacctcctggacagttcccctaggatgtcacctcaggcttcacctatcactgctccacctgcatgtcacctgccctccccaaacaaaccctccctctt

SEQ ID NO: 665003 - DNA, 474 bp, Homo sapiens
aacatgatccctagccaaatctgccctacttccctctggaagccactcttagaccagccatctggggacacagataaagatctaagtccagtgacaaaagattcaaaataaacactaaataaaagtgagtcgaaagggatcaaagtcagcattgattttggttctaagagagctggataaggcagttccaactttccagtataacaatcaataggtgagattatgtggaaatatttatcatgtgacattaacctaaggtatttcttatcaaaaactgtccccacttaaaaaacaaaactgcttgttcatctcatccttagctcagagacttatattctcccatactacctctgttcccaactctccaatttgccaktgggttctactgctttccaaatgaattaaaacaaactaacaaacaacaaaaacaagaagcttcttctgctgtcgtctgctccttcgtggtttgcgctc

SEQ ID NO: 665004 - DNA, 488 bp, Homo sapiens
ctaagcaagaatctacggaaaaagtaattgttgttcacatcttaatgatagcatagctaaaacctttggtagtgttatttttaggctctcgaaagtgtttgagttatttttgatgtcagtgtttttkcagggtgtgaacatctcttgaattaccccatatttcgatttattggaaggcagtcttctgaaatgcctgctataaagaagtgatttagaataatgttctccaagccaaaatgggggagggggtgtgttgcttgcccatttctttagcacattgtcatgttcagatgctagtttcaatctggtttaaaatttaaggtgttatgtgaacaagtgaaattactctttggcataatgaatcattggtgtgtaatgatggcattatttcactgatgtttcaagttgctaatttttttgttaaaaaaaccaagcccgtttaaaatatagtttaattttgtgtgtgtaaaatacagggaaaggtgaaa

SEQ ID NO: 665005 - DNA, 635 bp, Homo sapiens
atgtgtgcatgtgtgcgtgtgtgtgtatgtgtgtgtgctggggtttttgtaataacaaaaattccttaaaaggcattcaaagtctgatcagacttaatttttatctgcatccatgagcttggcataaggattacacatttcattatctaataaargggacaccattaaggaaaagagcaacattctctctgcccctttggcctctccaattgaactaaaacaagacttattaagtttttacccactccaaaacaaatgtttccatttcatcagaagcaagagagaaaaatcttaaaggacattaaccttcaagcagctccgaagggaaaggaatattagaacttgagaaataaaatggagaatgaaactcccttgacactcttcaggtaacaaggagaaccacacagttaaagagctattccctcctcatagtgaaaccctgaggtggaaactgatgaaaagtgtcccagagagcagcctgctcgctgcctctggtactcactcatttatccattcttctgagcttaaagagaaaagataaaaatgagaagtgctttaaaattaaagttgatgtttaaatatcacgtctcttctgagcccctactttttcatcttaaaaatactatttccagcca

SEQ ID NO: 665006 - DNA, 241 bp, Homo sapiens
taatttgcaaaggtgcttagcataaaacctgagacacagtgggtacacaataaaatgttagcttccttctttcagaactgaatttccractgccggatagatctcgcactaatctttgagttcacaagacccattagcccaccccattgctggaatatccaatttatcccataccttctcctcctgtattttctctctctcaagtaatagcatgaacattgtctttggcacctagtttcga

SEQ ID NO: 665007 - DNA, 241 bp, Homo sapiens
taatttgcaaaggtgcttagcataaaacctgagacacagtgggtacacaataaaatgttagcttccttctttcagaactgaatttccaactgccggatagatctcscactaatctttgagttcacaagacccattagcccaccccattgctggaatatccaatttatcccataccttctcctcctgtattttctctctctcaagtaatagcatgaacattgtctttggcacctagtttcga

SEQ ID NO: 665008 - DNA, 560 bp, Homo sapiens
tttctctagctagatctttcagtactatgttgaatagaggaggtaagagtattgtcttgttactgatcttagaggaaaaactttcaacatttccctgctgaggatgacattaggtgtgggtttagcatatgtgaccttcattatgttgaggtacattacttctatacctaagttgttgagaattattatcataaaaggatgctgggtgttgtcaaatgttttttctgaatctactgagatgatcatattgtttttgtccttcattgtgttactgtggtatatcacatgtatttatttatatttatttctgctaaactatcctggcatcctagggatacattccacttgttcgtagtataggatccttctaatgttmtgttgaattcaacactccatgcaccttcagagttggcatcatgtggatggtgcaaaggtttacatcttgtaccctctggagttgcagctcaagctatacctgggccttcttgggccacagctgaggctgccaaggggcactgcaccagagtgtggggacagagacttgatatgaacatgtgcaa

SEQ ID NO: 665009 - DNA, 560 bp, Homo sapiens
tttctctagctagatctttcagtactatgttgaatagaggaggtaagagtattgtcttgttactgatcttagaggaaaaactttcaacatttccctgctgaggatgacattaggtgtgggtttagcatatgtgaccttcattatgttgaggtacattacttctatacctaagttgttgagaattattatcataaaaggatgctgggtgttgtcaaatgttttttctgaatctactgagatgatcatattgtttttgtccttcattgtgttactgtggtatatcacatgtatttatttatatttatttctgctaaactatcctggcatcctagggatacattccacttgttcgtagtataggatccttctaatgttctgttgaattcaacactycatgcaccttcagagttggcatcatgtggatggtgcaaaggtttacatcttgtaccctctggagttgcagctcaagctatacctgggccttcttgggccacagctgaggctgccaaggggcactgcaccagagtgtggggacagagacttgatatgaacatgtgcaa

SEQ ID NO: 665010 - DNA, 541 bp, Homo sapiens
tatgctgcaatagtcataaccatgaatatgatgatatgcagaattctgtgaatctgcctagtggattgtctgaccttggtatggacttgagggtaaccagtgctccatatataaaggttggtaggaaatctgtatcctcaaaggtcctcaaatcagcagatatattggtaatttcattgtaacctttttttccataaaagatactgaaacctacagacagtatgttttatgagtaaaagagaatgaaccatttaaaaataagtgttatatttgtccataaggcagtcaagcgaatttcatttccttgaaacttaaaatatatgttacrtgaatactgctggctacaataagcatgcctgagattttaaattatttctgaatattttcttcactttcaagatagcaagaacatatttttctccagattgactatttaaataggataagagaggaattttatttgctgtttctatacgtcttctcatgagacactttgttgaagtgtggcacagaaagtattggctggctcaccatatagcca

SEQ ID NO: 665011 - DNA, 592 bp, Homo sapiens
ttgcatgagttagctagggctgccataacaaagcaccaaaacaaacagcaatttatcgactcacaaatctagagccttaaagcctgaaatcaagacttcagcagggccatagtctctctgacagctctagagaagaatccttccttgtctcttttagcttctgttgtttgttggcaatcttttgagttcctgggctggtagagggwtcactccagccacctggctatttccccactatgtgtcttcatgtcatcttcccactgttcctatctgtctctttttataaaggacatcagtcatattggattagggtccatcctaataaccatttttttgtaaactcaattaaccctgtaaagaccttacctccaaatgaagtgacattgaagatgctgggtatcaggacttcaacgtatctttgttggaggacacaatttggaggacactgttatggaggattcataacagtggcattggccagagtggtatcggtgagaagtggatggattgtggatgtattttgaaggtggagtaccgcctattataaattccaataagtactagatatgattatttttgttgttaaaattat

SEQ ID NO: 665012 - DNA, 583 bp, Homo sapiens
tcccaggtttcaggccttgcacaattgattagttggggtggggaggttttccagctaatgaacctgccacatagttctcagctatctgacctgcatcctgggccactgcccactgcaatccaggaagtataagtcccaaaagtgattagccctgcaaaggataggattctgcagctgcctttcggaggctaaggtcattatgtctctgctatcattgcctccagacaggcagctgttctccagggatctgtctgtatgcacattaagcccactgccagggctgccttctcatctrcgtggactcctcaagaaaatgctcttttacacttagcagaaggtgaaatcacagaattttgaaactgggaggggcaacttgggaatctgcaagtctgacttagagtaactaccctagggtcacctgtgatgctggtccaaaagatggctcttgggcctcaatgccacactccctccaaggacgaaattagagccaataacctagaagctccagcacccatttttttccccagccacagacctcccacaggcacaaggttgctgatgtagggatgacaaaaatgagctg

SEQ ID NO: 665013 - DNA, 626 bp, Homo sapiens
tttatgacccagcatcaggtaaacagacattgtccactgaaagatagagccttcagctgttgagcatggtgattgatactgttagctcatctacatcttactcaactttgtttcaaagtcgttaatgttgttgtcaagttgtttcatcagttgtggagagagggatgttaaagcttctttagactacagccagagttctcttcctgaaacatactttggatcataatacccttctcttcaaaaacgggyaacggctgcccatcgtctgcagggcaaggccaaactccacagcgcggctttccgggccctccgggatccactcctgcctgcttccccagcttcaccttcaccaagcagcatgatctaagtgtccacgaaggctcccttgccaagcgacacgtggtggacaaggggggaggccagtgagcagggcgttttctctcagcctgcccccaagcaaggcaagccacatcttagtgtccccaagcgtctttgctggcactttgaaagtgctacattttgagcctgttatctggcagctttcacgaggcaaaagcactctcctgatgtgtcagcctctggtgtctggtaatgtttcaaataaaaatgggcagtgaaagagaagc

SEQ ID NO: 665014 - DNA, 512 bp, Homo sapiens
atatatatatacatatatatatacacacacatacacatatatgtatatgtagctatacacatatacatatatattttgtagctatacstgtgtgtgtgtgtgtgtgtgtgtgtgtgtgtgtgtatatgtaaaacaccagaactcccaaattcataaaacaattactactggacctaagaaatgagatagatggcaacataataatgtgggagacttcaatacttcactgacagcactagacaggtcattaagacagaaagtcaacaaagtaaatgtttaaaatgcaaaacgaaattacctagatggtaaaactggcctgaaggcacatttctttctcaacattgtaaagggctcacatgttctggggtcaccgggaagggtaagcattctctcaaatatattttttcagatttagtggatgtgtttgcttgagttgctgcatgctgggggacatgtgaggtcagacttaactcttacttgcgtctttgagttcttggtggtgttttgccctt

SEQ ID NO: 665015 - DNA, 604 bp, Homo sapiens
tactcacccaacacataaggactcacataagcttaaggggtgacaaaagatattccacgcaaatagaagccaaaagagagtagaagtagctattcctatatcagacaaaactgacttttaagcagcaacagtgaaaaaagacaaagaaggacattgtataatgataaaaggaatagtccaacaggaaaatatcacaggcatatatatatatatatatatatatatatatatacatatatatatacacacacatacacatatatgtatatgtagctatacacatatacatatatattttgtagctatacgtgtgtgtgtgtgtgtgtgtgtgtgtgtgtgtgtgtrtatgtaaaacaccagaactcccaaattcataaaacaattactactggacctaagaaatgagatagatggcaacataataatgtgggagacttcaatacttcactgacagcactagacaggtcattaagacagaaagtcaacaaagtaaatgtttaaaatgcaaaacgaaattacctagatggtaaaactggcctgaaggcacatttctttctcaacattgtaaagggctcacatgttctggggtcaccgggaagggtaa

SEQ ID NO: 665016 - DNA, 604 bp, Homo sapiens
tactcacccaacacataaggactcacataagcttaaggggtgacaaaagatattccacgcaaatagaagccaaaagagagtagaagtagctattcctatatcagacaaaactgacttttaagcagcaacagtgaaaaaagacaaagaaggacattgtataatgataaaaggaatagtccaacaggaaaatatcacaggcatatatatatatatatatatatatatatatatacatatatatatacacacacatacacatatatgtatatgtagctatacacatatacatatatattttgtagctatacgtgtgtgtgtgtgtgtgtgtgtgtgtgtgtgtgtgtatatgtaaaacaccagaactcccaaattcataaaacaattactactggacctaagaaatgagatagatggcaacataataatgtgggagacttcaatacttcactgacagcactagacaggtcattaagacagaaagtcaacaaagtaaatgtttaaaatgcaaaacgaaattacctagayggtaaaactggcctgaaggcacatttctttctcaacattgtaaagggctcacatgttctggggtcaccgggaagggtaa

SEQ ID NO: 665017 - DNA, 665 bp, Homo sapiens
caaaaagtatgcgtaattatacatgtacataagtttgttatatatctagcgatacaaagaatgtgtaggacacaattgacaaataattaaaaatatgcaggactctaatgtaaattccgtaataataatagattcttttatgttgttatttatttattttaacttttattttaggttcggggtacatgtacaggtttgttatatggtaaattgcatgtcatgggaggttggggtacaggttattttatcacccagataattaacatagtacctggcaggtagtttttcctcttcctcctctcacctccaccctcaagtaagccctaatgtttgttacttctttctctgtgtccatgtgaactcaatgtttagctcccacttgtawgtgagaacatgcgatatttggttttctgttcctgccttagtttgcttaggataatggcctccagctccatccatgttgttgcaaagtacatgatgtcattcttttttatgactgcatagtattctgtggtatatgtgtactacattttctttatccagtatactgtcgaggggcacttaggttgatttcatgtgtttgctattgtgaaaagtgctgcaacgagcataaacgtgcatgggtctttatggcagaatgatttctattcttttggatatatacc

SEQ ID NO: 665018 - DNA, 585 bp, Homo sapiens
cttgcacactttcccagtcaattccactcccatcaacaatcccaggctaccattgatctgatttccatcactacagatggattgagtctgttttagaacttcttaggaatgcagccacataccctttcctgattggcttctttcactcagggtaatgtgtttttgagattgatctatgttgtgtgtatcagtaattcattcctttttattactgagtcttccagtggagggctatactacaatttgtttatctattcacctgttgatggacttggggttgttttcagtttcggggttttatgaataaagctggtagaaacatttttgtrtgagcatttttttttttggtgtgtgtgtatgcatgttttcattttgtgggggactaaatacttagaagtataaaggctgggttatatggtaagtatatatttaactttgtaagaactgctaaattgttttccaaacgtctgtaccattttacactcttgccattagggcatgagtgttctattaggttggtgcaaacttaattttgtttttgccattaaaagtaatttttgcaccaagaatagtaatagccttgcc

SEQ ID NO: 665019 - DNA, 527 bp, Homo sapiens
ttcccctgggcttgtttgtttatatccctgaaagcagttccacacagagcaaatcccattcagcaaacatctgctggtgaatggggcagggcagtgtaatgcactgggtctcagaacttgtctgcacatgagaaccaggggatctctcaaaaatgccaaagcacaggccatgcccaagaccacccaaatcccaatccctggggtgttttggtaaagctccccaggggactaatgtgtagacaagattgggaaccatgacacagtggctaagagtgtagacgttagagttaggctacttggggtcgaactcaagctccactacttctgatctgtgtggctttggggaagttacttaacctctctgtgcttcagtttccttctgtataaaataataatacaattggtaggaggattcaagtgctttgaacagtgtctctgtggcacacggtaagtataagacttagatattgttaccrtttcttgaatgcctactgtgtgcaaatgcctgcgctggagaggaaggatat

SEQ ID NO: 665020 - DNA, 592 bp, Homo sapiens
aaaatcacactggaagaagccacaaggcattggctgggggtgttgtgaaacaccagggaaagaccccaaaatcaataatagcgacttgttaggagctgacgccacgtattgcacttacagagagattctgctctaatgatgttagcaaatacttgtacgtgcaatgcatgccagagatggttaggactgattgtgcatggttggctatgtcatcattccagctgcagtttgtgtgatcctcctgctaccctgccatcccatcagcgcctgcctccaagcctccctttgctcactctttccttcccagcaccatggcctccctccttcatttcataaagtccaattcttcaagggctgaagacctatttttctaagagaaagagagtgagctggattttttaaattattattttcttctttttcccccttcccccctgttccccacttcctacttagctctttagaaatgcaatktataaccttcccttcaccagacactcattacagggcaagcttatctaaccatgtacttgcttagaagctccagagcccagcccctctcccaccaggagactgcctcgagagacattag

SEQ ID NO: 665021 - DNA, 429 bp, Homo sapiens
aatgctgatgacttcccccactagggcagagcctttaactctatgcttaccttatgggcaagagaagaccaatctgcagtcaggtacttcccaaagagtgagaatggagtaaggaactgggctctacaggccaggcccaattcctttttttttttttttttttttttgaaacyggataatcagagaagtcactcctcttccagggagaggagtcaggggtggggaagaagccaagggtttagggagcaatccctcttcatcaaaacctgatgagttagtcaggatgagctgagttctgctgcagtaacaaaacccttgactctttgtggtttaaaacaacaaatgtttattttctcctcacctacatgtttgatgtaggttggtaggaaactttgcttttcctagtcactcagaggttcaggctgataa

SEQ ID NO: 665022 - DNA, 576 bp, Homo sapiens
tggcctgccttttggttctggggaaggaagaaagaatcagcagatcccaggtcctaggtccgcaaggatgggcatttacactcagcacccggggcccatgattcacgctctgggggcttgggctggcccgcaatatgggaaaggcctcagtatcttccatttgaaaaaaatcctctacaatttagtaagatggcatttggtattatttcttaggaaatctgcacgaacaagtatctctaaccctaaaaagacctgagaaaaacatccagtgtgccctctcattgttgagagaaggggcctgcaggtaccttaatgggcaactggatggtgagyatgtgctcaaaaagactaaaatacctgtatccatttgctcagggctccatacaaagtatcaaaacctaagtggcctaaacaatgaacatttgtcctctcacagttctggaggccagaagtccaaaatcaaggtgctggcagtgttggttcctcctggagggtctgaaggagaagccactccttgcttcttcctcccttctggtgattctgggcaatccttcacatttcttggcttgtggaagc

SEQ ID NO: 665023 - DNA, 548 bp, Homo sapiens
ccaacattgtcatccttattcctaatgacagctgttactccacaaccttagacattagccagacccccacagaaaggaaaaggcctcggatatctccccatgactgcccccacaaattgttctttgctgggtgaaacctttcaagatgtggatcttaccacaaaacaaggacacatcaattgtaacttgaggtctgcaatccaagcctagctcctcacactcaagtctgttagagtcacgctgatggtgctgatctccccaggtacagcayaaaagcaagacaaaggcaagatgagatcaggcctccttctgcctaacctcctcttcctacatgctttctccacttcaaggacatgtgtaaatactgtgaaagaaaaataaaattaaaatccccagaccccaaacgcactaagccaaagggaaaagtctagctgggagctgggtcatgcaacccgcctcccgttttgtgtctaaatggataactatttacttccctcacattttgctcacagtgaaattccttgtgggccccaggatctttgccttca

SEQ ID NO: 665024 - DNA, 548 bp, Homo sapiens
ccaacattgtcatccttattcctaatgacagctgttactccacaaccttagacattagccagacccccacagaaaggaaaaggcctcggatatctccccatgactgcccccacaaattgttctttgctgggtgaaacctttcaagatgtggatcttaccacaaaacaaggacacatcaattgtaacttgaggtctgcaatccaagcctagctcctcacactcaagtctgttagagtcacgctgatggtgctgatctccccaggtacagcataaaagcaagacaaaggcaagatgagatcaggcctccttctgcctaacctcctcttcctacatgctttctccacttcaaggacatgtgtaaatactgtgaaagaaaaataaaattaaaatccccagaccccaaackcactaagccaaagggaaaagtctagctgggagctgggtcatgcaacccgcctcccgttttgtgtctaaatggataactatttacttccctcacattttgctcacagtgaaattccttgtgggccccaggatctttgccttca

SEQ ID NO: 665025 - DNA, 621 bp, Homo sapiens
ttcatagttttgcctttttccagaatgtcacatatagttgaaatcatacagcatatgccttttcagagtagcttcattcacttagtgataggttctgtatgcttttttattgcctgctatatgagcaatatttatttattcatttaaccattcagcatttcagcaaacactgatccatccatgttgggctaggcatcgttttcagtgcagaggaggcagcttgagcggatagacaaggcccctactttcattctgaaaaccagagtcccccggtgctatgatccaaatgcctgtgtccctccaaaattcacctgttgagacttaatctccaagctggtgayattaaaaggtgagacttctggggggagattagatcatgaggtccccctccttgtgaatgggattggtggtctttaaaggaggcctgggagagcgtgttcacccttccaccatatgaggatgcatagaaggtgccatctatgacgactaggtcctcaccagacacccaatctgccagtgccttgatctcgggcttcccagcctccagcaccgagagcaataaatgtctgttttttgataaattacccagtctaaagtatttcttatagcagctcaaacagg

SEQ ID NO: 665026 - DNA, 513 bp, Homo sapiens
atttacctccaatattcttttttttttttaattaaaaaaaatcttaatttttagctagacatgtcgtctagtcaaaagaatttgctcttcaatctcccctgaagttaggcatagccaaatgattacagtctggccaatgatatataaaaagacatgttgtgtgcaacttttgggaagtgccctcaaagggagagggtgcactcttcttttcttggacatgatgcctgggaattgagcagccactgtggaacacaacacaaatgatggcagggcagcaagctagcatawctagtccctgatgaccatggagcgctgtatcagccctggattgccttcccttgacttatttttttttaaataaatgttatagtgcgtatttgagatttacaacatgatgttatggtcttgactactattatgtgtgaaagaaaaatactttcatctcgtttaagcctttgtttgtttagtccatgctattgcatgcagccaaagctaatcttaacagatagagct

SEQ ID NO: 665027 - DNA, 513 bp, Homo sapiens
atttacctccaatattcttttttttttttaattaaaaaaaatcttaatttttagctagacatgtcgtctagtcaaaagaatttgctcttcaatctcccctgaagttaggcatagccaaatgattacagtctggccaatgatatataaaaagacatgttgtgtgcaacttttgggaagtgccctcaaagggagagggtgcactcttcttttcttggacatgatgcctgggaattgagcagccactgtggaacacaacacaaatgatggcagggcagcaagctagcatatctagtccctgatgaccatggagcgctgtatcagccctggattgccttcccttgacttatttttttttaaataaatgttatagtgcrtatttgagatttacaacatgatgttatggtcttgactactattatgtgtgaaagaaaaatactttcatctcgtttaagcctttgtttgtttagtccatgctattgcatgcagccaaagctaatcttaacagatagagct

SEQ ID NO: 665028 - DNA, 620 bp, Homo sapiens
aaattatattaagaggagaaaatatcagacagagactttggcctcaaaaaacttgccatgcattgcccctgcaggggtacttgcatttttatggatcattctggttattctccacttgactttctagaacctccctccatcctactytgtcctgctcagtgcccccagaggctgactccagtggactgaatcacctgggttctcttgtcctctaacttcgagtttggtttggccaatgaaaagcactaacaagaaattggaggcagatgagagaattaggttatttatttcagcccctctccaagaagggccaggttttctcaaggattgggttcctccctggctacagctttctctaggttctgttatttctattccccctccttgtccctccaggcctataggtggtcatggcttcctgctactcctagccctcaggtactctctcctcttgttgattttcttaatcctgcacacacctctataaataatctcttatttaagctccttttgattatacctctttgagcgtgctgtgcttcttttgttagaacactgactgataggtagaggagtatgtgagaaaaaccagcactttggtgtcagacagccctgaatgt

SEQ ID NO: 665029 - DNA, 620 bp, Homo sapiens
aaattatattaagaggagaaaatatcagacagagactttggcctcaaaaaacttgccatgcattgcccctgcaggggtacttgcatttttatggatcattctggttattctccacttgactttctagaacctccctccatcctactttgtcctgctcagtgcccccagaggctgactccagtggactgaatcacctgggttctcttgtcctctaacttcgagtttggtttggccaatgaaaagcactaacaagaaattggaggcagatgagagaattaggttatttatttcagcccctctccaagaagggccaggttttctcaaggattgggttcctccctggctacagctttctctaggttctgttatttctattccccctccttgtccctccaggcctrtaggtggtcatggcttcctgctactcctagccctcaggtactctctcctcttgttgattttcttaatcctgcacacacctctataaataatctcttatttaagctccttttgattatacctctttgagcgtgctgtgcttcttttgttagaacactgactgataggtagaggagtatgtgagaaaaaccagcactttggtgtcagacagccctgaatgt

SEQ ID NO: 665030 - DNA, 522 bp, Homo sapiens
tcactgcaacctccacctctcgggttcaagcgattctcctgcctcaccctctcaagtagctgggattgcaggcattcaccaccacaycctgctaagttttgtatttttagtagagatggggttttgccatgttggccaggctggtctcaaacccctgacctcaggtgatctgcccacctcggcctcccaaagtgctagaattacaggtgtgagccaccacacctggcctaatatagatattatgttaaagggattttgtagatataattaaggttccatatcacatgacctaaagagagggggattatccaggtgggccttaacgaatcacctgagccctgtaaaagcagagcattttctctggtagatcacagaagagaaatacagaattgtgttccagctgtcctggaagacagaaaatatccatggtgtgaacaacctgtgggggggccacatggcaaggaactgtgggcagcctctagttgttgagagtggtccccagccatcagctagcaggaaaat

SEQ ID NO: 665031 - DNA, 522 bp, Homo sapiens
tcactgcaacctccacctctcgggttcaagcgattctcctgcctcaccctctcaagtagctgggattgcaggcattcaccaccacatcctgctaagttttgtatttttagtagagatggggttttgccatgttggccaggctggtctcaaacccctgacctcaggtgatctgcccacctcggcctcccaaagtgctagaattacaggtgtgagccaccacacctggcctaatatagatattatgttaaagggattttgtagatataattaaggttccatatcacatgacctaaagagagggggattatccaggtgggccttaacgaatcacctgagccctktaaaagcagagcattttctctggtagatcacagaagagaaatacagaattgtgttccagctgtcctggaagacagaaaatatccatggtgtgaacaacctgtgggggggccacatggcaaggaactgtgggcagcctctagttgttgagagtggtccccagccatcagctagcaggaaaat

SEQ ID NO: 665032 - DNA, 599 bp, Homo sapiens
ccacaaatacatgaggaatagcaaggatctaagcaactaatataatgcacatgcttggatggggatatattcttgcaaagatatctttacattccagtaattaagtatgtcacattaattgcatggccctttcacaaaaccttgcaaaacaaacaaaccaaaaaaaaaaaaaaacccaaaaaaacaaccaagaactttycctcttgatatcagactaaaactgattgcataattacattacctggataattaaatacaaatttagtggcctcagaactgtatgatattgtggtttcattttctaatagaattatcccgcctttggcatagaattcttgctaagcaatggagatctaattacttagtgacatgacattaactcctcagggacctttctttggaataaaggcttagattaaaaatgatgcacagagcttctttctcatttcattactgggatccaaatcataggaattagagatgtgagagatctattaggctttcttctctcttatctagcaggcaggggaagagcgttcatcagacattgttcttctgggcttggttaggtccaatttagatagcaaagaaccatttat

SEQ ID NO: 665033 - DNA, 583 bp, Homo sapiens
atattacaagtagttaaaataccaaatatgcacagatttcttttcactaaaacatgttgaaactacaagtttgggtctcctcacacccttgtatatttaattcagtcgtccgcaagttgaaagacttgaatcatctcaagccatgttaaggactgggattgcttaatgaacagaagttatgggcaggccagtgactggatcgttgtcaataatcctgatagaatgtactgttcctgctttatagtaattatatttaaacatcccccaaaacacgtggtctcagatagtccattacctgggttcaagttatattatgacctaaatcttctgtaatcacagtctgaacaccctcatctccactcaggaaaatcactagactagaatgtgggaggggcagcyggcaccatattcatgttgtaaacggtaattcaatttcaataaaacattatgtcaacattaatttaatgttgttaatttgaattttattggttttgcaatttgtttgtaattagtccatttactttggttttgtaattgaataagaactgcaacataaggagtacataactagttttatgttcat

SEQ ID NO: 665034 - DNA, 515 bp, Homo sapiens
gaacaaatcccacctttgaagtttttccttcttgttacaaggggaatgtcttttgtttaatccattttagcccttaatacctgacctggatcaatcctgttggttagattacacagcattcatgctgattttaaactggcctgggggtggggggtgggacaggttctgtctcattggtgtgagaatctcaagaataatcaacatgtatacctagtccatttttactttgaataacaaactgtycttttatatttaaatgaataattataatgagcattattaaacagatttttgtgtgttctattagtggtgtattttgaatggtcccttaaaaactaattctttttcatttattcacagtagggtaagagactgattttcatcatgtggtggatcatgtcttcaattaaaaatcgagaaccactttttctctgaggccccacatcaaatgtgagtgtaagtacaaatttttccagcagtaggagacacttaacttctcaaccccaagcctgagc

SEQ ID NO: 665035 - DNA, 611 bp, Homo sapiens
cactactctgcccagtgaaaaaccttgatgtggactcaggcatatcttctttctctgcccatgtagcccttttaacagcttctcttctctggagtcgtagtgccatggcccacacaggcatgtcctcatttgcagccctggggatacaaagagtgggaccatagctggggtgacctttgggccacaattaagtatcacacatagtatgaaatcctatctaacactgtactctgaacaataggacaagtgagaagaggaaagaaaagcaaatgtgagccagccatgtgatcccatggctaccctaagggcctattaatatgattcagagatgcctgagtaactgactcttgttgcagttccctagtttaggagtgaaatgagacagtgtttgccttgagagaccaagaactgagtgaacgcctgagtatgtcataccatgctgtgctctgtaatcatgttgtttattgcatraccccaagattatcagatgcatcagtcccagatgaatatatagcactggcatatagccagactaattaatatgtagaactctctaatctcataaaattgaaggaggacagtctttctgcgatgctcagttacaagggtat

SEQ ID NO: 665036 - DNA, 485 bp, Homo sapiens
aatagtaatagggtattgtgtaatgcttattcaagtaaaatctataattgaaattcagcaattgttttttctcctattaaacaaatgaaatatagcctcttttatttagaaatctggttatctctgggtgttggttttgagtttttccaacatgtgttagtttcataactggcaaagattctctcgttgaccaaactcaagtcaggctcctctgaactcttcccaattaggtcctgacttttgagtttccatgttcatctctgcattgtccagttttagcatcaatcctgtcaagtcagtttagccagaacactaattctcaatatctgatcaagttcttcatccactaccattccctaggtgawgtctgatcaccctggcttgctttcagcaagaattcagtcaaatctccctttaccgctgatgcttcctctcagtaattttccatacactgactcccacactgctccttggctatgaattcc

SEQ ID NO: 665037 - DNA, 530 bp, Homo sapiens
gagaggcacgtctagattttgtgaagctcaagtgtataaaacttggagaattatatgtaagtaaactgatataaaactgcagatacagaattaggcacaagatattggaagacacctgggctagagaggaactgtgaggcctaagcttcattagcttcatggttgttttcctttgaagattaagaacttccagttctctgtttatgtctgactctacctctcagtaagcatctgactattccttcctccccggaagtattttcttttctggccttcattgatagcacactctttggttttccttttatcaatggcctccctgccctggctctgcttctgtcggtcccccaaatgctgaagtattcctgggctgttctagacttttctctctttctgtcttctttcccgagatgatcatattgaagctttraagggcaactatggggcaatatttctcaaaattagacctcctctgcttctcttttttagcgaccgattattttaaaaaacccaactgcccccgacctctc

SEQ ID NO: 665038 - DNA, 550 bp, Homo sapiens
tcattctcatccaggaagcagtttagaaggtcacaacctttcttagcacagatatttcaatagaacataagactttctgagctttccaaggaaatccacccaggcttctgcaggtaaggggtgctatggtgttaagggcagaggctctggagccagatcacctgctctagatcccaggcccaccacttactgatctctctgtacttcagttttgccacatgtaaaaaggggataatgacagtacctccttgtagagttattgttggcttaaatgagtcaattcaaggagaggacttagaagactatctcgtccatctaactcaatggctattactattcttaccacaccttagccatgagaggctgtctcagcagttgtgtccatcctctgttctgttcagcctgttgttggacctccagctcaatccaatgtggctgttttctagcccagacacttgagcttctraagggtctgatacttccgggttggaatgcactgtagtaggaaaatgggccaaacagaatcctgccatcttgaattggcttactc

SEQ ID NO: 665039 - DNA, 550 bp, Homo sapiens
tcattctcatccaggaagcagtttagaaggtcacaacctttcttagcacagatatttcaatagaacataagactttctgagctttccaaggaaatccacccaggcttctgcaggtaaggggtgctatggtgttaagggcagaggctctggagccagatcacctgctctagatcccaggcccaccacttactgatctctctgtacttcagttttgccacatgtaaaaaggggataatgacagtacctccttgtagagttattgttggcttaaatgagtcaattcaaggagaggacttagaagactatctcgtccatctaactcaatggctattactattcttaccacaccttagccatgagaggctgtctcagcagttgtgtccatcctctgttctgttcagcctgttgttggacctccagctcaatccaatgtggctgttttctagcccagacacttgagcttctaaagggtctgatacttccgggytggaatgcactgtagtaggaaaatgggccaaacagaatcctgccatcttgaattggcttactc

SEQ ID NO: 665040 - DNA, 595 bp, Homo sapiens
aggaaaaagtttaaagtattacaagaattaccaaaatgtgacacagacatgaagtgagcacatgctgttggaaaaatggtgctaatagatttgcttgacacaggattgccacaaaccttccatttgtaaaaaaaaaaaaaaatctagtatctgtgaagtgcagtaaagcaaagcacaatgaaatgcaatatgcctgtattctgtaagtataaaatacacactggaacagagacttaatatttaaaaagaatgtaaaatacctcaataatttaaaaatactgattatgagtcaaaacaaaattatattggacatactgggttaagtatcaccttaaaattaattttatctgtttcttcttactttttcaatgtggytactagtaaatttaaaactatatatgtggttcaaattggatttctattgaaaagtgctatcatagaactttgacaaaagtctctaatgaagtagaagatggtaaaaattgttaatgagaagatatggaaatcctgaaagggaatgatgtggttacttgagtacacatatatacattttaggaaaaagtttttaagagttactaaaagtacaggtgtgcgg

SEQ ID NO: 665041 - DNA, 508 bp, Homo sapiens
tggtaatatttgcatatgttgtgtatgtacataacatggattttctcattacatcccttaaaaattctacgtagttaacttgtttgcattttacaatgttcagatgagaaaactgaggcctgagaggctaaataactaattgcttatgccgggattgacagctcctttgaaatgaatacaaacatggtattctttaccctacagtgttatggaatcctttctcacaaagttgggcttcaataaactatatgcagttaaatgcaatttttattttattatgggtttataggtggactttttctttacagttacytttatcagtaaagcaaatcacacatataaatctgttgggagcggctgatgactctgggctacctctggcttacatagagttcaccactagcatggctgggtgaatggacgtgtgcacaaccagcgcaaaagaacctgggcagcttcctcgtgtgtcccactgtttgttctgcccacaggtatctgcccaaggcct

SEQ ID NO: 665042 - DNA, 572 bp, Homo sapiens
aaaccattgtcatgtagctaaagatccaccgttaaattctggtaaaatcattagatgtctcattttcttaaatgtgrtgcttcattagcaagatagtttagttattcagcatttgcaacacaatgaatgagaaaggagtttatttaattgtccatggcttaagctaacaggattaaaaacccagatagtatgtgttataagcatatggctccttttcatgactaatcacttgagatatgtaaatggtgtcaccacagaagcagcagaaggaaatataaaaatatgtgatataattatatttcagaggaggaataaccaattatattatacaggatcagctctaaaagaatgaagaaatgtcttgtatgtggctaaggatcaaacagtgctttattttatatgctcacacaagtaagttccaaaaccaaagtccaggattaaaaggactgtcatgagggatacaaaatgcttagtacagacacaatctttgatgcaaatgtcacagttctaaaaatcacttggtagcactgggcagcctttgaaatttggttcatatgtcgtgcttgtcagta

SEQ ID NO: 665043 - DNA, 583 bp, Homo sapiens
caaaagcagagatctttgtccatttagttcactgctatataccaagcacctagaacaatacatatagaaggcatgtaataaatatttgttggatgaacaaatgctgtttctctaaagattgttgtaataggtttgacctgtagacttagaatgcatctcagtatgtggtttatctttatattccttagcagtagttcctaagcttgttttccaaccatagcaaacagttcattttgatagtaattctgtagagcyaaatgaagcacacaaattctaaaggttggaaggaagtgctgcagcaaagaaatggattttgtaggtgttatagtccaaccacccatctattctaatcccatcaactgcatccccatggggcattgtatctctccatctttacagaaagggagaagaggacagaggtaaaagaataggttctgtgatcaggaggccctgtcatgtaattcttgttccacccatgtctactgtgtgaccttgaacaagatactttagcctctttctgcctcagtttcctcatctgtaaaatggtgatagaaacaactgctacctcatagccggttttttc

SEQ ID NO: 665044 - DNA, 477 bp, Homo sapiens
ttgaattctgaccccaaaaaatgtttttgcgtatgtcagttgggagttaagtgaaatttatatcagccacaagaaactaaaacctgaagaggtatgagaggttgtgttttactttttaattcatatagcatgatttaggtataaaacagccttcagagtatttttgtggctttaaacccatcagaaaactcatttttgcagtaaaatcctatcttcatggcagatccatttattctgggatcacacagcttcggctgatctccagagtaagcagaagatacagtagtgacagctggcagcctcgctcacttagattctgtttgtgcaactgctgttaatatggagccgctaacctaggaaamaaatcatggcttgaaccaaggtggaggacatggagcagggccctgtggcttttggagtagaagtggtcacacacgttaacaaacagcatgaacccaaactataaaaacatagaat

SEQ ID NO: 665045 - DNA, 599 bp, Homo sapiens
catgtgtcttgatggggctttgttaaattgaattttaaaattgtgttttaaatatacttagggaagtacagaaaggtacccsagaacaggttgttttataaagacaacaataatttctgaattattttcatttcagctttttatatactgtgtagtcacaaaatgagagaccctcccccactcaccccaccctcacagctccccagaggaacaatagccatgagcaaacagtgcttgcctcctgaccttcgggtgtttctcctaaaggctagctcatttaagggcagcagtcaggggcttgctactcttcgcagccctgtttcttttcttgtgatgagaagaaacaagcccaggctgacagctggccaagacttgaactagaatgttgaagttgaaaagtcaaaatgggtctgtgtcaaaggactagcagaggggaagggactgtcctccggggagctgaggagtgaggatggtcctcacctcgatccagcgatcaaattccccaagtaaatccatgtaaaacatgaactgtggccagcacttgttaagcaaggaatattaaaaatcattgtcattactgctgctattattgttacagg

SEQ ID NO: 665046 - DNA, 580 bp, Homo sapiens
ctttatttcagggctttcgttgaagtattaattaggaagaataggagattattcctcccaaggaactcattttaattttactgcttttggttttatagaatattttctattgaaaaacagatggttgtttttatatacaagttcacaagacacctaatatgtcattgttttggttttttgttcttattgctttattaccattcttctcatgaccaccttttttaaaagcaaacttttcattgaagctgtgacatacatacataaaagggcacaaattatagctcaatgaatttttacaaagcaaacatacccactgtttgtatcccagaaatagaacaatagagagcctagamatcatatatttacagtcaattgatttttgacagaggtgccaagaacacacaatggagaaaggacagttgcttcaataaatggtgttaggacaactggatgtccacatgcagaagaatgaaattagacccttatttcacaccatatataaaaatcaacccaaaatgaagtaaagacttacatgtaagacctgaaactatgaaagtattagaagaaaacctagaagaga

SEQ ID NO: 665047 - DNA, 575 bp, Homo sapiens
actagaactaatacatggatttagcagagatgcagtatgcaaggtcgacatacaaaaccaattttatttctgtatactagcaataaacaattagaaattgaatgaaaaaagttcgatttatagcacccaaaaaaccatgaaatatttacatgtaaatataataagatatgtaaaaaatctgttattctgacaactacaaaacactaatgaagaaatcaaagaaaacatttaggtggtgagacataccatgttcaaagtttggaagactcaacatgtttaaaatatctattctccccaaattgatctatatccaaygtgatttctgtcaaaatccaacaagactcttactgaaattgacaacttgattctaacattttcacgtaactagagtgtccagaatagccaaattattttgaacaaaaaaagattaaagtttaggaacttacaccacctgatttgaagagtttttttgttttttattttttgagacggagtctcactctgtcgccaggctggagtacagtggcacgatcttggctcactgcaacccccgcctcctgggttcaagtggttct

SEQ ID NO: 665048 - DNA, 577 bp, Homo sapiens
gctctggaaagtctcagccataaaattgaacaagtagaagaaagaaattcagagctcaaagacaaggtctttgaattaacccagttcaacaaagacaaakaaaaaagaataagaaaatatgaacaaaccctccaagaagtctgggattatgttaaacgaccaaaactaagaataatcagtgttcctgaggaagaagagaaatctaaaagtttggaaaacatatttgggggaataattgaggaaaacgtccccagtccttgctagagacctagacatccaaatacaagaagcacaaagaacacctgggaaattcattgcgaaaagatcatcacctaggcacactgtcatcactttagccaaagttaagatgaaggaatcttaagagctgtgagacaaaagcaacaggtaacctataaaggaaaacctatcagattaagagcagatttctcagaagaaaccctacaaaccagaagggattggggccctatcttcagcctcctcgaacaaaacaattatcagccaagaattttgtatctagcaaaactaagcatcatatataaaggaaaggtacagtctt

SEQ ID NO: 665049 - DNA, 478 bp, Homo sapiens
atcacctaggcacactgtcatcactttagccaaagttaagatgaaggaatcttaagagctgtgagacaaaagcaacaggtaacctataaaggaaaasctatcagattaagagcagatttctcagaagaaaccctacaaaccagaagggattggggccctatcttcagcctcctcgaacaaaacaattatcagccaagaattttgtatctagcaaaactaagcatcatatataaaggaaaggtacagtctttttcggaaaaacaaatgctgagagaatttgccactaccaagccacctctacaagaactgctaaaaggagctctaaatcttgaaactaatcctggaaacacacatcaaaacagaacctctttaaagcataaatctcacaggacctatgaaacaaaactacaagttaaaaagcaaaaacaaacaaaaacaaggtacacaagcaacgaatagcatgatgaatggaatggta

SEQ ID NO: 665050 - DNA, 478 bp, Homo sapiens
atcacctaggcacactgtcatcactttagccaaagttaagatgaaggaatcttaagagctgtgagacaaaagcaacaggtaacctataaaggaaaacctatcagattaagagcagatttctcagaagaaaccstacaaaccagaagggattggggccctatcttcagcctcctcgaacaaaacaattatcagccaagaattttgtatctagcaaaactaagcatcatatataaaggaaaggtacagtctttttcggaaaaacaaatgctgagagaatttgccactaccaagccacctctacaagaactgctaaaaggagctctaaatcttgaaactaatcctggaaacacacatcaaaacagaacctctttaaagcataaatctcacaggacctatgaaacaaaactacaagttaaaaagcaaaaacaaacaaaaacaaggtacacaagcaacgaatagcatgatgaatggaatggta

SEQ ID NO: 665051 - DNA, 613 bp, Homo sapiens
ctgtgacaaacccacagccaacataatactgcatagggagaagttgaaagtattccctctgagaactggaacaagacaaggatgcctagtctcaccactcctcttcaatatagtactggaagtcctagccagagcaatcagacaagagaaagaaagaaagggcatctgaatcagtaaagaggaagtcgaactgtcactgttgctgacgatatgattgtttaccttgaaaaccsttaagactcctccagaaagctcctagaactgagaaaagaactcagcaaagtttccagatacaagattaatgtacacaaattaatagctcttctatacaccaacagtgaccaagcggagaatcaaatcaaaaactcaaccccttttacaatagctgcaaaaaaaacccaaaaaaacaaaaaacatacttaggaatatgcctaaccaaggaggcaaaagacctctacaaggaaaactacaaaacactgcagaaagaaatcatagatgacataaacaaatggaaacacatcccatgctcatgggtgggtagaatcaatattgtgaaaatgaccattctgccaaaagcaatttacaaattcaatgcactccccatcaaaatacc

SEQ ID NO: 665052 - DNA, 613 bp, Homo sapiens
ctgtgacaaacccacagccaacataatactgcatagggagaagttgaaagtattccctctgagaactggaacaagacaaggatgcctagtctcaccactcctcttcaatatagtactggaagtcctagccagagcaatcagacaagagaaagaaagaaagggcatctgaatcagtaaagaggaagtcgaactgtcactgttgctgacgatatgattgtttaccttgaaaacccttaagactcctccagaaagctcctagaactgagaaaagaactcagcaaagtttccagatacaagattaatgtacacaaattaatagctcttctatacaccaacagtgaccaagcggagaatcaaatcaaaaactcaaccccttttacaatagctgcaaamaaaacccaaaaaaacaaaaaacatacttaggaatatgcctaaccaaggaggcaaaagacctctacaaggaaaactacaaaacactgcagaaagaaatcatagatgacataaacaaatggaaacacatcccatgctcatgggtgggtagaatcaatattgtgaaaatgaccattctgccaaaagcaatttacaaattcaatgcactccccatcaaaatacc

SEQ ID NO: 665053 - DNA, 665 bp, Homo sapiens
tgttttcctgatttaattgaattgtctgtgttctcttgtatctcattgagtttctttaagattattattttgaattccttttcaggcattgtgtaaatttcctggggtcagttactggagaattattgtgttcttttggtggtgtcatgtttccttgtttcttgtgtccctgcattgatgtctgctcatctagtggtgcagttacctattccaaacttaacagagtggcttttgtaaggaaagacttttacctccagagggcctaaggrtgtcacttgggcagagtgtggtggttctggctttgtgtaggttagtggtgtagtttctttgtagcttcttcagttgttatttatgttaacaatgactgtgagtgcctcagatggcctaggctgcaagagtttgtggcagtgatcatggctgagtaggttattagggaaagtgcttcagggatccttttgtctagtcttcctcacagtaggaaatcttagctgaggggatctcttcatattgggtctggaagactcacaggcagccacagcagcactgcaatccagggttaggtgctccgagtgactgtggagctgggttcttggtctcaaggtcttgtgaaaccactgtatcacctgggacttgccatgaaggttcactctccaaggcacgagccg

SEQ ID NO: 665054 - DNA, 607 bp, Homo sapiens
ttggctcactgcaacttccgcctcccgggttcaagtgattctcctgccttagtctcttgagtagctgggctacaggggccmgccaccatgcccggctaactttttgtatttttagtagagatggggtttcaccgtgttagccaggatggtctcaatttcctaacctcgtgatccacccgccttggcctcccaaagtgctgggattataggcgtgagccaccgcgcccggcccctccaatatgttaattttcttaactttccctcactttgaaaaactcccagtttctgtcaccccaaaagttctgttcagtaaaatcacccgtcaggcagagtgagggcagtgaaaactcatcagctccagcctcagctgcgaccctatacagatcatcagttctttaattgtctctcagtaatgcctgctgttgtcctgtgcccagcagttatctcagcccttcactgctcatgtcaagggctttactttaccatgtcctgtctcactgagtagatgttcttacctcttactggacagaaaaaaaggaggtctagtgtatacaacatctacttttagacccctgcagctacaacttttatcatttgtattcattct

SEQ ID NO: 665055 - DNA, 607 bp, Homo sapiens
ttggctcactgcaacttccgcctcccgggttcaagtgattctcctgccttagtctcttgagtagctgggctacaggggcccgccaccatgcccggctaactttttgtatttttagtagagatggggtttcaccgtgttagccaggatggtctcaatttcctaacctcgtgatccacccgccttggcctcccaaagtgctgggattataggcgtgagccaccgcgcccggcccctccaatatgttaattttcttaactttccctcactttgaaaaactcccagtttctgtcaccccaaaagttctgttcagtaaaatcacccrtcaggcagagtgagggcagtgaaaactcatcagctccagcctcagctgcgaccctatacagatcatcagttctttaattgtctctcagtaatgcctgctgttgtcctgtgcccagcagttatctcagcccttcactgctcatgtcaagggctttactttaccatgtcctgtctcactgagtagatgttcttacctcttactggacagaaaaaaaggaggtctagtgtatacaacatctacttttagacccctgcagctacaacttttatcatttgtattcattct

SEQ ID NO: 665056 - DNA, 607 bp, Homo sapiens
ttggctcactgcaacttccgcctcccgggttcaagtgattctcctgccttagtctcttgagtagctgggctacaggggcccgccaccatgcccggctaactttttgtatttttagtagagatggggtttcaccgtgttagccaggatggtctcaatttcctaacctcgtgatccacccgccttggcctcccaaagtgctgggattataggcgtgagccaccgcgcccggcccctccaatatgttaattttcttaactttccctcactttgaaaaactcccagtttctgtcaccccaaaagttctgttcagtaaaatcacccgtcaggcagagtgagggcagtgaaaactcatsagctccagcctcagctgcgaccctatacagatcatcagttctttaattgtctctcagtaatgcctgctgttgtcctgtgcccagcagttatctcagcccttcactgctcatgtcaagggctttactttaccatgtcctgtctcactgagtagatgttcttacctcttactggacagaaaaaaaggaggtctagtgtatacaacatctacttttagacccctgcagctacaacttttatcatttgtattcattct

SEQ ID NO: 665057 - DNA, 607 bp, Homo sapiens
ttggctcactgcaacttccgcctcccgggttcaagtgattctcctgccttagtctcttgagtagctgggctacaggggcccgccaccatgcccggctaactttttgtatttttagtagagatggggtttcaccgtgttagccaggatggtctcaatttcctaacctcgtgatccacccgccttggcctcccaaagtgctgggattataggcgtgagccaccgcgcccggcccctccaatatgttaattttcttaactttccctcactttgaaaaactcccagtttctgtcaccccaaaagttctgttcagtaaaatcacccgtcaggcagagtgagggcagtgaaaactcatcagctccagcctcagctgcgaccctatacagatcatcagttctttarttgtctctcagtaatgcctgctgttgtcctgtgcccagcagttatctcagcccttcactgctcatgtcaagggctttactttaccatgtcctgtctcactgagtagatgttcttacctcttactggacagaaaaaaaggaggtctagtgtatacaacatctacttttagacccctgcagctacaacttttatcatttgtattcattct

SEQ ID NO: 665058 - DNA, 576 bp, Homo sapiens
gcccccccggtgtccccgcgaggggcccggggcggggtccgccggccctgcgggccgccggtgaaataccactactctgatcgttttttcactgacccggtgaggcgggggggcgagccccgaggggctctcgcttctggcgccaagcgcccggccgcgcgccggccgggcgcgacccgctccggggacagtgccaggtggggagtttgactggggcggtacacctgtcaaacggtaacgcaggtgtcytaaggcgagctcagggaggacagaaacctcccgtggagcagaagggcaaaagctcgcttgatcttgattttcagtacgaatacagaccgtgaaagcggggcctcacgatccttctgaccttttgggttttaagcaggaggtgtcagaaaagttaccacagggataactggcttgtggcggccaagcgttcatagcgacgtcgctttttgatccttcgatgtcggctcttcctatcattgtgaagcagaattcaccaagcgttggattgttcacccactaatagggaacgtgagctgggtttagaccgtcgtgagacaggttagtttt

SEQ ID NO: 665059 - DNA, 312 bp, Homo sapiens
gtgccttctcggctcttgagacttagccgctgtctcgccgtgccccgggtcgaccggcgggccttctccaccgagcggcgtgtaagagtgcccgtcgggacgagccggacccgccgcgtccccgtctcggtcggcacctccggggtcgaccagctgccgcccgcgagctccggacttagcyggcgtctgcacgtgtcccgggtcgaccagcaggcggccgccggacgctgcggcgcaccgacgcgagggcgctgattcccgttcacgcgcccgcgacctccaccggcctcggcccgccgtggagctgggacc

SEQ ID NO: 665060 - DNA, 312 bp, Homo sapiens
gtgccttctcggctcttgagacttagccgctgtctcgccgtgccccgggtcgaccggcgggccttctccaccgagcggcgtgtaagagtgcccgtcgggacgagccggacccgccgcgtccccgtctcggtcggcacctccggggtcgaccagctgccgcccgcgagctccggacttagccggcgtctgcacgtgtcccgggtcgaccagcaggcggccgccggacgctgcggcgcacygacgcgagggcgctgattcccgttcacgcgcccgcgacctccaccggcctcggcccgccgtggagctgggacc

SEQ ID NO: 665061 - DNA, 346 bp, Homo sapiens
ctcgctgctgctgctgcctctgcctccacggttcaagcaaacagcaagttttctatttcgagtaaagacgtaatttcaccattttggccgggctggtctcgaactcccgacctagtgatccgcccgcctcggcctcccaaagactgctgggagtacagatgtgagccaccatgcccggccgattccttccttttttcaatcttattttctgaacgctgccgtgtatgaacatacatctacacatacacacacacacacacacacacacacacacacacacacacacacacmccccgtagtgataaaactatgtaaatgatatttccataattaatacgtttatatt

SEQ ID NO: 665062 - DNA, 533 bp, Homo sapiens
gcggcacccggggcggccgaccggccctcggcgatccccgcggctccccccaccaccgccgccgccgcagtcgcggccggtcccccggaaccgtctcctcccccgcacgcgccgcaggccgacccccggaaccctccgggaagcccaccgggccccacgcggggcgccaccgacccggtccccaaggcgcgcgccgggggacgcggacgccgggccgatcagyggccggcggcggcgccccacgaggcggtgccgggttcggtcccaggcggggccaccaacggacgtgaagccggtgagccgctcggggggaagaagaggatcggcgggcggcgggcggggaagagggcacagacgggcgagggccggggaccgcgagggcaagggcacccgggagcccgcagaggcggcggctcggggagaaacctcaggcacggccgggccaccaggaaaacacggccgcgggatcccaccgccacagacacgagggcggtcccgcggcgccccgcctgggacgccggacggccctcggc

SEQ ID NO: 665063 - DNA, 510 bp, Homo sapiens
ttcttcctggtttagtcttgggtgggtgtatgtgtcgaggaatttatccatttcttctagattttctagtttatttgcatagaggtgtttatagtattctctgatggtagtttgtatttctgtgggatcggtggtgatatccccttgggtttaataaacagataacatcaaacattcaactaatccaataaaaagaaattttattcatttgagaatgtgttttccagagcatacttatatattacgttttaacttcataatttatattttataaaaacataactaattcaagttaatcttctctaatttttaattcaattgaatttttatcaggatcactatatttaaacaaaaattacctgaatttttcacaycataatttatagattctgcttctacaaattgtctgtagggaccattatttctacacggtctactttcctgggttaagtggtggatacccaaatgtttttggaataatgttttcttatatcagtttttagtcagtga

SEQ ID NO: 665064 - DNA, 599 bp, Homo sapiens
ggttctgacccaagaaggacactgtctacttcccaggcatccctccttggctgggaggagaggggaggatgagtccattggaagctgagaattgtggaagctggggatgggagttttgagatggaggaggcaggcgtgtgaaggaggtcagggaaaggcaagtaaatctactaaycattgcagtttataaaataaaaaccttaaaaatggtttaacatgcaaaaggttaaattttaaaaagaggccaggttttaaagaaggtaaaatacctcaaatttagacataataaaaatgaggaaaatactcaaaacatttcaagcaaattgttcttcagaagaggagaggttggaattaatcaagagacctttgttacacacacatcccccaagagtttcccaaacaataaattcatttacaaaacaaaataggaatcaacacaaaacctcatccacatacagagaaaaataaattgtggtgattctgtaacagctgaaaaactagtgagggaggagaaaaatgaataaactctaaatccattaggtgatatttataaatagcaaaattggaggatggaatggagaaaagagttgaacttatca

SEQ ID NO: 665065 - DNA, 599 bp, Homo sapiens
ggttctgacccaagaaggacactgtctacttcccaggcatccctccttggctgggaggagaggggaggatgagtccattggaagctgagaattgtggaagctggggatgggagttttgagatggaggaggcaggcgtgtgaaggaggtcagggaaaggcaagtaaatctactaatcattgcagtttataaaayaaaaaccttaaaaatggtttaacatgcaaaaggttaaattttaaaaagaggccaggttttaaagaaggtaaaatacctcaaatttagacataataaaaatgaggaaaatactcaaaacatttcaagcaaattgttcttcagaagaggagaggttggaattaatcaagagacctttgttacacacacatcccccaagagtttcccaaacaataaattcatttacaaaacaaaataggaatcaacacaaaacctcatccacatacagagaaaaataaattgtggtgattctgtaacagctgaaaaactagtgagggaggagaaaaatgaataaactctaaatccattaggtgatatttataaatagcaaaattggaggatggaatggagaaaagagttgaacttatca

SEQ ID NO: 665066 - DNA, 592 bp, Homo sapiens
gtcccaaatgaaaaagttgagcagaaattcttctctcactcgttttgccggcttggaggtcagactggaggtgtcctgaactagaaccagagcataggttctgacccaagaaggacactgtctacttcccaggcatccctccttggctgggaggagaggggaggatgagtccattggaagctgagaattgtggaagctggggatgggagttttgagatggaggaggcaggcgtgtgaaggaggtcagggaaaggcaagtaaatctactaatcattgcagtttataaaataaaaaccttaaaaatggtttaacatgcaaaaggttaaattttaaaaagaggccaggttttaaagaaggtaaaatacctcaawtttagacataataaaaatgaggaaaatactcaaaacatttcaagcaaattgttcttcagaagaggagaggttggaattaatcaagagacctttgttacacacacatcccccaagagtttcccaaacaataaattcatttacaaaacaaaataggaatcaacacaaaacctcatccacatacagagaaaaataaattgtggtgattctgtaacagctgaaaa

SEQ ID NO: 665067 - DNA, 599 bp, Homo sapiens
ggttctgacccaagaaggacactgtctacttcccaggcatccctccttggctgggaggagaggggaggatgagtccattggaagctgagaattgtggaagctggggatgggagttttgagatggaggaggcaggcgtgtgaaggaggtcagggaaaggcaagtaaatctactaatcattgcagtttataaaataaaaaccttaaaaatggtttaacatgcaaaaggttaaattttaaaaagaggccaggttttaaagaaggtaaaatacctcaaatttagacataataaaaatgaggaaaatactcaaaacatttcaagcaaattgttcttcagaagaggagaggttggaattaatcaagagacctttkttacacacacatcccccaagagtttcccaaacaataaattcatttacaaaacaaaataggaatcaacacaaaacctcatccacatacagagaaaaataaattgtggtgattctgtaacagctgaaaaactagtgagggaggagaaaaatgaataaactctaaatccattaggtgatatttataaatagcaaaattggaggatggaatggagaaaagagttgaacttatca

SEQ ID NO: 665068 - DNA, 599 bp, Homo sapiens
ggttctgacccaagaaggacactgtctacttcccaggcatccctccttggctgggaggagaggggaggatgagtccattggaagctgagaattgtggaagctggggatgggagttttgagatggaggaggcaggcgtgtgaaggaggtcagggaaaggcaagtaaatctactaatcattgcagtttataaaataaaaaccttaaaaatggtttaacatgcaaaaggttaaattttaaaaagaggccaggttttaaagaaggtaaaatacctcaaatttagacataataaaaatgaggaaaatactcaaaacatttcaagcaaattgttcttcagaagaggagaggttggaattaatcaagagacctttgttacacacacatcccccaagartttcccaaacaataaattcatttacaaaacaaaataggaatcaacacaaaacctcatccacatacagagaaaaataaattgtggtgattctgtaacagctgaaaaactagtgagggaggagaaaaatgaataaactctaaatccattaggtgatatttataaatagcaaaattggaggatggaatggagaaaagagttgaacttatca

SEQ ID NO: 665069 - DNA, 629 bp, Homo sapiens
gttggaattaatcaagagacctttgttacacacacatcccccaagagtttcccaaacaataaattcatttacaaaacaaaataggaatcaacacaaaacctcatccacatacagagaaaaataaattgtggtgattctgtaacagctgaaaaactagtgagggaggagaaaaatgaataaactctaaatccattaggtgatatttataaatagcaaaattggaggatggaatggagaaaagagttgaacttatcattaaagaagtaacacatgtgaaaacataaggtgtaactcatccccaaagaaaagtaaactctccataaagtagcaagtatagaaatttattgaaaaggaggaaagtaccactcacccccccaatataagcgtattaatttgaattaaaattttctccaaatccgagataggttacrcaaaagaatacaaaaagattatttttctttcaactaagaggaaaaacaaaatccgatttaaattcactaatgggacaagaagggaggctgtggtttgcaggtgctagtaaacgggatgagggttgtgaagagtttgaggggtagaggaccagcttacctcgctttggagccgcagcggccaacaggagtgggcaaaag

SEQ ID NO: 665070 - DNA, 636 bp, Homo sapiens
ggtttcaccatgttggtgaggctggtcttgaactcctgacctcaggtgatccacctgccttgacctcccaaagtgaygggattacaggtgtgaaccaccgcgcccgactttctttaccttttttaaagcacgtcacttttctagtctcattatttctataatgaaattatattttgctggcagtctttctgattaaacactatttcttcctttattaatcagaatattttgatagaatttaacattttcttgataagctttaatcattggtagaaattacatgtgcactgatttttgcggtcctcagatggtctcaaaatactatattgccagttgaaaagtcatgtagtatgtatctttttgttcctcttcatgttgtaatgtgttggttactattaatgtcctctcttctttctttcattgtttttataagcaattattttgaataataaaatcaagaataattacaaatgtataatgctttttacattttacaaagtgttttctggaacactaaaaatattcctaaagataaactgaaattttaaaaagatcattagtcttttgacctaacttaatcaagccacatttagagtacaaagaacattattgggaagagacacatgaaaatttata

SEQ ID NO: 665071 - DNA, 636 bp, Homo sapiens
ggtttcaccatgttggtgaggctggtcttgaactcctgacctcaggtgatccacctgccttgacctcccaaagtgatgggattacaggtgtgaaccaccgcgcccgactttctttaccttttttaaagcacrtcacttttctagtctcattatttctataatgaaattatattttgctggcagtctttctgattaaacactatttcttcctttattaatcagaatattttgatagaatttaacattttcttgataagctttaatcattggtagaaattacatgtgcactgatttttgcggtcctcagatggtctcaaaatactatattgccagttgaaaagtcatgtagtatgtatctttttgttcctcttcatgttgtaatgtgttggttactattaatgtcctctcttctttctttcattgtttttataagcaattattttgaataataaaatcaagaataattacaaatgtataatgctttttacattttacaaagtgttttctggaacactaaaaatattcctaaagataaactgaaattttaaaaagatcattagtcttttgacctaacttaatcaagccacatttagagtacaaagaacattattgggaagagacacatgaaaatttata

SEQ ID NO: 665072 - DNA, 636 bp, Homo sapiens
ggtttcaccatgttggtgaggctggtcttgaactcctgacctcaggtgatccacctgccttgacctcccaaagtgatgggattacaggtgtgaaccaccgcgcccgactttctttaccttttttaaagcacgtcacttttctagtctcattatttctataatgaaattatattttgctggcagtctttctgattaaacactatttcttcctttattaatcagaatattttgatagaatttaacattttcttgataagctttaatcattggtagaaattacatgtgcactgatttttgcggtcctcagatggtctcaaartactatattgccagttgaaaagtcatgtagtatgtatctttttgttcctcttcatgttgtaatgtgttggttactattaatgtcctctcttctttctttcattgtttttataagcaattattttgaataataaaatcaagaataattacaaatgtataatgctttttacattttacaaagtgttttctggaacactaaaaatattcctaaagataaactgaaattttaaaaagatcattagtcttttgacctaacttaatcaagccacatttagagtacaaagaacattattgggaagagacacatgaaaatttata

SEQ ID NO: 665073 - DNA, 596 bp, Homo sapiens
ttgctttctgttccctaccttggaaaatcaggtgaggaacaaagtgagccacacatcaggcttctattgccaataaacagggcattaaaaggagaccaaaatcagtctggtaattaactttagcaagcctattttcttctcgtcatggaaatgcaactcccattgacatcaaggggagctttgtgctcacatggagaggagaatggtctccccaagcatcatggagaaagctgtatgttaagcttcaaagcataagtgccctctattactgcatcaccaattttaatcaactgttcttatatctacaatttggctcattgtccaaatggggaagcacctcttaatttgacaaacaagaatccctrataacagatatgaaacaaattacttataacgccaaggtcgtgccatgtagtagtacttcattagtcttcccctttccccaggaaaagctgactgtgtgttttaaatgtcaactctctgtagttcacggttttacagtgcactcttttataacacagagtgatgaagaaaaataacataaggtattaaatataaatattcagttaatagtagtttaatagtatcattcaata

SEQ ID NO: 665074 - DNA, 400 bp, Homo sapiens
gggggacatcctcagaggagtggcttttgagctggctgtgatayagaatgtgtaggcatgacgctgagaatagtttcaggaatggcttttgacaatacatgatcacaaaagagtgcctgggtgagaagtctggtcagagacactgcttcagtgggactgccttgtgccctgcccacctgtggccttgggcaagttactcaaggtctccatctgtgaaatggggggaaataatatctgctgtccagatcactgtgagaattaaacaggataaagtctgtaaagcaactgccttctggtgggtaccccctccttcttgtctcagctggagaagcccctggtgtttgaaggaacatctctgctgctgagaattggtttaggacagtaggtgatcctgaagctc

SEQ ID NO: 665075 - DNA, 460 bp, Homo sapiens
aatgcatctcatcccctccatagattaaaccatgtgtgccgaggtacaagtagggacgtrgtggtaaattcgggaattttagcccatcccaagtgcttcttcagaaaaactctttgacagaatggaaaaaagttactaaattaatattttttctctttcagtgctgctaatcacccttattttccattttctgaagaatattgaccatgagctattgaacattaccaccacaatttcctccttttaggtgacagagagaggatttcagtatttgatagaggagtaggaagtaggatctgtagttgcaggttgcttgcctttctttattttatgaaatgaagactttaacaagaagatgtttgtttttcctgattattaaagtaatacccataaattttagaaaaataaaaaatacaaaaaaagacctgtaattctttccttacagaatacttatcatttg

SEQ ID NO: 665076 - DNA, 616 bp, Homo sapiens
gttattttcgtaactttattaaaacaaactagaaactaatagacaaaaatgaacatcataagtactctccaagtcccctttaaacacttcacttgggccattggtttatatggctctccatgctgaacaggctgaagccacagaccatcctgtttgaagaatatcttaggaagatatgggctccataaaactattcttgcatcaggaaagtgttttttatcatacaaataattactaaaaaaaaaaagagagatttcaaaatcagttatccaaaagtcaactccaactattctaggtaatgtgattaatgtgaattttgtaggatttcatgtgcatgttttcattagaaaacattctgtgtgtcttagtctcatatttataccagataatttttaaataattgctttgagttacaaaataatcagaaaagtttttaaatgtcagcagcctgtgctggcaatccaggtgacatcctatgaggacaggtgtagagctccacrgtccaccctgaccctccccgtcagctcctaaaattatatctatcccatatgtgccagcttctcttactgttttgttgtggtggttgttataagagatttggcaaacaaagttaaat

SEQ ID NO: 665077 - DNA, 589 bp, Homo sapiens
atctgtacaacaaactcccatgatacatatttacctatataaaaacccagcacatgtacccctgaacttaaaataaaagttatagttaaaaacaataacaacaactcctagctgtgctctcttatggaaaaaaagcaggaacatagaaagactgaagcaccctcctggractccaaccttgtataatagctccctgatgctgcaacactcttttcctttgttccttttccctttgaggaagaactaaccgagcttaatggtcattggcaagcatacatttcagtctctccccagttgtatgtaggatgggagacctaaactcaattcaaatgctttgacaactttttgtggtagaatgacagaacgtaacacaaatcctcctgtagaaactttgttaatcagcctctccttaaccccatactctgtaatataaacaaatgactaagctctagaaagttcaggatttttatctcaatttctacctccatcctatttatttgagtgcatttagtgccacgaggtcctgttgtccccaggcttgtctttaggaaagtattagttgacaactaaattcttttactatggcaat

SEQ ID NO: 665078 - DNA, 537 bp, Homo sapiens
aggagcttctgagccaggaaaaggaatttcacaaggtagtgtcatcagttaaggcaggaaccggccattttcayttcttctgtgattcttcacttgcttcaggccatctggatgtatatgtgcaggcttgggctcagaggcctgacagttttgttttatacattttgtgggggacagaagttacaagcaaagacataaatcaatacatagaagatgtacattggttcagcccagaaaggcaggacattttaaaggagggacttacaggtataggtggattcaaagattttctgattagcaattagttgaaagacttaagctttgtctaaaaatctgaagtcagtagaaagaaatgcttgagttaagggggattgtggaagccaaggttcttgttatgcagatgaagcctccaggtagcaggcttcctgaaaagatggctttgaaggactcttttaaaatatgtcaaataattatattttagactaaaatatttttatttccttcagggtctgctatctgtcatgtgatgttatccca

SEQ ID NO: 665079 - DNA, 655 bp, Homo sapiens
ctgctgtgtctgaggaggactagaatggctggctcagagtggccaacagattcagtactagatgagatcagattgttaaaaaaaaaggggggggaccagaaaatgttgaacttcatagatgattgtaagactttttctttcactatagatgatggtaagacattttctttcactctgagtgagatggaaagctgttggagagttgttagcaggggrtgataaaatctaacttcttgccaggtttgctctgttgggaataaattacagctgggcaaatatggaatctgggaaaccagttaagttactattactgttttccaggtaagacatgagtatggcttatctaaggatggtggcagtgcaaatggaaagaattggtcagaatttagatatgaattgaaaataaaacttataggactagctgctagaattaatgtggtataagaaattaaaaaagtcatcaagaatgatacccattattttagtctgaataattgaaaagtagagagaggaaattttcagaaattctatgtatgggggtgaagggaaagataacagaaactcagctgtgaatatattaagtttgtaatttctagattatattgtgcatatattaagtttttggtttctagatttcattcaagtagagatgtca

SEQ ID NO: 665080 - DNA, 604 bp, Homo sapiens
tactctcttaaagacacgacactttcttttctttcttttctttttcttcctttcctttcctttcccctttcctttcctttcttttccttttttttgagacaaggtctcgctctgttgcccaggatggaatgcagtggcgcaacttcagctcacagcaacctctgcctcccaggttcaagcgattctcctgcctcagcctctcgagtagctggggttacaggcactcgccaccatgcccagctaatttttctgttttttggtagagatggggtttcaccatgttggtgaggttggtctcaaactcctgacctcaagtgatctgcccaccttggcctcccaaagtgctgggattacaggcgtgagccactgcactcggcctgacagacactttcgagtgggggacaccattctgagctttggactggggagcccactccttctgtcaataccataatctagtgctattgtttggtttataaaaaatagatttaaatttacactgacacattaaacacccagacttcatagtttagggttcaytcttggtattgtacattctatgggtgtagacaaatgtgtaatgacaggtacccaccactgtagt

SEQ ID NO: 665081 - DNA, 579 bp, Homo sapiens
cctgtctttggtttcataggggggtatattagcaaggtaattttgggttgaagctttggggtgtgatccagtaggtggttcttagatgtattggtcagttggtaggttgtatggcctccctatattttctcacagttgcagccatgttccctctcaatgccctgaaagtgtgggctcctcttccccttgagtgctggctgtagatcacagcttggcactcctgggatgcccactgcagctctgggatgatctcagggtttatgttccttctccaacctggaggcagcagaggaagggaccttagtagtggttgtggccaagggtcttctgcttgtttcttgggggctccacctcagatgcaggtcagcaattgctcaatgcaatcagcccaggatggagggtctgtgctatggacccaagcccagggtttcctgtctgatgatgagcaggaggcatgggacccataggagactggcttcttctccttgggttgacatagcytgttggaggtgtggataagggtctttatccttacctacaaagaccttagggtctttgctccttcgttagtctgcgggt

SEQ ID NO: 665082 - DNA, 595 bp, Homo sapiens
ttattattgcttgtctttgtatagtaagattatgagtaaaatttctcctctttcttttttctaaattttataaaatacttttaaaaaatagctttagttttaaaaaagaaagaaaaaagtataagaactgaagaggaaaagatgagaaaaggaagaaraaggggaggacatttactttctcctctcttctcttcttgacccttcaaagacctccacccagagacttatccctagcaaggtaattatgccttgatggattatttactgccaccaacagagtgttccctccacatctagctactaaactcttagcatctggacaggtaaagcagagttttactgcctaccagccccagtgctgaatactcaataaatgttagactaaactgagcaagactaaacgacactggccccatccaaatcctttctttccaaggggatctgtagtttcagtctccaccacacatccctgttgcaaaacaggatcaaaatttctctctgcttcttatacttcagtcttattcatccaagaactccaatgtttagtctcttaagtggcccagtgtctgaagactgcaaacctatccaatccatt

SEQ ID NO: 665083 - DNA, 516 bp, Homo sapiens
aagtaaaagaggattatacttctgacttatcattttccacatcttaagctttaattgaaatatcaatatcaaaagtatcaatatccacacactatgacttgaaattggactagaaaaactaagaagctatagagtgaaagcattttaaatgacagagcatgatgcaagccaaataattatagtttcttaataagtaaattagtgtacgataattttcctatatatttcaagttggaaaaaattaaattattcactttctatcaaaygaaaaaagtagctctaatatgcaagaatttttcatgggtcacttggaagtttatcctttaggcctgaagtagattgggtttctgaacataactagtcattgcctatcacacgatttaacatcacttataaataaaaaacccaaacatctttataattttgttccatgtctcttaggtattattttaccatatcaatagaataaatagcaaaacatagtattgtttttcaataataattaataaatacata

SEQ ID NO: 665084 - DNA, 589 bp, Homo sapiens
agctaatattatatgttgtctagacattttaggtaaactktcaagactgagattatgttgagtaatccccatgggtgcatcaaaatgtacacaatggtgctgaataaacagcatgtgaaaattactttttggtacaaaattatcatgttctagacagcattattgtagactagccaataatatatacatctctttagctatctaaaataagaaaacattgttacagctgaattattttacgtcattgggtatataagcatcctattttaaatttttaaaaagcagaatacttatgctccattgcttcccctcagacatatgaaggaatgaccactgagcaatacttatcttactttaagccactttgtgctttgagatctatagtcacatagctttagttcaacataagtttaatgccaccttaagcaaatttggaggaacttctgtctaaaaacaatggtttattatatttttagttcaagaagaatccatgtctgaactctgtagcaaaaaaaaaaaaaagcaaacaagcaaacaaaaaacctaaagcatctctatccctagaagctgctattttcatctcagaggt

SEQ ID NO: 665085 - DNA, 505 bp, Homo sapiens
accatacaaatatatgctttacaatacctcaggcactgcaatccacaccttgagattcaccaccactaaatacttttaacacttaaaggtttaaacaagaaccctattagggggtytacaatttttagagcaagttctactaatgaattccacattgtgtaagcacacacacacacacacacatacacacacacagctctacacagtgtgctggaaaatacattgtggaggagagcccagctggcaggaagttctcttccttgttctcatcaaatctttaaagtccgtccattccattgcttaacacgtaattgctgacccctcttttctcttccttagttttattcttactaatgttctcgaagattaagaaaaacgaaaattaagaaaaaaaaactctattcgtaaaaaggtaggagagcctcaatacttggttagtaatggattgttatcactgagccgatgaaagggaaagaagagcgaggcactggaggtgcatcagaat

SEQ ID NO: 665086 - DNA, 565 bp, Homo sapiens
acccagtctctggtatttctttatagtatcgtgagaatagcctaatacaacttctatactgaagactacaaaacattgttgaaagaaattaagggagatttaaataaatagaaaaacttctgttttcttaagttggaagacttaatattgttgagatggcaatattctccaaattgatatacagatttaatgcaatttatatcaaaatttcaaatayctcttttgcagaaattgacaagatgatcctaaaagtcatatgaaaatgcaaaggatccagaagggccaatataatcctgaaaaggaacaaagttggaggactcccactttctgattttcaaaacttactgtaaaactacagtaattaagacagtgtagtactggcaaaaggacagccatataggtcaatggaataaaagtaagactctatggttaattgattttcaacaaggatgccaagaccatgcaatgaagaaaagaacaaaataacaatcttttcaacaaataatagtaggacactggatatccacatgcaagggaatgaatttggacccctaactcacaccgt

SEQ ID NO: 665087 - DNA, 440 bp, Homo sapiens
caggcctttcccaaaactcatcttcttgtagtaaaaatcagcatatttattattattatattattattcaagtattatttcccatgaawtataattatgtacataaacagcttatcttttactgccttttttcagagacataacaccaggctgagtgtggcttttggctgattgaaaaccatgcaagcattcttcaggtctgatggaatcttgctgtctgtgtatgttcccacttgcagccacatgctcctgcatgcttttcagtgcttcaggcaccacatttccctcttttaacagaccagaatggcaccaaagtgtgactcattaggtgacttaggtaaatcaggaaaaacaaaaaggaatgtcccactcaaatattgtctgagtaattttgtcaggcctgtctgtattcttgaggtttttttttttttttttccgta

SEQ ID NO: 665088 - DNA, 440 bp, Homo sapiens
caggcctttcccaaaactcatcttcttgtagtaaaaatcagcatatttattattattatattattattcaagtattatttcccatgaattataattatgtacataaacagcttatcttttactgccttttttcagagacataacaccaggctgagtgtggcttttggctgattgaaaaccatgcaagcattcttcaggtctgatggaatcttgctgtctgtgtatgttcccacttgcagccacatgctcctgcatgcttttcagtgcttcaggcaccacatttcccycttttaacagaccagaatggcaccaaagtgtgactcattaggtgacttaggtaaatcaggaaaaacaaaaaggaatgtcccactcaaatattgtctgagtaattttgtcaggcctgtctgtattcttgaggtttttttttttttttttccgta

SEQ ID NO: 665089 - DNA, 655 bp, Homo sapiens
acttattgttataaactttcctcttaatacttttgctgcattccatgtttttgtcttgcaatctattttgtctgatatgagtatagctactcttgctcttttttggtttccatcaccacagaatatctttttccatccccttattttcagtctatatgtgtctttttaggtgaaatgggtttcttgtgtgcaacagatcatcgaatcctctttttttcatccattctgatactctgtctttttactggagagtttagtccatttacattcaatattattattgataagtaaggacttacttctgccttttaaaaaatttgttttctggttgttttgtggacttctctttcttttttccttcttttctgtcttccttttagtgaagatgattttctctggtggtatgatgtaatttcctgctttttatttttggtgtatacattgtattttttttattataggttgccatgaggcttgcaaatactgtcttatatcccattattttaagttgataacatcttaacactgwttgcataaataaacaagcaaaaagaaaactaatagaaactctgttttttaactttgtgccctgctttttaacttcgtgttgtctctatttatatcttattgcactacgtattgaaaagttgtagtt

SEQ ID NO: 665090 - DNA, 552 bp, Homo sapiens
gggccccacgctcaatttgaaagtgtaatggtttggctgttgtctctaaaaggtgaaaggacttgaaggayttatcaagcataatgagaagccctctcctgagtttataactagaaactctttcttagagtggaagacattagacttggccttggccctaccagatttgctcaagtttctgggcaatgatagggccttctccgtgtgcatgggagagcagcccacattgaataagtccatgctcactctaaacacctgtttttgtttcaagcaaggagagactcatgttgtctaggaacactgtgggcccttgggaacaggaaataagtgagcagtattttgtgtaaaatgtggggaattaaatgaagcctttcctgttgcctcgctcatttcaccttttacaagaaaccatctctgaccacttccaaacagtcgcactttccaccccttgcttggcactggttacagaatgctatagggtggagctgtttgccatgtctcaagctcatcttagactatttgctgctgttgccacatcttttatatttgcat

SEQ ID NO: 665091 - DNA, 590 bp, Homo sapiens
ttgtgttccttcatcagctggccactgcccaagtgtggccctctggaagaggacacaaccttgaatgaggcagtgctctaaggctgagggagattcccagtgagcagcatgctagggcagtcaatagaycctaatccccacaggtgggagataggtgcatcatcctcaagaaaaattggggtgtcattgctgatatccatcacagtgtttatagctccaggccccgtgtcatctgcatgtttattcttactctttttccattgaagatagtacaagaggccccaataaatcaaacagtttttaatgcttgccagaaaaggagacagctgcttgcaaaattcatgtatgcttcccttttaggcttagatatactgtatatacaaccagtccaaccaccaaagatcagcttcctttgtctttgaactggggccaaagaagttaagaagtttcccaatataggccctttgtagtcagccgctttccctagagctttggctgcaggcaactattggactcctttattcaatgtaatgtcatttgcttattccagaatttcaaataaatggaatctttcaataattctttatttt

SEQ ID NO: 665092 - DNA, 464 bp, Homo sapiens
tcttaactcattccagcatcaacttaaaattctagagtccaccractcatctaaatctgatacgggtgagactccaggcaggagtcattctaagacaaatttccctccctcccactgtgagcatgtgaaatcaaacaagttatatgtttccaaaatactttggtggtacagggacaggacagacatttccactccaaaagggagaaataggaaagaggaaaggaataacagatcccgagtaagtccaaaacctaacagggcaaatgacattaaatcttcaggcattaaatcttctttgactctacatgttggtatctgaatttactgggtgggggttgatcccccacagccctgggcagccccatccccatggctttgctggcctcagcccacacagccactctcaagtgttggagttgggtgcctgtggctctccccagttggcattgcttgctggtgtgagt

SEQ ID NO: 665093 - DNA, 620 bp, Homo sapiens
tatgactcttgtccttgtttaatccatgagaaagccaaagatctagaaagataaaataaactggtcaaggtcacagagtgtctaagcagtagaacctggataaaatcatgtcagtctgatgccaacacttagccatttactactggaaggctctcaaggcaaaggatacaaggaaggaagaaggggcattagtagttgcaggtggatgggttggttaggcctcatctttcctaggtcagtattggtcctgggatctgaccacagagtcccacaaccataatcgggatatactgagtgggatgaggaatgaaggcccaggaaccatgyaagaccttatcctctcactgaatgaaatgcccaaagttgagaagacagagggcatggtcaggcaaggagattcccccaggggcatcaatgggccagaatgaaaatcttctctgaagagaagatgcacccattgcacatctggaggctgaatttgaaaataatactttccttttcccttttcatgcaccctcaccatctttcctcctcctccccttccctctctttagtcagtgagaattgccgttcagtaaccaagggctgtgaaatggggagctggggcccagtcacagctc

SEQ ID NO: 665094 - DNA, 535 bp, Homo sapiens
acagtggtgtgatttcggctcactgcaacctccacctcccacgttcaagtgattctcatgcctcagccttccaagtagctgggattacaggcatgtgccaccaagctcagctaattgttgtatttttagtaaagacaggttttcgcygtgttggccaggctggtctcgaactcctgacctcaagcaatcctcctgccttggcctcccaaaatactgagattacaggcaagagctaccgcactgggtcacaatatatttttttttattcttttactgttgacttatatatttcactatattcaacagaacttctaatagtacatatttagatcatattttgtaattaacttcatattttaattggtgttatttagactattcacatgtaatatacttcttgatatgttatggcttaaccccatcattttttttttcttttggatgttttctgtttgttctcactggtttttatttctctgttgttgttgtttttccctgcctccccactgatcccttgaacttttttttagaattg

SEQ ID NO: 665095 - DNA, 606 bp, Homo sapiens
gtaggcattcagaatatatttgtaaattaacaaatgaatggatgaaagaatgtacttctccctcacaatttagaccatatgcaatactgatctgtctaaaaacattctggtagtttaagttctaagtcttataaaaatgaacataaaattagtgatctaattttctaacgtaaacacttaattgtcccacaaaatgtatatccagatgcaagcaagtaattgcatatgccacaacaataatttgcaagtaaatgactcacttgcatgtgtgaggacatatttttacaggtgcaatttaggtagcaattgatgaaattctgaacccaggcattcagcccatctaacagttatactgtgatgtgaagaataaaatagaaaagctgtcttggttctgaaagtgagcacctagactgctatatcaagcatcttaagtacttatggtatwtgggcatgcggagaccaaaataatatcacagacatttcatttgggaatatagttcttaacccacaagttactgtaggtttaaataacaaatacattttctcaccagttcatccactctcacagggaattgcctgcaggcaaaatcaagaagtagaggaaat

SEQ ID NO: 665096 - DNA, 606 bp, Homo sapiens
gtaggcattcagaatatatttgtaaattaacaaatgaatggatgaaagaatgtacttctccctcacaatttagaccatatgcaatactgatctgtctaaaaacattctggtagtttaagttctaagtcttataaaaatgaacataaaattagtgatctaattttctaacgtaaacacttaattgtcccacaaaatgtatatccagatgcaagcaagtaattgcatatgccacaacaataatttgcaagtaaatgactcacttgcatgtgtgaggacatatttttacaggtgcaatttaggtagcaattgatgaaattctgaacccaggcattcagcccatctaacagttatactgtgatgtgaagaataaaatagaaaagctgtcttggttctgaaagtgagcacctagactgctatatcaagcatcttaagtacttatggtatatgggcakgcggagaccaaaataatatcacagacatttcatttgggaatatagttcttaacccacaagttactgtaggtttaaataacaaatacattttctcaccagttcatccactctcacagggaattgcctgcaggcaaaatcaagaagtagaggaaat

SEQ ID NO: 665097 - DNA, 572 bp, Homo sapiens
cagttgactgctgttatgggttgacactgctatgggttgaatcgtgtccctcaaaaactcatatgttgaarttgggccagatgaagtggctcgcacctgtaatcccaccacgttgggaggctgagatgggaggatcgcttgagaccaggagttcgagaccagcctggtcaacctagcaatatcccatctctaaacaaacaaacaagcaaacaagcaaacaaagcaaacacacaagcaaacaaggagccctcagctcctcaaaatgtgcccttatttggaaataaggtcatggcagatgtaattatttaagatgaggtcatactggagtaggtagggcctctaatccactatgactggtatccttacaatagggggaaatttggacatagctatgcacacggggaaaatactatgtgatgataaaaggcagagatcaatgtgacattcctacatgccaaagactgccagcaaaacgccagaagatgggggcgggcatggaacagactttttttttgagacagagtcccactctgttggccaggctggagcgcagtggcgtgatcttggctcac

SEQ ID NO: 665098 - DNA, 572 bp, Homo sapiens
cagttgactgctgttatgggttgacactgctatgggttgaatcgtgtccctcaaaaactcatatgttgaaattgggccagatgaagtggctcgcacctgtaatcccaccacgttgggaggctgagatgggaggatcgcttgagaccaggagttcgagaccagcctggtcaacctagcaatatcccatctctaaacaaacaaacaagcaaacaagcaaacaaagcaaacamacaagcaaacaaggagccctcagctcctcaaaatgtgcccttatttggaaataaggtcatggcagatgtaattatttaagatgaggtcatactggagtaggtagggcctctaatccactatgactggtatccttacaatagggggaaatttggacatagctatgcacacggggaaaatactatgtgatgataaaaggcagagatcaatgtgacattcctacatgccaaagactgccagcaaaacgccagaagatgggggcgggcatggaacagactttttttttgagacagagtcccactctgttggccaggctggagcgcagtggcgtgatcttggctcac

SEQ ID NO: 665099 - DNA, 572 bp, Homo sapiens
cagttgactgctgttatgggttgacactgctatgggttgaatcgtgtccctcaaaaactcatatgttgaaattgggccagatgaagtggctcgcacctgtaatcccaccacgttgggaggctgagatgggaggatcgcttgagaccaggagttcgagaccagcctggtcaacctagcaatatcccatctctaaacaaacaaacaagcaaacaagcaaacaaagcaaacacacaagcaaacaaggagccctcagctcctcaaaatgtgcccttatttggaaataaggtmatggcagatgtaattatttaagatgaggtcatactggagtaggtagggcctctaatccactatgactggtatccttacaatagggggaaatttggacatagctatgcacacggggaaaatactatgtgatgataaaaggcagagatcaatgtgacattcctacatgccaaagactgccagcaaaacgccagaagatgggggcgggcatggaacagactttttttttgagacagagtcccactctgttggccaggctggagcgcagtggcgtgatcttggctcac

SEQ ID NO: 665100 - DNA, 549 bp, Homo sapiens
taccagcagcaaactccagccacccagcttcatggggccagcctctcccacctctcctgctgcccaattgttattgacaaaaataagcactctattgtgacttgccacagaaataaaaattgctcaggggaaggaattgggaacattttgtactccagggtcacaaaagatttaaaagtcattctccctactggagatctcatttacactgggcagaaacaacaacaaaataaaaacctgtcaaatggattgtgcaacaaaggaaaatgctgcagaggcaaacctagtaggagcaggaggaaagggaaaggaggcaatacacagcctccttgtgggaggccccaggggctgggcactgcgcgatgctggaggagggaagggaaggtgacctccctcctgcccatctccctargatgcccccagtggctgagaccacccttcttcataccaaggaacacaactccccatgcctctacccaccgcatcaaaatgggcagacccaaacccaaccagagacaactatctgtgatataaagggagagtagacaa

SEQ ID NO: 665101 - DNA, 564 bp, Homo sapiens
agcctcaatttcatcatctatgaaaaagagctaataatgcctaccttacagaaatgttatgaaatttcattaaaataatataaataacagtgcttgacccaamgtaggtactcaacaaatatttccatacggaagcacaatctgatgtctgtgtcttattactgatgtcacaatctcattaaaaatgtcttatttatcttgaactaaagatatgttctaattctgccctgttgactatgtagaatgggtctaattcttcttccaagaagctctcaaatacatgagggtgatgtgtcatgccctcttcaccaaactttctcttctctaaccaaatgcccccaagttcctccaactaaacaagaatttcttgtctcaaaagtaactagaagctcttgggctctagtggctcccaagacggagctcagcaccaataacacaccctttgcccctggggatcccaaacttgatcttgtggatatgggtaaagttcatgatcagccaaatgctttcttcattatacaaaattcaggggagtgtctccatatcctctccccattcccaaca

SEQ ID NO: 665102 - DNA, 572 bp, Homo sapiens
catactgggttttaagtttgagtttacaaaaacatgtataattcacacaagagctgaggatgaaagcaaacagcttaagcagccaacagcataaggagcagagaagaaggatttttttttaactgatcttttttaattgtttaattgtcttaagatcaggatcccctggcaaagtcacaatggatggtttgtgagaggtctcagtrcatctttgtgaggcaggacaaagatggatggggaacaagaaagcttttaagggcattacaatttattatctatatccaggtctgcactgcacaaaatgaaggaatcatctggtccaaactcaaaaaattgtggctaagagtatcaccttttggaaacacagacctggcttagggtgtataatagcagtgtccttcctctgcaaggtctaaacagcctcattacttaggaaattgtcttccctgttccttcacatatctcttactatctcagtctgtgcttctcctgtggattataaagggctgcccaggctggaagaatttactggcaccctctcacatgtgctagggtgcaggctgatgaaacaa

SEQ ID NO: 665103 - DNA, 572 bp, Homo sapiens
catactgggttttaagtttgagtttacaaaaacatgtataattcacacaagagctgaggatgaaagcaaacagcttaagcagccaacagcataaggagcagagaagaaggatttttttttaactgatcttttttaattgtttaattgtcttaagatcaggatcccctggcaaagtcacaatggatggtttgtgagaggtctcagtacatctttgtgaggcaggacaaagatggatggggaacaagaragcttttaagggcattacaatttattatctatatccaggtctgcactgcacaaaatgaaggaatcatctggtccaaactcaaaaaattgtggctaagagtatcaccttttggaaacacagacctggcttagggtgtataatagcagtgtccttcctctgcaaggtctaaacagcctcattacttaggaaattgtcttccctgttccttcacatatctcttactatctcagtctgtgcttctcctgtggattataaagggctgcccaggctggaagaatttactggcaccctctcacatgtgctagggtgcaggctgatgaaacaa

SEQ ID NO: 665104 - DNA, 523 bp, Homo sapiens
accactcctattcaatatagtwttggaagtcctggccaaagcaataaggcaagagaaagaaatataagtcatccaaatgggaagacaggaagtcacactatccctgtttgtaggtgatatgattctatatctagaaaaatcccattgtttctgcccaagagctatttaagctgataaacaacttcagcaaagtttaaggatgcaacatcaacgtaggaaatgagtagcattcctatacactaccaacatccaagccaagatctgaatcaggaccacaatcctgttcacaattgccacaaaaagaataaaatgcctaggaatacagctaccagggggaggggggtgaaagatctctacaatgataattacaaaccactgctcaaagaaatcagagatgacacaaacaaatggaaaaacattccatgctcatggataggaagaatcaatatcattaaaatgtccatattgcccagagcaatttacagattcaatgctattcctatcaaactaccaatgacattct

SEQ ID NO: 665105 - DNA, 523 bp, Homo sapiens
accactcctattcaatatagtattggaagtcctggccaaagcaataaggcaagagaaagaaatataagtcatccaaatgggaagacaggaagtcacactatccctgtttgtaggtgatatgattctatatctagaaaaatcccattgtttctgcccaagagctatttaagctgataaacaacttcagcaaagtttaaggatgcaacatcaacgtaggaaatgagtagcattcctatacactamcaacatccaagccaagatctgaatcaggaccacaatcctgttcacaattgccacaaaaagaataaaatgcctaggaatacagctaccagggggaggggggtgaaagatctctacaatgataattacaaaccactgctcaaagaaatcagagatgacacaaacaaatggaaaaacattccatgctcatggataggaagaatcaatatcattaaaatgtccatattgcccagagcaatttacagattcaatgctattcctatcaaactaccaatgacattct

SEQ ID NO: 665106 - DNA, 591 bp, Homo sapiens
ggccatgacccttatgatgggtgggaaaaagttatcatgacttttcacccctactgtttttctatactttcctactttttttctatacttttcctttccctggtgccatcaccctcctggtaccatcaccttcctggtaccatcacttcccgacaccaccacctccctggtgccatcaccccagctactcagcagattacatgtggtatcccatttctatctgtcttctcaaacattgccttagatcttaaatttttccttttgtttcttctcccttttctatcacttcttggttatttgctttgatgacctattgaatgcagtggattctcccagaaaaaaatgaaaaatrcatgcaaacacacaatttcgtgtatgattttagagagttcacagacttcctgaagcctgattcacctatcccaacttaagaactcttgctttctgcctttccctcactaagaaaacatggaagaaagtggcatagcatgtacattttgcactgaaaggggttaaccaacccagtgtcctagaaagcagagcctgagaccaagacttaaaagagaacactttgttgggaagtgtgattct

SEQ ID NO: 665107 - DNA, 467 bp, Homo sapiens
ccaggaatttgagaccagcctggtcgacttggagaaaccccatctctactaaaataaaatacaaaaattagccatgtatggtgctgcgcacctgtaatcccctctactcagtaggctgaggaaggagaatcgcttgaacctgggaggtggaggttgtagtgagccgagatcacgccattgcactccagcctgggtgagagagtgagactccatctcaaaaaaaaaaaaaaaaaccaaacaaacaaaaaaaaamcccacaaatccttaggaagtgtctcaggtctactcaatcagaaacttccagcaatctgctttaacaagcgtccaagtgattctaatgcagactaatttgagaagcactgcactaaggtatatccatatatattttgcagaatacttatgcaactattaaaattgttctcacaaatgaataatgatagggaaaggtgtgcctagtactatgacac

SEQ ID NO: 665108 - DNA, 290 bp, Homo sapiens
gcaaacacactctatggaaatgcctatgattcattagtaaatgtttaacaatcagcattccagagagacctgtaatrtatgtcaatttgggtggtgtactttcactatggccaatttcaagttatcaaaatgacattactgaacttggagttggagctggcttcaacatgctgatccttaccctcttctagggaaaaaatttccaaaacctacccccagaattccagaatttcttaccatctatcccttatttattatttctttattctgagatggggcctttttccccc

SEQ ID NO: 665109 - DNA, 597 bp, Homo sapiens
aaagaattcaggttgaatccatacagtaaagtgagagttagtttatgaggaaagtaaaggaataaaagaatggatactccatggagcagccctgagggctgctgattggctatttttatgctttttccttgattatatgtcaaacaaggagtggattattcatgagttttctgggaaaaggttgggcaaatcccagaactgaggattactcccctttttagaccatatagggtcaattcctgacgttgccatggcatttgtaaactgtcatggcactggtgggagtgtcttttagcatgctaaggcattgtaattagcatataatgatcaaagaggatgaccagaggtcactttcatcaccatcttggttttggtggatttyggccgacttctttaccccactctgtttcatcagcaaggtctttgagacctgtaccttgtgccaatatcctatctcatcctgtgacagaatgcccaacctcctgggaatgcagcccagtaggtctcagactcattttacccctattcaggatgcaatcactctggttcaaatgtctctgacaataccccagcaccgaaagtcaaatcaggaatttg

SEQ ID NO: 665110 - DNA, 615 bp, Homo sapiens
gtttaatacatggtagacatgacatttctgatggatgaagctaagatatattaattattaaattatgttgggacagctggccaaccatctggaaaaaaaataggctaggtttctacacattactcccattccagatggataaagcattaaacattttaaaaagaaaccataaatgtactagaagaaagcatggattttttttaatcaccctgaggctgatgttggggttaagaagaccttaataaccatgatgcaaatccctaaatacataaagaaaagttgaatgaatttacctcaataaaaattggtattttctcatgggcaaaaagaacatgaataaagcaaaaaaaatcaaatcgcaacataggaaaatatttgtaacatgcggtagaacaatcttgagctcttatraatcagtaagtaaaaggccaacaacccaagttttttaagggaataaaagttatgtaaagaaaaaaattaccattaaacataagaaaagatgcttaatcttattcataattttaatcacttccacttcagattggaaaaaatacaccacttaataacagctttattgacatacaattcatataccataaaattcccccatttaaa

SEQ ID NO: 665111 - DNA, 608 bp, Homo sapiens
gccccctgaaagaattatacaatactatgggcctgctacttggacacaagatggcttgtggggataacggacccccatttacatgctcaaccgaatcatacggttgcaagccgtcttagaaatcatcactaataaaaccggccaagccttgactttaccggcctgacaagaaactcagatgagaaatgytatctatgaaaatagattggctcttgactacttactagcagctgaaggaggggcctgtggaaaatttaaccttactaattgctgcctacacatagatgatcgagggcaagtagtcgaagacatagttagagacataacaaagctggcacatgtgcctgtgcaagtgtggcatgggtttgatcctggggccatgtttagaaaatggttcccagtgataagaggatttaaaactcttataataggaattatagtagtaataggaacctacctactcccttgtgtgctacctgtactcctccaaatgataaaaagctttgttgctaccttagtcaccaaaatgcttcagcacaagtgtactatatgaatcactatcgatctgtcttgcaggaagacataggtagtgaggatgaaagtgagaa

SEQ ID NO: 665112 - DNA, 608 bp, Homo sapiens
gccccctgaaagaattatacaatactatgggcctgctacttggacacaagatggcttgtggggataacggacccccatttacatgctcaaccgaatcatacggttgcaagccgtcttagaaatcatcactaataaaaccggccaagccttgactttaccggcctgacaagaaactcagatgagaaatgttatctatgaaaatagattggctcttgactacttactagcagctgaaggaggggcctgtggaaaatttaaccttactaattgctgcctacacatagatgatcgagggcaagtagtcgaagacatagttagagacataacaaagctggcacatgtgcctgtgcaagtgtggcatgggtttgatcctggggccatgtttagaaaatggttcccagtgataagaggatttaaaactcttataataggaattatagtagtaataggaacctacctactcccttgtktgctacctgtactcctccaaatgataaaaagctttgttgctaccttagtcaccaaaatgcttcagcacaagtgtactatatgaatcactatcgatctgtcttgcaggaagacataggtagtgaggatgaaagtgagaa

SEQ ID NO: 665113 - DNA, 501 bp, Homo sapiens
cacaaattcaacctttagaatctacatacaaagtagaaagtctgattgcaaatgtgcaaatgtacatggaaccaacaaatgtaaatcttgaggatatgaaaaaatacaatgactgaccaaagctcagagggaacaagggtgatagaagtggaagaagccaggacatcctacatttcttattttacacattaaggaattaacccttttcccatttgccctgagaatactcggcggttggaattgtagccacacatttaccctgagataactttgctatgcaatatctcatttttattattattttcacattttcaaattgctctagtatattgactttgcaaacaaaagacatcactctattgatagcattctgtttttagtggtggtatttccattaatattaacaaaatacagtaattctcgatcgctgaaaatgtcaaatgctagaattctcgaacasttgttggcccttgaagattcatttgatgagattgacttttc

SEQ ID NO: 665114 - DNA, 519 bp, Homo sapiens
aagtttttcttttctcaaaaactcagtgtcgtggtaccggcttctagtgctctgggcagtgagacccttttacttgataactggtagctgggacaacttggcaatrtaaataaataaacggcatctagattaaaaaggaagaagtacagttatctttatgtacagatgacatgatcttgcatttagaaaatcataagaaatttactaaaaagtggtaggactcattaacaaatttaggaatgtaacactatgtaagattggtatacaaaaataactgtatttctttaccaagaaatcaagaatccaaaaatggaattacaaaaataaatcttgttacaatagaattaaagctggggtaactttaacataagaagcttaaacttgaacactaaaaacatggttagtgttggaaacacccaggtaccatccctgagccttctctccttggctctgaggactttaccttcatggggtgaagaaaggggttgcattcttggcttttacataatattaggtggg

SEQ ID NO: 665115 - DNA, 519 bp, Homo sapiens
aagtttttcttttctcaaaaactcagtgtcgtggtaccggcttctagtgctctgggcagtgagacccttttacttgataactggtagctgggacaacttggcaatgtaaataaataaacggcatctagattaaaaaggaagaagtacagttatctttatgtacagatgacatgatcttgcatttagaaaatcataagaaatttactaaaaagtgktaggactcattaacaaatttaggaatgtaacactatgtaagattggtatacaaaaataactgtatttctttaccaagaaatcaagaatccaaaaatggaattacaaaaataaatcttgttacaatagaattaaagctggggtaactttaacataagaagcttaaacttgaacactaaaaacatggttagtgttggaaacacccaggtaccatccctgagccttctctccttggctctgaggactttaccttcatggggtgaagaaaggggttgcattcttggcttttacataatattaggtggg

SEQ ID NO: 665116 - DNA, 554 bp, Homo sapiens
gagagttaaacttatgatggaaagactgaaggggtccaagctgtagagaaacaggactgcaaaccacaaagggctgaatcagtcaaggagaactgcagggcgggatgaacagggaccaacggaacatttggataagctgttgagaagaaaggagaattcagagaaaaagaactgtcagtgaggtcataataggaactgttacagtgaactaaatatggcctgggaaggactctgtacttctagatttgagtccctgtggacaaactgcaacctmacttaataggtagaaagactgaaaacctaacttaggagtatgcgcctgtaactatagctgagtcctgaccaatcccaacagccaaacttctgccactcacacactgctgagtgttcagctgtgttcaaataaggcaaatgctgagcactgtaaccagtccagttgtttctggacctcactgctgagaactgtaacaggctcaggtgcttctggacctcactcctcacttcagacttctgtacatcacgttccctttattgtctataaatcttccaccatg

SEQ ID NO: 665117 - DNA, 584 bp, Homo sapiens
aacaagtttcttgaatgttacatgtggagaagtttgcacacttggaagaaaaagaaaccactatacccgtggyttgcgctataccaaattagaatgaaaaggaaaagcatatctgtcttgaaattacatttcagctttcttcgaatgggatagggtcagggaggcaaatggtttggagaaataaagattcaattgtttaatgtgtctttcatacatatattttgtcaaaaagagattcctagaaaccgggaaaagtactagaagccaaagtggcttgtctcaatttatagaattaatcaaataatgttagtctttatccattctcaaaggacagcttcaagaatcaatctaaactttaaatatgctgaagtgggtttgtagttgtagcccaaacagaaagactgggcgatatagttaggatatttgtgcccacccaaatctcatgttgaaatgtaatccccagtgttggaggtggggcctggtgggaggggtttggatcatagaggcagacccctcatgaatggcttgctccatgccctttgtgataagtgagctcttgctctaacttcacacaagatctggtc

SEQ ID NO: 665118 - DNA, 562 bp, Homo sapiens
gaaacctggtactaagaccaaatattgaaacagaagatgccccatcacyttcatcaccaaggcctttataagaacttgagaagctctttgccaggatgaggggcagaaaccaaatgtgtatttcttttccttttcttttgaacacagattctctgtttcaccgaatctggagtgcaatgatggagttttagctaactgcagcctcaaccacctgggctcaagcaattcccccgcctccgccttccaagcatctgggactacaggtgcacaccatccatgcccagctaatttttgtgtttttttttttttgtagagatgggatcttgttatattgctgaggctggtcttgaactctggggctaaagcgattctttcaccgcagcctctcaagtagctgaaactacagatgcataccaccatgcccagctaattttttcttatttctttttgttgtttaattgagggggtctcactgtgtttcccaggctggtcccgaacttttggcctcaagcgtttctcctgctttgacctcctaaattgttgggattgtggttgtgagcca

SEQ ID NO: 665119 - DNA, 294 bp, Homo sapiens
aaatgactgttagcacatatttgagcatcattcatatcgtcctgattgtcctatgctgatcagccttggctatggacaaagaagatatwaaagcaagctggaagacaaggcatggttgacagttaaggaagatgaagtcaacaagagttcagggaaaactgagaccacttgagtcagggaagacttcacataggaaggggggagagacagaataggctctatagaataaattaaaaaaaaacagaacaagaaagaactgagggattggcagagtgagaatacattatgagtaaa

SEQ ID NO: 665120 - DNA, 294 bp, Homo sapiens
aaatgactgttagcacatatttgagcatcattcatatcgtcctgattgtcctatgctgatcagccttggctatggacaaagaagatattmaagcaagctggaagacaaggcatggttgacagttaaggaagatgaagtcaacaagagttcagggaaaactgagaccacttgagtcagggaagacttcacataggaaggggggagagacagaataggctctatagaataaattaaaaaaaaacagaacaagaaagaactgagggattggcagagtgagaatacattatgagtaaa

SEQ ID NO: 665121 - DNA, 546 bp, Homo sapiens
caccactgcatttcagcctgggttgacagagtgagtctctgtctcaaaataaatacatacatacatacacacatacatacatacatacatgcataaaaatattctgaggcatttctcccttccccagatgttgcaggaagtcagggaccccaaatggaaggactggctggagccgcggcagaggaatataaattgtgaagatttcatggacatttatccgttcccaaataatactcwtataatttcttacgcctgtcttactttaatctcttaatcctgttatcttcataagctgaggatgtacgtcacctcaggaccactatgatatttgtgttaactgtacaaattgattgtaaaacatatgtgtttgaacaatatgaaatcagtgcaccttgaaaaagaacagaataacagcgattttcagggaacaagggaagaaaaccacaaggtctgactggctgtggggtcgggcaaaatagagccatatttttcttcttgcagagagcctataaactgacatgcatgtagggaagatattgttaaatt

SEQ ID NO: 665122 - DNA, 546 bp, Homo sapiens
tcttggttcttggacctttgaattccagaactttctccaattgccccccacccccactcacccattatccctggttctcaggccttggaacttgcattgaaatacaccagtggctttcctcattctccagtgtgtcagtatattggacttctcagactccatgattacaaaggcagaagaagctctccagatgtcttccagtaacgttgaagtttttatcagaatgttgcaaggaaacaccaattgggtcacctgggatgaccttcaatgacctgaagacatttactgaaggagctgtgttaagttttttaacatcttctattgagtaaaagtgaaaagcagctttttacttggttgaaaccaattgagaaagaaattctatcaaatatcaartatgtgcatgaacttttaaaaagacaattttattgacctatattgaacttcataagttttgcctattaacaataaagctactgtgagcatttttgtacaagtctttacagaaatatacagacatgtgctttcatttcttttggctaagctagg

SEQ ID NO: 665123 - DNA, 598 bp, Homo sapiens
atggctctccattgtcagtaggrtcaagctagactttttagcctagtctataaggtctgccacaaatcagcctcaatttacttttctggctttatgactgccccagccttgccagcagccacactacacttttcatcattctctaaacaaatatatgtatcctgtagtcttgctaaggcaatgctaagatgtaattttaaggtgggggggcaataataatattaacttctaatctcatggggtagataataataatagtcactatataccaaacattgtgcaaaaaacatcttacacacatcaactaattttaacctaatcataatcacttttactaattttactgttaaagaaattcaggtgttgagaaagctgccgaaggtcatacagttagaaaatggtgtagccagtattacaacacagattgtctggcttcttgagcactgtgacattgtggaaagacctgtactctggagacggattgttctgctgacatttgagcctccagaaacgtttactgcctctgctggcttctgccagctttacaagactttgctggttaaatttgagccttgcaaaagagaaaatggacaaaatc

SEQ ID NO: 665124 - DNA, 554 bp, Homo sapiens
ggccagatctaaatgaccctttccagacacttgtttgtgaaaaccatctaggattctgagctcatgtgagtctcatggtgtgtagtttggaaatctgacatagaggaataccacctctacccctgggtttggggattctgggagaagaaaactatctgtgcacaatttaaatcttcagattcccagattcttaaggcaggtaggtgcctgtagctttcacyacgctgtatctactggtgtctttcagacaatccagcttgacatactgcactagcaatgaattgtagcctggaatgcacatcttggaactgaattctaccactgctaccaattcaagataataaatactgcccagtagagtcaacactacataacaagcatttattcagcacttattttgtgccaagcttattttgtgccagcctctgttttaggttctgaggctacaaagattagccacagttcctagcctgaaggatctcacagtgaaatggggaagacagacataaacaagatcattttttctactctgggctatttctatgtttcgtact

SEQ ID NO: 665125 - DNA, 554 bp, Homo sapiens
ggccagatctaaatgaccctttccagacacttgtttgtgaaaaccatctaggattctgagctcatgtgagtctcatggtgtgtagtttggaaatctgacatagaggaataccacctctacccctgggtttggggattctgggagaagaaaactatctgtgcacaatttaaatcttcagattcccagattcttaaggcaggtaggtgcctgtagctttcactaygctgtatctactggtgtctttcagacaatccagcttgacatactgcactagcaatgaattgtagcctggaatgcacatcttggaactgaattctaccactgctaccaattcaagataataaatactgcccagtagagtcaacactacataacaagcatttattcagcacttattttgtgccaagcttattttgtgccagcctctgttttaggttctgaggctacaaagattagccacagttcctagcctgaaggatctcacagtgaaatggggaagacagacataaacaagatcattttttctactctgggctatttctatgtttcgtact

SEQ ID NO: 665126 - DNA, 554 bp, Homo sapiens
ggccagatctaaatgaccctttccagacacttgtttgtgaaaaccatctaggattctgagctcatgtgagtctcatggtgtgtagtttggaaatctgacatagaggaataccacctctacccctgggtttggggattctgggagaagaaaactatctgtgcacaatttaaatcttcagattcccagattcttaaggcaggtaggtgcctgtagctttcactacgctgtatctactggtgtctttcagacaatccagcytgacatactgcactagcaatgaattgtagcctggaatgcacatcttggaactgaattctaccactgctaccaattcaagataataaatactgcccagtagagtcaacactacataacaagcatttattcagcacttattttgtgccaagcttattttgtgccagcctctgttttaggttctgaggctacaaagattagccacagttcctagcctgaaggatctcacagtgaaatggggaagacagacataaacaagatcattttttctactctgggctatttctatgtttcgtact

SEQ ID NO: 665127 - DNA, 436 bp, Homo sapiens
gggggagggttgggccttatatgttgggagaacacagggtaccactctgtcatccaggctggagtgcagtggtgcaatygaggctcactgcagccttgatctccaggctcaagtgatcctcccacttcagtctcccaagtagctgggactaaagactcatgcaaccatgcctggataatctctgaaatttatttttgtcaagacgaggtctcactatgttgcccagactggtctcaaactcctgtcctcaagtgatcctcccaccttggcctcccaaagtgctgggattacaggcgtgactccgcacccaccccttttttcatagttttaaataataaaagtattataagtaattttcattatttcaagaatagtgtattttcttaagatcttttaaaatcataaagcaaactctttaagagatttagctaatgct

SEQ ID NO: 665128 - DNA, 436 bp, Homo sapiens
gggggagggttgggccttatatgttgggagaacacagggtaccactctgtcatccaggctggagtgcagtggtgcaattgmggctcactgcagccttgatctccaggctcaagtgatcctcccacttcagtctcccaagtagctgggactaaagactcatgcaaccatgcctggataatctctgaaatttatttttgtcaagacgaggtctcactatgttgcccagactggtctcaaactcctgtcctcaagtgatcctcccaccttggcctcccaaagtgctgggattacaggcgtgactccgcacccaccccttttttcatagttttaaataataaaagtattataagtaattttcattatttcaagaatagtgtattttcttaagatcttttaaaatcataaagcaaactctttaagagatttagctaatgct

SEQ ID NO: 665129 - DNA, 614 bp, Homo sapiens
cctttgtccagcatatccgtgctgtttgtgctacatgtctgttagtcactcagtagccagctaggttgtcagattgcaaaaagagtatatatagcacactatccatggtttcaggcatcccctggggactttggaacacaccccctgcagataagggggggctactaattgcatatgtgtgtatagactttaaggatktctgaaattagtttttcaagtccctgtgggaaaaaataaacatcgtgatacattgatggattgtttttaatcctgaaaaaaaaggcctcttcatctaacaataggggatattcattaaatgttcataaaaaatctttacagacaccagaaaacatttgtataatattaaggtttttaaaagtacacaaattacatgtgcagaaaaagctgatctctcctatataaaaagaaatgtacatctatttacataataaaaagattggaagtacataaaagtgtgtattgtaattatttctgagggtcatcttgtgtaaaatacttttcttttttacacttttcagtgtttctctgtatgagcatgtaatacttttgttaaaataccaagagttatataaaaaaaaaataataagatgaat

SEQ ID NO: 665130 - DNA, 616 bp, Homo sapiens
ggtgcatttaaaccagcccaagccagggggatttctgatcccaatggtatgaacttgagttcccacaaaccttgccaccaagggctaaggtgattaggggctctaaaaaaacttgaaaggcagtctgaaccacaagaactgcaacttttagatgagtcctagtgctgaactgggcccagagtcagaggactgaaggggcacgtgatgtactgagacatcagctggggtgtctacgggagtgctggcatcacccctccccaaccccaggctgcatagctcatgctccaaaagagaccccttccttctgcctgaggagaggagagggtagagtgggaggactttgtcttgcatcttggatgccagccgagccrcagcaggatagggcactgatcagagtttgaggcccccattccaggctctagcccctggattacatttctagacacaccctgggccagaagggaaccttcaaggaaaggttccttgaaggaaaggacccagttctggcagaattcaccacttgctaactgaaaaaccagcagtgatacccaggtactacatcgagggcctttggtggaactctgaaactttctggcttcaggcgagactcagcaca

SEQ ID NO: 665131 - DNA, 608 bp, Homo sapiens
tctttttgctatcttatgcattggaaattcagacacattttctttgagatggctacttgatttgtgggcttgtgttcagtccaaacctaagtgcccatcagtggatgaatggataaagaaaatatggtatatatacacagtggaatactattcagccataaaaagaagaaaattctgtcattttgcagcaacatgtataggactggaagacattatgttaagtgcaataagccaggctcagaaagacaaatattgcatgttttcactcatatgtgggagttwaaaaagttgatctcatggaggctgagagtagaatggtggttaccagaggctaggaaagtgggagggggatgaagagaggctggttaatgggtacaaaaatacagttagatagaagaaacaagttctagtgtttgatagcacagtagggtgattatttgttaacagtaatttattgtatatttcaaaatagccagaagagaagatttagaatgatcctgacacaaataaataacaaatgtgtaaactggtgaatatcccagttatcttgatttgaccactgcacattgcatggatatatgaaagtatcatgtgtaccccataaatat

SEQ ID NO: 665132 - DNA, 608 bp, Homo sapiens
tctttttgctatcttatgcattggaaattcagacacattttctttgagatggctacttgatttgtgggcttgtgttcagtccaaacctaagtgcccatcagtggatgaatggataaagaaaatatggtatatatacacagtggaatactattcagccataaaaagaagaaaattctgtcattttgcagcaacatgtataggactggaagacattatgttaagtgcaataagccaggctcagaaagacaaatattgcatgttttcactcatatgtgggagttaaaaaagttgatctcatggaggctgagagtagaatggyggttaccagaggctaggaaagtgggagggggatgaagagaggctggttaatgggtacaaaaatacagttagatagaagaaacaagttctagtgtttgatagcacagtagggtgattatttgttaacagtaatttattgtatatttcaaaatagccagaagagaagatttagaatgatcctgacacaaataaataacaaatgtgtaaactggtgaatatcccagttatcttgatttgaccactgcacattgcatggatatatgaaagtatcatgtgtaccccataaatat

SEQ ID NO: 665133 - DNA, 608 bp, Homo sapiens
tctttttgctatcttatgcattggaaattcagacacattttctttgagatggctacttgatttgtgggcttgtgttcagtccaaacctaagtgcccatcagtggatgaatggataaagaaaatatggtatatatacacagtggaatactattcagccataaaaagaagaaaattctgtcattttgcagcaacatgtataggactggaagacattatgttaagtgcaataagccaggctcagaaagacaaatattgcatgttttcactcatatgtgggagttaaaaaagttgatctcatggaggctgagagtagaatggtggttaccagaggctaggaaagtgggagggggatgaagagaggctggttaatgggtacaaaaatacagttagatagaagaaacaagttctagtgtttgatagcacagtagggtgattatttgttaacagtaatttattgtatatttcaaaatagccagaagagaagatttagaatgatcctgacacaaakaaataacaaatgtgtaaactggtgaatatcccagttatcttgatttgaccactgcacattgcatggatatatgaaagtatcatgtgtaccccataaatat

SEQ ID NO: 665134 - DNA, 564 bp, Homo sapiens
gatgataaaaggcagtcatctgacaaacagactagccatatctacaaaacaccctctttaaaatattaatataagcataggtgatctttagactgaaaaaaatactaatatgaaatgcccaacagtgttttgaatgcagcaattaaataaagcaaatatctaaactgggttatgccctataactaaaggaaacctcagtcacgctgacttgctaaacgtgtacatgccacaagagtaagcacagtgatcagagaaataaactgaagaaaaaaatcaggggggatcattttttaacagatgttgcagatcagtagagagaatggaagaggaaaatagaagcaagcctgaaaaccaaattgggcttgaagagcaatccatattactatgaaaaaagatgggaacagctctgagctttgcattttactttatgaacacccaccmcccacctccagcaccaaatgctttagttttgtgactttcatgtgaatgatttttataaaaacacaccaaggaggcatagtacccaatgaaggcaatccgatctcagaccatgttcattctcct

SEQ ID NO: 665135 - DNA, 581 bp, Homo sapiens
gcgcagtggtccatgcctgtaatcccaacactttgggaggctgaggcaagcggatcacttgagctcagagttcaagaccagcctgggcaacacggcaaaaccccatctctagcaaaaatacaaaaaattagccgggaatggtggcatgcaccggtggtcccagctactcaggaagctgaggtgggaggaccgcttgaacccaggaggcagaggttacagtgagctgagatcatgccactgtactctagcctgagtgacagagtgagaccccataaaaagaaaaagcagcttatgcattcctcaaagaaacacaatcaaaagtatttgcaattacaggtatttgaggggcagccacgtagtagttggaaaaagcagggagtcaggacacaggggcccagratcctgtcccagtttggccccactatgtgcccctgcatgtcattccactgctctgtgcctttgtttcttcatctataaagatgaagacacttgactacatttccgtctcagtctttgatgacaaagaagttttaatgaggatttagtgttcagacaagacatgatctaacagtgtataacag

SEQ ID NO: 665136 - DNA, 504 bp, Homo sapiens
ctcacaatgtaccttcttgtacatttcattgatttctgagattcctcagcattattggaatggaagaatacgatagtatttatatggtttcacattaaaaagtgrgataaaaggaggaaagtaaaacttgtttatgttgtaatttttattccttgcttcatcttcagttctaacgctcagtctcaagatcaggacagcacattattggtaataatgtaatataaaaatttaggttcctaaaagtgacaacctattttcttcaccaagtatcagtgtttaagaaaaaacaactaaacaacaaatttgggtagaaaaacatatgcctcttcaaaattacttattgtttttagtttaaacacttacaacactgcctagccttgtgtgacttttgtataaaatagtgagcaagtgtggcctagtggacaatatactaattaatagctaatactaataactactactatttttgagtactaacacaggcactgtgttaagtgttttaca

SEQ ID NO: 665137 - DNA, 504 bp, Homo sapiens
ctcacaatgtaccttcttgtacatttcattgatttctgagattcctcagcattattggaatggaagaatacgatagtatttatatggtttcacattaaaaagtgagataaaaggaggaargtaaaacttgtttatgttgtaatttttattccttgcttcatcttcagttctaacgctcagtctcaagatcaggacagcacattattggtaataatgtaatataaaaatttaggttcctaaaagtgacaacctattttcttcaccaagtatcagtgtttaagaaaaaacaactaaacaacaaatttgggtagaaaaacatatgcctcttcaaaattacttattgtttttagtttaaacacttacaacactgcctagccttgtgtgacttttgtataaaatagtgagcaagtgtggcctagtggacaatatactaattaatagctaatactaataactactactatttttgagtactaacacaggcactgtgttaagtgttttaca

SEQ ID NO: 665138 - DNA, 504 bp, Homo sapiens
ctcacaatgtaccttcttgtacatttcattgatttctgagattcctcagcattattggaatggaagaatacgatagtatttatatggtttcacattaaaaagtgagataaaaggaggaaagtaaaacttgtttatgttgtaatttttattccttgcttcatcttcagttctaacgctcagtctcaagatcaggacagcacattattggtaataatgtaatataaaaatttaggttcctaaaagtgacaacctattttcttcaccaagtatcagtgtttaagaaaaaacaactaaacaacaaatttgggtagaaaaacatatgcctcttcaaaattacttatygtttttagtttaaacacttacaacactgcctagccttgtgtgacttttgtataaaatagtgagcaagtgtggcctagtggacaatatactaattaatagctaatactaataactactactatttttgagtactaacacaggcactgtgttaagtgttttaca

SEQ ID NO: 665139 - DNA, 493 bp, Homo sapiens
gggaaaaggagcaaagggtgtctattaggggacttgctgtactatctctacattgtttctataaatctaaaattattcaaatttaaagcagcttttcaaaaaagatgatagcatgttaaaaggacacaggagccaactgaaatagctcctcgtggatcaatggtgatagaattggattataacccaaggaataaaataaatatccatgattttatattaatatgagtaaataaataaattaattattggggaagaggacaactgtttcttacagaagaattccaattaataaatgcagaagaaatgaaggagatagaaaacaccattagaacactagagtagtaatcactacagccatgatcaaccaataaatgctaaaattagtgagagaawgtttatggagcaacaagatagcttccaattaccttactgaaaatatttattaattacaaaagggaaagcagtaacttttcatggagaagcctggcagaca

SEQ ID NO: 665140 - DNA, 579 bp, Homo sapiens
tctgaaggagatatgcacccttgggaagaatcaaatatgcaaagaaggtaataaatttctgaagccttctttgaatttccatatttcatttgaataaaacttttgggcactcccttaggttatgtggcagtggaagccagattcattctaaatctcctgaagtggttaaattatcatctaattcattttggttttacttgattgccacaaaacctggaaaatgttaataaatcaagatgtcttggtgatgacttatttttggaaatacatagtacttaaagaatttagtataatagtccatgttgaaaattgttccaagttttctttgttatgcttccttctaaagattttcccatcattcattatttaaaaaattaactgggtttaacagagaactggctagcctataatcttgtcagctgagcacaatkgcctatagaaaagacacttggggaatttatttttaccttggggtggatttgttgccgtaatggacctagttcttgttgttacctaattttaaatgtgtaagccttcttagaggcaggacttaggtgttgtttaagattgatactttga

SEQ ID NO: 665141 - DNA, 440 bp, Homo sapiens
gaaaatagcatgcccaaaggggtaattgtgtggttgttctcacttctattatgacagttatcatactgcattattgacaagcatttgtgtccttatgtaacttctctattgtaatgtgagttctttgaaaacagaatctctgccctrtcagccttcctattcctagtatccagtatgaggtactcaataaacaaatgccgactgcaagaataaatgacgactccatgactgtgacatgcacgggttagcacagtggactgggagtgcagggctctgatgtcagccttgagttagaacagcagccctaccatgtactagctttgtgacctgtggcatctcatctcacctctctaagcctcaggggctttttttggctaaaataataataaatgttttgagggttaaatgagaaaataaatgtaagcatccagcattgtcat

SEQ ID NO: 665142 - DNA, 546 bp, Homo sapiens
gacaaggcagtactgagttccaatacaaagtccacaatcactgtgctcttcctcccccaagcacacactcttccactgtsccacacagctgctgctgggggatgtcagtgattcaagactgtcttttcaatcctcttcagtgcctcattccttaatatgttaaaaccagatactgtgattgttcaccggatttttggctcttataaaggtgcttttacgtgtggatagttgttcaatttggtcttcctgtagagtggggaactatttctagaggcctctattcagccattttgctctgcttcctctaattatagtttttaattaatatattatgaatatatgtatatatgaacaaatatccagcttataaatcattttaaaatgttgaccaatattttgttgtattctgtactttaaatattcccctattattgaagatttaagttgttctaatatttcactataataaacaatgctgttacaaacattcttgccagagctaaatatgatttacatccttaattacttatttaggataaattccta

SEQ ID NO: 665143 - DNA, 466 bp, Homo sapiens
acatgctggtgaatgggtttataataatcaagacttctttacccaatgttacaatatagatcaagtctgtgattttgctgtaacctctcgatattggctgcttgtagagagggagacaaaagaataggtctggaaaacaaaaataaagtggattttaacttcttgcatatatacatacatgtgacaaatatggcaaatatcaaacattaatttttgttaatttgttgattctgtgtgttgagtacacaagcaaatttatcttttctataatggagataaattgttgatgcaartcatgcagtaaatttgcaaaattaactgcaaatatcattttaaaaattcaaaacttgaataatgacagcaaggagggcctggggattcattaggtacagaactaactccaaagtttgtaactatttatggccttcttacataaaaacgtaagaaattctagtctagtcagagc

SEQ ID NO: 665144 - DNA, 558 bp, Homo sapiens
taactgttatttaatttgcctaaaattataattaccaggggacctaatgcattggataatgagaaaaaaataagttattataggttgaaaattatagtcatctagtgttttaaaaattcactcagaacaacttttaataagataaatttttcagttccttcccaattatagtgaaaccactcactaatcttcactactggaaagctagacttgtcacaaaagggagttgtcctctcccatgtagttgctctatgtcaagtcccttgctacctattgcgatatcagttttcctgatatatatccatcacctctcttccacctactcacgttatttctccaaaaggaattacttcattgatttttggctgtgatatttactcactgttaatagaaaatgtcaggatggtaggaaggacttgtttgatatttataatttttataagaatccrtaagtcattttctctgaattaaaaaaaaaaaacattcctttgaaatttcagaatgcatctgttactcaacacagagtgtgcctaaatcagtacatatattcttacatat

SEQ ID NO: 665145 - DNA, 568 bp, Homo sapiens
gcaggggcaggactccagcctgtgtggaacctatagggtttggtgcaggaaggtctgcaatggagcatggccaagaatgctcaacccccaacgctctccaagctcctctaggtgtccctagcctttgagtgactgttgaacctggacagagcaagaacatcttgtctatgaaatggggttccctgtttcctagcctctcctggacaaccagcctacccacccccaattrcagcactgccttggatgcacaaccagggtgattctcaggtgccctcatcatagctcctttgctggtaccatccctgaccattggagagctccagcttctctgactcatacacgtcctgcccccactacagcctccccttgggtctttgccacatgcactcacccatggtcttctcccactgctttgcaagtgcattcatgtaaccaaacctcactatcacatccccaatggtatgcatgtgtgtgcacacctcaccacttcaccaaccatcagagcaagttcatcctgccaccccacccacccttgctggcagtccacccctactgaggtgtgggcagc

SEQ ID NO: 665146 - DNA, 621 bp, Homo sapiens
taaaactataaaaacccttgaagaaaacctaaggaacactattctggacataggccctggctaagatttcatgacgaagatgccaaaagcaatgaaacaaaaacaaaaatttacaaattggatgtaactaagctaaagagcttctgyatagcgaaagaaaatatcaacagagtaaacagacaacccacagaaagggagaaaatatttgcaaactatgcatctgacaaaggtttaatatccagatttataagaaacttaaacaaattaataataaaaatccccattaaaaagtaggcaaaggacatgaacagacacttctcgaaagaagacatatacatggtccagaagcatatgaaaaaatgctcaacatcactaatcattagagaaatgaaaatcaaaaccacaatgagcatctcacaccagtcagaatggttattattacaagtcaaaaaataacagatgctggcaaggttgaagagaaaagggaacacttacacactcctggtgggaatgtaaattagttcatccactgtggaaagcagtttggagatttctcaaagaacttacaactaccattcaatccagcaatcccattactgggtgtatacccaaaggaatata

SEQ ID NO: 665147 - DNA, 553 bp, Homo sapiens
ctaaatgtatttttagttgttattaatgccatgacattgtacttgctctggatagaatacatgaaaacttaatttctggccttgttaaaataaatttaaattgctttaaaactttttttttttttttactttgatagattgtgtactctctactgttatgtgaatagggccaagggcacttggtaataaaattaactttgatctcctttctaaacttaatagaattatgttacatatttgtttatatataattaatgcttggaataacacattttactcctctggcatagttttctactcacctattttctacacatacagtcatgcattgcttaaatatggggttaggcaagttcaattttgtcactgtgcaaagatcacagagtatacatacacaaacctagatggtatagcctactacatacctgggctacaaacctgcayagtatattactatactgaacactttagtcaatttaatacaatactatttgtgtatctaaacatttctaaacatagaaaaggtacagtaaaaatatgacataaaaaatag

SEQ ID NO: 665148 - DNA, 640 bp, Homo sapiens
tgggcaactacaattaaaaataatttattgtatatatcaaaataaccaaaagagttaaattgaaatgttcctacacagagaaatgatagatgcttgaggtgatggatatcccaattacactgacttgatcattatatattgtatgcctatataaaatatcacacataccccaaagatatgtacaattcttatgtatccatgaaaattaaaaattaaaaaaggaacagatagaatcaaaaagagaaaatattttagattagatatgtgtaaagttatagaagatggaagtgagtagaacttatctgggagtaatgaatatgctacttattagaagggaagaagaaggagaaaggatttgggatgaatcagtggaagggtttgaattacaggttagtatgtttagrtagcttgttgcaatagggcatgactaaagttaccaaacagaaaaacaggtgaacaaagcagcaacctgagatgattaatctggctacagtatgcaaactggattgttgtaaaggggttggggaagataccaagagtagataagggtggaggacagattgggagggggtcaagggagacttctagaatgtgaaaaattatctacgtcttgatctggtggctgggcttaagcatatac

SEQ ID NO: 665149 - DNA, 552 bp, Homo sapiens
ttaacattctagtaacatgaggcagacaagaaataaacattacttaaatacaaagaatatcaacagtgataggtgctaggcagagaactgatgtagcatgatgtgacagtgtcattagaaaggccttttgaagacctgctaaattatccctctgtctctcatgtttatcatcttctccccctttgcaaatactgtggtattcacaacactggatttaaattctaccttccctgctgtgtaaccatttacatatcacttagcttctaagaatgtccgtgactgcatctttaaaayagaaataatggtattttcttccgcatagatttgttgggagatttgcatgagatattcatgaaaagcatttagcacagtaactatcacttattagcaattgttattaacctaagtgaaatggggtttaataaatgttagctattgtgatattgtggtaaaaagcactagtgggtgaacatgaggtattcatgtttttaggcttcaagctgagacatcatcctcattaaactaacacaggaacagaaaaccaaacaccac

SEQ ID NO: 665150 - DNA, 552 bp, Homo sapiens
ttaacattctagtaacatgaggcagacaagaaataaacattacttaaatacaaagaatatcaacagtgataggtgctaggcagagaactgatgtagcatgatgtgacagtgtcattagaaaggccttttgaagacctgctaaattatccctctgtctctcatgtttatcatcttctccccctttgcaaatactgtggtattcacaacactggatttaaattctaccttccctgctgtgtaaccatttacatatcacttagcttctaagaatgtccgtgactgcatctttaaaatagaaataatggtattttcttcckcatagatttgttgggagatttgcatgagatattcatgaaaagcatttagcacagtaactatcacttattagcaattgttattaacctaagtgaaatggggtttaataaatgttagctattgtgatattgtggtaaaaagcactagtgggtgaacatgaggtattcatgtttttaggcttcaagctgagacatcatcctcattaaactaacacaggaacagaaaaccaaacaccac

SEQ ID NO: 665151 - DNA, 440 bp, Homo sapiens
acatcgttatataaaccaaaaataaaattccagttccctgcccccaaccatctgaatgggccccttctctcagccaagggcattccaaagttaacctagaaaactagtttcasaccctgatgagaaaggggagccagaggccccattataccctcctccgtgttggaattactgatggaacagactctttaagtctgataagaaacacttacaatgcattttctctgaagcctgctacctggaggcttcacctacatgataaaaccttggtctccacaaccccatattttaacccagatatttctttctattgataataacacttttagccaattgccagtcagaaaatctttgaatctgcctatgacttggaagtccactcttccagtcatcctgcatttctggactaaacccatgtacatattacatgtattgattga

SEQ ID NO: 665152 - DNA, 440 bp, Homo sapiens
acatcgttatataaaccaaaaataaaattccagttccctgcccccaaccatctgaatgggccccttctctcagccaagggcattccaaagttaacctagaaaactagtttcagaccctgatgagaaaggggagccagaggccccattataccctcctccgtgttggaattactgatggaacagactctttaagtctgataagaaacacttacaatgcattttctctgaagcctgctacctggaggcttcacctacatgataaaaccttggtctccacaaccccatattwtaacccagatatttctttctattgataataacacttttagccaattgccagtcagaaaatctttgaatctgcctatgacttggaagtccactcttccagtcatcctgcatttctggactaaacccatgtacatattacatgtattgattga

SEQ ID NO: 665153 - DNA, 553 bp, Homo sapiens
aaagtctgaccacgaataaggcatcttctatttttattgctttttatgcagtaagataaaagcttgaggcaaggattggatctagggtcatattgacccctatgccaaagtaacttttgagctaaaattttatatgacatcctgctacccaatttattccaatggattttttagataactaatatataagaatgagatttaagcatacccaatacatttttgtctgttagcaacattctttaatattagatgtgtgatttatttttgccaaagagacccaaaggattgcagtgaaacaaggataatttagatattattaactattttcaaaatagaaaagcattttttatactactctcactattatttatctttaggtactttagtacttatttatatccctatctcaggaaaggagaaaaatagagaaaggaggtaaaattaagagaaataattatgactaattgcttgaaaatgatgaaacattaggagggaagactgmaaacagtcctgaagcaagaattcctggggagtctgaattttagccaaagat

SEQ ID NO: 665154 - DNA, 606 bp, Homo sapiens
ctggttgtaacttcatatcattgaaagaggcactgagaacatgagaatgagtagggagagggagacagagaatgaggatgaatactgtgttcctgagttgctaattcagtgtgacttgttgaatgatagggtatttttttttatgattgggtatttttaatttaaaagaacttaatgggcagrggagttaatttcactcttttgtatttctttcaatcatttattgtctcttcctttgtcattttccttttctgactttgggctaacgggtgttgactttgattgattgtcagagttatatacctctgagtatatatattttaagtttgagtgataaccatatgacctataaacaaaggtagtagtttcttggttttagcttctcatcacttcagccaaactctagggtagatgtaagtgaggaaatttttgactgcaatagaagagtggtacaataaaatatttatttgagctaaattattttatcctaaaatagcctgagcttactgtgtaatagtattcaagtgctaggaattatgagacatttcataaaatttccaacatactgcactatttgtttttatatactgctatatgaaggtatgc

SEQ ID NO: 665155 - DNA, 605 bp, Homo sapiens
ggaaatttttgactgcaatagaagagtggtacaataaaatatttatttgagctaaattattttatcctaaaatagcctgagcttactgtgtaatagtattcaagtgctaggaattatgrgacatttcataaaatttccaacatactgcactatttgtttttatatactgctatatgaaggtatgccttacatttccatataaaataaatatatttctaaaattcaaaaaaagaagtatacaataaatattagctattaccattaccataatataatttttactcttaaaatttgaattcctcttgctatctttatctctgagtctttgtctctgttttgcctagctctatcttttgcctaatgttgttcaattttctcatcccgttgaataagaaatgaatacataaaccattaatctgccattcaatttataatggatatttctggcaaaaataaccagcacaaattaaaactgaaaatggctatgactgtatgtggcaaaaatgtgatattgactaaaagtggagcaaatcttgaaatgcagatctgcaaaatttgacccaggaaaattggatctcatagaaataagtcactgaagaaacctc

SEQ ID NO: 665156 - DNA, 495 bp, Homo sapiens
agggtctcagctacttaggaggctgagttgggaggatcaattgagcctaggaggttgaggctgcagtgagttgtgatcatgccactgcactccagcctgggcgacagagtgagaccctgtttcaaaaaaaaagaaaaaaagaaatcactttaagaaaccaaaaagaattaatccccaaaattaaaacagtgttatgtaatataaaaattgattcaaaaataaaaaataaaaaaaagaaagaggcactgaagagggtagtaaacacagcttgaatcactgatgccacccctccccccttyccttggcagtggccatgtaatgcagagagaaaaactgtgcacttggtggagaaacagcacactgcctgggagacttggcattgaactcagtaccatactgccctgtcacagcagaaagcaaagccatgctaggctcatttggcacccacccatgaagagaacatttcaatcagccctaaccagaatggaattaccc

SEQ ID NO: 665157 - DNA, 576 bp, Homo sapiens
cccaaacctagagaaaaatatcagtattcaagtacaagaaggttatagaacaccaagaagacttaagccaaagaagattatcttcaggcatttaataataatattccccaaagtcaaagataaagaaagtatcctgaaagcagcaacagaaataaaacaaataacatacaatggagtgctaatacggttggcagcagagtttgtagtggaaaccttcaatggaaaactaggaaaaastggcatgacatatttaaaatgtttaaggaaaatgcttttaccctcaaatagtccatacaaatatatcctttaagcatgaaggaaaaaataaaggcaaacaaaagctgaggcatttcaacaccagatacctgtcctataagaaatgctaaaaggaattattcactttgaaagcaaaggatgttaatgagcaagaagaaattatctgaaggtacaaaactcactggtaatagctagcatgcagaaaaacacacattattataacactgcaattgtggtatgtaaactactcttaagtagaaagacaaaatgatgaactaatcaaaaataataactacaaca

SEQ ID NO: 665158 - DNA, 576 bp, Homo sapiens
cccaaacctagagaaaaatatcagtattcaagtacaagaaggttatagaacaccaagaagacttaagccaaagaagattatcttcaggcatttaataataatattccccaaagtcaaagataaagaaagtatcctgaaagcagcaacagaaataaaacaaataacatacaatggagtgctaatacggttggcagcagagtttgtagtggaaaccttcaatggaaaactaggaaaaagtggcatgacatatttaaaatgtttaaggaaaatgcttttaccctcaaatagtccatacaaatatatcctttaagcatgaaggaaaaaataaaggcaaacaaaagctgaggcatttcaacaccagatacctgtcctataagaaatgctaaaaggaattattcaytttgaaagcaaaggatgttaatgagcaagaagaaattatctgaaggtacaaaactcactggtaatagctagcatgcagaaaaacacacattattataacactgcaattgtggtatgtaaactactcttaagtagaaagacaaaatgatgaactaatcaaaaataataactacaaca

SEQ ID NO: 665159 - DNA, 626 bp, Homo sapiens
tacacgagctctttcatttttttgcctgccaccatccacgtcagatgtgacttgctcctccttgccttctgccatgattgtgaggcttccctagccatatggaactgcaagtcatgtcaagcctctttcttttttaagttgctcagtcttgggtatatctttatcagcagtatgaaaaccaactgatacaaagagtattcctcttttcattattccaccactcaacatgttgtttaagtaatggcttctatttattattattgataacaaaaatgaaagcaaaggatatagcttcatttctagatcgtggacagagttgcttgtaaaagtaatttattttttgaccctcatactaattaattgatatgacagttattttacaaagatgctttatttcatcccttcgagtatactagcaaaacacattatcagcctgttttctaaacttccacatgttcttttcatacttacaaatgtttcctcattttgtccccttgtaactatgtctattgttamtcattgcttctgtttgtgaataagtgacttgagaagcagaggatttggatttctagctcaggcaaacatttaaatgtagtctagacaatgcaatccaagaaaagtaaaag

SEQ ID NO: 665160 - DNA, 643 bp, Homo sapiens
accactgagctttgagatattttacacagcaaaaaatgactaatacagaggccttgaagaaaaacaatgtttaagagttaagctaagggaaaggaaccagaggagaggaaaacactaaaaagaagaaattagagaggcagaaggaaaataatgagggaaaaagtattgaggatatcgggattagggagaatttcaaggcagaaatggtcaaattccacaaagagatcacacyggatacagagttaaaaataaactactgaatttgtaaattatgtgttcaatgtttttgagctttgccaaaacaggttcagttagttggtagaaacagaaatcatattgctgtgggttaaaggacaagtggaaagggagaaagtagaggcaggatatgtagaccatgcttgagtgttataattagatggagggaggcaggtgtcagggaataacacaaagaccacaagagaaaagttagagttgaatttgcctcctttgcaagtagaggagaaccaagtcactcagaaagagttcggcaggtctccacaagctgaaagaggaaggatgaaatacgaggccaaagagagagttaactccatatgagaaaggattatttgcattaaattctaatttattaaggaaagtattataa

SEQ ID NO: 665161 - DNA, 534 bp, Homo sapiens
agattgacattgtttagggggatggggagatctaacaggaaaaggagatgactcagaaagaacttccccaacagtttaggatgccccctaatgatgggaacattctaagatatccgctagagaaaaagtccaggaaggtatggcatagatttctcattgctgcttcaacattcatttaccctttctttattagtaagagagctccaattttatttagggtggcaatgtgcctagctaaaataatgcatttcccagcttatcttgagattaaagtggccacttcactgagctatgaccagtgagaagtaaacaaaagctattagaakgagaagacagacagctggcatgtgtcactttgccccttccttttccacaccctacctcctagaatgcagatatgatagatgaggctccaaacaccattttggactattgtggtgatcctgcagatggaagccaaataataagaatggaagagcagatggaagtcaaataagaatggaagagcagaaatagagatggaggatgagtccc

SEQ ID NO: 665162 - DNA, 597 bp, Homo sapiens
aaaataatagatttttaacattcttatgaagagggtaacttggtgaagtgatggatatgttaattatcttgatacatagatgcatcaaaatgtawacatagatcaaaagatcacattgtaccccataaatatacacaattattatttgttaatccaaaaggaaggaagggggcaagagaggagagaggaaagaaagaaaaagagaaagaaaataaaaaagaaagaaagaaagaaagaaagaaagaaagaaagaaagaaagaaagaaagaaagaaagaaaaagaaaaaaagagagaagagagagaaaggaagggagggagggaaggtaggtcagagaagcaggagagccaagttttgtttttgttttttaaggatcatgaaaaccaagggaagatgtttaaatttaggatatgctgaaactgtgagattagggaatcaaaccaaaagagtccctgaagatgctggtagaggagaagcctttcccagaagatagaatctctgtggaagctttgaccatatcctggctgtcagagaacaatggcaataagcaatgagtggtataagtgaggagtatggacttgggatgatgtataacacg

SEQ ID NO: 665163 - DNA, 647 bp, Homo sapiens
ataaatatgagtgaaacatcatgattaggggtaaattggtttactatttcatcaagacagcatgcccatacaatataacagaacagcttttaggggagacactctatataaaatgatgcttgctaatcactcatcatttttttattatgtaaactgccagacaactgatttgacaaaaatcttatgaattagtttaaatgcattcctgacgtgtaatcaatatctccagcagacttcaagaatgcattgcagtgtgttacatccttattagacatatcaaaatgagmcttacctgaagctaatatcattaaatcactcaagaacttaattttagttcagtaatcgacttccataaaattgtcactggaaatgctgaagggacagcccattagagtataaaattgtaggtttgctttcttcatctttcttaaaatgcactaaagcaaatctagttagaaacatgaaaaataccatgagtattacataccttctctaataaatttcatattctgaaatcagaaagtgttgagagatggttaagatgagaaattatgtaatatttgacccacttttcttgaaatccttcagtttgtagcttgttggtatttgcccctggctccctatgatgatgttttttgtttgtttca

SEQ ID NO: 665164 - DNA, 647 bp, Homo sapiens
ataaatatgagtgaaacatcatgattaggggtaaattggtttactatttcatcaagacagcatgcccatacaatataacagaacagcttttaggggagacactctatataaaatgatgcttgctaatcactcatcatttttttattatgtaaactgccagacaactgatttgacaaaaatcttatgaattagtttaaatgcattcctgacgtgtaatcaatatctccagcagacttcaagaatgcattgcagtgtgttacatccttattagacatatcaaaatgagccttacctgaagctaatatcattaaatcactcaagaacttaattttagttcagtaatcgacttccataaaattgtcactggaaatgctgaagggacagcccawtagagtataaaattgtaggtttgctttcttcatctttcttaaaatgcactaaagcaaatctagttagaaacatgaaaaataccatgagtattacataccttctctaataaatttcatattctgaaatcagaaagtgttgagagatggttaagatgagaaattatgtaatatttgacccacttttcttgaaatccttcagtttgtagcttgttggtatttgcccctggctccctatgatgatgttttttgtttgtttca

SEQ ID NO: 665165 - DNA, 647 bp, Homo sapiens
ataaatatgagtgaaacatcatgattaggggtaaattggtttactatttcatcaagacagcatgcccatacaatataacagaacagcttttaggggagacactctatataaaatgatgcttgctaatcactcatcatttttttattatgtaaactgccagacaactgatttgacaaaaatcttatgaattagtttaaatgcattcctgacgtgtaatcaatatctccagcagacttcaagaatgcattgcagtgtgttacatccttattagacatatcaaaatgagccttacctgaagctaatatcattaaatcactcaagaacttaattttagttcagtaatcgacttccataaaattgtcactggaaatgctgaagggacagcccattagagtataaaattgtaggtttgctttcttcatctttcttaaaatgcactaaagcaaatctagttagaaacatgaaaaataccatgagtattacataccttcyctaataaatttcatattctgaaatcagaaagtgttgagagatggttaagatgagaaattatgtaatatttgacccacttttcttgaaatccttcagtttgtagcttgttggtatttgcccctggctccctatgatgatgttttttgtttgtttca

SEQ ID NO: 665166 - DNA, 557 bp, Homo sapiens
aaagcttttgaatgaataaattttttgctgcctgcatctggttaacatgtcacttcctgataaggaagccacttttttactgcagttgcacactattttattgtttattcattagatatttttgaaattattcctgttttaagacagatttcataatamaaataatatatttgtaaaagcctcttgtcatattaaggcaccacctcaaatacacacaggcacacttacatacatacacacacacacatgcatgcacacacatatgtacatacacatatatttaaacttggactgtcatcttgtcactccagaatggtagctagtcaacagaagaaacgtactgaaaatagaaaagaagtctgaaaatataggcctctcctatgtagctagctgatttcagctgcttatgactgcagagtataagttaatcgaatcaatgctcacaatacaagttagtcatcagaaaggaccagaaactgattatgtatgaataagagtacagaaaacaatgtatctggacatacactataactctgggatatttctattctaagaac

SEQ ID NO: 665167 - DNA, 542 bp, Homo sapiens
gcattttcaaaactcatcaagctgtttatttgagatatattttattgtatattgattctacttcaattgtaaaaattgcaaaaaaaaaaaagaagaagaaggaagaggactggggcttccatattaaaataataaattaaattaattcaaataaagagtctgaatcttactgacttgagacaccagggtgtcaggggcagtaggcagggacccagaggggtgaccccctccccagcatgggtcccacaggccctggaaagggagttggctcatctgcaaggctgagttcccacctcacattccctggaacaggaggaaagaccccagatgcaaaagttatctgagctcttcctctgctgtgatagggtgcgggggaggctgcacacctcatatcygggtcagccaagcatcttctcccacagagcaaagcaaggatctcccattatgttcagcactaggcttgtcccaaggcaatgtctctaggattccccagcaaagaggaaggagaagggaagactctcctgaaaggacctcgtggccag

SEQ ID NO: 665168 - DNA, 531 bp, Homo sapiens
gaaactgtggggccagaaaaaaataacataacatctgaaagcgttaatagcaaagactgtcagccaatagttttatagccagcaaaactatccttaaaataaagaaaaaacaaacatattttcagataaacaaaaactgaaaaaaacctattgccataatatcagccatacaaaaaatactatagaaattcttcatgctgaaaagaaagggcattaaatagtaactcaaatctacataaagagacaaagagcactggtaaatataactatataggtaaatccaaaaaaacaatatgaatgtatctttgtwatttttttctcctctctaatttaaaagaaaactttacaaaccaataattataaatcgatgttgatgagaaaacaatgtatatggttgtattttgtatgacaataacagcataaaagagtggagaagacatagagctagagggaaacaaagattttgtgtagtagtaaaattaactttgtactaatctggagtaaattgttataaatagagataataatttt

SEQ ID NO: 665169 - DNA, 568 bp, Homo sapiens
tcaaaaaaaaaaaaaaaaaaaaaagccaaactcccctctaacatttataaacccccatttacatgtcaagaaaaattgaatttgtgtttctgattcatttacagttaatttgtgaatggctgttctacaagagatagctgggtccaaacactccaggctgcaaatacccaaggttgcaaatgtccaaggcacagtctcgcctccctttagggacactcccaggatggcaggaagctcctcttcggatggggcctgggcatgggcagagagacagcatgacagccacagactccaacacaaccaggctcctggtccactgggagcctcctgtcccaagtcacggccaccgtccctcacawcagcagttctccagctatccatgactggccagggaggcccctcatggatggtgagaatggcaagccggggagaggcactgtatgggcaaagatgggaaagttggcatgcccttggatgtgggcaggtaggcaggtggcccatggagaggactggctctcagacctgtctcctgggatctgtttgctcaggcaaccatgaccaagtatca

SEQ ID NO: 665170 - DNA, 579 bp, Homo sapiens
ctgggctctttctgtgggctgtgagttagaacttgtgccaggcttctctccagcttctggtggtacactggcaatctttggcattccccacatgtgtgtgtaactgtgtccaaatttctcctttccccttctttttttcttggcctttggtgacaattatccatgtatttttatgagtatatcacagttgtacatattttgagggtacacgtggtrttttgatacttttatagaaaataatgagtaaatcaggattattaagatatccatcatctcaaatatttatcttttttttatgttgggaatattacaaatcttctcttctagttatcttgaataatatacacaaaaattattgttaactataatttccctactgtactgtcaaataccagagcttacccctttgaaattaccccttcttgtaagaacaccagacacatgggactagggcccaccctaatggcctcatgttaatttgattatctctgtaaagaccccatctcccaattccaaatgaggtcacattccaagatactagggcttaggacttcaacatatgaatttggagggcacagg

SEQ ID NO: 665171 - DNA, 606 bp, Homo sapiens
aaagacttcatgttctcacttatatgtggaatctagaaaagaggaactcacagcaccagagagtagggtggtgattgccaggggctggagcgttggaactggggaatgtggagatgttgggccaaaggtgcaaagtttcagtgagatgtaaggaatacgttttagagatctattgcacagcattttgactatagttaataataatgtattgtatatttcaaaattgctagaagggtttattttaaatggccttaccataaaatataagtatgtgaggtgatggatttgttaattagcttgatttaattatttcatgtgtatgcgtgtatgaaaacattgcagttttctaaaaagtaaactgaggcacataaaattttgaagagtttatttgagcaagcaatgattcatggattgggcasctccaaaccagaaggagttcgggacctcctccaagggaatgcaagagtgaggcttttacagaacaaacatagaagaaaagcaaagaaaatatttgatttaaacacagctatgccgttgcattttttggtctatcctgttggaaagtcactagttatataattataagtttgttggatacttctaatt

SEQ ID NO: 665172 - DNA, 598 bp, Homo sapiens
caggggcagccaaggaatggctgctggagaagagtctagaatcatgagaagggtctatctaggcagaaatgacatcatgcgctattgagtgatggctatagccctgccgctgtgctgggctctttttccatccattcgaaaactagttctcgagaacccactatttgcccttacgttcttacttttacacacactttttagctgaatcttcacagctaccctataaggtttgtacagcttttatcccattttcacacaggaacaaacccaggtatagagcagttaagagactgccccagcgtcactcagccagtgagtggcaaggccaggaattgaacccagctctttgtcacccatttggccacattgagaagagctagggtcagcaaccagaaggagaaggagcggtcaggtacagaacaccagcagctggagggaggaggtgaggggcacgggaacccaggccagaacccacattttgctccttaaccaaaactgagctctctgggactgggcacggagtttcaggagtttgaaaattctctgaggatatttttgacatgygttttctttttaataataatctaaaaagattttt

SEQ ID NO: 665173 - DNA, 604 bp, Homo sapiens
ctggagaagctcttgtccagagaagggaactgagacagccgcccaccagctctcagctgtcagagtcccgctgtccctggacatgaaaaagaggcttcttgagtgtccattgccatggaattcatcccgcctggggstgctaagctgagcgagggcccttaaggatgtattaagggcagaataatgaggtgatgactaaggtcctcccacctgggctgcaattatttcattttcctggaaaaatggcatcatcatgatgaatacttggctgatttcagggcagattaatgcacttgatatgcagtgtatccccgtttatcactggatgtgtcttgctgagagctcgtacctcttaatcagccagggccggctctcccagccagctcactcacagctcccagccctcccagaacaaaggacttgcggggaagggcaatttttcaaccttatgttccatttcttcgttttcaaattatttaaacacaactttcatctcctgttacaggccaaatggtgtctttccaaagattcctgtgttgaatccctaaaacctttggggctcagaatgggattgcgtttggaggcagggtttttaagaggtgat

SEQ ID NO: 665174 - DNA, 573 bp, Homo sapiens
tgatctgatcccagtccaggcagccaggcacaccagcacaggccacctggaagggctcctcacaccctctgcaggctcccactcccaagtgatgcactgcactcttccagtgggtaagaagtggtgagasgtgttcatctggaaacctacctagaatcattgaagactgagtgttaaccctaatttttgttttattagcatcctgtgcctctcttttgcagaaagtcgggtaggtaagaagaataacctctaagctggcaagttagcagggtagtggggcaccattgctcagcagatggaatctgtgtttaatgaggactttaacccaatagggacccagttacgtggactctgggtttcttttattagaaagttacagtgcgagggtggtaccatgtgttgtcaatgttttaaacatggcacaacaattagtgtgcagagggtaatttctcaatgccttttcatgacactagggttcatcgagaactataatgacccatccagcctcctaccataatctctaagttttttttatagtcacaggtaattacaccatggagagattacatcact

SEQ ID NO: 665175 - DNA, 487 bp, Homo sapiens
aaaactaagcctgcctaatgcactcataagtgtcctcagtaaaatggacattgaatactctgatgaaagcttaaagccacccacacactgagcatggagagaatttttgccttcacaaagaagtctttccaaatgcaataaaaatacatctcaaaaatgtgtattttgaggttgaaaattgaaatcatgtgtccctgacaattatttagattttttctaatgaggacatttttaaaggagagtaggcactatctttctaaattggaaagtcaagaacatgcagtttcagttaggattatatataatgattctgaggaaaaaatagtcaaaataaatcgcttgcttaagacagtattttttttttgacttgtrttaaaaagtccatgctgatggatgacttcagccacataaagtcatcaaaggtccaggtttcttctcagacaccattccaacatctctaggatgtggtttttcccttacaaagatg

SEQ ID NO: 665176 - DNA, 615 bp, Homo sapiens
ctataaaaacactgcaaaatatctatagtaataaaaattcttcattcatatatatataatatatgataagcaaaattagaaatcttgatgttttaaagcaaataatttttatttaacagaaagttttagtgtcaaatatctctttttgccatataaatttttttgttgcttccaagtatgataacgtggccttttacatgccaaacatattacagtagtttcttctyataaaatttgattttccatggctttagtttctcatggtcaactgtggtccaaaaataggtggatacagaacagtaagatattttgagacagagagagaccacattcatataacttttattacaatatatggttataattattatatttccttattattaatctcttattgtgcctagtttatcaaaacttatcatgggtatgtgtacaggaaaaacatgtatacagggtttggttctacctatggtttcaggcatccactgggggtcttggaacgaatgctctgtggataagggaagactacaatagtcgatatttgcaaaaagacagaagcaatagggtagcaactacatgtcaagtgtgatgtgtatggagtcatataaaagttaa

SEQ ID NO: 665177 - DNA, 615 bp, Homo sapiens
ctataaaaacactgcaaaatatctatagtaataaaaattcttcattcatatatatataatatatgataagcaaaattagaaatcttgatgttttaaagcaaataatttttatttaacagaaagttttagtgtcaaatatctctttttgccatataaatttttttgttgcttccaagtatgataacgtggccttttacatgccaaacatattacagtagtttcttcttataaaatttgattttccatggctttagtttctcatggtcaactgtggtccaaaaatagrtggatacagaacagtaagatattttgagacagagagagaccacattcatataacttttattacaatatatggttataattattatatttccttattattaatctcttattgtgcctagtttatcaaaacttatcatgggtatgtgtacaggaaaaacatgtatacagggtttggttctacctatggtttcaggcatccactgggggtcttggaacgaatgctctgtggataagggaagactacaatagtcgatatttgcaaaaagacagaagcaatagggtagcaactacatgtcaagtgtgatgtgtatggagtcatataaaagttaa

SEQ ID NO: 665178 - DNA, 546 bp, Homo sapiens
gtatgccctggggacgtgtggagttggccacaccctagctatgctggaaacagtcaaaccttatcagaacataacttaccaggttttacattaaagttaaaattgctaagagtcgccactgtgacatgcaattaagactactggaaatagatttacatgcaaagtgtgtaagaacagtaaaatgtgttttttaaaaggttataaraaggtatggaaatgtaaattttgcctagggttaaaggattgttttaagttagatgggaaaagctaaaggcttgaagaagtggtggaaaaatagtggaaattaatcttgtagaagaggttcaccatgagaacatgttgactacattcaaaagggttataaaaggtttttgcttctttaaaatttctaactcaccattttggcaaaataaataactatggtaatctggaattccaaaatcaaacttcagtttcaaaattgccctccctggcacctgacttttcaaatacttcagagggcccgtgaagtgtccagaagagaggtaaacaggattatttgactgg

SEQ ID NO: 665179 - DNA, 599 bp, Homo sapiens
tgcgcacccactggaacccttgaggtaaaactaagcaggaaaatttctcccaagaaaaggatggcatccttgatgtgaacagcttttsccaagtccacagattgacgtctactgtcattaaactcttatctttgaatatttttttcttgcttatgcctctacgaacaatagatgtggaaacagggcctgttatgtgcactaatggggtgtacttttatttgtgaaggagtttgcagccagccttatacatggataaccttatactttgatcaataaaagatgaaggcccaatgtaggtaagaaactttaatggtatatatgtggcctcataatcagtcaaaaacaaaacattggttcacccctcttaacccacatcgtgggttaaagaaaacattgctagaaggccttcactattctaaaggggcatcatttgttaggtcctagttccatggtttaaaataaaagaagcaatgattagaaatgtatccctcatgataggttctatagcaaattctactgtaaaggctacagttatacaatagactctaaattctcttgtgaaagttatgataaaattggctaaacggagaaatatctgt

SEQ ID NO: 665180 - DNA, 599 bp, Homo sapiens
tgcgcacccactggaacccttgaggtaaaactaagcaggaaaatttctcccaagaaaaggatggcatccttgatgtgaacagcttttgccaagtccacagattgacktctactgtcattaaactcttatctttgaatatttttttcttgcttatgcctctacgaacaatagatgtggaaacagggcctgttatgtgcactaatggggtgtacttttatttgtgaaggagtttgcagccagccttatacatggataaccttatactttgatcaataaaagatgaaggcccaatgtaggtaagaaactttaatggtatatatgtggcctcataatcagtcaaaaacaaaacattggttcacccctcttaacccacatcgtgggttaaagaaaacattgctagaaggccttcactattctaaaggggcatcatttgttaggtcctagttccatggtttaaaataaaagaagcaatgattagaaatgtatccctcatgataggttctatagcaaattctactgtaaaggctacagttatacaatagactctaaattctcttgtgaaagttatgataaaattggctaaacggagaaatatctgt

SEQ ID NO: 665181 - DNA, 529 bp, Homo sapiens
tagtttttgactaatctcatgcactaggccccaacaaaccaaaccaaaatggagttgcttgtgctaagaaacacatagattctagaacaaaccacattttttctcctgcaaatctctgtaacaaacatttctaacagcataggtatccaccacctgaagtctccattaaatcttttaatcaaattcatttcctctcgcctagaaaccatcaagtttcaagtgatcatgcaacaaaggtttcagacacctccaggtgaagatrccactcctggccatcaggaagctaccctgcctccactagatacagcagggtgagagttccataatccccaataggtagggtctacactccaagccagcatgaagtggttacagaaaaaagaccattggtccctctgcctcccataaagatttatggggatcacatctctcagtggggagatgaggcagaaaaatagggtctggaggcagggaacataggccaattcacacttcagctataacaggaaatatcctctctatagggcat

SEQ ID NO: 665182 - DNA, 529 bp, Homo sapiens
tagtttttgactaatctcatgcactaggccccaacaaaccaaaccaaaatggagttgcttgtgctaagaaacacatagattctagaacaaaccacattttttctcctgcaaatctctgtaacaaacatttctaacagcataggtatccaccacctgaagtctccattaaatcttttaatcaaattcatttcctctcgcctagaaaccatcaagtttcaagtgatcatgcaacaaaggtttcagacacctccaggtgaagataccactcctggccatcaggaagctaccctgcctccactagatacagcagggtgagagttccataakccccaataggtagggtctacactccaagccagcatgaagtggttacagaaaaaagaccattggtccctctgcctcccataaagatttatggggatcacatctctcagtggggagatgaggcagaaaaatagggtctggaggcagggaacataggccaattcacacttcagctataacaggaaatatcctctctatagggcat

SEQ ID NO: 665183 - DNA, 356 bp, Homo sapiens
ttggtaccagaaatggttctggaggaacagaattttaaggatggatttttttagttggttttggggtttctggaattgactgcttaatctgattagacccaaaaatgttaaggactgtacttcgaatagtatggagaacactgatagtctttggcatgaactgtttggagagttatgcaaaayaagtgcatttgatactcctgattcactgctcttgagaggcaagaaatttagtgactctatatatatctttgaccatatgtggagaaccaaggaatattatgaaattggtgggtttcttctaagtttacaaagtgatgaaagaaaatgatgagcttagggattctaactccctg

SEQ ID NO: 665184 - DNA, 501 bp, Homo sapiens
caggctgtacaggaagcatggctggggaggccttaggaaacttaacaatcatggtgggaggaraggggaaagcaagcaccatcctcacatggtagagcaggagagagagagttaagggggaagtactacatactttcaagcaactggatctcatgagaactctatcatgaaacagcactagggggatggtgctaaaccattagaaaccaccctcatgattcaatcacctcccaacagaccccacctccaaaactcaggatgacaattcaacatgagatttgggtggggacacacagccaaatcatatcaatattgaatactgaattcaatatatttgaatactgaattcaatatatttgaatattgaattcaattttttaatactgaattcaatatttttaatattgaaggttgtggcacctcagcttcaatgagtcttcagaaataggcaatttttattagaaatattttgaatctggccaggttcagtggcttacatct

SEQ ID NO: 665185 - DNA, 581 bp, Homo sapiens
ctcagagggtgttcaagctttgaaagtcccagggaagaacataattggcccagcttgggtagatgctccttcctagacaactcaatagtggtcaggcaggctgggatactacacttttttcacggctgcgaaaaggaagtactgctttcagcagaaaagaaaagtgcttggaagattaaaaattaaaaataatttaatatctactaaacatattttcgattaggggaactatgaatatatcacaagagtcagttgtgtgtaagtggggctggtctctgtttccaaatttaatagctctgggaccttgtgccactatcttaatccattaaactcccttgacctcagtaactaattcataaaatgggaataaatactttaagtcattgaaggcaggagactagaccagggatgtggcagccatgggcatggaccttgacctcctccacacggagcaaacttgaccaagggctaagcttctgccccttgcaacccattgcctgattttgtcaaggctgctcttggacaacgattgagtatagsgggaatggcacacccattcctgggaacgtaatagttcacag

SEQ ID NO: 665186 - DNA, 585 bp, Homo sapiens
gccttcaccaaacactgaatctgctagtgccttgatcttggacttctcagcctccagaactatgtgaatcaagtatctattgtttataaattactcascctgtgacattttattgtagcatcaaaaactgactatgaccagaaattggtaccagagaagtagaacgctgctgtaacaaaaatttaaaaatgtggaagtggctttggaactgcaggacaggtagagaagcaagaagagtttggagctccatattagaaaaagcctagtctgctgtgaaaagagtgctaagggtaattctgttgatattttagaatacaagagctatagacagcctaaatcttagaaattacttcagtgttggtgaccagaatgattgtagaaacatgaacagtaaaggccattctggtatacctttatgaaaactggaggaaaggtcttctttgttacaaagtggcaaagaagctggctgaattgtgtccatgtcctagtactctgtggaagacagaatttaagagcaatgaactagtatatttggcagaagaaatgtcgaagcaaagagttcagggtgctgcagggcttctctac

SEQ ID NO: 665187 - DNA, 603 bp, Homo sapiens
agggtgtagcaatgaggtgctatcttggaagcagaaagcagccttcaccaaacactgaatctgctagtgccttgatcttggacttctcagcctccagaactatgtgaatcaagtatctattgtttataaattactcagcctgtgacattttattgtagcatcaaaaactgactatgaccagaaattggtaccagagaagtagaacgctgctgtaacaaaaatttaaaaatgtggaagtggctttggaactgcaggacaggtagagaagcaagaagagtttggagctccatattagaaaaagcctagtctgctgtgaaaagagtgytaagggtaattctgttgatattttagaatacaagagctatagacagcctaaatcttagaaattacttcagtgttggtgaccagaatgattgtagaaacatgaacagtaaaggccattctggtatacctttatgaaaactggaggaaaggtcttctttgttacaaagtggcaaagaagctggctgaattgtgtccatgtcctagtactctgtggaagacagaatttaagagcaatgaactagtatatttggcagaagaaatgtcgaagcaaagagttca

SEQ ID NO: 665188 - DNA, 582 bp, Homo sapiens
tttggttaagtgtcacaaatattakcttctactctgctgtttcactcttttaaggagccttttgatgtatatagttcttaattttaacatactaagaaaaaacaatcttttccttcatagatagcatttttttgtgtcttataggaaaatccttcctaactgactccatgaaaatattttcatgctttaccttctaaagcttcatagttttacctttcacatgtaagtctttaatccactgggaattgattttttgtgaaagtccttgcttttgttccaagccaggttttcaagcccccaatcaattttgaaagtcccctgtcatcttataataaattcttgttttgcttcagatagccagcataagtttctgttgctttcaatcaagagccctggctgataaaatggactactgccttggctcccattcctggagccctgccttttaaccccagtccagtgctgtgccctgtgaccagatacagactggtttttgtccatggtttggactatgcccaaagtttgccatactctatgatcttgtaccttacccagcagactacttcatatttctgaacctgc

SEQ ID NO: 665189 - DNA, 563 bp, Homo sapiens
aaaaaccagcgagactgctggttctttcatcaattgtatagatatcccactgagtaacaagtttaatggatgacacaggaatgttttagcagatagattatcctaaaacattaccatcwtctagtgcacattaacataactttctcaagctgtggaattcatgacgagttggaaagtttgctgactccatgttttcctaagacggccttaaaggaagactccacataccattagctctttccttttatgtagtggttatgcttcaccatttagaagctattttctcttccaaaacaataaaataaaataaagctgctttcttagtctcctaaactgggagggaccatcggctttgatgataccaaccagcataaatgtcaaaatctctttccatatactgctacctataaattactgaaggctcgaatctgcctggaattgggaaattttaagtgtttcaggcataagaatcaaaatatttttataaaacttttactgagcactttagcatattgtctgggactgagaaattatgttaaagtaattgtttcatttaatgggcc

SEQ ID NO: 665190 - DNA, 563 bp, Homo sapiens
aaaaaccagcgagactgctggttctttcatcaattgtatagatatcccactgagtaacaagtttaatggatgacacaggaatgttttagcagatagattatcctaaaacattaccatcttctagtgcacattaacataactttctcaagctgtggaattcatgacgagttggaaagtttgctgactccatgttttcctaagacggccttaaaggaagactccacataccattagctctttccttttatgtagtggttatgcttcaccatttagaagctattttctcttccaaaacaataaaataaaataaagctgctttcttagtctcctaaactgggagggaccatcggctttgatgataccaaccagcataaatgtcaaaatstctttccatatactgctacctataaattactgaaggctcgaatctgcctggaattgggaaattttaagtgtttcaggcataagaatcaaaatatttttataaaacttttactgagcactttagcatattgtctgggactgagaaattatgttaaagtaattgtttcatttaatgggcc

SEQ ID NO: 665191 - DNA, 563 bp, Homo sapiens
aaaaaccagcgagactgctggttctttcatcaattgtatagatatcccactgagtaacaagtttaatggatgacacaggaatgttttagcagatagattatcctaaaacattaccatcttctagtgcacattaacataactttctcaagctgtggaattcatgacgagttggaaagtttgctgactccatgttttcctaagacggccttaaaggaagactccacataccattagctctttccttttatgtagtggttatgcttcaccatttagaagctattttctcttccaaaacaataaaataaaataaagctgctttcttagtctcctaaactgggagggaccatcggctttgatgataccaaccagcataaatgtcaaaatctctttccatatactgctacctataaattactgaaggctcgaatctgcctggaattgggaaattttaagtgtttcaggyataagaatcaaaatatttttataaaacttttactgagcactttagcatattgtctgggactgagaaattatgttaaagtaattgtttcatttaatgggcc

SEQ ID NO: 665192 - DNA, 600 bp, Homo sapiens
ttacccttcccttccaggactgcttagggaaagcaccatgactaaatatgcattacacttcagtggcatgtgtaacctggctgtcagccttgcattttctcaagtcrttcagcttgcagaatttccttgtcccttgagatggaagctaagaattggcttacatttctatcccagcactagcccttgagattcttagaggacttacttttctcttcagtatctcaggttccaagtacctgcatctgctgagtttacaatctgtccttcatgttaccttctggtgtgttctcccttctttcttagtgtgacccggtgggcactacctcaatcctgtcactctataacataacactgagcaagctgtattaagtcatttaaaggacataagttttgaaaaaaggatggtacccacaatctccctatatttaaatcaaaaaaataaaaataaaatttatttttgaaatgtcacaatttacatatatgctgaaataaaaaggcttcttattaaattttaatattgccaaattcaacttttctctctctctctctttctcacatgctttctcaatgtgtgagaatgtccatattaggtaatacact

SEQ ID NO: 665193 - DNA, 585 bp, Homo sapiens
ggattaaaaatcccagctgtaaaactttgggggaacatgcttgatatggtttggttctgtgtccctacccaaatctcatctcaaattgtaatcctcacatgttgaggaagggatctgtaatccccaggtgtcaaggcagggaggtgattggatcatgggggtagtttccctgatgctgttctcatggtagtgagagagttttcatgagatctgatggttttataaggggctctttccccttcgcttccttcacatgctctctcacttgctgccatgtaagatgtgcctgcttccccttctgccacgattttaagtttcctgaggcctccccagccatgcagaactgtgagtcaattaaacctccttttttaaataaattacccagtctcargcagttttttgtagcagtgtgagaaaggactaatacaatgctttaaggaaatcacttactactaaattacagcttcttcatctttgtaatggggctaataatcatcatagctacctcatagattgagtctatgaaaaaacaaataaatgaatctatatgctgagtccaaacctagcaaatctatctatgggata

SEQ ID NO: 665194 - DNA, 520 bp, Homo sapiens
gaaattttaattatacctctaattcaaggatagagggagaggagaattggatttcgttatacataattttagttggcttcaatccttgtgaaaggttaacttgcacaagcagaaacttgaaaactctactcctcaatatacttttccccttcagtcctgtgtttcctctgttctattccctgttgacttggaagttgcatggggccctaatgaatgatgggcaatttgctgtattgatggcaaagatgcaagctcaacacaaagygtctctcgtcatttgaaaaagctcattacaaaccaaataattcatgaactaaggcccatccataagggatgatctgcattaattgtgctaaattaagttgataaagtctacaggattcagagacaaaattcttatgtcaatatggatgttttccaccatttcaaaatgtagggtttaactagcaggtgctgacaactttactttggaatattccctccaacagattaaatctcagcccttgaggtaagatgtgct

SEQ ID NO: 665195 - DNA, 573 bp, Homo sapiens
tctgcattaattgtgctaaattaagttgataaagtctacaggattcagagacaaaattcttatgtcaatatggatgttttccaccatttcaaaatgtagggtttaactagcaggtgctgacaactttactttggaatattccctccaacagattaaatctcagcccttgaggtaagatgtgcttcttggaagttaccagacatcttttataaatgatctagaagtatttctgtcttttaattgaaggaaaatgttatttcctacagtccgggatctcccttggttcttaacaaactctagcaaagcatgtcaagaaacttttcacaataacactctaggaatagagtgactggaggctttttcaacaccatcagtaaacattaagcacagattattcttcaggtcatgaggaaacatagaattgtactctgggagactctgaacctgcattgattcctgatccaatagagcagtagtayaatctctcataaatttttcccctcaacccacaaaaatttaaaaattaaaataaaaaatttccctccgcagcatagccactagttgaacaacatt

SEQ ID NO: 665196 - DNA, 668 bp, Homo sapiens
tagccttataatatattttgaagtctgcagtgtgatgcatccagctctgcttgttttgctcaggattgcattgtatattctggctctttttttccacagaaattttaggattttttttccttttatgtaaaaaatgaaaagtacagagttttattagttctctctttgcttgtttgtttataaaattagtgttgtcatcatcactttaaaacaatgggttataagatagtatttataagtatcatgaaaacttcaaatgaaaaaaacataaaatgaatacacaaaaaataaaaagcaagaaattaaaacataccaccagagaaaatcatgtttactaacaggaagacaggaaggaggtaaagaaggaagataagaccacaaaaccatcaaaaaggaaataacaaaatagcaggaataagtccttacttatcaaaaataacattgaaggtaaatggactaaattctccaattgaaaggccgtatagatttaaaaaatagagtggctgaatggatttaaaaaatagaggagtggctgaatggatwaaaaaactaagacccgatgatctgttgcctacaagaaacacacttcacatgtaaagacacatatagactgaaaataaagggatagaaaaatatgttccatgccaacatgagccaaaaaagacaag

SEQ ID NO: 665197 - DNA, 471 bp, Homo sapiens
aattagtacagctacaatagaaaacagtatgaaggtttctcaaaaaattaaaaatagaaccaccaaatgacccagcaatcccactaatgagtagatatccaaaggacatgaaaccagtgtgtcaaagagttatctgtactcccatgtttattgcagcattattcacaatagccaggatttgaaataaacytaagtgtctgcccatcaactaatgaatgaattaaaaaaaatgtgatattatatatacacatacacacacaatagaatactattaatcctccaaaaagaagaaaatcctggcatttgcaacatagatgagcctggaagatattatgctaagcaaaataagccacacacagaaagacagatactgcgagatctcatttatatatgaaatccaaaacagtggaactcatagaagtttagagtagaatggtggttacagggggaggggtgcagaggggtaggaga

SEQ ID NO: 665198 - DNA, 275 bp, Homo sapiens
aacaagaatactcacacagcgctaacgttgtattgtaaaagtcaagcatattgtcatttgcatgacattggatttagcaatgtatgcttagatattatgtcaagagcatgcacagcaatacaaaatagataagctgaacttcaccacaattaaaaacttctgtgcattaaaggacactatcaacagactcaaaagacaacccgcatgatgggagaaaatatttacaagtcckatatctgctaagggtttaatatccagaacatataaagaattcc

SEQ ID NO: 665199 - DNA, 542 bp, Homo sapiens
tattgatgattggtttaaaatactcaaaactctactatagccacctgtgaaattgtgtgaaaatctttttaagttcattttgactgaagaaatcccaatatttttttgagaacaactctcaatctctgccccataaagtataataatttctattataggccccaagccccaattcaatagagcacattactactttatttttcaacattacatttaagctctggcctggttatgtgactttgaaaataaaattcaggccttcaatctgtcatcttttgcttgtrgacaatgaaaatgcacaaagatgaaaatcttgatgcttcatggactcaccataatgctgtgctaatacaacagcctgtggagcaggcctttggtgtgacccagagaaaatgcttgaatattaactttagaagagaattgaggtgtcatttgatctaagattgtttattttataattaagaaaattgagttcctaagagatgaagtgatttgcataagggtaccataagtcttataaacaacaggcctgggacttacaa

SEQ ID NO: 665200 - DNA, 568 bp, Homo sapiens
tgttttggttagacaagatgatgtatgtgtcagtataatgccaggctcacaaaagttgctaactaaatgttagttccttcaatacatacattcattccctgggacatggttccaaaagtagattatcataagaattctgtgagaagctttgaaaaaactacagatgtctatggcatatattaatacatggcgtctatatccatacatgtatgtaaatgtatgcaaacaatttaatctactttttccttaacattaactccttcagatagaatggttggcccaaatgatttaattatttttkaggttgttgattcatagaaacaaatcccctgcagaaaggttgtaccaatttacacggttacctttcttcacattttctctaacactgggtattcttgagcttttagtatttctcagttggtggaaaggatctcttagtttgttgggatctctttgattatgagtgagattcagcattttccataatttactgatgtctgcatttcttcctccctccttccctttcttctttcctttctccttctcctacttccactttctcccgtcc

SEQ ID NO: 665201 - DNA, 415 bp, Homo sapiens
gcccattatcttgctcatgattttagattcccagctcttgattttggaaggcgctgtctttgtgaaatttcagagatcaaggagttagtgttttgtggtgtgggaaatttctctcagtctttgctccttgcattctttgtgcagttttttctttgtttatttcagagacagggtcttgctctgttgcccaggctggagtacagtggtgtgatcataactcactgcagccttgaatttctgagctcaagtgatcttcctgtctaagcctcctgagtagctaggactacaagtgtgtgccaccacgtctggctaaaaattttttttagacatgggtcttgctrtgttgcccagactggtctgaaactcctggcctcaagcagtcctcccacctctgcctcccaaagtgctgagatta

SEQ ID NO: 665202 - DNA, 562 bp, Homo sapiens
aagtggcagtgtcatgcttagggtttgtcccggatgagcttttattttagcattttgccatataatatatagattgaggccttggttaaaggcacggacaggtggtgtttttttccttcctatgttttaattattcacagtttatttaaacccactcaggaaggtggacccagaaaagccaaattctgtagtacataaccccaaatttcaaggttttgcggaacaaattcaacacaagttttgtgtcagtttagagttaaacgcatctcaagtarctgacttaactggcttgcctctatgaaaactgtaggcaggtttcattatagattttttttttcttgttattccggcggttaggtgcatgtttattttcttgattaaatttacattctatgttttatgactaattctttaaataggtgcatcatatagaaagtattttaggagagaaattattatttaagcactacagtatatcagatatatgagaaataatggagttgtagtctctgctctttaaaataactgtaaaaacatcttaaaaccctatgccaaataataa

SEQ ID NO: 665203 - DNA, 567 bp, Homo sapiens
ttaacatttttatttatttttagtgttcattctattaattttgacaaatatatatcaccacaattaaaacattctctaaaccttccaaatttgctcgtgttgcctatttgtagttaacctctccttatacctcaatccctagcaatcactgatctgctttctatccctgtaatttgccttttccaatgttatttaattggaatcatctaagatgtagtttttaaatcctggctttcacttagaataatatatttgaggtttattcatgttgctgtgtgcatcrgtagttgtgtatcagtagtttgtccttttttattgctgagtagtgttccattttatggatataccataattagtttattcatatacctgtttatggatatttaggctgtttttagtttttgatgatcataaaactgctgcaatcatacattaaaaaaatgtgactctatgttctttaaaaaatttggtggggcatggtggctcaaacctgtaatcccagcactttgggaggctgaggcgggcggatcatgaggtcaagagatcaagaccatcctggccaacatg

SEQ ID NO: 665204 - DNA, 567 bp, Homo sapiens
ttaacatttttatttatttttagtgttcattctattaattttgacaaatatatatcaccacaattaaaacattctctaaaccttccaaatttgctcgtgttgcctatttgtagttaacctctccttatacctcaatccctagcaatcactgatctgctttctatccctgtaatttgccttttccaatgttatttaattggaatcatctaagatgtagtttttaaatcctggctttcacttagaataatatatttgaggtttattcatgttgctgtgtgcatcagtagttgtgtatcagtagtttgtccttttttattgctgagtagtgttccattttatggatataccataattagtttattcatatacctgtttatggatatttaggctgtttttagttyttgatgatcataaaactgctgcaatcatacattaaaaaaatgtgactctatgttctttaaaaaatttggtggggcatggtggctcaaacctgtaatcccagcactttgggaggctgaggcgggcggatcatgaggtcaagagatcaagaccatcctggccaacatg

SEQ ID NO: 665205 - DNA, 530 bp, Homo sapiens
tttcttattttaaaaaaaggcgttaaggtccacattaaagtcaggtataattggtaaagtttaaaactgctagtctcttttatttcacgaacactgccaggccttggaaattattgataaaacttgattcactgtgagaaacagtcaaaaaataataaaaaaaatagcattttattttaaagttaaagaataataaaataaaaataaaaacttgcttgagatacttttctagaaatggaacattttacaatgaaaataggatccaaacatataagtatttacttttggatatttgatagataggcttgttataagattgtgactcagctgaagtggttttagtttatacagatttttgasagaagaaagtacacctttttgctctatatgttttctctggaaacatctcattgtattgtaccaattttgtcttgattctctaagaatctttttagtcttttaggacaaaggaaataggtattgagagacatttctcttcaatccatggatctcttctgtttctgcacatt

SEQ ID NO: 665206 - DNA, 619 bp, Homo sapiens
  misc_feature 330, 345, 347: n = A,T,C or G
aaagaggttaagtcacttgtccaaggtgtacagctaagaagtcgtggagacagaattcaaaagtcctggccaagcaactcaagtgtcagtagatggatgaatgatgactaaataaaatgtggaacatacgtacaatggaatattgttcagccttaaaaaggaagagaattctgacagaggctacaacatggatgaaacttgaagacactgtgctgagttaaataagccagtcacaaaaagataaatatgtttgattccaccttatatgagataccctgttgtattcaattcatagagacagagaatggaatggtggttgccaggggctgngggaaggggaaggananatgtgaagttgttcaatgtttacagaatttcagttttgcaagatgaggagttctgaagagtggttgcacagcaacgtgaatatactaaacactactgaactgtacacctaaaatggttaagattgtaaattttatgtaatatgtattttaccacaatttttatcaatttatttacatttttacttttagactcaggggatataygcgcaagtttgttgcatgggtatattacatgatgctgaggtttgggcttctaatatcccatcacccaa

SEQ ID NO: 665207 - DNA, 433 bp, Homo sapiens
tatttggagtcactttagttggtctcattaatgtcctttagagaaaaaaaaaaaaaacagaataaaccctgtattcaagaacctgatataacatactgccttcagtttcatgtctctttattctcttttaatctgcaaaaatttagtctttcattgactttacctaccttaatctttttgaaaaagcacagggcrttattttgcaaaatgttccccaatgtggagcagtctagcatttcctcatgattatattacagttatgtattttttgacaagcatgtgatagaagtgatgctgtattctgtctagtggattatattaagaaggctttgatattggtttgtctcattattagatattaactttggttacttgaatttggtagtttatgccagtattctaacctgtagagttacactttctcctcagtgta

SEQ ID NO: 665208 - DNA, 574 bp, Homo sapiens
agtgaaaattaatcagtgattttaacagatttggggagaaacagggcgagatgaatgactggagcacagggaatttgtaaggctgtgaaactattgtatatgatactgatatatacatttgtcaaaacccatagaatgtattgtagaaagaatgmgtcataatgttaccatctactttagttcatgatattgtaccaatatcaacttaccaattgtaacaaatataccactctaatgcaaaatattaagaataaggttaactgggtgtgggaggcatggagatgacagagtatagacaaaactctttgtattttccatttactttggtaaaatttaaactgctaaaacatctcaatttcttaacaatgaatcttcagaatgctacccaaagttcttctaattagaactagatgagtatggataatatttaatgttcttttctgttaggtaaaataatatcttcacaaggatagatatattattatattacttagacatataaaaatggacagaaaagagaattttggttttgagcagcaaaagtaataaaatatagtgatcacttgccactttt

SEQ ID NO: 665209 - DNA, 450 bp, Homo sapiens
agcataaatcatcttgctttttaaaggtgcactttcaggagccctacagaaaaaaaaaaaattattgaatcccatttataagaaaaacaaaggtaagactgactatgataataataatccttgcattttaaaagtacttttttcttttgtttttacacaccagaatataaatactaggtcttctttcttagactcttttgtttcgtatgtggcatcgtacaaagcatatcggcaatcattcagaggtagcaacttmacaaaagatgtgtaggggtcctctacagtatcaccaatgtcacccaccaagatctgctttgcttcctctacaattatttgtcttttgtcatcgcttaaacagaagagaactgctttctttctctttttgatctcctcttgtgtagaagatttccttactttcatatcattaaaaactttgatgacttcatcatt

SEQ ID NO: 665210 - DNA, 610 bp, Homo sapiens
tatatatatgtataataattggagagtagagtccacttaaatgcatttgatttatttctcccctgtcattgtgagcgttttacttatcttggtttttaaaatataagccttcatgaaaagttctggcctgagcagggcctctaaggaatgaggwagcacgaatagctagttcaaagatcatgatccttctgggtaaatcagagaatattctcattggtaatggctggcaaggaataaggttgcagaggtcaatgtgaaggaatgggaagaaagacaaattatgaagaacttttagaatcttggaaattagtttgaatgattttttaatgcaaaggttggtgaaatgctatgggatttgattaatggggtggtttaagaaaattaaaccagcagtagctcaaggcccaattcttattctagtccataatgaatgtgcctatttttctatttttgcatagtactgatataaggatagaaaacagtatatacaattgattccatttttctgttgtttccttatcttaaaccttgctttccccccagattacacaaccgtaaagggcagaaaatgtcttgtttatcttttatcttccattatgctagcacagat

SEQ ID NO: 665211 - DNA, 610 bp, Homo sapiens
tatatatatgtataataattggagagtagagtccacttaaatgcatttgatttatttctcccctgtcattgtgagcgttttacttatcttggtttttaaaatataagccttcatgaaaagttctggcctgagcagggcctctaaggaatgaggaagcacgaatagctagttcaaagatcatgatcyttctgggtaaatcagagaatattctcattggtaatggctggcaaggaataaggttgcagaggtcaatgtgaaggaatgggaagaaagacaaattatgaagaacttttagaatcttggaaattagtttgaatgattttttaatgcaaaggttggtgaaatgctatgggatttgattaatggggtggtttaagaaaattaaaccagcagtagctcaaggcccaattcttattctagtccataatgaatgtgcctatttttctatttttgcatagtactgatataaggatagaaaacagtatatacaattgattccatttttctgttgtttccttatcttaaaccttgctttccccccagattacacaaccgtaaagggcagaaaatgtcttgtttatcttttatcttccattatgctagcacagat

SEQ ID NO: 665212 - DNA, 610 bp, Homo sapiens
tatatatatgtataataattggagagtagagtccacttaaatgcatttgatttatttctcccctgtcattgtgagcgttttacttatcttggtttttaaaatataagccttcatgaaaagttctggcctgagcagggcctctaaggaatgaggaagcacgaatagctagttcaaagatcatgatccttctgggtaaatcagagaatattctcattggtaatggctggcaaggaataaggttgcagaggtcaatgtgaaggaatgggaagaaagacaaattatgaagaacttttagaatcttggaaattagtttgaatgattttttaatgcaaaggttggtgaaatgctatgggatttgattaayggggtggtttaagaaaattaaaccagcagtagctcaaggcccaattcttattctagtccataatgaatgtgcctatttttctatttttgcatagtactgatataaggatagaaaacagtatatacaattgattccatttttctgttgtttccttatcttaaaccttgctttccccccagattacacaaccgtaaagggcagaaaatgtcttgtttatcttttatcttccattatgctagcacagat

SEQ ID NO: 665213 - DNA, 614 bp, Homo sapiens
cagtacttggagtttctgtttttatccccaaaagtctacaattaaaacaattaagagtttatggtacttaaaaacactattaggtaaaacttgagtccattcattggttcaaatgcttatttatacctttgtaaaaaatcatttcctcaatctcaaggagttgcagtaaactagtagggaagggagattcatttagaaggactaagggtaaatatttgaaggagagaaagaagagggaaggcttatgggaaaggtttcagagaggtgacattgtkatgggccttaaagcctaagtatttcgggcagcttatctctatttctcttgttttgccctttttttttgcttttttgagacagtctcgcactgttgcccaggctggagtgcagtggtgcgatctcagcttactgcaagctctgcctcccgggttcacaccattctcctgcctcagtctcctgagtagctgggactacaggtgcccaccaccgtgcccggctaattttttgtatttttagtagagacggggtttcactatgttggccaggctggtctcgaatgcctgacctcatgattcacctgtctcagcctcccaaagtgctgggattacaggtgtcag

SEQ ID NO: 665214 - DNA, 614 bp, Homo sapiens
cagtacttggagtttctgtttttatccccaaaagtctacaattaaaacaattaagagtttatggtacttaaaaacactattaggtaaaacttgagtccattcattggttcaaatgcttatttatacctttgtaaaaaatcatttcctcaatctcaaggagttgcagtaaactagtagggaagggagattcatttagaaggactaagggtaaatatttgaaggagagaaagaagagggaaggcttatgggaaaggtttcagagaggtgacattgttatgggccttaaagcctaagtatttcgggcagcttatctctatttctcttgttttgccctttttttttgcttttttgagacagtctcgcactgttgcccaggctggagtgcagtggtgcratctcagcttactgcaagctctgcctcccgggttcacaccattctcctgcctcagtctcctgagtagctgggactacaggtgcccaccaccgtgcccggctaattttttgtatttttagtagagacggggtttcactatgttggccaggctggtctcgaatgcctgacctcatgattcacctgtctcagcctcccaaagtgctgggattacaggtgtcag

SEQ ID NO: 665215 - DNA, 614 bp, Homo sapiens
cagtacttggagtttctgtttttatccccaaaagtctacaattaaaacaattaagagtttatggtacttaaaaacactattaggtaaaacttgagtccattcattggttcaaatgcttatttatacctttgtaaaaaatcatttcctcaatctcaaggagttgcagtaaactagtagggaagggagattcatttagaaggactaagggtaaatatttgaaggagagaaagaagagggaaggcttatgggaaaggtttcagagaggtgacattgttatgggccttaaagcctaagtatttcgggcagcttatctctatttctcttgttttgccctttttttttgcttttttgagacagtctcgcactgttgcccaggctggagtgcagtggtgcgatctcagcttactgcaagctctgcctcccgggttcacaccattmtcctgcctcagtctcctgagtagctgggactacaggtgcccaccaccgtgcccggctaattttttgtatttttagtagagacggggtttcactatgttggccaggctggtctcgaatgcctgacctcatgattcacctgtctcagcctcccaaagtgctgggattacaggtgtcag

SEQ ID NO: 665216 - DNA, 566 bp, Homo sapiens
tgtgtaccctctggactgtgcttccctttcctccttcccatttccacctagctagaatgcagacatggtgataaatcattttggaacatgagaatggcagcaaaaccctaaggatggcagtaccaacaagatagaaagagcttggacccctgataatctgccttgactttgacagtatgttggaattaaatttctctgttgtttcagttactgtcaaattgctttgatagttsggaagtattttttcgttctatttcttttgcttgaaagagtttgtgtaagattggaattatctgctttttaaaaaatttggcagaattcacctataaagttgtctaggactgatgttttctctgcagaaggattttagtactgattcaagttctttaatggtttaagaccatctacattaacaaatttcttcacagatccattttgataatttgtattttctaggattttatttttgcatacattttcaaattcatcaaaaattgtgtatatctcatctttaaatttctactctatccatagttatgttgctcccctttcagtcttaactttat

SEQ ID NO: 665217 - DNA, 566 bp, Homo sapiens
tgtgtaccctctggactgtgcttccctttcctccttcccatttccacctagctagaatgcagacatggtgataaatcattttggaacatgagaatggcagcaaaaccctaaggatggcagtaccaacaagatagaaagagcttggacccctgataatctgccttgactttgacagtatgttggaattaaatttctctgttgtttcagttactgtcaaattgctttgatagttcggaagtattttttcrttctatttcttttgcttgaaagagtttgtgtaagattggaattatctgctttttaaaaaatttggcagaattcacctataaagttgtctaggactgatgttttctctgcagaaggattttagtactgattcaagttctttaatggtttaagaccatctacattaacaaatttcttcacagatccattttgataatttgtattttctaggattttatttttgcatacattttcaaattcatcaaaaattgtgtatatctcatctttaaatttctactctatccatagttatgttgctcccctttcagtcttaactttat

SEQ ID NO: 665218 - DNA, 566 bp, Homo sapiens
tgtgtaccctctggactgtgcttccctttcctccttcccatttccacctagctagaatgcagacatggtgataaatcattttggaacatgagaatggcagcaaaaccctaaggatggcagtaccaacaagatagaaagagcttggacccctgataatctgccttgactttgacagtatgttggaattaaatttctctgttgtttcagttactgtcaaattgctttgatagttcggaagtattttttcgttctrtttcttttgcttgaaagagtttgtgtaagattggaattatctgctttttaaaaaatttggcagaattcacctataaagttgtctaggactgatgttttctctgcagaaggattttagtactgattcaagttctttaatggtttaagaccatctacattaacaaatttcttcacagatccattttgataatttgtattttctaggattttatttttgcatacattttcaaattcatcaaaaattgtgtatatctcatctttaaatttctactctatccatagttatgttgctcccctttcagtcttaactttat

SEQ ID NO: 665219 - DNA, 613 bp, Homo sapiens
tcggctcattgcaacctccacctccagggctcaagcaattctcctgcctctacaggtrtgtgccaccatgcctggctaattttttgtatttttagtagagatggggtttcaccatgttagccaggttggtctcaaactcctgacctcaggtgatccggccgcctcagcctcccagagtgctgggattacaggcgtgagccaccgcaattggtcgtgagtagcttctttagcatatattttcaaagttcatccacatgatagcctgtattagaactccattcctttttattgttgaacaatattctcctgtatggacataccacggaagagatatacctttgtttatccattcatcaattgatggacatttgggttgttatcacttctggctattaagaataatgctgctatgaacatttgtgtatacatttttggatgaaggtatgcttttaattctcttaggtatatatctaggagtgcaactactgggtcatacagtaacaaatggtttaattgtcgggtcatacagtaacaaatggtttaattgtttgaagaactgccaaactgttttccaaagtaactgcatcatttacattcccacaagcaatgtatg

SEQ ID NO: 665220 - DNA, 564 bp, Homo sapiens
attatagctgttattattcaaaagtgactttgggccaggcacaatgtctcacatctttaatcacagcaccttgggaggctgagataggcagatcatcacttgagttcagaagttcaagaccagcctggccaacatggcaaaaccttgtctctacaaaaaaacacaaaacattagccaggtgtgggggcgtgtgcctgtagtcccaactacttgggaggctaaggtaggagaatcatttcaacctgggagacagaggttgcagtgagccgtgatcatgccattacactccagcctgggtaayggcgagactgtctcaaaaaaaaaaaaaaaaaaaaaaaaaaaaaaaaaaaagaagggactttgcctttgcctccactccatgatagcagagaaagagacaaacagcttatgcaatcatatgagggtagagataataaaatgtggccattatagttatgtgcctaaatcactgaagatccaactggaccttattatgagtagtagctatattggcaactaagaaagtctcactttagaaaaggagagggttgtattcctgaactg

SEQ ID NO: 665221 - DNA, 595 bp, Homo sapiens
tgttaattattcacctcatagtgcactcataaaaaagatttaccaacagtctcctaggagtagaaggcatattgtctcttggcatattttacaaacatgctttccacacactcccagtacaaggttattatactttctcttctgtgacactcagaaaggctgtagatactcacacaggattggacatgtcattatatgttaaaaatgatgtgtatttttcttccacttaatgggcattggaagctttatttagttgactgcgtaagttaaagaacatcttgataaagcaattacaaaaaatatttttgcttacgtggataataaaatgcatatatgctatgttttgatttaatggttgttttccatatattcttgttttggtttaatgtttggtatattcttgttttgatttaagggttattttccrtatattcttctaataattaaaaacttttaaaagtttatttatataagattatttgcttaatgatattagtattgcagagggaccccttgttttttaaaaaagggtcacagtatacttaggatgtttgttactgagttagggtttcactgagttataatttcagttgta

SEQ ID NO: 665222 - DNA, 597 bp, Homo sapiens
agcacaagcagtgtctgaagatctgaaatctattttggtttcttattttaaaaatcatcttttaatgctatttattactgatatttatcagcattattgttgcataggtctgggtaatttgaagaggacyggcaaagttggacttaaaatgataataaatatagctactactaataatattgattgagcctacatgtgcgtgacactgtgcaagccagtttattatctcatttaatccttgcaataaccctgtgaggcaagtgctctcattattatttcactttacaaatgaggaagtgaagatgtggggggggtgagaaaacttgccttcagtcactcagctagtaagctggagaagaggcaggactccaaatatcaagggtctagtttttagctatgtgtatgtattctgcttcttagtatctgcctttctgctgtgactggagggttggctcatttgtaagattgggagttgggatggggacagacctctttggggaaaacaaacacagcctaccctaccccaaaggagaagcccaaacacaactgggagaagggccatccacatacaactcagagagcatcatttcacttgta

SEQ ID NO: 665223 - DNA, 559 bp, Homo sapiens
atcagtgttttagtaccgtcatacatttgatactaaatttgaggacatagattaaaaaatctcatgaaagccatggacatcttaatactatggtaccatctttgcgtattcatacatacatacaaaattctgcatgtatttcaggaggcccaaggactagaggatccattccatggactctatgaatctcaggttcagaagccttgctttaaaattctacattaaatgtaatgaaggaaaaaaaaatgtagtttgaatgaaagaaatggcactaggaaatggtgatagagtttgaacatgctttgtataaggwaaactcttctctaaagggaattactcgatattaaataactaaacattataattagctcaagaaatatacttgaagaggacaaagtatagtacaaagatgtataaagttatataagttgttcagaaaactaatccaagggatagttgggagtctattgtagggaaaaaacaaaatgcaaagaatctgatatttagaaattatatacctatgtatatacccatctcattaagaatagctggttttata

SEQ ID NO: 665224 - DNA, 517 bp, Homo sapiens
aacaccacatgatttcctagtgtttcaattctgaatgctgctagacagatggatttctcccttaacactatgaatataatgaatatcttacagtgacacatctgaaaayaggtatgtgtgtgtgcatgtgttggtttgtttgtacttgcatttacttttaggattgggttgggggaccatggactattgcttccctttgagtgtcactggctgttgtattctcactttttctgtgtcttccactcagaataaaggctgctgggtaggtgctccctatttatcaggatgcagctgtgcatttaaccagacccttctcttgagctgaactctctatcctgggttcttgtgacttctttcttggtatcacagggctaggtaatccaaagattaagtctgatctttggggctttatgctctgtaaaaaaatatattttcttttttcccctaatttttattttagaatcagggagtacatgtgcaagttttgtcacaaaggtatattgcgtgatgctgaggt

SEQ ID NO: 665225 - DNA, 413 bp, Homo sapiens
cggaacattggtttctataactgcyatgaatttgaatcgaggccagtatctctaaatttgaaataaactgatactctgtcttgaaagatgatacaggccacttatgttgtataaggtatttagaaaagagtatttcagtttaattttttagctatatatacacccacacacgcatacacacacacatacacacacacacatatatctttcaaattgttagactcctcagcactgtgacctccagtggttcttgctgttagaggctcacacagaagaactcggaaatgcctgcagccatttattatccactttcagccaggagttagcagtgagtttgcacctggttccaggtttggcatttctcctcataccatggaggagctgctcacttcatcagaaagtcattatccctc

SEQ ID NO: 665226 - DNA, 413 bp, Homo sapiens
cggaacattggtttctataactgccatgaatttgaatcgaggccagtatctctaaatttgaaataaactgatactctgtcttgaaagatgatacaggccacttatgttgtataaggtatttagaaaagagtatttcagtttaattttttagctatatatacacccacacasgcatacacacacacatacacacacacacatatatctttcaaattgttagactcctcagcactgtgacctccagtggttcttgctgttagaggctcacacagaagaactcggaaatgcctgcagccatttattatccactttcagccaggagttagcagtgagtttgcacctggttccaggtttggcatttctcctcataccatggaggagctgctcacttcatcagaaagtcattatccctc

SEQ ID NO: 665227 - DNA, 521 bp, Homo sapiens
gaagatggagccctgatggcctaaacacctcctattaggccccacctcccaacactgttgtactagggattaagtttccaacacatgcwttttgtgaaacatgttcaaaccatagcattttcaaattccaaaataagatatcccttacaatagtatcttaccaaacacagtggctcatgcctgtaatcccagcacttagggaggcagaggcaggaggattgcttgagcccaggagtttgagaccaacctgggcaacatagtgagatctcatctctacgaaaagaaaaaaaaaatctctatctgcactacttaaatgactgaccttttagtccatgctcttacttctgttataaatgttcaagacttgagacaacttcttccttctcaaattcaattagttcctaaattcaatacacttatcttcagcatggtcccttgcatctgtccactgcattatatgaaccagtcaataggcattttattgctaactgtaggataaaggaacagaaagaaggtaaaac

SEQ ID NO: 665228 - DNA, 439 bp, Homo sapiens
aagaattaatattattaaaatggccatactactcaaagcaatctacagaatcagtgcaatacctatagaaataccaatgagattctttatagaaatagaaaaagcaatcctaaaatttgcaaggaaccacataaagtccctgaatagctaaagaatcttgagaaaaaagaacaaagctgcaggcattatactacctaactttaaaatatactacaaaagagtagtaaccaaacaccgtggtaactgcatgaaaacagacacatagaccaatgaaagagaatagagaagctagaaatraatccatgcttttataaccaactgatttttgacaaagatgtcaagaatacacattaggaaaaggacaatctcttcaggaaatggtactaggaaaactggatatctacatgtggaagaataaaactagacggttctctctcac

SEQ ID NO: 665229 - DNA, 495 bp, Homo sapiens
gcagagcaagggttttttctccagctgttcttcaaggatcttccacttagattggagcaatgtgcttatataaatcttgccacatttttagtgcttctgtaaggtgaaaatgctcaaatagggttacgtaaatacaaacttactttgggaaaaaaagtaagagggaaagagatgaactgtaacagagatctggtttttcatcaacattttgttttatgagtctttggagatgtggctaagttgagtaactaaatacttatgcttcagttctctataagcctttcttgtgctgtattttgaatggaaataattttaaagcagttttttctttggtattyacaaaattcttcccaacaacattatcagtgaattggatgacattgagatagcaggaatactattgtgtttgtatgtgttttttagagatggaaactccttaaaaaaacacagtggaaccgaaataatgtctttattgttcattcttaacagaagctc

SEQ ID NO: 665230 - DNA, 495 bp, Homo sapiens
gcagagcaagggttttttctccagctgttcttcaaggatcttccacttagattggagcaatgtgcttatataaatcttgccacatttttagtgcttctgtaaggtgaaaatgctcaaatagggttacgtaaatacaaacttactttgggaaaaaaagtaagagggaaagagatgaactgtaacagagatctggtttttcatcaacattttgttttatgagtctttggagatgtggctaagttgagtaactaaatacttatgcttcagttctctataagcctttcttgtgctgtattttgaatggaaataattttaaagcagttttttctttggtattcacaaaattcttyccaacaacattatcagtgaattggatgacattgagatagcaggaatactattgtgtttgtatgtgttttttagagatggaaactccttaaaaaaacacagtggaaccgaaataatgtctttattgttcattcttaacagaagctc

SEQ ID NO: 665231 - DNA, 604 bp, Homo sapiens
cacaggcccacttacatgaggatttactaccacccctgagacagcaagaccaacccctcctctttctcttcctcctcagcctactcaatgaaaagatgataatgacctttatcatgatccacttccacttaatgaatagtaaatatattttcttgttcttaggatattcttaataatgttttctcttgcttactttattataagaatatataatgcaacatataatttacaaagtatgtggaaatcaactgtttatgttattggcaaggcttctcatcaacttgggctattagtagttaagtytttggagagtcagaagttatacacagattttcaactttgtcgggggttggtgcccccaaccccagcattgttcaaggttcaactgtataaagaactcaactcaatagaaaaaaaatctgattaaagaatgggcaagacatctgaatagctatttcctaaaagaagacatacaaatggctaacaggtacatgaataaatgttcgatgtcactaatcatcagggaaatgcacatcaaaaccataatgagtcatcatcttagcctggttttaatggctattatcaaaaagacaaaaaataacaa

SEQ ID NO: 665232 - DNA, 599 bp, Homo sapiens
tatagacacagattttgtgagttgttatgtatctggtgcaagtatatgagtagaagtttgaacttcaattagttgggtttatgaagcactgacagcgtagggcaatatatgaggcatgtaggaaattacaaaggaaataggaaacacaatctttgttcatattgagtttataatctaatggaacaaatataaatggagatacatgataacagataaaataaacataaaaacatagtcataaccagttacagatggatagagatatttgcacaagtgctatggagttgggaaaattattgcaaggactattgtcagctggggtaagtcagaaactgttttaatacaggatgtaaaacttatgcaaaaatattaaggccaggaaggacaaggattagtgtgggggaaatcattytaggaagtaagaatgaaatgaaaatacagagggagcaggcaggctattgtagatgacaataacgttagctggaaaagctgagtatttttaggacatacgtttcttttggaaaagcagctatactagagtaggctaactgctgtaacaatcagtgccaagtatcggtgacttaataaaatcaaaggtt

SEQ ID NO: 665233 - DNA, 483 bp, Homo sapiens
cctgccgtcacctcacactcaccactctctcctttcctagcttcattattcattattttttatcaacagtctcttcattcttgtattaccttagcacgtaccttgcagttatggttagcagtgttccttcaggatgcctcttcagcctgttctttcttttcttcttccatctgcacacamtcttgatagtgaccttatctcctaatgatggcattggtatagtaagtccctacctagaactccaccccgaatattgctgctacataaataatcattttcttcttgctccattctcatttagtaatctcttttcctcccttttgtgtgagaatgaattccagattcctcagcctgtacctaaagaatcactgttccctagcctcacctccttcctaccctcatttctgacagctaatcacaggaaggctctactccaggcagactggtcacagcagtctctgaattcaaaggatgctaattctg

SEQ ID NO: 665234 - DNA, 561 bp, Homo sapiens
gtgtgtgtgatttcctggacttacttcgggttaaggcagtttgatattctagtcttttaaagttgagcatcaaaactggttttaagaccacacttaccctggaatttcagaagagtttgacataagaaaggtattgtagtaaagtggttgagtgggtacggtctggagtctcattacactgatttgaatcctggtyatagcacctattaacatgtgacttagggcaaattagttaaccacagttttctaatctgtaaaatgggagttatgcaatcattattaggggtgtgtaaagattaaatgaattattaatagtgtgaagcatttagaacagacatgtagaaaacactcaaatattagctatgcaacaactctaataataatttttagtacagtgtgtgttgcttaatcacggggatacattttaagaaatacatcattaggctcctttgtcattgtgcaaacgtcatagagtacatttacacaaacctagatgatatagcctgctacacactaggatatatggtatagcctatttctcaaagcctacaacactgtaca

SEQ ID NO: 665235 - DNA, 561 bp, Homo sapiens
gtgtgtgtgatttcctggacttacttcgggttaaggcagtttgatattctagtcttttaaagttgagcatcaaaactggttttaagaccacacttaccctggaatttcagaagagtttgacataagaaaggtattgtagtaaagtggttgagtgggtacggtctggagtctcattacactgatttgaatcctggtcatagcacctattaacatgtgacttagggcaaattagttaaccrcagttttctaatctgtaaaatgggagttatgcaatcattattaggggtgtgtaaagattaaatgaattattaatagtgtgaagcatttagaacagacatgtagaaaacactcaaatattagctatgcaacaactctaataataatttttagtacagtgtgtgttgcttaatcacggggatacattttaagaaatacatcattaggctcctttgtcattgtgcaaacgtcatagagtacatttacacaaacctagatgatatagcctgctacacactaggatatatggtatagcctatttctcaaagcctacaacactgtaca

SEQ ID NO: 665236 - DNA, 525 bp, Homo sapiens
tggccttattatccagtgggtctcacataggcatacatttagatcaactcagcaaatacttattgaacatttactgtatgtcgaccactaatgtaggggtgcaaagatgaaaaaagatactgatgtggcccttagatgttcatagtatggataaattgaaggaaaaccagacactttagtttgtttttggcagaagagtaacttggtaggtcttttggacagaacaagagcaatacacattcaagtaatatatgtatatgtgtgtgtatatatatgtgtatatatatgtgtgtgtgtgtatatgtgtgtgtgtgtgtgtgtgtgtgtgtgtatrtatattccccccaccaagatggagtcttgctctgtcacccaggctggagtacagtggcatgatctcggctcactgaaacctccacctcctgggttcaagcaattctcctgcctcagcctgcagagtagctgggattacaggcgcccaccaccacacccggctaatttttgtatttttagtagagaaggggt

SEQ ID NO: 665237 - DNA, 549 bp, Homo sapiens
cttgttgccagaattgaatatataatacacataacacaccaagcatgaagcacacagtaggtatcagtattagttctttctgcctaacctgacctactcccaatcatagatatagttcaggtgttaacttgctggtatcctctacaagagaggttggttagagcaagtctgccaggctaggaaatatcagggagatcttaataagtttctgatatggtttggctctgtgtccccacccaaatctcatgttgaattgtaattctyaatgttgggggagggatctggtgggaggtgattggatcatgggggtagatttcccccttactgttctcacgatcccgagtaaattctcacgagatctgatggtttaagagtgtgtggcacttcccccttcattctttctctctcctgctagccatatgaagaagtgcttgcttcccctttgctttctgccatgattgtaagtttcctgaggcctccccagaagcagaagtctgtatagttcacagaactgtgagccaactaaactccttttctttataaattacc

SEQ ID NO: 665238 - DNA, 549 bp, Homo sapiens
cttgttgccagaattgaatatataatacacataacacaccaagcatgaagcacacagtaggtatcagtattagttctttctgcctaacctgacctactcccaatcatagatatagttcaggtgttaacttgctggtatcctctacaagagaggttggttagagcaagtctgccaggctaggaaatatcagggagatcttaataagtttctgatatggtttggctctgtgtccccacccaaatctcatgttgaattgtaattcttaatgttgggggagggatctggtgggaggtgattggatcatgggggtagatttcccccttactgttctcacgatcccgagtaaattctcacgagatctgatggtttaagagtgtgtggcacttcccccttcattctttctctctcctgctagccatatgaagawgtgcttgcttcccctttgctttctgccatgattgtaagtttcctgaggcctccccagaagcagaagtctgtatagttcacagaactgtgagccaactaaactccttttctttataaattacc

SEQ ID NO: 665239 - DNA, 539 bp, Homo sapiens
ggagatcccattttattttatgaatgctcattgacgagaggtaatataattgcccccacccttcaaaccatctgcatttgttttctgtatcatatgatttagtgcttggctataaacagctgtattatagattcctttcccttctatgctaccctttaataagtgaatttrcaaggggcagtagatctcccagaagcaatatacatatttttaacagtatgtggggaggctgaactaacttgtactgagagtaataggctggatatcatggaaatgggaattggcactaatagctgctctcagataaaacttttcctgtgccttcttttgtatatcacatgatactatgtccaatgtacagtcaaacttaaaatagaaaaaaaatcaaatacatggtagtgagttttcaaactcatataacctgggctactttcacttaacacatagttactcataaaatgtcacttttttatgaattcaagaagttttttgggggtaaacttagtgcctcatgccttgggccatcatgtaggttacac

SEQ ID NO: 665240 - DNA, 641 bp, Homo sapiens
aatgatttctgtgtctttcttttttcttttttttttttttgagacagggtcttgctgtgtcgcccatgctggagggcagtggcataatctcggctcactgcaacctctgcctcccaggttcaggcaattctcctgcctcagcctctggagtagctgggattacaggcatgcgccaccatgcctggctaatttttgtatttttagtagagatggggtttcaccatgttagccaggctggtctcgaattcctgacctcaagtgatccacctgccttggcctcccaaagtgctgggattacaggtgtgagccaccacgcctggcctgtgtttttctttatagtcttactacctgtgcatcatctctaaaataaagatagttttyaaggcatcttttaatgaaatggataagctttgaaaagcaggactgtaaattataagtcatttataatgttatcttcaattccctgagacaacctttattaaaaatgcctactttcataagtgaaaataaataactttaaaataatactgatagctttcagcaggcataatagtagaagtgatgttttgtgagctccattttggatcacattttaatttttttatgcttagatactacctcctcagttgaggactaatatc

SEQ ID NO: 665241 - DNA, 607 bp, Homo sapiens
taatgcagctaaataaagttcaaaagtagaacttaaattatttgaaagtattgtcacttaatatgttgggctttatgaaatattaagtaaacttaaaaaattagaaacatagaaattagaaaaaacttatctgagttttttttttttttttgagacggtgtcttgctctgtcacccaggctggagtgcagtggcaggatctcagctcattgcaaactcygcctcccagattcacaccattctcctgcctcagcctcccaagtagctgggactacaggcgccgaccaccacgcccggctaattttttgtatttttagtagagatggggtttcaccgtgttagccaggatggtcttgatctcctgacctcgtgatccgcctgcctcggcctcccaaagtgctgtgattacaggcgtgagccaccgcacctggccttatctgagtttttataaagtagcatgatccatcacatgtttttaattaataattaagaagatattaagtatctactggcttagggattagacattatacttttctaatatgctggtattagagcgaaaggattggtactcgtactgatattgtgtattgattaaatgacattac

SEQ ID NO: 665242 - DNA, 509 bp, Homo sapiens
tattttaaaacgtctataattagttccaaataatagtaatagttactctaacttctgttaaatgcttattatactttcaatttaaaatttcaagtttaattggtaagatcagkttctttggtaaagggtaggtatatagtgttttaaaaaatacacctcatattgtaaatattttacaaattgtatcattttaagttaggcagttattttgctaagtattacaaattttgggcctcagacccctcctttcctttttagtggtcttttacagtttacaataatgtctgtgttttcgcaaacacatctgtaaagtagtggatttcatcagaagatgcaaaagttcttttcaaattaaaacagttgtcaatcttataaaaatattttcaaatacaaaagtaaaagtagcatagtctaaaataggagaaaagacaccccttccatactaactataactttgaactttattgttttttatttagagacagggtcttgctctgttgcctaggcag

SEQ ID NO: 665243 - DNA, 496 bp, Homo sapiens
tttgccttttcataagcaactccaggtgaacaaattcaagaaaatgggtagttttttccaacagaataatttcagacaccatgacagggcttggataaattcatatggggctagaggaaagtttctttcttcctgaaaatacaaatccagaatgtgggtactctactcagtatatagtgttaaggctggccttggccaagaagcgtggatttggattcacaaccaaaagagggaaggaattaacaagttccagggaagagaagaggagaatgagtgaagaaggagggaacgtgccagtctttatcagctcttttgtacaagacagagtgctraccactttcatgtgttatcccaattaaggcgaacaagacaggcgccttgtcagggattctgctggggggaggatggtcacctatgctgaagaaaagggaaaggtcacggaggctccagcagcaggagtgaattcttttgctggttgtttaacctgattgactga

SEQ ID NO: 665244 - DNA, 591 bp, Homo sapiens
gcttggataaattcatatggggctagaggaaagtttctttcttcctgaaaatacaaatccagaatgtgggtactctactcagtatatagtgttaaggctggccttggccaagaagcgtggatttggattcacaaccaaaagagggaaggaattaacaagttccagggaagagaagaggagaatgagtgaagaaggagggaacgtgccagtctttatcagctcttttgtacaagacagagtgctaaccactttcatgtgttatcccaattaaggcgaacaagacaggcgccttgtcagggattctgctggggggasgatggtcacctatgctgaagaaaagggaaaggtcacggaggctccagcagcaggagtgaattcttttgctggttgtttaacctgattgactgattgctattatacagtcatcttcccctcacctgcacaatagaacaacttatgccagttgtgttaggatcagtaaataacaaaggattgagaaaagagttagaaatataaaatgaccttcataaagagctctaatgctaaacatgttaaacagacattgaactttgtagcaagaactgcttcaag

SEQ ID NO: 665245 - DNA, 591 bp, Homo sapiens
gcttggataaattcatatggggctagaggaaagtttctttcttcctgaaaatacaaatccagaatgtgggtactctactcagtatatagtgttaaggctggccttggccaagaagcgtggatttggattcacaaccaaaagagggaaggaattaacaagttccagggaagagaagaggagaatgagtgaagaaggagggaacgtgccagtctttatcagctcttttgtacaagacagagtgctaaccactttcatgtgttatcccaattaaggcgaacaagacaggcgccttgtcagggattctgctggggggaggatggtcacctatgctgaagaaaagggaaaggtcacggaggctccagcagcaggagtgaattcttttgctggttgtttaacctgattgactgattgctattatacagtcatcttcccctcacctgcacaatagaacaacttatgccagttgtgttaggatcagtaaataacaaagrattgagaaaagagttagaaatataaaatgaccttcataaagagctctaatgctaaacatgttaaacagacattgaactttgtagcaagaactgcttcaag

SEQ ID NO: 665246 - DNA, 578 bp, Homo sapiens
ttctagactagcctagaagtgagtgaatttattcattcatttaacaaatatattttaatcatcacccaygggtcaggtgcttttctacacgaactgttctacactaactgacttattcagaggtgactaagaaaacctctgctctctagaagcctagaagactgagatatcaataagtaattgacattctgcctggagcggtgcctcaggagaaataagtgtcaactatggaagcagcaccacagaggggccatttttaatagtgcagggagcccaaggtcttcatggtggaggaggagctatctgagcttgggagggaacccgaggtaatggtttgggctaaaaggcatttctggtgtggcaaattgcaaaggacacaggcagaagtggagggctggggaacggtgacaggaggtgaggctggagaggaagggagagcagaggcctcagatcccagaggactgccatcctgggagagccctggcaggagttttcaggagtgtgacagagactgcatcttcgagaagaattaccctggaggtggattaggcctgaggctgctgtgggagtgttccata

SEQ ID NO: 665247 - DNA, 578 bp, Homo sapiens
ttctagactagcctagaagtgagtgaatttattcattcatttaacaaatatattttaatcatcacccacgggtcaggtgcttttctacacgaactgttctacactaactgacttattcagaggtgactaagaaaacctctgctctctagaagcctagaagactgagatatcaataagtaattgacattctgcctggagcggtgcctcaggagaaataagtgtcaactatggaagcagcaccacagaggggccatttttaatagtgcagggagcccaaggtcttcatggtggaggaggagctatctgagcttgggagggaacccgaggtaatggtttgggctaaaaggcatttctggtgtggcaaattgcaaaggrcacaggcagaagtggagggctggggaacggtgacaggaggtgaggctggagaggaagggagagcagaggcctcagatcccagaggactgccatcctgggagagccctggcaggagttttcaggagtgtgacagagactgcatcttcgagaagaattaccctggaggtggattaggcctgaggctgctgtgggagtgttccata

SEQ ID NO: 665248 - DNA, 589 bp, Homo sapiens
gataggcgcaggcagcatgatttagaatgaaagaatattaattggtttcaccggagtgtatattttcattatgagagaagtgactacctagattttaaaaaataattggttggtgacacacctgcagtgtgcatgtgacctctagaaacttgagaacgaaagtaaaggtcaagatgagaggtgtagcaccacaacgagccttttgtaggcacgctgttgaacagcggcgttcaaaaatcgctaacaggtggtttcagaaagtcagtgatactaatgtgcttgtgtccagactttagaaatactacagcaaacttaaactgtggtttcagtaaattctccttaccttatgaacagcttcttctgtgtattgagtttacaaatgtgtctttagtgaatctttggacttagtttatgcattagagtataatcattatgctttgttctttgactatgagcaagctattttaaacaattaagtccatgcagtaatgtttagtcattgctagcggtggttaaatctcttggaaatggatctggctttgatcctagccccacwattatctgttacatgtgggacagtgactaagtt

SEQ ID NO: 665249 - DNA, 424 bp, Homo sapiens
tctaaatagtatacaaggttttgcagtatgatagaggttgaattgaaagtatataaactcttggaaatcttctggatgatatactccatggctttttaaaacttctctaatgaaagacaaattgtataaagcagaaaatattatattaaataaaaaatactcggttttgatctgttaatctgcagctcacccttgaacaacatgagggctgggagsccaaaccactctctcagtccaaaatccacatgtaattttgactgagcctaactactattagcctactgttgaccggtagccttattgatatcataaacagtcgattaacacatatttcatattttatatgtgttatgtactggatgttgtaataaagtaagctggaggaaagaaaatgttattgagaaaatcatgaggaagagaaaat

SEQ ID NO: 665250 - DNA, 598 bp, Homo sapiens
cttgtgactcaagtagaaagattccataccatgtcacaacctttcattcacagacgtgggaaaaattaacggcattagaaattaaacaaacagttaacttggtcccaactaggaaatagcatggtagtgacagttgatgatcagtgtaatgttgatctttgacccttgagccccataaaatttcatcctcttgtctctcagctgccttataattayagtgaatgtttccagttttcacagctcttgcttggtaactaactgtgtgtctaggcctgatttattttaattcccatgtcagttgctcagttgcagttcattccaaaggggacttaaatcaccattttttttgttgttgttggtttttttttcttttgttagctacaagcaagaagatcctggatcatgccagaggtttaaaagaagaagtgaagttcaacaagttcatgtcatattttaacatgttccagaatttctcacaggtctaccaaagtaagtggttggtgcattaactccttttggtcctgcttttgattttggataattttttttccctagacacataggcatttcagcatttcggctgtgagtacaaacaata

SEQ ID NO: 665251 - DNA, 598 bp, Homo sapiens
cttgtgactcaagtagaaagattccataccatgtcacaacctttcattcacagacgtgggaaaaattaacggcattagaaattaaacaaacagttaacttggtcccaactaggaaatagcatggtagtgacagttgatgatcagtgtaatgttgatctttgacccttgagccccataaaatttcatcctcttgtctctcagctgccttataattacagtgaatgtttccagttttcacagctcttgcttggtaactaactgtgtgtctaggcctgatttattttaattcccatgtcagttgctcagttgcagttcattccaaaggggacttaaatcaccattttttttgttgttgttggtttttttttcttttgttagctacaagcaagaagatcctggatcatgccagaggtttaaaagaagaagtgaagttcaacaarttcatgtcatattttaacatgttccagaatttctcacaggtctaccaaagtaagtggttggtgcattaactccttttggtcctgcttttgattttggataattttttttccctagacacataggcatttcagcatttcggctgtgagtacaaacaata

SEQ ID NO: 665252 - DNA, 637 bp, Homo sapiens
ggagactggatttagatattattctaattgtgatgggaagtcatttaaaatgctgtaacttagaagtgggcaggaaaaaaataacttggctcaaaggaagcaaagctttttggaagctggatatccacttgattattgggagtgtgggtgaatgttgagggtcacattggggaaaagcaggtagggccwtgctgcagttgcctatgtgtttatttaggtaccaaacctcaaaagacattttcatttgtgttgtaaacatattagagtttattacacacttcagtacaccttatacttttcaaggttttatgcttccaaaagtgacaaagtttcttccatttgtagaactccttttagtctgcatttttaaactggtagtctgctaaggattctatttttctgtaaatatatatgtcatcttcatttttggatatttttactagaattttataattctatattttcacttttgctcttttcatattctaaataagttattccatcatcttctggctttcaactattttgtttataaataaccttaatatcattattgctcttttgaaggtaatcactttttctctgactgattttaagatttttggatttttacagtttgattatgatgtactactga

SEQ ID NO: 665253 - DNA, 584 bp, Homo sapiens
atttaaaccatcaactttattgtttcaatcttgtaacatttctttctgaatatcctgtccaaaaagaaagtttttgccaagatttgctttactttcatataatctttggagcgttagcagtttcatatgagcttatcagagtgttatgaaagtgaactgtggtcatagtgttaaaaawttttttgagctattgctttatgctacttcaaaagcacaagaaagaatggtcttaataacaacaatgccaaagcaataccaacaatatcagtacaggtgtgtgattcctaatcaaagaaatctcttcactgtggataagggtgaaaatgtaattggaatgtttagttcaggtaatatgaggaattcccagcaaaaggaattgatttaaggtagtgcctatataagtcaaaaactaaagtcatctttctgtattcttttaccatctgccgtgaaattgcatcagtctttttcaggaaaaaaaaactggcacaaataaatctaagttcactgggaaaaagagtttgtgtttacgacagtgcccagtgtgctggtattgcttaataaatgtcaaatctgatggataatat

SEQ ID NO: 665254 - DNA, 624 bp, Homo sapiens
agggtcatcacaaacaagctgtgctaagggcagtcagacagggataaagtaaaacttagactgcaaaaatgttattaggaagtcagagacacctgatacacattcatatagaaatatatatayattgaaaaatatagtatctctagaattctaatcctgattatcaatactttattctgattatgttattttgacataaatgagatgacctaagaaaaacagcagcatcaattttccaaaccatacgactataagcctttttggttaacacaacaaagcagtctctgtactgtcctggctttctttcttatccacctgaaaatcttgacagaaaaacctcacagtggtaatctaaatgaagaatttgtttataatcaacatgttaattcagtttgcatcttggtacaggtggtcaagttacttggtagaatttcctctattaggttataatatgcttttgaaattacttttcatgtaagataaatgagttattttaaaatatattttcttcagtgaaactcgtgtctagaacaaaaatcaaaggatattttttccctcaaattatcctagagtaaaataataaatttgcttcagtgttatgtcaacacctagagatcatttaca

SEQ ID NO: 665255 - DNA, 624 bp, Homo sapiens
agggtcatcacaaacaagctgtgctaagggcagtcagacagggataaagtaaaacttagactgcaaaaatgttattaggaagtcagagacacctgatacacattcatatagaaatatatatatattgaaaaatatagtatctctagaattctaatcctgattatcaatactttattctgattatgttattttgacataaatgagatgacctaagaaaaacagcagcatcaattttccaaaccatacgactataagcctttttggttaacacaacaaagcagtctctgtactgtcctggctttctttcttatccacctgaaaatcttgacagraaaacctcacagtggtaatctaaatgaagaatttgtttataatcaacatgttaattcagtttgcatcttggtacaggtggtcaagttacttggtagaatttcctctattaggttataatatgcttttgaaattacttttcatgtaagataaatgagttattttaaaatatattttcttcagtgaaactcgtgtctagaacaaaaatcaaaggatattttttccctcaaattatcctagagtaaaataataaatttgcttcagtgttatgtcaacacctagagatcatttaca

SEQ ID NO: 665256 - DNA, 560 bp, Homo sapiens
tgaggatagaagctgtgtttctgttactcattaaggtatcaccaatgtgtagcactatgcatttaattagtaattcttgtctatatcactggatgcttgagtgaataaaagaatgtgttttttaattctacattatgaaggtttttttaattattttgagccaattaagacatatggccaaattgggtgaagctcagatttataagtaggctttctaacattattccattaataatttcaacattaaagttttggaaaaaaacacttactatacttttcatgactgttttaactgtaagaaggtattcttctacctctaatttacctctaatttagaccatcatgaatttcttatatatagttaaaatcaaactgaaaatacctctasaggaagtccttcactagaaggactagaattgatgtgtgtaatatgaaagtactagagaaatgttagggggaatagggtcaagagtttaacatttattttgtaatttcaactgagcaaccattctttattcttgagatcaaactgaaaatataaatcaaagaatgttaaaaga

SEQ ID NO: 665257 - DNA, 407 bp, Homo sapiens
tttacttttatgccttaaataattgggaaataatatttatataactattttaaaatatttgatgctaataaacagtgaaaaatcccttaatattttaaatgtgttctgaggcttagatttctttaaaaaattgttattataaattataatatctattaaaagctactacatttgcaattggactaccactctatactcctgatcctcctcttccctggtctaaccatagcacttgtcctctttatcacactacatcaattacttattctaatgtttattaatatggtcaatatcctccatctaggttataaatttyataaaggcgtgggttttacttttattcagtaatgtatcccaagcacctagaatatatgtctgatacatataaattctcaataaataattat

SEQ ID NO: 665258 - DNA, 563 bp, Homo sapiens
gatttttagtttcataccattgtgatcagaaaagatatttgatatgattttgatctttttaaatttgttaagacaagttttgtggcctaacatatggtctattctggagaatgtgctgtgtgcacttgtaaagaatgtgtacactactgctgttggaagaaatgttctatatatgtctgttaggyctattttgtctgaagtgtagtgtatctccaatatttccttactgattttctttctgcatgatccatccattgctgaaatgaagtattgaaatttcttgttttattgtattgccatctgtttctccctacagatctattaatatttactttaagtatttaagtgctccaatgtcaggtgcatatatatatatatataatctttatattttctgatgaattgacatcattatcagtatatattgacctactttgtctctttttgtagattttgacttaaaaattgattttctctaatatacatatagctatatctgccatctgcttttttggggagttccatttgcatggaatatctttttctatttcttctttttgtga

SEQ ID NO: 665259 - DNA, 618 bp, Homo sapiens
ttgatgggttccaaaactgggttcagataacactcctttgaaatgagtttggaatgtcacaatggaatctgcaggcttctcccaacaaaagagttttctaagttatcccaaagtaactccatcctttactttttctaggagaaaggattcccgtcccttctgtctccaaaattmttttcttaaacaggttatagtagagtaattatatcagaaaatgctatcccataaaaatcaattttgtaaacatttttacaaaagtcctctaaagggtaaacaaataataagcctcctccactttacagatgctaataatctaaattcatatttaagtacagtaaattgaggccccaaattgaggcttttgtactgatatgctgacacaatcttaaaccatttcaatgagaattatctaatcctatctttaagttatcaaagcaatcaaggtaatgataaaaataatgtatattgcttaaaatctaataatatgtaatagaaaaatcataattatttttcttataaaaattcaaagtaggtgatgatttttttctcaaccattatctatttatgtaactattatatactttgaattactaacaaattattagtagatgtttgtga

SEQ ID NO: 665260 - DNA, 574 bp, Homo sapiens
caccattgttatcaagaaccctcaaatggaaacaattcaaatatacattattggtagaatagaaaaaagctcctgatctattcaggcaatggaatagtaaatataacaatgrgaataaatacattgcaactacacacaacaacatggatgactcacaaaagttgatgttgagcagcagaaaccagaagcaaatgcacatttggtgagtccattcaaataaagtacaagacaggcaaaattaatctagatagttacaagttaacacaatggctactcatgaaaggtatagtgactccccatagtcactaactacataagcatattttttgagtaacagttattgaccaaatggtaaaatcagagtggccatgtattttatacaagtgtggtaggctgaataatggcttctcaaggtatccaaattctaccttcaaacttcgttaagtggatgggaccatggggagaagggtgctcccgaaatgctcatttgctggatgagctggatgatgctgttcttgtatgattccaggctaagattggacaaaagagaaacttgagctcaataagtagtcat

SEQ ID NO: 665261 - DNA, 574 bp, Homo sapiens
caccattgttatcaagaaccctcaaatggaaacaattcaaatatacattattggtagaatagaaaaaagctcctgatctattcaggcaatggaatagtaaatataacaatgggaataaatacattgcaactacacacaacaacatggatgactcacaaaagttgatgttgagcagcagaaaccagaagcaaatgcacatttggtgagtccattcaaataaagtacaagacaggcaaaattaatctagatagttacaagttaacacaatggctactcatgaaaggtatagtgactccccatagtcactaactacataagcatattttttgagtaacagttattgaccaaatggtaaaatcagagtggccatgtattttatacaagtgtggtaggctgaataatggcttctcaaggtatccaaattctaccttcaaacttcgttaagtggatgggaccatggggagaagggtgctcccgaaatgctcatttgctggatgagctggatgatgctgttcttgtatgattccaggytaagattggacaaaagagaaacttgagctcaataagtagtcat

SEQ ID NO: 665262 - DNA, 598 bp, Homo sapiens
cattagtctattatatctactatgatgccagtactacactgtttttcttactgtagttttgcaataattttgatatttggaagtatattcctttaacttttttctatattgttttgactattcagggcatctttataattcatatgattttgaagatcagtttttccatttttgaaaaaaaaaacaaaaggccattgaagttttgataaaaacaacattgaatctgtacaagtcttccattttagcaatattaagtctcccagttcatatacacaggaaatcatttaggtcttctttaatttatttcagcaatgctttgaagttttcagtatatccctcatttttatatctttccttttcaatttcatcaatttatttgtgtatttcattattcttttctgcaattttatgccaatcacctgcttgttctgcctctcattcagctcagtcaaakccgtttaccttctcagtttttcttcctatttaagcaaaggatttttttacagtatcatatgaaaatatttaaaattttatggtatatttttaattttagcctttacaaattatattttttaaaaataagaaaattacccataat

SEQ ID NO: 665263 - DNA, 628 bp, Homo sapiens
cattatgcaataatgaagttgtagtatttggacacattcaagaagctaaaaagcatattagtagtayataacagttgcagatagaaaataaaatgttaaaataacaagaattttaagcaaaagtgagttaatcgtataattttaggttagacagagtatctatcaggagtataacttccactctgagtaatgtcctgtgatgcttaatgaccataggtcaccagaaacctgtacagagtaatcgagaaatgtgtttctaaggagattctggtaggcattcaatttttcactgaaatccttctgcttgtaattagccataggggcagaaattagcctgcaagtaattgcacttgtaatgggttcactgagtaatacctttgttaccttttaactaaaatgaaggaacttctttccaattgtatgtgcaattgcctcattatgaagttcattactttcagcctcaatttgacaagtgaaaataatttttgggtcatattgtgaatgtgtgtagggcaaattctaaaaatgtacctatcccagttacctattgctgctgcattacaacttatctaaatttagagccttaagtaacaactatttactacgtgttaattgttctgtgattcag

SEQ ID NO: 665264 - DNA, 519 bp, Homo sapiens
tttttttcaaattgtttctatcagttattggttagtttcctaaccttcacacaattaacctgatgaggttatgaattcaattgatatgataatttagcaatatgcacaatcaataactaactagtgacttcagcagttctgctaraaaaagaaaaatgcctttcagcagaatcagaaagtccctgggtttcattccatgatacaaagtgactaattttgagcttattatcctcttactttcaattgtccaatactatcagaagcaatcgccatacacaggggccctggaattcacattctatggcagcagctgcttagattctagggcttcatcctcacgggtccaggttacatttcgcctaatggagtgttagtttcccttcctagtatataaattgggatctcattgtctcagaatgataaccaagtctcatttccaagataaaattgcagccagctaattcacccttggaaagcaatttttgtatttgttaggcttccttggttgcaagcaacagt

SEQ ID NO: 665265 - DNA, 390 bp, Homo sapiens
taccaggcccatagaaaatatccacaataaaccgtcacatacttccactgagcctaaatgttgccttagtccctctgttaatactgtggtcccrgcagcacttccaacagtgtgaacaagcacacaggtgaaaacttttctcatcctattttaggtcctctcatttctgttaatagactggaaaagattattgacattatttgttgtaggttcactatttcccaggcgctatgccaaatactgggactataaccacagcagacatagtacctgccctcaaggaacttccaagccatgaagaaagaagactgaaaaaaaaaaaaacctaccattacaatgctgctaaaatagtaatattgaaaaagcatagatgtatatacagagtaaaga

SEQ ID NO: 665266 - DNA, 390 bp, Homo sapiens
taccaggcccatagaaaatatccacaataaaccgtcacatacttccactgagcctaaatgttgccttagtccctctgttaatactgtggtcccggcagcacttccaacagtgtgaacaagcacacaggtgaaaacttttctcatcctattttaggtcctctcatttctgttaatagactggaaaagattattgacattatttgttgtaggttcactatttcccaggcgctatgccaaatactgggactataaccacagcagacatagtacctgccctcaaggaacttccaagccatgaagaaaraagactgaaaaaaaaaaaaacctaccattacaatgctgctaaaatagtaatattgaaaaagcatagatgtatatacagagtaaaga

SEQ ID NO: 665267 - DNA, 618 bp, Homo sapiens
agctcctcctactaccacaattctagtttcagcagaaaatgcatatgtactttctaaagctctaaacattctactggtttagtcttccagtatttattgcttatagatattctattatatacttacattcagctcctcaccaataaaaacgacaaattttagatcatttatgagcaggactaaaattgtttatgttagaattaatcactgaaatttcaaagtattacaaatcagtaaatacagcaaagaaaaagggtggtgaaaagtacatattaataycagtcacatttcaaaagtgtacactgaaagcaggagaaaaacaatggtaataccttctaaattaaatattggcaaaaaaaatttcttaacataaaattaaatgaaaaataaagtaagctaaagaaaaatggagagcatatttctattttttccattcataaacttgtattctacttatatcagtttattacacattcttaacaatgattaaaattgttcatgaaaatttcataagacattaaacaaaatagctatcatctcaaattatttccctattaactgtttttacagcacatttatgttaggtaagtatttttaaaaatcacaaaagcaaaatac

SEQ ID NO: 665268 - DNA, 618 bp, Homo sapiens
agctcctcctactaccacaattctagtttcagcagaaaatgcatatgtactttctaaagctctaaacattctactggtttagtcttccagtatttattgcttatagatattctattatatacttacattcagctcctcaccaataaaaacgacaaattttagatcatttatgagcaggactaaaattgtttatgttagaattaatcactgaaatttcaaagtattacaaatcagtaaatacagcaaagaaaaagggtggtgaaaagtacatattaatatcagtcacatttcaaaagtgtacactgaaagcaggagaaaaacaatggtaatacctyctaaattaaatattggcaaaaaaaatttcttaacataaaattaaatgaaaaataaagtaagctaaagaaaaatggagagcatatttctattttttccattcataaacttgtattctacttatatcagtttattacacattcttaacaatgattaaaattgttcatgaaaatttcataagacattaaacaaaatagctatcatctcaaattatttccctattaactgtttttacagcacatttatgttaggtaagtatttttaaaaatcacaaaagcaaaatac

SEQ ID NO: 665269 - DNA, 593 bp, Homo sapiens
ggctcacgcctgtaataccagcacttyggcaggccaaggcaggcagatcacttgaggtcaggagtttgaaaccagcctggtcaacatgttgaaaccccatctctactaaaaatacagaaattagccaggcgtggtggtgggcgcctttaatcccagttactgggaaagctgaggcaggagaatggctcgaacctggaggcagaggttgcagtgagccgagattgcgccattgcactccagcctaagtgacagagcaagactctgtctcaaaaaaacaaacaaacaaaaaaacaaaagaaagaaaaaaagaaagcaaacaacagataactttacaaagaataggaatcatttctgcccttctctagaggaaattgagtgacagctttgtataaaggaacatttccgaagctatagtccaaggtgtacacattgaaactgcattccacccattcatatgttcaggatattatgcctatggggtacctatttctacaacaaccttgtaaatactcccactgacagggctcagaacactcccaaagtacagtgtcttggcatgctgaactgaaaaaaggggctcagaagtaaaatct

SEQ ID NO: 665270 - DNA, 581 bp, Homo sapiens
cctacaggctcctgtaacatttttataagcaactaaaagaagattcctctcctaataaaaaaaaaattcagttccttgcttagttacagacatcatgcagtctttcgtgacaacatattgctcagcccatttggccttctgcaccgggatatttttacccatgactgaatgttctgtgtcagaagtggttggcggtagacgaatgggggctcggcaatctttggatggtgagagtcgcaaggctcaaactctgtccctagatcttgctgctcacayggtctgtgtttctattttcaatttgtggcaaaatgtataagaaagtgctatgaaaggaatattacttgtattatttcctcatcactaagttctttatagcagtttcttttcccttgtggaagagagttccaaacagagcctatgaatccctgaagaaattttagctcaggaaatgatttaaaaacaaaatccaaatccaatagccaaactgacttatgtttacctttagaagttttatagttctagactttacactgaagcctatgatgtgttttgtgttcatttttacatggttcaaagcacct

SEQ ID NO: 665271 - DNA, 580 bp, Homo sapiens
gcttttgtggcaaaaaaaattatgtcttcgacctaattatgctctttttctgttggtatatctttctagatgtttaccaatgtctaytgaaaatgtacattcctattgacataccaatggcctttcttagttagagctatgtataaagaactaagtacaggaatatgacttcaaacattgacgcaaatgccagaaattgggaaccacttaaaatttcaaatacaggggattgagtaaattgattatggtgcaaccatatcaaggaatacaatgaaggtattgaacctggtgtattagaactggatttattgacttaggataatgttactggttattgattttctcaaattgttatttgataataggtattaacaaaattaatgcataggttgatgtatttttaaataaaaatatatgcaaatctattcattcaatgaatatttactaagtattgacagttttccaggaattgtgctacgcactgggagtacaaagataagcaattatataattacatcttataaacacattaataaagtcaaaatttgaaggatacaaagaaaataatgaactggcaaaa

SEQ ID NO: 665272 - DNA, 409 bp, Homo sapiens
gtttctatctctgttccctgtttcacgtgatttctctctggcttaaatgttcctgttatggtttgaatggatatgtccctccaaaattcatatgctggaacctaatactcttttaggaagtgattaagtacaaatgttccattctcataaataaggttagtgcctttataaaagaatttgaaaygaatgccctagtccctcttctctttttgccctttctgctatataaggacacagtatttattccctccagaggatgcagcaataaggcaccatcttggaagcagtgtcctcatggttggccatggctgcagcatgaccatttcaccttcagctcatatccacattacaggccggaagagggggcaagggctgagaagtgtgttcaccatgtgtgccccttttcaaa

SEQ ID NO: 665273 - DNA, 559 bp, Homo sapiens
cgcttaaaacacttacattagcctacagttgggcaaaatcatctggcaacacagtacacttcagagtataatttgtttgcccttttgatcaatcactgactaactgggacctgcaactcggcttgctatccaacattgcaaaacagtgtcctaccacatattgctggcccagaaaaagatcaaaaagattttaaaaagtatggtttctactgaatgtgtatcactcttgtaccatcataaagttgaaaattgtaaatcaaactgttgtaagtcgtaagtggggattgtctgtatattctctattggctaaaaataataaatttctcacttttaatacaataggtttcactctcatctactgtattagttcattttcacactgctataaagaactgcctgagactgggtaatttataraagagagagttttaattaactcacagttctgcatggctgcagagggctcagaaaacttagaatcatggcggaaggtgaaggggaagcaaggcaccttcaacacaaggcagcaggaaggagaatgaatgcagaaggaactacc

SEQ ID NO: 665274 - DNA, 606 bp, Homo sapiens
tcacactctggggactgtcgtggggtgggggacgggggagggatagcattaggagatatacctaattgtaaatgatgagttaatgggtgcagcacaccagcatggcacatgtatacatatgtaactaacctgcacattgtgcacatgtaccctaaaacttaaagtataataataataaaagamaagaaaaaaaaattcccacaaagggatacctacaatataactttaattaaaaagttttgtttacacacttaaaaaaaaaaaaaggtaacattgatgaatcactggagacaacgtgtggactaaagtgagaatgagaaacttataggggttacagttttgggagatacccacactttcatgggtttttcttccaggaactccaccaggttctcatggtgaagagacaagaaaaacactcctgtctctgacaggaggttggaaaaatttaccattttttagtacccacagagtattttccataacaaaggccaatactccaaataaaaaggactttaccagagccttttctgatgtaagagaagtgaaattacccaattccaattctctacaatctctttcagaaaacagaatcagaggaagtac

SEQ ID NO: 665275 - DNA, 596 bp, Homo sapiens
atgtaagagaagtgaaattacccaattccaattctctacaatctctttcagaaaacagaatcagaggaagtacctcctaacccattctataaggccagaactatcctattaccaaaattatatagacaacagaagaaagccaatctctcatgaacatagacacaagaaccctccacagtatactgacaaactaaatccagcaatgtataataagaattwtgctccacaaccaaatggggatttattacaggtacggaaggttgattgtgcaattgaaaatcagttaatctaccacattaacagagtaaagaagaaaaagcatttgaaaaaacctaacacccattcatgatgaaaattcttaagccaggaatagagagcaccttcttcaccttgataagaacatctgcaaaataggtatagctgacattatacttaatggtaagaaactggatacttgccctctaagatgcaaaacaagggaagcatgtctcttctcatcactcctagtcaacatcttactagaagtcttagtataagaagaaatgttctacatacggggaagagagaaatgaaatggtttagtttacagatggtac

SEQ ID NO: 665276 - DNA, 612 bp, Homo sapiens
cttataatgctgggcagtcatttctcttactttcttgaactggatgcctggtggactttggtatacattctaccatcagggagattttctcagagaacataaatataaactgaaatatcaccactgtggctgtagctacttgagacagcttgctgtgttagsataattttgtgagtacctgggtgtcatgggaaaacttcaaacaatgtttttgtctagtagaaaacaaacatgtgcaaacaattctactataactcactagatccttgtttgaaagctccacttgtaatggaaccactataaaaaacacggatacccaaagaagaaattttttgacacacagaggagtcactgataacccacaaaacttgcactattttccaattttcctatctgttcaacccaaacctctacagggctagttggtcggtctgattttgataatttacaaagggcactctactgtattttcctctgccttgattaatctacaagacctctatcaggtaaatggaacacgagtaattcaaggactttttaagtgatacaaatattaggtagaacagtaaaatattatattgtatgtcaattttcatttgaccatagcagatg

SEQ ID NO: 665277 - DNA, 612 bp, Homo sapiens
cttataatgctgggcagtcatttctcttactttcttgaactggatgcctggtggactttggtatacattctaccatcagggagattttctcagagaacataaatataaactgaaatatcaccactgtggctgtagctacttgagacagcttgctgtgttaggataattttgtgagtacctgggtgtcatgggaaaacttcaaacaatgtttttgtctagtagaaaacaaacatgtgcaaacaattctactataactcactagatccttgtttgaaagctccacttgtaatggaaccactataaaaaacacggatacccaaagaagaaattttttgacacacagaggagtcactgataacccacaaaacttgcactattttccaattttcctatctgttcaacccaaacctctacagggctagttggtcggtctgattttgataatttacaaagggcactctactgtattttcctctgccttgattaatctacaagacctctatcaggtaaatggaacacgagtaattcaaggacttkttaagtgatacaaatattaggtagaacagtaaaatattatattgtatgtcaattttcatttgaccatagcagatg

SEQ ID NO: 665278 - DNA, 546 bp, Homo sapiens
aagaactataaatgttgtatagttccagctagaataatttttcataaattcatggttagataaaaatatagagaggatatttcttaagactccatggttgagtgtcttggtatgatggtatatggaagagcagataataagctatgtacacagggttttccctattgcatgtcatyatgaacctccttatccctgttgataaaacaaaccaaggctatattaatgcttgagataatgtctttgttcatattgtgctactataacagaataccacaggactgggtgatttgtattgaacagaatcttattggcttatggttctgggggctggttagtccaaaatcacgtgaccagcatctgggtagggcctttttgctgtgttatcccatggaggaaaggcaaagaaagggtaagagagaacaagagattgaacttgcagtctcatacccttttataatcagcattaatccattagagagggtgagccctcatggtcctaaacaccttccatgaggccccactttccaatactgttgcattgagaat

SEQ ID NO: 665279 - DNA, 564 bp, Homo sapiens
actgttgcattgagaattacattttcaatgcatgctttacgggggacatgtttaaaccataggatttagtatgtatgtttgggactaaatgtatacyaaattaaagaggtctcagatgttttgatttctaggattgccatatcttctcttaataactaaacacattaatcccacacctccacttccaatgttggagaaaggagaccattaagaagctaggtttgtcttgatggacaccagctaagagagaataaagtggtaccttactaagggatgttctatagtcaggagtaagttctttacaaatcccatctttacttgatcagatgatactcttactcagcattcatatcttcccattaaaaccatgaaactgaaaatcaacagtttctcccattctgtatcactgctattattacatcttttagtattaatattcatattaactctttcaattattaaatatttgctatgcagaagctttttagctttatgtagtcctacttgtttatatttgtgcttttggtgtcatatcaaaaaaaaccattccctggatcaatgtca

SEQ ID NO: 665280 - DNA, 576 bp, Homo sapiens
ccaaattaaagaggtctcagatgttttgatttctaggattgccatatcttctcttaataactaaacacattaatcccacacctccacttccaatgttggagaaaggagaccattaagaagctaggtttgtcttgatggacaccagctaagagagaataaagtggtaccttactaagggatgttctatagtcaggagtaagttctttacaaatcccatctttacttgatcagatgatactcttactcagcattcatatcttcccattaaaaccatgaaactgaaaatcaacagtttctcccattctgtatcactgctattattacatcttttagtattaatattcatattaactctttcaattattaaatatttgctatgcagaagctttttagctttatgtagtcctacttgtttatatttgtgcttttggtgycatatcaaaaaaaaccattccctggatcaatgtcaagaagcttttctcatgttttctctagtaatgttatagtttaaggtcttatatttaagtctttaatctacttacagttgattttttccatatagtatgtatgaattaa

SEQ ID NO: 665281 - DNA, 519 bp, Homo sapiens
aaaatctgtattgaaggatgtaggtcatgttatgtgagtttcagagtgacttccaggcaagcctttgaaaaccacccacttaggtacttcaggttgaattttaattgtcaacttctctgactttcaaaggtagctcccttaactttcagtagaagctttcttgacatctactccatgatctcttccaataatcctktaaacccaaaccagaatatatagagtggcttctgttttcttgactgaacataactaaaacaatgcatgctatacctctctgcaatcccagaggaccaattggaagcaaatttgaagtccaacatcttcatcaactcattccctcttttcatttcaccagaagctttctgaccttgaattaatgagaatagtgatgctgtatcactataaacatttttaaatttcaaattggatcttatttaaatttatctcttatttatgatttgttattttcattttacaaatagaagaattgaaatgccacacagttacatgaatgaccaa

SEQ ID NO: 665282 - DNA, 530 bp, Homo sapiens
ctgtctgatttgtgtattctgtattatacttcccactcagtagaatgtatacagtatacagtaacagatggtatttgaagtcatggatgaagataagattgtctggggatatatataggtagagaaagagatggggggaaaaaagaacaagagaagccattctagaatcccgagattcatgaaataacctcagtgaagggagcctgtgaaggtaccttcaaaaaaatattcagaatggtaggaagaaaagcaggacagagtggtgacacggaagttatggaagaaakaaagtattaagagtggctagctagtgttacagaaaggaaaagacagaaaatactttaaatagactatttgattaaaaacttatcagtgcctctaggaagaactgcctcaagaaggaagcagaatcaaacctcaaattaaagtgggttgaggtttgaaagggtaatgaaaaaacagaaacaagaagtatggaacactgtaactgtaactttgtttcaaatagctagaagaaagatattgaatat

SEQ ID NO: 665283 - DNA, 407 bp, Homo sapiens
gctatgaaagtcctagaagcaacccctttctaatagaaggcttgtttcatctacattgaaaatatgtttttttagcgtagcaccttcatcaattatcttagctagatcttctggacaacttgcatcttctacatcagcacttgctggttcaccttgcacttttttatgttacagagatggcttctttcattaaacccaatgaaccaacctctgttagcttcaaacttttcttctgtacttttttcactgttgtcagccttcatagaattaaagagagatgcagctttagtttaaaggaaggttttggctttgttgatcttctgtacagaccactaaaactttctctgtatcagtaataaagctgttttgcttatcatttgygtattctggagtaccactttgaattt

SEQ ID NO: 665284 - DNA, 564 bp, Homo sapiens
gcagtcttctgtctgtggccaaaggccctagagcccctggcaaagcactggtgtaagtccaagagtccaaaggcccaagaacctggagtctgaggtccaaggccaggaggaatggaatgaagcatccagcatgggagaaaagaaggaacccagaaggctcaacatgctagtttatcccactttcttccacctggtttgctctagctgcagtggcagccaattggatggtgcccacccacactgaggctgggttttcctctcccagtccatcaactcaaatgtcaatttcctctggtaacacactcacagacacactgagagacaataccagctatctaggcatccttcsatccaatcaagtgacacctaatattaaccaacacagtggttaattaatactgtcattgaaaaaactaaactatatatcaaaaacctgaaaattattgtacatattgagtcataaatttcacttttaggaattcatactaagggaaaaaatggtagatgtgcacaagcacatgttaaaatgcttcatcataaaggtatttataataaagtatataa

SEQ ID NO: 665285 - DNA, 493 bp, Homo sapiens
cagtcatttatcaatattataattatgttttttcaaaaataatattctaaatatttctcagttaagaacttcctaaaatgaagcagaaaatccttcaaatttttttgcagtaaggtttgcaaaatggtttttttgaggagggaggagcaatacatatgaaaatattagaactaagcaaaaggaagcttttactagttcttagtcccattgtgatataaagcagcagtccccaacctttttggcascagggagcagttttggtagcagagagatgggggggtgcgttagattctcataaggagtgcacaacccagatcgctcgcatgcacagttcacagtagggtctcggctcctatgggaatctaatgctcctgcagatctgacgggaggtggagctcaggtggtaatgctcactgggctgcctctcacctcctgatgtgtggcctggttcccaaaaagccgtagactaagggtccatggccaggggattggg

SEQ ID NO: 665286 - DNA, 575 bp, Homo sapiens
acaaaccatgattatcaattttgattagtattactgcatttttcactaaagcatcaaaaaagtcttgttttacttgaattagcattaraccaggcagttaaccattgtatatctgatcctacatttgcattgtatgaaaagagcatgacatcagtagactgataagttatggatggataatataatacctaaagcaaacactaaaagattatacaaagagatacacacaaaacattacagataagtagaaagtgaaattttaaaaaatgtttaagtatgccacaggaagacagaaaaatgatagagaacaaaagaggataaacagaaaaaaattataaacttgagccaaaacatatcaaaaattacattaaatgcaaattgtcaaaatataccagttaaaagaaagtatcagggtagattttttatatgactcattgatgtgctgtccacaagacattcacctcaaatataatgatataagcacattaaaacttaaaaatagaaaaaatacaccaatcaaaagagtttaaaagacatatgaacatttttttcagtgggccatgttaaactatagt

SEQ ID NO: 665287 - DNA, 554 bp, Homo sapiens
gaaaaatataaaaggtctggagggtgacaacagaaagaaaagaaaaggctggagaacatgagtttacttaacctccagaacagagtcaggacaaacaaagaacacttggtgaagacagagcaaacccagacacacggatatttaatcagctaaaagctacagcaatgtgaagctatataacaacactggccagccaaatacaaggttaaatgtgtttcaggcctagagcttagagctgttgcctatttcctggaagtttcaatctgaattttaaaataaatttgayatgaaagccagtcaagtcactgtatagacaagtaaagttagacttaactacccacttaggttttacacaaatattttaaaattattttaaaatagctgctcattgtttataggttgtccataggttgaccgataataataatgttttcacaaatgatttacttttacaaagattggatcatggtttatactacatatttcatgagagtaatacagtctatcttatctctattttgcctgcaaacaaaaacttaacatgcaagcataca

SEQ ID NO: 665288 - DNA, 613 bp, Homo sapiens
tcaattttataaaatctactttaaatttggctctatattatccaggtaatgcaatctagcctcttatagtcttaaggatttcaaaaatactaatttgccttcccaccaacagtgtgtaagtgctcccttttgtccttatccttgacaacgtccattattttgtgaatttttaatgacagcaattctgawaggtataagacagtagttttaatctgcatttctctgataattagcggtggtgagcattttttcatatgcttgttggtagtttgcatgtcttcttttaaaaaatgtctgttcattttctttgcccactttttaatggttatttgttccttgctgttgctgagttgtttgagttcctcattaattctggatattagtcccttgtggaaaacagtatgaagatttctcaaagaattaaaaaatagaattgccattcaatccagctatgacactactgggtatctaccccctgaaaaaaattatgtgcaaaagataacctgcactcacatgtttatcgcaacactattcacaatagcaaagacgtggactcaacctaagtgtccaacaatagataatcacagaaagaaaatataaaatgtatatacaa

SEQ ID NO: 665289 - DNA, 611 bp, Homo sapiens
ttgaatttttagtttttaaatctagtcaaagataccatattttattgatactcaattaaattagaatgaaaactaggaaccaacaagtttgaccctcatgcctctgaatctaattgtttgttgtagccttcacgagttgaaatctcacatttgttgagactaacaaagaaaaacatgaaagttgtgttttaatattataatattatagatgccctcaaaatgttatttaaaatgttaaaaatattctatgagcaacttaaagacatatttgaaaaatatttatgttaatatgcatatcagcagttagacaaaagaaccaaaatatattaacagtttacaatctcaactcaaaagatttcgttcaaaaactggtaaggaatggcactatgcttgaaattaactgtagctcttaggtatatmtagctctcaggtatatatacagattctcataaaatatttgggttcctgaagcttaggagtcctcttttgtgatgcaatccacagtgtgtgtacaggtgtcactgactctgtttatatcaccttgtgggaattggggctcagagaattggcataaaaatgttgatattcttgatactgttattgttttgata

SEQ ID NO: 665290 - DNA, 508 bp, Homo sapiens
agcagaatcacagagggggaaaaaagccaacaaactctgtgtaccctaatttgtttccttaactttcaaaaaatttattttattttcaattcacacctaaaaattgtgacagtaaaggacaaccaaatcttgtctttttctttaaggacatatttagccttgggttaactttctatttctgtttccttggaaacttgataaattataatgtcagctgtattaccagggaaggtttcttatggtaaaaatggccactgattgataagttacatttgacttgaagtatggatggtttaatggtraattgtctatatgtattgtgtacaacatgaagttttaatacatatatacacactgtggaatagctaaataaagctaattaacatatgtattacatcgtatgttttcttaactttgattaaaataaaataatttttactttgcgaaaataaagtttaagtgaaggaaaacttgaatttacattcaaaaatagtttgtggtgtaaatt

SEQ ID NO: 665291 - DNA, 538 bp, Homo sapiens
aatccccacatgagtttattgctgtaaaagtttataaaatgagaactgagtttaaagtactctgggatgtctaatatttaaggtattcatcagaagagaaagcagtcttttctgaggaaatccctgttcatcacagatatcaaagaattgctgaggttaagttcctggtaaaataaggacctaataaagaagtccccatgatatgaaattgaaaacaaaaaacaatacaataatattcagcaaaaattaactcctgaaactataagattaaaatgtattaaataaatatatcaagtatgtgtcaaaaaataaaagttgtggtaaaatattagttcagtacaagagtatttaagaaagaataaaaaagagtgcttcgaaattacagatagrtagatataacctgatatatataaacctgatattttgtcttaatttcaattatttttatatctattgatatatatcttcaattatatttataatatacatatatttatgtcttcaaatatatataaataattaagacagaatattagag

SEQ ID NO: 665292 - DNA, 387 bp, Homo sapiens
agacttaagagaagacagaaagacaactaaatggaatcagaaaaaacaatgaatgagaatattagaagtttaattaagaaatataaaccataaaaagaaccaaacagaaatcctggagctaaagagcacaatgacagaactgacgaaattgaactgataccttcaatagaaaacatggtcatgcagaagacagaatctgtgaactcaaaaataggccattttaaattagccagtatgaaaagtaagcaaaatagaattaaacaatatrgggcacaggactatcagacatcatcaaaagtggaatatatgcattatgaatatccaaaaaggacaaaagaaaggaaaggaacaaaaagattatggaagaaatagtggctgaaactttcc

SEQ ID NO: 665293 - DNA, 387 bp, Homo sapiens
agacttaagagaagacagaaagacaactaaatggaatcagaaaaaacaatgaatgagaatattagaagtttaattaagaaatataaaccataaaaagaaccaaacagaaatcctggagctaaagagcacaatgacagaactgacgaaattgaactgataccttcaatagaaaacatggtcatgcagaagacagaatctgtgaactcaaaaataggccattttaaattagccagtatgaaaagtaagcaaaatagaattaaacaatatagggcacaggactatcagacatcatcaaaagtggaatatatgcattatgaatatccaaaaaggacaaaagaaaggaaaggaacaaaaagattatgkaagaaatagtggctgaaactttcc

SEQ ID NO: 665294 - DNA, 608 bp, Homo sapiens
gtgggcgagtgcaagagttaaataaaaataactaaagggggactcagtcacgggggaggggcttcacttctgtgagttttatctccaggagcctgaccaggttctaacagtaaatattggaaagcagttttctcatgcttctgccaggttctatcagtaaatattggagagcagttctcccttgtttctgcctcagggatagaaagcagaaccatttggaaatatgccagagcactctgttcttaatatggtctgccctcaagagaaactatttaaccaaagcctaaagtgctaggattttatcagatcctaactggcatggggaaagagaaatacccaattccagcccattctagccacctaggtggggaaacacttgtgaagttcaaaatacagaagcatagcctcactaaaagacttgsaatactatgcagccataaaaaatgatgagttcatgtcctttgtaggaacatggatgaagctggaaaccatcattctcagcaaactatctcaaggacaaaaaacaaaacaccgcatgttctcactcttaggtgggaattgaacaatgagaacacatggacacaggaaggggagcatcatacaccggg

SEQ ID NO: 665295 - DNA, 608 bp, Homo sapiens
gtgggcgagtgcaagagttaaataaaaataactaaagggggactcagtcacgggggaggggcttcacttctgtgagttttatctccaggagcctgaccaggttctaacagtaaatattggaaagcagttttctcatgcttctgccaggttctatcagtaaatattggagagcagttctcccttgtttctgcctcagggatagaaagcagaaccatttggaaatatgccagagcactctgttcttaatatggtctgccctcaagagaaactatttaaccaaagcctaaagtgctaggattttatcagatcctaactggcatggggaaagagaaatacccaattccagcccattctagccacctaggtggggaaacacttgtgaagttcaaaatacagaagcatagcctcactaaaagacttggaatactatgcagccataaaaaatgatgagttcatgtcctttgtaggaacatggatgaagctggaaaccatcattctcagcaaactatctcaaggacawaaaacaaaacaccgcatgttctcactcttaggtgggaattgaacaatgagaacacatggacacaggaaggggagcatcatacaccggg

SEQ ID NO: 665296 - DNA, 606 bp, Homo sapiens
gttccttgtctctcatagcacctagtttataaatttacaaaaattgtttttaattattaaagagtacagtattttacttaatttgcatccctaaactttatgtttatatcactatgtctgatcagctttaggcattttcaattaattccctgatatctgagggttggtcaaaaaccatctctttctttcatcttaatagtattgttatgacttttaagttatttcatgttttttctgtaattacaaaatattgaatatttggttttttattatttcytgaaagtatatctggtcaacttactttgtaaggttaatatttaccttttatttgctgcctcccttctcaactgcaaatgcagttattcctatttttacttttacacggtcaagtatttgttacatctttataaatatcactaatttcacaaacatgtagtgtgctatgattgcatttttttctgatattttttctgatattttgtgtttcctgaaattttaaattctcattttaaaaaattagaattaacatatttatcatcttcttaagtcagcctatactttcaatgatgatataaacatctctgtacctctcttacttcttgattc

SEQ ID NO: 665297 - DNA, 606 bp, Homo sapiens
gttccttgtctctcatagcacctagtttataaatttacaaaaattgtttttaattattaaagagtacagtattttacttaatttgcatccctaaactttatgtttatatcactatgtctgatcagctttaggcattttcaattaattccctgatatctgagggttggtcaaaaaccatctctttctttcatcttaatagtattgttatgacttttaagttatttcatgttttttctgtaattacaaaatattgaatatttggttttttattatttcttgaaagtatatctggtcamcttactttgtaaggttaatatttaccttttatttgctgcctcccttctcaactgcaaatgcagttattcctatttttacttttacacggtcaagtatttgttacatctttataaatatcactaatttcacaaacatgtagtgtgctatgattgcatttttttctgatattttttctgatattttgtgtttcctgaaattttaaattctcattttaaaaaattagaattaacatatttatcatcttcttaagtcagcctatactttcaatgatgatataaacatctctgtacctctcttacttcttgattc

SEQ ID NO: 665298 - DNA, 606 bp, Homo sapiens
gttccttgtctctcatagcacctagtttataaatttacaaaaattgtttttaattattaaagagtacagtattttacttaatttgcatccctaaactttatgtttatatcactatgtctgatcagctttaggcattttcaattaattccctgatatctgagggttggtcaaaaaccatctctttctttcatcttaatagtattgttatgacttttaagttatttcatgttttttctgtaattacaaaatattgaatatttggttttttattatttcttgaaagtatatctggtcaacttactttgtaaggttaatatttaccttttatttgctgcctcccttctcaactgcaaatgcagttattcctatttttacttttacacrgtcaagtatttgttacatctttataaatatcactaatttcacaaacatgtagtgtgctatgattgcatttttttctgatattttttctgatattttgtgtttcctgaaattttaaattctcattttaaaaaattagaattaacatatttatcatcttcttaagtcagcctatactttcaatgatgatataaacatctctgtacctctcttacttcttgattc

SEQ ID NO: 665299 - DNA, 606 bp, Homo sapiens
gttccttgtctctcatagcacctagtttataaatttacaaaaattgtttttaattattaaagagtacagtattttacttaatttgcatccctaaactttatgtttatatcactatgtctgatcagctttaggcattttcaattaattccctgatatctgagggttggtcaaaaaccatctctttctttcatcttaatagtattgttatgacttttaagttatttcatgttttttctgtaattacaaaatattgaatatttggttttttattatttcttgaaagtatatctggtcaacttactttgtaaggttaatatttaccttttatttgctgcctcccttctcaactgcaaatgcagttattcctatttttacttttacacggtcaagtatttgttacatctttataaatatcactaatttcacaaacatgtagtgtgctatgattgcatttttttctgatattttttctgatattttgtgtttcctgaaattttaaattctcatttwaaaaaattagaattaacatatttatcatcttcttaagtcagcctatactttcaatgatgatataaacatctctgtacctctcttacttcttgattc

SEQ ID NO: 665300 - DNA, 606 bp, Homo sapiens
ttcacaatataagtatttgttattctttcagcgtccttttttaaagtcgtttggtctccttttcactcaaggagtcctgggactgtgaactgactcaagtctgagactgcactggggctgtgagtattctgtgtgattcagtcagatttctgttcactaggcctagagttttcctgcttaaacagatcaatttggactctgayaggctgcccaactatttcagttctaggaactctattgtcagctagccaaagccaaccacctctgaaagtaagattattctaaatgctgctttgctttgtgaaagtaaaagaagaccaaacaaacgagaaaaacaaagcctgtttactcagaacttgctgcagcaagagagccaccaactgtcacttccattttggcagagatgcaaatacaggcagaagagtggaaaagctttatagttgcagaaagggaagacttcagatatgccctggttggaggctattggcatgaggatgctatagggctaactagaagtgtggtatcctatgggattggttacgggtgcataattggttttctctggttggtcctaagttggaagcaggaacaaaaattagggaagct

SEQ ID NO: 665301 - DNA, 544 bp, Homo sapiens
ccaaccacctctgaaagtaagattattctaaatgctgctttgctttgtgaaagtaaaagaagaccaaacaaacgagaaaaacaaagcctgtttactcagaacttgctgcagcaagagagccaccaactgtcacttccattttggcagagatgcaaatacaggcagaagagtggaaaagctttatagttgcagaaagggaagacttcagatatgccctggttggaggctattggcatgaggatgctatagggctaactagaagtgtggtatcctatgggattggttacgggtgcataattggttttctctggttggtcctaagttggaagcaggaacaaaaattagggaagctgtcagttattgatcaattcttgaacattttcaggttcattgctcaagaatgtattgtttagtttcctggattatcattagsgataatgagctggcttcctgaaagtctgatttacagcaggttgcttcttgggctgcctattacagataaggggctggtttcctgggcagcttgctacaggttttagatcag

SEQ ID NO: 665302 - DNA, 601 bp, Homo sapiens
aatgcacactggatttcaaaaccttaggacaaaaacaataacaaaaaagaatgtaaaatatttcattagtaatttttaatawtgagtgtatgttaaactgatagattagatattattggttgaataaagtgtataatattaatttcatctctattttagtatttttaaatgtttatatgagaaaaaactgacatgtatttgacttctgttttatttatactgaacagcataattctagactttaaaggtgaaatttctattatctataaaatgaattctagtgaatttcttgtgaatgaatcaccatacccaagttctaacagtttttagtggtacttcttcaagaaatttcctttaaaaggtttatttagtattgagttgaaattaatatttatatattttcacaaattctatacggcattttttttttgctcatttcattttaacattggccaattatacaaatatgtcatggagttatttatagagcacttattaatgcagataatgtttattattttattcatgttagactgtcctagaaattgctatctttaaaattttattatgaccttgcttcaagatccccaaggtatggtgt

SEQ ID NO: 665303 - DNA, 622 bp, Homo sapiens
aaggtataaatttcattccttgtcattcaaatatttcttttaatttgactcaaaatttatgactttcaaatttgatcagatggctgaaatcatttcttatcctccactgaacttaatatggaattgaatgaatttctctttctttctcaggcagattggtttataacccaataccaaagctcttcaaatttaaattttgcccagaaaatagtcttaggtaaagagggaataatgtaaaaagtatcataygtatgtagtgaaaacattgagtgttttaaaattattctagtactggatagagatgaaaatataaacaaataatcttgaccagtaataaggtaattattctggaaaacaaaatgattgctgagttttacttttgtgtaatttttttttgcttttctaattacctttacatattttcaaaaaataattcactttaaaaacagcattacaaaaggagataggcataataatcaacaacaaacaataatatttacataagacaggcattcttcaaaagagtgtatatgtatcactcatttaatccccatagcaattttagatgttattgttatctctattttacagatgaaggaattaatgagcaggaaagaaaaat

SEQ ID NO: 665304 - DNA, 622 bp, Homo sapiens
aaggtataaatttcattccttgtcattcaaatatttcttttaatttgactcaaaatttatgactttcaaatttgatcagatggctgaaatcatttcttatcctccactgaacttaatatggaattgaatgaatttctctttctttctcaggcagattggtttataacccaataccaaagctcttcaaatttaaattttgcccagaaaatagtcttaggtaaagagggaataatgtaaaaagtatcatacgtatgtagtgaaaacattgagtgttttaaaattattctagtactggatagagatgaaaatataaacaaataatcttgaccagtaataaggtaattattctggaaaacaaaatgattgctgagttttacttttgtgtaatttttttttgcttttctaattacctttacatattttcaaaaaataattcactttaaaaacagcattacaaaaggagataggcataataatcaacaacaaacaataatatttacataagacaggcattcttcaaaagagtgtatatgtatmactcatttaatccccatagcaattttagatgttattgttatctctattttacagatgaaggaattaatgagcaggaaagaaaaat

SEQ ID NO: 665305 - DNA, 552 bp, Homo sapiens
gacttactacaaaccttatgactttagatgtgaccaggacaattcaggttatctgatttctagtttgttattctttctattactcagaaaatctacagtgaggcagtataaaaggaagaacaaagaaacgggaaggaggaaacaaggaagaaacaaaaccataaagtatctgaagagtacaatatgattactatgcaagtgttttaaatttwtaatttttcaactttactacttcttaaattcttcatatgaattctctcccacacctttaaactgactgaaacttgataaattcctgcttgcattgcagtagtctcacattccctaaaactgtgcttttatttaaacctagtaattatactatgaaccaatctaatcaatcctaaactaaatcaaacaatcctattatatggttaggttgaattttacattttatacagtatgttgagaagatgtgctttgacattacatttgcaacttcatatctgtatggtgctgtagaatggtcccataaaaagagcagaatgatgactggaaattacatttctaaaa

SEQ ID NO: 665306 - DNA, 552 bp, Homo sapiens
gacttactacaaaccttatgactttagatgtgaccaggacaattcaggttatctgatttctagtttgttattctttctattactcagaaaatctacagtgaggcagtataaaaggaagaacaaagaaacgggaaggaggaaacaaggaagaaacaaaaccataaagtatctgaagagtacaatatgattactatgcaagtgttttaaatttttaatttttcaactttactacttcttaaattcttcatatgaattctctcccacacctttaaactgactgaaacttgataaattcctgcttgcattgcagtagtctcacattccctaaaactgtgcttttatttaaacctagtaattatactatgaaccaatctaatcaatcctaaactaaatcaaacaatcctattatatggttaggttgaattttacattttatacagtatgttgagaagatgtgctttgacattacatttgcaacttcatatctrtatggtgctgtagaatggtcccataaaaagagcagaatgatgactggaaattacatttctaaaa

SEQ ID NO: 665307 - DNA, 552 bp, Homo sapiens
gacttactacaaaccttatgactttagatgtgaccaggacaattcaggttatctgatttctagtttgttattctttctattactcagaaaatctacagtgaggcagtataaaaggaagaacaaagaaacgggaaggaggaaacaaggaagaaacaaaaccataaagtatctgaagagtacaatatgattactatgcaagtgttttaaatttttaatttttcaactttactacttcttaaattcttcatatgaattctctcccacacctttaaactgactgaaacttgataaattcctgcttgcattgcagtagtctcacattccctaaaactgtgcttttatttaaacctagtaattatactatgaaccaatctaatcaatcctaaactaaatcaaacaatcctattatatggttaggttgaattttacattttatacagtatgttgagaagatgtgctttgacattacatttgcaacttcatatctgtatggtgctgtagaatggtcccataaaaagagcrgaatgatgactggaaattacatttctaaaa

SEQ ID NO: 665308 - DNA, 436 bp, Homo sapiens
gcttaaaattacagaaatttattatcttaaaatttttaaggttagaagcctcactgagctaaaatcaaggtgtgagcatgacagcattccttctggaartttgagcagaaaacctgttttcttaccttttccagcttctggaattgccagtattccttggtgcatggcttctgccttcatcttcaaagggagcagtgtagcaacttcaaatctgttttctctaactctgatatttaactccctcttatagagacccttgtgattacattgggctctcttgaataatttagaataatcttcccatcgcaggattcttaaccaaattacatctgcaaagtcccttttgccaagtaaagtaagatattcacaggtcctagggattaggactttgatatctttggggaggccatcattctgtctaccacatagatctttc

SEQ ID NO: 665309 - DNA, 436 bp, Homo sapiens
gcttaaaattacagaaatttattatcttaaaatttttaaggttagaagcctcactgagctaaaatcaaggtgtgagcatgacagcattccttctggaaatttgagcagaaaacctgttttcttaccttttccagcttctggaattgccagtattccttggtgcatggcttctgccttcatcttcaaaggsagcagtgtagcaacttcaaatctgttttctctaactctgatatttaactccctcttatagagacccttgtgattacattgggctctcttgaataatttagaataatcttcccatcgcaggattcttaaccaaattacatctgcaaagtcccttttgccaagtaaagtaagatattcacaggtcctagggattaggactttgatatctttggggaggccatcattctgtctaccacatagatctttc

SEQ ID NO: 665310 - DNA, 534 bp, Homo sapiens
aagtaagtgttacagttggcacctgcctatggaattcactagtcttactaaatcatttgaagatgctgacatgagagaatggagcaatagcctaatagaataccgaagactcaattacagcaccagttgaaagagaacatrctgaaaacttggtttatttttcaagatgccatacacatatgctctcaataatgaaggtatatgaatgataacattgaatgtcaatgaactaaactctctaatcaaaagacattaatggactgaatagatgaaaaaacaagattcaatgatctattgcttacaagaaacacacttcacctataaagacacacccagactgaaaaaaaagatgaaaaaagatgtttcatgtcaacaggaaccaataaagagaaagagtggctatacttatatcagaaaaaatagatttccaggcaaaaaatagaataaaagacaaagtagattatcatatattgatgaaggagtcacttcagcaagaggagataatgattggaactgtatatgcatccaacattt

SEQ ID NO: 665311 - DNA, 563 bp, Homo sapiens
aagaacacacaaaacctaaaattagtaggagaaaggaaatgataaatatcagagcagaaataaataaatttgaaatgaagaaaacaatacaaaagatcaatgaaacaaaaagttgactttttaagtagataaacaaaatggacaaaactttatatagactaagaaaaaaaaaagagaatgcccaaagaaataaaatcagagatgaaaaaagacactttacaattgatactacaaaaattcaaaggtttattagtgtctactatgagcaactatctgccaataaattgaaaaatctggaataaatggataaayttatagacacatataacctaccaagatagaaccattaaatccaaaacctgaacagaccaataacaagtaacacaattaaagctgtaataaagtttcccaggaaaaatagcctgagacctgttggcatcactgctgaattctaccaaacatttaaagaagaactaataccaatcatactcaactgttctgaataatagagaaagagagaatacttccaaactccttctagaaggccaggattaccctgatac

SEQ ID NO: 665312 - DNA, 380 bp, Homo sapiens
ccaaactccttctagaaggccaggattaccctgataccaaaaccagatgaaggcacatcaaaaaaaataaagctacaagccaataactctgatgaacattaatgcaaatattttcaacaaaatgatatttaatagcaaamcaaattcaacaataccttatacaatcattcatcattaccaagtctgatttatcccaggatgcaagcataattcaacatatgcaaatcaattaacgtgatacattatattaacaaattaataaaggacacaaactatatgatcatttcaattgatgccgagaatgcacttgaaaaagttcaacatcctttcataaagaccctcaaaaaagcagtataaaaggaacttacctcaatataatg

SEQ ID NO: 665313 - DNA, 379 bp, Homo sapiens
tagtgaagttgcagaaaacaaattaacatacaaaaatcagtagcatatttgtatgccaacagtggacaatatgaaaaagaaatcagaaggtaatcccatttataatagtcacaaataaaattaaatacctaggaattaaccaaagatctctacaatgaaaactataaacgctgatgaaaaaaattgaagaggacacaaaatataataagatattttattttcatggattggaagaatcaatattgttataaatgtccaaactacccaaagcaatctgcagatttaatgaaaaccctatcaaaataccagtcacawtcttcacagaaatagaaataacaatcctaaaatatgtggtaccacaagagacccagaatagcca

SEQ ID NO: 665314 - DNA, 605 bp, Homo sapiens
gacgggacttaaactataaagcttctgaacagcaaaagaaacaatcagcagagtaaacaaacaacccactgaataggaaaaacatcttctcaaacctatacatccaacaaaggactaatatccagaatgtacaaagaactcaaatmggcaagaaaaaatcccatcaaagagtgggctaagaacatgaatagacaattttcaaaagaagatatgcaaatggccaacaatcatatgaaaaaatgctcaagattactaatgatgctaatcaaggccacaatctgataccaccttactcctgcaagaatgtccataaaacaaaactggaaaagaaaaagggagaataataataataataataatagatgttggtaggaatgtggtgaaaagggcccacttttatactgctggtgggaaagtaaactagtataaccactatagaaaaccgtgtggaggttttaaagagcaaaagtagagaactaccatttgacccagcaatcccactactggttatctacctagaggaaaataagtcattatacaaaagagatacttgcacacgtatgtttatagcagcacaatttgcgattgcaaaaatatggaaccag

SEQ ID NO: 665315 - DNA, 605 bp, Homo sapiens
gacgggacttaaactataaagcttctgaacagcaaaagaaacaatcagcagagtaaacaaacaacccactgaataggaaaaacatcttctcaaacctatacatccaacaaaggactaatatccagaatgtacaaagaactcaaatcggcaagaaaaaatcccatcaaagagtgggctaagaacatgaatagacaattttcaaaagaagatatgcaaatggccaacaatcatatgaaaaaatgctcaagattactaatgatgctaatcaaggccacaatctgataccaccttactcctgcaagaatgtccataaaacaaaactggaaaagaaaaagggagaataataataataataataatagatgttggtaggaatgtggtgaaaagggcccacttttatactgctggtgggaaagtaaactagtataaccactatagaaaacygtgtggaggttttaaagagcaaaagtagagaactaccatttgacccagcaatcccactactggttatctacctagaggaaaataagtcattatacaaaagagatacttgcacacgtatgtttatagcagcacaatttgcgattgcaaaaatatggaaccag

SEQ ID NO: 665316 - DNA, 415 bp, Homo sapiens
acatctcatataatttctcataaaataatttcatagaaataataaaatgaaagaagacagattactagaaataaaagtaatgtttaattagggattttaatgattgaaaaaagcagtgtactttctgtcaaatgggaaaacttgtaaacaatttttaaagcagtagctaaaaaatgagaagaaagtgttaattarctcatattttgttaacagcacagaagcattttattttccattttctctaacatcaaatgtcttttagaaatattaacacatttactcattattatattgtggctacatatgacttcagctaatttatgtaattatagatagaaatacaaaatgattttatactgccaacaaatacaatttttctttaatttccaagaatagaatatataatgcataattt

SEQ ID NO: 665317 - DNA, 599 bp, Homo sapiens
tggtgtccatatgataaagcttaaacttagggtaattcagaagcactaccattaaatatttcacactgggctgggtgggagcagtggctcatgcctgtaatctcagcacttcgggaggccaaggtgggtggatcacttggagccagsagtttgaaaccagcctggtcaacatgtatttactaaaatacaaaatataatacaaaataagcccagcgtggtagcatgtgcctgtagtcccagctgctagggaggccaagacatgagaattgcttgaacccaggaagtggaggttgcagtgagcagagattgtgccactgcactccagcctgggcgacagagtgagactctgactcaaaataaataaacaagtaaacaacccaaaaccaaaacaacaacaacaaaaattcacactgaaaccaagagctattcatttaattattaacagcaataatgtaatcaaatttataatcataattagtatttaatgtatgaataattttggaattctattggaatcagatttttgttcatagcaaatacaataagtttttactgtacacctctgtttaatataaaatatttaattctatttctcatta

SEQ ID NO: 665318 - DNA, 599 bp, Homo sapiens
tggtgtccatatgataaagcttaaacttagggtaattcagaagcactaccattaaatatttcacactgggctgggtgggagcagtggctcatgcctgtaatctcagcacttcgggaggccaaggtgggtggatcacttggagccaggagtttgaaaccagcctggtcaacatgtatttactaaaatacaaaatataatacaaaataagcccagcgtggtagcatgtgcctgtagtcccagctgctagggaggccaagacatgagaattgcttgaacccagsaagtggaggttgcagtgagcagagattgtgccactgcactccagcctgggcgacagagtgagactctgactcaaaataaataaacaagtaaacaacccaaaaccaaaacaacaacaacaaaaattcacactgaaaccaagagctattcatttaattattaacagcaataatgtaatcaaatttataatcataattagtatttaatgtatgaataattttggaattctattggaatcagatttttgttcatagcaaatacaataagtttttactgtacacctctgtttaatataaaatatttaattctatttctcatta

SEQ ID NO: 665319 - DNA, 534 bp, Homo sapiens
attgtctttaatccagcaataatacatgtatttaagatgtgactgtttcctgaaattttttttaaagttcaacttcgtaaaaatgtcatccttagtaaatatttcactgattatgctgtaaatatgaatgagagaactaaaatgtagccaatggaagcttaagcgagggtacaagaaatgactcctcctgagatcaattgtacatcatggtgactatagttagtaacaatatattgcatacttttaaattgccaggagagtagattttggatattatcccaaaaaaaagtatgtgaggtaatgcatatgttcattagcttgatttagccrttccacgatgtaaacatacatgaaaacatcatgttgtgcacgataaatacatatacgttttgtcaattaaaaaacaaaaagaaggttgggtgcaatggctcaccacctgtaatcctagcactttgggaagccaagataggcagatcacttgagatcaggtactggcaatgccatttcaaaatactttgacataaaatttaaatt

SEQ ID NO: 665320 - DNA, 640 bp, Homo sapiens
tagtgatgttgagtattttaaagtatgttgttggccatttgtatttcttcctttgagaaatgtctgttcatatgcttttctcagtttttcatggggttgctwtttcttgagttgtttgagttttttaatatattctgtatatcagtcatttgtcagaagcataattggcaaatattttctcccaatctgtaggttgtctgtttaccctgttaacaatttcttgtgctgcatagaagcttttaagtttaattacataccgtttgtctagttttggtttcattgcatttgcttttgggtttttcattatacattgtttgcctaagccaatgtccaaataatttttcttaggttttcttccaggagttttatagtttcaggcctcatgtttaggtgtttaacccatcttcagttaatttttactgtggtaagagatagcagacaaacttcattcttcttcatatagctagccaattttcccaaaatcatttattaaatatggtattcttttccattatttttgtcaactttgtcaaatgtcagttggttataggtatatggctttatttctgggttctctgttctgttccattgttctatctgtctatttttgtaccaatatcatgctgtattagttactatc

SEQ ID NO: 665321 - DNA, 585 bp, Homo sapiens
tgtttgagttttttaatatattctgtatatcagtcatttgtcagaagcataattggcaaatattttctcccaatctgtaggttgtctgtttaccctgttaacaatttcttgtgctgcatagaagcttttaagtttaattacataccgtttgtctagttttggtttcattgcatttgcttttgggtttttcattatacattgtttgcctaagccaatgtccaaataatttttcttaggttttcttccaggagttttatagtttcaggcctcatgtttaggtgtttaacccatcttcagttaatttttactgtggtaagagatagcagwcaaacttcattcttcttcatatagctagccaattttcccaaaatcatttattaaatatggtattcttttccattatttttgtcaactttgtcaaatgtcagttggttataggtatatggctttatttctgggttctctgttctgttccattgttctatctgtctatttttgtaccaatatcatgctgtattagttactatcgctttttattataatctgaagtcagacaatgtgatgcctctggctctgttctttttt

SEQ ID NO: 665322 - DNA, 364 bp, Homo sapiens
ttgatgggcattgcattgttagcatactgaattgtataattataaataatttcagaaataatgttaaatgattcacactctgctagttttattttatccacaggtaccagccctatttctattctctttttgatcattgtatatttctaayctgtaactaaaagagtttggcaaattgcttatttataatagtatgacaagccaccaatcaaagtatctggcttccagaatcagattatcctaattctgtccactatttatttcgtggttgcagcggagtcccaggaacatacaatagcatggcaagaaacaatcaatgctaacacaagccacaaagataatcggaatggaatcagtggtttgc

SEQ ID NO: 665323 - DNA, 570 bp, Homo sapiens
ttctgttattcaaattgacattctgttttagataatgcatgtcttctctctagtcttaatatgcatattaagactatacacacacacaaatacacacacatatttgtctctcattttcagaggtttgttatgatgtctcttgacagagacttattttggtttatcctgcttgtgattttctcagcttcttaaaactataggtttaagccttttgccaaatttaggaaatgttctgtcctatgtttattttcrgcactcactcctttccttctcctctggggcaccaatgctttgcaagctagatgttgctttttgtcctattggtacatgaagattctgttcattttgtaactgtctattttctctgtgttgtcagattgggtaatttttattcaattgtcttcaaagtcaccgattctttcttctgtcatctccaatcattgagctacttagtgccgttttcattttggtaattgtatttttagttctataattaggctttctctacgtattttttcttttgctgacttttctactttttttgcttcattaatatttgtaatcgttctt

SEQ ID NO: 665324 - DNA, 583 bp, Homo sapiens
aaacagtttttgggtaaaaacagacttctgactcacacattattgctgccttacctctgtattggggtgtaaactcagtttctctaccgagatatgctaacacaaggtaagagasaaacaaggccaatttacactgccccattgcttcaagtgtgtgtgaaagagagaggaagagaaagataaaataagagagaaagagaacttttttttttaactaatatagtttagaagaagtcttttgcatgaaatttgacaagggaaagtgggtactgagccagtaggttcgaaagacagagaggagtacaaaaatactaaacaaattatattagtccattctcacactgctaataaagatgtacccgacactggttacatctttttttataaaggaaagaggtttaaatgactcacagttcagcatggctagggaagcctcaggaaacttgcaatcatggtggaagggaaagcaaacacatccttcttcacatggcagcagcaagaagaatgagtgcccagggaagggggaagccccccaaatcatcagatctcatgagaactaactcactaccatgagaacagcaca

SEQ ID NO: 665325 - DNA, 583 bp, Homo sapiens
aaacagtttttgggtaaaaacagacttctgactcacacattattgctgccttacctctgtattggggtgtaaactcagtttctctaccgagatatgctaacacaaggtaagagagaaacaaggccamtttacactgccccattgcttcaagtgtgtgtgaaagagagaggaagagaaagataaaataagagagaaagagaacttttttttttaactaatatagtttagaagaagtcttttgcatgaaatttgacaagggaaagtgggtactgagccagtaggttcgaaagacagagaggagtacaaaaatactaaacaaattatattagtccattctcacactgctaataaagatgtacccgacactggttacatctttttttataaaggaaagaggtttaaatgactcacagttcagcatggctagggaagcctcaggaaacttgcaatcatggtggaagggaaagcaaacacatccttcttcacatggcagcagcaagaagaatgagtgcccagggaagggggaagccccccaaatcatcagatctcatgagaactaactcactaccatgagaacagcaca

SEQ ID NO: 665326 - DNA, 579 bp, Homo sapiens
atctctgggaggaaattgatttgtccatatggctgaatgatcagataatggaatttataagactcttggggaagcaactgaaatagaaaatatcgtatactactgctttacagcaagactcctaggagcctaaattttccaaataaatcatacatgccctcttatatagaagcacttaacactgaaaaaaaaaaaatcacttctagtcttcgaagagaacattattaataacaacggcatcaatgattcctcagtttaagtaacaaaataatattcgtgatgacactaatatacaatatttctgtgacgatttcatgaaaaaataacatgaaaatatttagtaaactgcaacttattattgtaacacacactaattaggaatttttctcttctccataacttgccactaggatataaagctgaaaaaataaaaataatgyacactttggggactcctcagctcatccaaaggcagagcacactaacttaacaacatctttcaatggcagacaaaaaaaaacaaatgcataagcatgtttacagtgccgtttttattgtttccccaaagtaatccaacac

SEQ ID NO: 665327 - DNA, 578 bp, Homo sapiens
agtcgtccctcttctatggaacaaatcgagggtttcaaaatagctctcataaaggtctaaagttggtgtaccaagagaagaatataatcttgctctacatttggagttttagtgaactcttgaagctctgtgtcaaagtttcttaacccttgcgctgttgacattttgactggaaagtgttgtggagggctgtgcattgtacagattaggagaaaaactcttagagtttgtaatgttgagcagcatccctggcattacccactagataccatagagccattcttcccctagtcatataccaaatatgcctctaggcattgccaartctcccatagaaggcaaagttgctttcagttgagaattactgctcttattccacataattctgccaattaaacagagtgcaaagtgtgaggagatttagaaaacataagtgaacatagacacaagttgtaacctgaagcagagagattaaaaaataatgtactattggtcctcagtatctgtgagtttcacgttcatggatttgaccagctacagataaaaaatattcattaaaaaatgaatcgttgtgtcca

SEQ ID NO: 665328 - DNA, 473 bp, Homo sapiens
aatcctttacctcttgatgaaaagtagaaatgtgaatattttcttttttaatccaatagtttttcagtctgcaaataagacaaaagagagaacaagctttctttttgtaaacaaaactgagtagacttttcacagaataaagtctatcatcaactatagcttcaaaagcaaagctctgtcaaaatgagtacccaatttaatygggccaataagttattttatggaaatttagggttctaacgtcatgtcaaatagtaaaagatattgcactttggggtaggtagataatgaatcttgtctgcatattttgaatgtgctctttaaatcatcagattttaaacactttgtttttcctatttcaaattcagtagcaaaatcaaactgtgcaattgtaaaattacttctaaggctgaaaatgtattccaatttttatttgcatcagctaaataaaaatgcttttctaatcacttaat

SEQ ID NO: 665329 - DNA, 473 bp, Homo sapiens
aatcctttacctcttgatgaaaagtagaaatgtgaatattttcttttttaatccaatagtttttcagtctgcaaataagacaaaagagagaacaagctttctttttgtaaacaaaactgagtagacttttcacagaataaagtctatcatcaactatagcttcaaaagcaaagctctgtcaaaatgagtacccaatttaatcgggccaataagttattttatggaaatttagggttctaacgtcatgtcaaatagtaaaagatattgcactttggggtaggtagataatgaatcttgtctgcatattttgaatgtrctctttaaatcatcagattttaaacactttgtttttcctatttcaaattcagtagcaaaatcaaactgtgcaattgtaaaattacttctaaggctgaaaatgtattccaatttttatttgcatcagctaaataaaaatgcttttctaatcacttaat

SEQ ID NO: 665330 - DNA, 565 bp, Homo sapiens
tattttaatatctgtattagtcaaggactgtattagtatgtatacagctattagtctctagagaaacagaattaatagcatatatgtatatataaaagggagtttattaaggataactgacttacagggtcacaatgtaaagtcccacgataggccatctgcaagttgaggagcaaggaagcaagtggtaaattagttcaaatcccaaaacttcaraagtaggaaagccaacagtgcagccttccatctgtggtcaaaggttggtgagaccctcgcaaaccactcaagaatccaaaagctgaagaacttggagtataatgtttgagggcaggaaacatccagcacaggaaaaagatgaaggctggaagactcagcaagtcagcttattctaaccatactggcagttgattaggtggtgaccacccacgtggagggtgggtctgcctctcccagtccactgattcaaatgttaatctcctttggcaccacccttacagacacacccaggaacaatattttgcatcctttaatccaatcaagttgacactaatattaaccatcacaa

SEQ ID NO: 665331 - DNA, 565 bp, Homo sapiens
tattttaatatctgtattagtcaaggactgtattagtatgtatacagctattagtctctagagaaacagaattaatagcatatatgtatatataaaagggagtttattaaggataactgacttacagggtcacaatgtaaagtcccacgataggccatctgcaagttgaggagcaaggaagcaagtggtaaattagttcaaatcccaaaacttcagaagtaggaaagccaacagtgcagccttccatctgtggtcaaaggttkgtgagaccctcgcaaaccactcaagaatccaaaagctgaagaacttggagtataatgtttgagggcaggaaacatccagcacaggaaaaagatgaaggctggaagactcagcaagtcagcttattctaaccatactggcagttgattaggtggtgaccacccacgtggagggtgggtctgcctctcccagtccactgattcaaatgttaatctcctttggcaccacccttacagacacacccaggaacaatattttgcatcctttaatccaatcaagttgacactaatattaaccatcacaa

SEQ ID NO: 665332 - DNA, 600 bp, Homo sapiens
cttccatctgtggtcaaaggttggtgagaccctcgcaaaccactcaagaatccaaaagctgaagaacttggagtataatgtttgagggcaggaaacatccagcacaggaaaaagatgaaggctggaagactcagcaagtcagcttattctaaccatactggcagttgattaggtggtgaccacccacgtggagggtgggtctgcctctcccagtccactgattcaaatgttaatctcctttggcaccaccctyacagacacacccaggaacaatattttgcatcctttaatccaatcaagttgacactaatattaaccatcacaatagcttagtagattttaatttaaaacaatataaattatttaattaaaaatcaagttggagttagaagattgtaaatcacctagtcaaatttatctatgtatacaaaatatcaaaaaatgtagtcttttggcaaaaaatatatatatgatgtgtttcatgcagaacacatctctggatttaaattttatcagccattatttgtttatcttcaaatcacatttatgctaaatgaaaattgataattttattgagttttgtacttaaatattaaaata

SEQ ID NO: 665333 - DNA, 600 bp, Homo sapiens
cttccatctgtggtcaaaggttggtgagaccctcgcaaaccactcaagaatccaaaagctgaagaacttggagtataatgtttgagggcaggaaacatccagcacaggaaaaagatgaaggctggaagactcagcaagtcagcttattctaaccatactggcagttgattaggtggtgaccacccacgtggagggtgggtctgcctctcccagtccactgattcaaatgttaatctcctttggcaccacccttacagacacacccaggaacaatattttgcatcctttaatccaatcaagttgacactaatattaaccatcacaatagcttagtagattttaatttaaaacaatataaattatttaattaaaaatcaagttggagttagaagattgtaaatcacctagtcaaatttatctatgtatacaaaatatcaaaaaatgtagtcttttggcaaaaaatatatatatgatgtgtttcatgcagaacacatctctggatttaaattttatcagccaytatttgtttatcttcaaatcacatttatgctaaatgaaaattgataattttattgagttttgtacttaaatattaaaata

SEQ ID NO: 665334 - DNA, 642 bp, Homo sapiens
gttttgttgttgttgttggaagacacttaattactcatgtaaattataataatagtaccatttagttttctgttatacaattttgtcatttacacttttctaggaaattgcaaattattagccaattgtattaaaatratttacaaaagattattctaaaattcttattttatatttttagtgtctctggatacactgatgtaatctaatatattaatatattgatataacctatatgtattatttttataattatttatgtgtagcttttttatttattacttcagccagatgtatttttttattgttattttatacatttttatacaggaaattttttggttatattcttttattagagttctccagagaaacagaatcaataggatgtacatacatatatgtaaatatatagacataaatatagatttattgtaaggaattggctcatgcaattataaagtcttctaagtcctaagatttgcagttggcaaatgggagacacaaaaaaagcagatagtatagttccagtccaaaggccagcaacacaaacaaaaaaagaaaaacaatgtctcagctcaaagacagtcaacaggtggaattcccttctactcacaggaggaacagctttttgctctattc

SEQ ID NO: 665335 - DNA, 642 bp, Homo sapiens
gttttgttgttgttgttggaagacacttaattactcatgtaaattataataatagtaccatttagttttctgttatacaattttgtcatttacacttttctaggaaattgcaaattattagccaattgtattaaaatgatttacaaaagattattctaaaattcttattttatatttttagtgtctctggatacactgatgtaatctaayatattaatatattgatataacctatatgtattatttttataattatttatgtgtagcttttttatttattacttcagccagatgtatttttttattgttattttatacatttttatacaggaaattttttggttatattcttttattagagttctccagagaaacagaatcaataggatgtacatacatatatgtaaatatatagacataaatatagatttattgtaaggaattggctcatgcaattataaagtcttctaagtcctaagatttgcagttggcaaatgggagacacaaaaaaagcagatagtatagttccagtccaaaggccagcaacacaaacaaaaaaagaaaaacaatgtctcagctcaaagacagtcaacaggtggaattcccttctactcacaggaggaacagctttttgctctattc

SEQ ID NO: 665336 - DNA, 558 bp, Homo sapiens
acttcaggaataagagtttgatagcaaataacccagtagcagtgagaaatggaagaacaagaacatgcctatttagtagagtacttcattacgttgaagtttctaactacaaggaaatggaaatgaaagtgtaattctamaactaattgtgtatgctagtagtagcttaagaaaaatatattatttcatgaaattgcttaccttcaggttgccttttccaactttttaaattggcacttacagtatgctaaactaattgtgaggcacaattaaagactccagatgtgactgtgatttagcttgatgaaagaaattgtgagacattgatcattgatgctaatttcctacattctgctcaaatcttggcagtaacatgagtaaatcccacacaatgttgctgtaccatattaatttttgttcttactttactcaaatatccacacatttaaaattaatagatttcttcagataacaacaaatagaggaatctatcaatatatatgtggtttgtctgaacaagagtcatatacctagaataaattagtaatagcaactgat

SEQ ID NO: 665337 - DNA, 593 bp, Homo sapiens
aattgacaccaacagctgccctcatggagatttcactcaaggaagtcataactgccacataaacagttccctttgctattgaattagataataattattcttgtgttcaaaactatacaattttatgaattttctacccatatacttaccatttagcattcacaagaagacattatttttccgyctttcaactgataaaagttatacagtaaaattgtaataagcaagcaatgaaatatacttttctccaatattcttcttttgtttaatcctgagagtaactgacagattaaaaaccctaataatataaagaaataattaggatgcaacatgggtaaactggaaaacagtttacccatgctaagtgaaacaagccaggcacaaaaagagaaataccgcatgtgcttttacttacatgtgggagctaaaaaactttagaatgatggctaccagagggttggaaagagtagtggggagggagggataaagaaaggaagaaggattagttaatgggggcaaaaataaaatgagaaagcaggaataaggtctaatgtttgataatacaatacagtgactatagttaacaataattg

SEQ ID NO: 665338 - DNA, 593 bp, Homo sapiens
aattgacaccaacagctgccctcatggagatttcactcaaggaagtcataactgccacataaacagttccctttgctattgaattagataataattattcttgtgttcaaaactatacaattttatgaattttctacccatatacttaccatttagcattcacaagaagacattatttttccgcctttcaactgataaaagttatacagtaaaattgtaataagcaagcaatgaaatatacttttctccaatattcttcttttgtttaatcctgagagtaactgacagattaaaaaccctaataatataaagaaataattaggatgcaacatgggtaaactggaaaacagtttacccatgctaagtgaaacaagccaggcacaaaaagagaaataccgcatgtgcttttacttacatgtgggagctaaaaaactttagaatgatggctaccagagggttggaaagagtagtggggagggagggataaagaaaggaagaaggattagttaatgggggcaaaaataaaatgagaaagcaggaataaggtctaatgtttgataayacaatacagtgactatagttaacaataattg

SEQ ID NO: 665339 - DNA, 596 bp, Homo sapiens
tgaacaaaacaaaacaattaaagaaaaataatactagttgataacaaccccagaagtctgcttctgaacccaagccatgtcaacgatcttcatgaaaaacagtgggcactaacttattattatgctgaattctgtgttggttttaaaattgtgtgttgtttaaaaaaaaggcaaatgggctaattcaaacatattttttggattaataaaagaatcaaaacatttaacataataataaaagttaaaaatgaatatacactatgaccaagtaatccctattgtgcaatccataccaatatacatatatatatacatattatatatacataatatataaatatatataatgtataagttcaaaacattacattgttaaataaaataattagttttcactgtttctgcaactgaaatttttttcatgatactttgcgatacaycaaaaagttgtaaacaaatgtaagtaatataagcttaatgttatgaaaataaaatcagagcaaacaaagtgaatatatgtgtgcatctataaatacgtgtgtaaaagcatcagaagaaaacccacataattaagtcaggttggaatttcagctaat

SEQ ID NO: 665340 - DNA, 621 bp, Homo sapiens
atactaattaggtaaaggcaaagatgaatagatcaataatmataataaaaagtctagaaacaaagatagttattgtcaggaaccagacaagaaaatagaaagcactccaggtatttcaaacacaaatgtctcaatacagagaagtggttacaaggtgttgtaaggtgtagaagaagaaaaaagagaatgaaatgtcagccagagagtccaaaattaagaatagtgatgctcttctggatggattttattatctactgcctgatgctgcattgttagaggtgctgtttcagtcagttctgatatcactgaaaagattctgccgagaacagacccataccatgctgcctttgcctgtgctccatggagtctggagaccctgtacactcactgccattccagtaactgcctataactgccagaagcaagcatcttctttctttctctcgccttctgattatttccagtgtattttaatgatagagtctaaagcaaacccctagcaaatgagactcaaaactgtattttgaagaaccccaatctcagcaatatagggtagagtataagagaatttgggacacagtgaatacaagcatgctccacaattcaaattagtagcaaaag

SEQ ID NO: 665341 - DNA, 621 bp, Homo sapiens
atactaattaggtaaaggcaaagatgaatagatcaataataataataaaaagtctagaaacaaagatagttattgtcaggaaccagacaagaaaatagaaagcactccaggtatttcaaacacaaatgtctcaatacagagaagtggttacaaggtgttgtaaggtgtagaagaagaaaaaagagaatgaaatgtcagccagagagtccaaaattaagaatagtgatgctcttctggatggattttattatctactgcctgatgctgcattgttagaggtgctgtttcagtcagttctgatatcactgaaaagattctgccgagaacagacccataccatgctgcctttgcctgtgctccatggagtctggagaccctgtacactcactgccattccagtaactgcctataactgccagaagcaagcatcttctttctttctctcgccttctgattatttccagtgtattttaatgatagagtctaaagcaaacccctagcaaatgagactcaaaactgtattttgaagaaccccaatctcagcaatatagggtagagtataagagaatttgggacacagtgaatacaagcatgctccrcaattcaaattagtagcaaaag

SEQ ID NO: 665342 - DNA, 395 bp, Homo sapiens
aaataagaagtgagaatcttttcttataaattatttcccaggaacaaatattgaaactgaatgagtagtcacataattatgtaattaraccccaaatagccactactttgcaagtggccaacagaatcataatgagctgcaatatgtgttatgcaaactaaaccctgttaaagaattgggtttgaagaagaattgaagactcaaggataccatatacttatgaggtgcaataataataataataataataataatccagttctctttttttactcttgggtcaaaaacaatcattttttcacctgtaacatgaaatcaaatttcaatgaatctaaatgtataatcaagcatctccaggaattttgggtattatgatgaagattaacttggataaa

SEQ ID NO: 665343 - DNA, 457 bp, Homo sapiens
ctcatgatctccaaagtgttctggtttggacaataaattatatggccaccttatctatgattcttaatacagctgacgtattcttttttcttttcatttttaacaaacattgtaaattgctggtgtatgtaacaaataagagtcaacgaaatgttatttttgtcattaagtatttaattactatgcctctatgttgtagaatttttgtctaatgattttttgtggaaaaatattttccattatcaataactcatttattattgttttcctttaaatatttttttaaactccacacaatcttaatatgcagaataagcagctactttagggttaaagtgcatatagacaggcagaatcatctrtgttagaggactggagcactgctaaccatgtttcatcctggggtgtttaaatgaaccttggagctctcaagccctaatttgaatttcaatgtgcc

SEQ ID NO: 665344 - DNA, 630 bp, Homo sapiens
tactcactagctgttcatgaaggagaaatcagagtcttagatatctaaagtgatatataaaatgattagtcatacataacttagtgtgagttacaaatgtgtctacttaaattaatgagaaaatgacaaaataaagtgccaaggaagatgatctgaaacattcttacacttttatcattgttgaacaactgttttacttgagagtcattctgaagaatattcaattagttcttcttgtgtgatcaaatgtaatccttccctttccagaccaaaaaaaataaataaataaataaaatctccctatctagtaactgttttctgtagctttgataaaagctcaattcttgatctgacattcagattcattaaattcaaactttatttacatagcttcttcctttcagttagggaagagacatgtatttttaaatattatctttgagagtggggataatttggcyggtgaaagcttttttggcttttggaaaaatcctaatagcaaatataatgctaacaattactatacaaaatggggaaaaacaaataaaaccaaaaacctatcagggaaaaattagttccagaactaattttgtaacagaaataatgtaataaaacaacctccaaaagttt

SEQ ID NO: 665345 - DNA, 570 bp, Homo sapiens
taggtgaaatcaaatgtaaaaatgctaaaatccatattagatttgactggaaacattttgaaatataatatatttaatcatctgtaaagataaccttaaaatgagcaatcatgaaggtatgaaatgaataattttgacatcaatgtaacacttaagtcatctaggagtgatattagtctagcctcaacatcttcactgagtaagaaacatcacaggaaaacatatgaaaatttgaaaaataaggctctaatccactcagaacttttgtgtcagatactctttatagtttaaacagcctcttcttatgctatatattcctgcctaggccacaatattcasgtccagtctgagctgttcattgggcaatgtctgatacattctactctcactaaacctctctctttaaatcactgcaccacatacagacatacagttttaggtgtgccgatttgatacttttttggtggaatactctgtggagcctatagaatgtcatttaaaaaaactcttattaatatattttgtaaaatatcaagagcaaaaggacatgctaatgaagtgctggtgcta

SEQ ID NO: 665346 - DNA, 588 bp, Homo sapiens
ttctcatttatgtaaatattaccagaaagtaaattggctctactgtaayattgaagctatttaatcagtttttaacaggtgctatggactgaactgtgtctctctaaaatttatatgttgaatccctaacctccaatgtgactgcattcagagacaatttttttaggaggtagttaaggttaaataagctcatgagattgggaccctaattccatatgactggtagccttatttataaaagaggaagaaaaggagatctctttctctctgccttgtgaggacacaggaaacaagaggtggattgcaagccaggaaacagccctcaccaggaacagaatcatcaggcaccttgagcttatttttcccagcctccagaattgtggaaaaagaaatctgtggtttaagccacccagtctatggtatttgttatggcgacttgagctgactatcgcaatacatatataaagaatatggaaaaataaataaatatttaaatgtggtttaagtgaataatagacaatataaagcattcatgaaggcttataattttaatttctgaaatgtttcattagagaaagatttgtttct

SEQ ID NO: 665347 - DNA, 542 bp, Homo sapiens
aatatagaagttactcttttactaatgaattattttctaatgaatacaattctttataaattatttttctatgaataatattcaattccatttttaaaattttattcaattaatcaatatttatccagcataatcaaatagataattcctaatgtcaagatgcttataatctattgacaatagactatggatcaatatatgctttgtaaaaggcaagcagttgccttttaattgtttataaactttttttgtctgaaatatgttttyaattataacccagttaaattgatctacctttttcatcacgcttgtgaatttggtatctgatttagcatatctttcaatatactgacatattagagatataatctactccaaaattagaaatgaaaaactaatttattacaaaatgttacaaaagtagaattttctagagtcaccaggaaggttagaaaataaagttctaagatgttcctagcattttcgcgttccatctacatgtcgtggctttacctgatttcgatggctgcaattctctttga

SEQ ID NO: 665348 - DNA, 542 bp, Homo sapiens
aatatagaagttactcttttactaatgaattattttctaatgaatacaattctttataaattatttttctatgaataatattcaattccatttttaaaattttattcaattaatcaatatttatccagcataatcaaatagataattcctaatgtcaagatgcttataatctattgacaatagactatggatcaatatatgctttgtaaaaggcaagcagttgccttttaattgtttataaactttttttgtctgaaatatgttttcaattataacccagttaaattgatctacctttttcatcacgcttgtgaatttggtatctgatttagcatatctttcaatatactgacatattagagatataatctactccaaaattagaaatgaaaaactaatttattacaaaatgttacaraagtagaattttctagagtcaccaggaaggttagaaaataaagttctaagatgttcctagcattttcgcgttccatctacatgtcgtggctttacctgatttcgatggctgcaattctctttga

SEQ ID NO: 665349 - DNA, 563 bp, Homo sapiens
gggattcaaggtcagggtggcagtaaagccactagattgaaggagtgctacttggggcagagctgcccaggggcaatgcctgtttatgaagactcacattgggctagcataagaagaaataaacacacattgtgttgaatgagggattttgtaggcttttctttttcttacagatgttaaactatccttaatagtagactaaacaaccagtcaaaccattagccctgcccatggatgaatctagatgtattttgcagactatttgtctttccaattaaattggacagcactatagtgcaracagtgctacaatgtcacagcagacaattacattgtcacagcataatgtgcaagctcaaaaatgtttcttctttaatcagctagccataggaataccccacaagtcttcatggtatgtgtgcatgtaaatgtaaaagggtgtactcattatcctggtggaactgccaggcctcctcacatattccatttgcatttgatgataaagagcactagaaatattccatttcataaacaggtaaatgaaatagcgtatcagagacaat

SEQ ID NO: 665350 - DNA, 581 bp, Homo sapiens
aaaattccaaagtggaatgagactgatcttattgtttcacctaagattaaatagcctcaccaaaggaggtgtggtagagaaagagctgacctaactaattttggaaatgagtaaagactgtaacactaaaggcaaaaggaactaaatacaaacactcttttagttgataaagttatttctcacagtgtaagacttaacaattctgaaatatatgcatactgaaattaaacaattcataaatgaaagacaaatagtggaagccaggtttctcaatgttagagtaagaggattcwgataagcaattaataaaagaaaggaatgatctatgtggtaataaatttgagtcagacctgtctcaagctctgcagtaggagggtgctttctagctgagtcaactccatttaagcaggcttcccagaagtctgacataatctttttaattctatctcagaggtatgaattagtatgtatgactgtccttagctgaaagaaaggttttcatagaattttagctataaactttaccatccacaaataaatttggggttcttttattgaagaagaaagctataatttatatt

SEQ ID NO: 665351 - DNA, 581 bp, Homo sapiens
aaaattccaaagtggaatgagactgatcttattgtttcacctaagattaaatagcctcaccaaaggaggtgtggtagagaaagagctgacctaactaattttggaaatgagtaaagactgtaacactaaaggcaaaaggaactaaatacaaacactcttttagttgataaagttatttctcacagtgtaagacttaacaattctgaaatatatgcatactgaaattaaacaattcataaatgaaagacaaatagtggaagccaggtttctcaatgttagagtaagaggattcagataagcaattaataaaagaaaggaatgatctatgtggtaataaatttgagtcagacctgtctcaagctctgcartaggagggtgctttctagctgagtcaactccatttaagcaggcttcccagaagtctgacataatctttttaattctatctcagaggtatgaattagtatgtatgactgtccttagctgaaagaaaggttttcatagaattttagctataaactttaccatccacaaataaatttggggttcttttattgaagaagaaagctataatttatatt

SEQ ID NO: 665352 - DNA, 595 bp, Homo sapiens
gtatgactgtccttagctgaaagaaaggttttcatagaattttagctataaactttaccatccacaaataaatttggggttcttttattgaagaagaaagctataatttatattgagtgataacaaatactctttgccaaatcatacaaaaaatacatgttaaattttaaataaattttaaatagcttaaatatatawcaattaaataataaagaacaaagtgtagataaatatagactactatttttctaacttaggattgatcaaatttttttatgtgtaaaaataaggatgttgatcaagggatacaaaatttcagttagataggagaaattttaaaatataaaaactaacacaaaacaaagacataaacatgattacataaaatttcaagtttattcatagcaaaaatgttaaaaattgataataaccgcaaattagaaaataattgaaatatatataaaagacagtgtgctattttagacaatatgttaaagactttagggatcactaagaaaaaagtatcaagggatctagcctgttagacttagttcctgaacctgacatcacagaactcattagattcattctgaaa

SEQ ID NO: 665353 - DNA, 602 bp, Homo sapiens
aaaaacaatctactatatttagccacttaagaattgtgttgccactgagtttctatttcaaaatataaagtaatacaattagcctaacacctaaaactgcaggcatattttgagtgtttgttctttagattcccttttaagatgttaaaaaggaactgtgcaacaaaatattatctgaatatatattatcagcactaaatatgatacagttgtcattcaatccccagtttgcatatgcatagtagaaatgttgtgaaagctagctaaaggaatggaaatagactggtcataattcttaatttaagactaattcatgataaaaatctagaacacacacaaaaaaggataataattgtaaaaacctgcaaaaaaaaaattagaaaaatctgcaattaaaaaacggacaccaagataagtctataagkcatgacatttttgctgattaggttctgccctgtctttctcatgcatgtagttcactgcgcagtgcatatgtcccactgaccagcccgattgcggtcatatggagtgtctccatctgagatagttgttctgggactctgctttttaccgtaactgaaaaagggaaggtctaaaatgcg

SEQ ID NO: 665354 - DNA, 602 bp, Homo sapiens
aaaaacaatctactatatttagccacttaagaattgtgttgccactgagtttctatttcaaaatataaagtaatacaattagcctaacacctaaaactgcaggcatattttgagtgtttgttctttagattcccttttaagatgttaaaaaggaactgtgcaacaaaatattatctgaatatatattatcagcactaaatatgatacagttgtcattcaatccccagtttgcatatgcatagtagaaatgttgtgaaagctagctaaaggaatggaaatagactggtcataattcttaatttaagactaattcatgataaaaatctagaacacacacaaaaaaggataataattgtaaaaacctgcaaaaaaaaaattagaaaaatctgcaattaaaaaacggacaccaagataagtctataagtcatgacatttttgctgattaggttctgccytgtctttctcatgcatgtagttcactgcgcagtgcatatgtcccactgaccagcccgattgcggtcatatggagtgtctccatctgagatagttgttctgggactctgctttttaccgtaactgaaaaagggaaggtctaaaatgcg

SEQ ID NO: 665355 - DNA, 583 bp, Homo sapiens
gtgacaggaagagagctagggagctcatttttataacggcactaatcctattcatgaaaacactacccccattacctaatcttcttccaagggtcccacttcctaataccatcacattgagggttagcatttcaacatgaattttgggaggacacattcagttaatcattctctcacaggcctaagacccagccaatattaagtttttattttcttcctgggcatgattctaagtgcatgcatccaggagaccttgagatatagaaagctgattaacagcaggatccagttgtccctggttgccayaattacaggcaataattatagattttctttatctgtgcttttcaatatggtagccatcggtgacatgtagcttagcgaaaacttgaaatgtggctagtgtgacagaggaaggaatttctggtttcatattattttaatcaatactcatttaattttagatagccacatgttgctagtggctattgtattggtctttgagcatctgaggcaatgctgtgctgtcccactgttactgatagaaacttcgtagtgcattcattcagtacactgcacacaa

SEQ ID NO: 665356 - DNA, 583 bp, Homo sapiens
gtgacaggaagagagctagggagctcatttttataacggcactaatcctattcatgaaaacactacccccattacctaatcttcttccaagggtcccacttcctaataccatcacattgagggttagcatttcaacatgaattttgggaggacacattcagttaatcattctctcacaggcctaagacccagccaatattaagtttttattttcttcctgggcatgattctaagtgcatgcatccaggagaccttgagatatagaaagctgattaacagcaggatccagttgtccctggttgccataattacaggcaataattatagatkttctttatctgtgcttttcaatatggtagccatcggtgacatgtagcttagcgaaaacttgaaatgtggctagtgtgacagaggaaggaatttctggtttcatattattttaatcaatactcatttaattttagatagccacatgttgctagtggctattgtattggtctttgagcatctgaggcaatgctgtgctgtcccactgttactgatagaaacttcgtagtgcattcattcagtacactgcacacaa

SEQ ID NO: 665357 - DNA, 583 bp, Homo sapiens
gtgacaggaagagagctagggagctcatttttataacggcactaatcctattcatgaaaacactacccccattacctaatcttcttccaagggtcccacttcctaataccatcacattgagggttagcatttcaacatgaattttgggaggacacattcagttaatcattctctcacaggcctaagacccagccaatattaagtttttattttcttcctgggcatgattctaagtgcatgcatccaggagaccttgagatatagaaagctgattaacagcaggatccagttgtccctggttgccataattacaggcaataattatagattttctttatctgtgcttttcaatatggtagccatcggtgacatgtagcttagygaaaacttgaaatgtggctagtgtgacagaggaaggaatttctggtttcatattattttaatcaatactcatttaattttagatagccacatgttgctagtggctattgtattggtctttgagcatctgaggcaatgctgtgctgtcccactgttactgatagaaacttcgtagtgcattcattcagtacactgcacacaa

SEQ ID NO: 665358 - DNA, 574 bp, Homo sapiens
cccagttttttaaggcagcggtcactaatgtttttgacaccagggaccagtttcatggaagacaatttttccacagactggaagctgrgagagagggatattttcagaataaaactgttccacctcagatcgtcaggcattagttagattctcataaggagcatgcaaactaggtccctcacatacacagttcacaatagggtttgcactcctatgagaatctaatgctgccctaatctgacaggaggcacagctcaggcagcagttctaactggcctgctgctcacctcctgctgtgtgacctggttcctaacaggccacaaatcaatactggtccacagcctgtaggttggggacccctgttttaagggaactactagcaaacctgactaaattttgcctgacagggagacattatcctcttctagtcaggaaacaaatgtatgacctgttccaaaggcaagcactatatttatccttcaaaagtgtatgctgtgtgaatatgtttgagaagatattccagaacaaaaattgatacaagacatgcactggagattttgtgcatgtcattaca

SEQ ID NO: 665359 - DNA, 633 bp, Homo sapiens
tctcaattatttcccagagatacccataacttaaaatgcaggaaccaagagatttgagcctagacatttggatgaaaagcgatttccacctggagaaagtcactgcccttctgtgcagaggtaggtgccctgatacttgcctgacagctggaaagcgtggctcagaagaggtaggtgggagaagaggccacatagtatctccctgggcctcctggtgaaaaacttgtgtgtgatttttcaggcctgaccacaaactyggggaaagctgacccctaccccagacttggggcacagcccatgcgtggcagtctctggagggagctctcaaggtctcaggtctctctggctggtcgtagtcatcacatatttgcattcctagcccctgagccttcattcctgggtttatcagaagccttggggagaggtgttctttaggcgcctctgctgaggccttctttgggtggggcagggaagggagagaaatcttgaagccgcttttccccacaatgactcagaatctagtacttccactcctagccttccccctcccttgctctcggccccagagtccataaaacttccagagccttttgttcagggctctgtcagcagtgagaccaccccaacccgaca

SEQ ID NO: 665360 - DNA, 575 bp, Homo sapiens
catgcttcactcctcaagatacatctagagagtcaagaaagttagcaaaaaaagaccatttacaacacatggcctcatatacaagataaactcaatcatcttatccatgtttttcatccttaccatatgtgatattgggacatccaaacccactcctcttatctgagaccagatcccccaatttctgggaaagaaatgaccaggagcacaaagatacccagatggaaactggggaggggtagactgactgcttttctgacacagtggactttatacatcctcctccygcagaagactgaccagaacatacaaaaggaagcgctttcaaatttaactgatccttttacccaactatcaggactctgtcttgtttcccttttgctgtcagtaagatggccttaataatactgttaacgaagccaccctctatcactgtgcctagagaggaaacaattcctctatcactacctagaggggaacacaactctaatctctgtatcactttgattctatgatctgtgctgctccctcccctttgatacttctgaaacaggaatgttccttaaaactagtgg

SEQ ID NO: 665361 - DNA, 575 bp, Homo sapiens
catgcttcactcctcaagatacatctagagagtcaagaaagttagcaaaaaaagaccatttacaacacatggcctcatatacaagataaactcaatcatcttatccatgtttttcatccttaccatatgtgatattgggacatccaaacccactcctcttatctgagaccagatcccccaatttctgggaaagaaatgaccaggagcacaaagatacccagatggaaactggggaggggtagactgactgcttttctgacacagtggactttatacatcctcctcccgcagaagactgaccrgaacatacaaaaggaagcgctttcaaatttaactgatccttttacccaactatcaggactctgtcttgtttcccttttgctgtcagtaagatggccttaataatactgttaacgaagccaccctctatcactgtgcctagagaggaaacaattcctctatcactacctagaggggaacacaactctaatctctgtatcactttgattctatgatctgtgctgctccctcccctttgatacttctgaaacaggaatgttccttaaaactagtgg

SEQ ID NO: 665362 - DNA, 575 bp, Homo sapiens
catgcttcactcctcaagatacatctagagagtcaagaaagttagcaaaaaaagaccatttacaacacatggcctcatatacaagataaactcaatcatcttatccatgtttttcatccttaccatatgtgatattgggacatccaaacccactcctcttatctgagaccagatcccccaatttctgggaaagaaatgaccaggagcacaaagatacccagatggaaactggggaggggtagactgactgcttttctgacacagtggactttatacatcctcctcccgcagaagactgaccagaacatacaaaaggaagcgctttcaaatttaactgatccttttacccaactatcargactctgtcttgtttcccttttgctgtcagtaagatggccttaataatactgttaacgaagccaccctctatcactgtgcctagagaggaaacaattcctctatcactacctagaggggaacacaactctaatctctgtatcactttgattctatgatctgtgctgctccctcccctttgatacttctgaaacaggaatgttccttaaaactagtgg

SEQ ID NO: 665363 - DNA, 592 bp, Homo sapiens
tctccctccccccaccccatcccccaacaggccccagtgttgttcactcatrttgtctgtgtccctcaataaaatgtatacccatgagaactatccatgtcacggctctgtcccaagtgcctgagtatgtttcccattcaaaaagtatttgttgaatggatgaatagacctgaggcagccttccaacaggagcacctgctttcttccggcatcatctctagccctgcaagaggagcttctgcttagataggaatgctgagaaccatcagaatcttttctctgcaggattcctggctgcctttagacataagcctggcgctcacatctgggccatggtgtgctcctgttgaacataatttccatagaacaccaacatcagatacagccgctctgtgactgtaatggagcaaaagaaaacaagatgatcccataatcatgtctagacccagacaaaaataagaacattgtccgaaccacaagaatgaccaaagatgctcctttcctggctaatatgagcaacttctgcttctttattaattacacctttagcctcatctcattccttctgccttctaggtaagaattattaaga

SEQ ID NO: 665364 - DNA, 592 bp, Homo sapiens
tctccctccccccaccccatcccccaacaggccccagtgttgttcactcatgttgtctgtgtccctcaataaaatgtatacccatgagaactatccatgtcacggctctgtcccaagtgcctgagtatgtttcccattcaaaaagtatttgttgaatggatgaatagacctgaggcagccttccaacaggagcacctgctttcttccggcatcatctctagccctgcaagaggagcttctgcttagataggaatgctgagaaccatcagaatcttttctctgcaggattcctggctgcctttagacataagcctggcgctcacatctgggccatggtgtgctcctgttgaacataatttccatagaacaccaacatcagatacagccgctctgtgactgtaatggagcaaaagaaaacragatgatcccataatcatgtctagacccagacaaaaataagaacattgtccgaaccacaagaatgaccaaagatgctcctttcctggctaatatgagcaacttctgcttctttattaattacacctttagcctcatctcattccttctgccttctaggtaagaattattaaga

SEQ ID NO: 665365 - DNA, 390 bp, Homo sapiens
taaagagttccacctgaggcagagtataaacgccaattaccacttgaagccaaaggttttgggagtggataacatccccacytcgccagctcgtgaaaagaagacttaaaaataattgtcaagtattatcactccaggcattctcccccacctgactgctaaaaccaaagatcagttctcagtcctcattttactgagcagaatttgatagtcgatcctctcagattttctgcttttctgcatggggatacataacgctttcctggtttccctgctacctcacaagccccttttctcagtttccgttttaatggttcttccttttcattccaaactcttaatgttggaggacacgtggattcaattctcagttctttatccatatgcact

SEQ ID NO: 665366 - DNA, 571 bp, Homo sapiens
ccataagtcatcaatacggtgttacaaatttgtggccttattgtaaaatattcaactcaaagttccagaataccagagaactatggagaagtcttgaagaacctatatttgtcacaaacacttgctttgggagctaagctaagctcccagtctgagaatttccctaaactcttgagggaggctttcagaactatcctctccgtatctccagtaagccccctaatttttagagttagtggaggaaaaggcatacacgcaaataaggtgcagtctgtaaaataattttttaaagtagatgattattttagcattacttctaaagtgtttttctttttaggggctgcttagcaatgatttatctaactgatagttggggagatcagctcctgtaataaaacggggcagatatttcaagattaaatattttccaaarataatcaagagttgattttaagacagacagaacatatgtttgggtcaataggtaaatgaaaagatgctcaatgtaattaatcatcaaggaaatgcaaatcaaaccataatgagataccacctcaaacctgttaggcta

SEQ ID NO: 665367 - DNA, 567 bp, Homo sapiens
catcacctagagaacttaagaaattgaactttgagagcacattaccgtaaaacactcatcggtctatgtatgacttccagctaccacgagtctttttcacataaatcccaaagatagttgatttcttgctgctttgctctagatgtaatagctggtaataatgtggtcctgcagaggtgttytaaataatggatagcaaagcaaagcccttgcagggatcaattcagaccaacaaccatctagagtgaacccatgtaggccaggcatgtgctaggtgctgacagggccttttggtgtaattgagcagtgcaggcaggaagccaattcaggaaaagcatagaattatttgcttttccctctgctagctgagttattcctgcaagatgggtgtgttcagggttccgaattatttaaaggtttatgctgaaaatttggagggcaataactatgcaccagtgtatctttagtcaaagttgttatgtttctgctttgtagaaacatcccatcaaggctgggcacagtggctcatatctgtaattccagcactttaggaggccgaggcgggag

SEQ ID NO: 665368 - DNA, 567 bp, Homo sapiens
catcacctagagaacttaagaaattgaactttgagagcacattaccgtaaaacactcatcggtctatgtatgacttccagctaccacgagtctttttcacataaatcccaaagatagttgatttcttgctgctttgctctagatgtaatagctggtaataatgtggtcctgcagaggtgttctaaataatggatagcaaagcaaagcccttgcagggatcaattcagaccaacaaccatctagagtgaacccatgtaggccaggcatgtgctaggtgctgacagggccttttggtgtaattgagcagtgcaggcaggaagccaattcaggaaaagcatagaattatttgcttttccctctgctagctgagttattcctgcaagatgggtgtgttcagggttccgaattatttaaaggtttatgctgaaaatttggagggcrataactatgcaccagtgtatctttagtcaaagttgttatgtttctgctttgtagaaacatcccatcaaggctgggcacagtggctcatatctgtaattccagcactttaggaggccgaggcgggag

SEQ ID NO: 665369 - DNA, 545 bp, Homo sapiens
ccgataccgctgtggcaatgaatatgggtcagggtgtgatatgcaaccagtgaagaaatgggcccttctgacttcagtgattggaaggtgatggatggttggttgtttcccctgtatcactgctattgagtaaagtgaggaatctatgagccatgacttataaaagttccagtgtacaacaccattaatgaccaacaaggcaattaagcactaactggcctttagatcaaaatgcccttatgactccaaagaatattaaactaataataaataatagtttggataactgttgaaaatacaatctatataactttatatagtttctttaggtttcagatattattgatatttgatggtaaaataatcttacaacattggaataaacatggaagaacagtggaaacctttacagtttaggatgtctcaaaggcccgaagatctaaaaaaataattatatatatatatatatttatatatatctgcagagstgatgtactctgaggcagagttttccaaacttcatagattaaaacacccggagggct

SEQ ID NO: 665370 - DNA, 647 bp, Homo sapiens
aaatctcacacaactgaaagtcacagaggagaatgtcacagagtaaaaatctaaaatcagcacttaaacttcattcagatatatgatggctgctacatttcacattcataaaaagagactccatagaatccagcaraaaacaacagctaaattgctagtacagagcagagatttcaaccattgcatatagctcaggagtgaaagtttggtgtttgactacagaaagaagactaatgttagaaaagagtcactcttcaaaggaaaataaaagagcctatctctacaaaatatcatacacataatctaacatataatttaacctgcctagacatagaaccaggaaaatatgacacataacaaaaaaagtaaacaatggattaagacattgaaatggcccacatgctggaattagaagatgagaaatttaaaataagctattataagcatattcaaggatttaaggaatagatggtcataagagagaatatatggagaatctcaacagagaagtaaaaatgataaagggataataggacaaattttagaactgagagacagaatatcttatataaaagtgtcattttatgcacataccagtaaattaaagatggcagaaaaaactatcagtgcacttaaaaacagatcaa

SEQ ID NO: 665371 - DNA, 415 bp, Homo sapiens
gagtcggctggcttggattcagcctcactttaccacttgcttgtgtgtagccaagagcaggatatcccacctcctgctgcctcagtctccttatctgtaaagcggagataatcttacctaccatatgggattattgtgagtaataaacgggtaaatgaatgcaaagccctttaaacagtgccaagtgcagaatatgtatctagagatatgccctattgttttgggcttgatgtcatctttccatattatacagttgttactgcctgtttccccagaaaactcctggggccacatccttctgcctgctgcctgtggaaggcrctatttcccacttacatgcaaatagctaacgtactctgcttttccttgacttctgtaaccaacacatctcaaatcgccaaaacggaccagcagt

SEQ ID NO: 665372 - DNA, 614 bp, Homo sapiens
ggatggtggcatatttgggagatgcttgggaagatatctgagcagaggcctggagtaaataagcaaatctgcaggtatttgtgaagtggaatttctgccaagatgagagccaaggcaaggactctgagatagacagtgtgtggtgtttcctggtacctgtaagaaggccagtgacatggagctcacagaatgaggaaattgacagaataagagggagaagagactctgctaaaactggtgctatttagacattagtgatagttctatattaatgctgatagttagacattattccaagtacaataaaaagccaytggaagacacgaaatggaagggtgaaattgttttccttgattgtttttaatggaaggcctcagctgctgtgtggtgaataattagaagtaaatcacagaagtaaaagttctagcagagagaccatttatgagtcaattacaataatgcaggagtccgaaaataatggaggaggtaagaaggcatcaaaccctggaaatgtgttgaaaataaaactcaagtaatttacttgtttaatagatgtggagtataaggaatcaaagatgattgcagaaatttatcctgagcaaataaagaacaga

SEQ ID NO: 665373 - DNA, 660 bp, Homo sapiens
ctgggagctagaaaccttagtcagctaaataagaggaatactaaataagaggaatatttgcacaaaaatcacatccaaattcctccctcctccttggaatcagaggccatagtgagtagccaggaaacctctcttggcccatctgagccttgggtcttggtcytgttcccagggcctcccagcctgctattcctcgtgcagatgagaatagggtagagatgcttcgaagggcaggcctgccatggatgtggagttcttggaactcaagacccaggagaagcaactaacaggcctttgagaagctgccttcataatacaggcatacctcactttattgtactttgctttattgcacttcatggatcctgcatttgttacaaattgaaggtttgtggcaaccctgtgctaagcaaatctactggcatgattttctaacagtgtgtgcatactttatgtctctgtgtaaaattttcaaaacttttcattattatctgttacggttatgtgtgatcagtgatctttgatgttactattgtaattgttttggggtaccatgaaccatgctcatataaaaagatgaacttaattgataaatgtttgtattctgactgctcatctgaatggccatttgcccatcttgcttcctctcctggggccacc

SEQ ID NO: 665374 - DNA, 576 bp, Homo sapiens
cagtggtacgatcttggctcactgcaacctccacctcccaggttcaagcgattctcctgcctcagcctcccaagtagctgggattacaggcatgcaccaccacgcccagctaattttgtatttttagtagagatggtgtttctccatcttggcctggctgttctcaaactcctgacctcaggtgatctgtccacctcggcctcccaaagtgctggaattacaggcrtgagccaccacacctgggctggtgttaccatcttgttataatctggcagaggtgataatttgaaggaaatttgtgtactgtttttcaggttatgaagcacttcatctagcttacctcatctgattcgcatatttattgtatgagataggtattactatgtttctcattttaaaaatgaggaaggtgaggcagattcaatccattacaaggtttgtgaattacagtgagtacttctaacatcagtactacacagctgtcttccctacatacaggggactgtttgcatttcagcattatcaaaaagaagaagaaatctattagagaaagaacagccaccgaaataagttggt

SEQ ID NO: 665375 - DNA, 568 bp, Homo sapiens
taatattaaataacagaatttgttaaggtcatagtagagtgtctatgtgatatgtagaaatagtcgaaaaatgttagtgtgcatcatctttgtcttaatacgtcacataaattcaaacatttttacatttaaaaccaactgaattttaaaatagaattgatgcgttttcatcaatagaattttgaagtagttaaaatgtaatttctttacacagtttcatttctgccttccacctactgtctcttcaacttctttctgccaacaaatatttagtaagtgataacaatgtaccaaacagcatagtagatgacaagaggaattgtatttgttatctcttgctgtgtaacaaattaactcaaacttaatggcataaaataacaatttttttatagcactgtttctcaaagtcataaatatcaaagcaactgatatttgctgataactgataactgggtggttctggtttgagtctttcatgaagtcaaaatgctagctggagtttcagtaataacattgaagcttatctggactaratgatctattaccagattggctcaatcacatagtt

SEQ ID NO: 665376 - DNA, 469 bp, Homo sapiens
cagaattgctcaggaaaactgaaaccactctatacctttcacacagaaaagattttgctgagggagttagatgctcccaaaagtgttggagagccagaaatatgaagatcagaaaggtagatccagctaattatgatcaaactagatagtttgggaatcacaggaaaaccaccagtaagatcaaagaygcctgcataactaaagcagctctcttcaataaactcctctaggatgcttgtttatcaaggcccatgagcatgtctgccactgctggaggtacattaatatggctgtgcttcttttctgccttccaaatcctaaatgaatacctggcagaatctaacctagagtcttgctagcaagcattctgaaaacataatgtccaatttttcattccttgtgatattgcagagtacaaaagagaagaaagtactgctgcaccgtcaaaggcaaccaggcacattccacc

SEQ ID NO: 665377 - DNA, 557 bp, Homo sapiens
acacaatttaatatccttaagttcaccaatattattatatatcctgtgcaattaagaaattcattttaggcacattagcaataagtacctcttattgcatgctctatacatgcaaaacagtaaacatagtatgaagcaatgcaagcatgtatgtgaaatttggctttacactaaatccagcttcaggcttaactatatttaaaaaagaattgccaaactgccaatgcattttttacaacacttcttattttactttaattaagactaagagctttaactatgaaaatgttaagaagccaaatgtctcygattctttatcaagattttaagaatattttattatttaaactttttccatatctttctcccctacttaatggttccttactacattgtttcataaataaccttttcaaatctatagtttgaactaacttttaggtaactccacaattagacaaaattattctcttttttttcactagtaacataacccttcctggcacatgttgtatacagaattatgtgttaactagaattcttatacttagtaacct

SEQ ID NO: 665378 - DNA, 464 bp, Homo sapiens
acttctcctgtcttcttttaaaaattttccctaaattggtattggtcatgtctactgacattccattggtcaaaggaagcaatttcacatgatcaaccttgaccatgacataggctctcatcttctacactgaggattggcaaacataagaaatataaagatcttttaggaagggagtaaataactggaaataatacaatgtatcacactgaaaaggaaagatgtgtgatattatggtagtttatgggttagaataaaatgaaatggaaaaggaactgaagattaaaataaaacaatagtaagtttaatgggaagaaatgattgcagcatcctggaatttgatgtcagttggtagcttattaaaatatctgaggtagaccacttagcagcaawgtaaatgtgtaggttgtggtcataagataatgtggctgaaacagtaggctggtggcataattcattagaag

SEQ ID NO: 665379 - DNA, 531 bp, Homo sapiens
gaggagcaggttcctagggaagtatagggcagtggtgactcagacatgacccacaaaccattctttcatcctaggcctctgggcctgtgattggagagactgttccaaagacttctgaaatggtttcaaggtctttctcccattgtcttgggtattagcacttggcccactttgggtcatgctaatctctctagcaagtgattactccacagccttcttgtatttctctcacgaaacaagctttttctttctctgtcacaaggttaggttgcaaatttttcaaatatttgtgttttctttcctgtttagatataagtttcaaattcaagtaatctatttgctcccacatcttatttcagctattagaagcacacaggccacatcttgaatgctttgctgcttagaaatttcttctgcttgatacagtaaatcatcactcaagttcaaatttccacacatscctatggcatgaacacaatgcagccaagttctttgctagggggtaaaacagatgaccttgacttcaattcc

SEQ ID NO: 665380 - DNA, 474 bp, Homo sapiens
tttccagacaattatctgcttggcttccaacatggcaacctccaccatacctgaatgctgcagataggcacagcattatgttcccctgggaccctcccagactgcagaccatgtgacccccaccggcccccactcgccccagccaggctaagctacctagcttggtcttccagtgcagaggttccatctctgctttaactccratggcagggacagtgctgtgttcactcagaaaccacctagactgcagatcacgtgacccctttcccctactgcccctagccaggcaggtcttgccaggttgaacttccagtgcagtggccctgcccctgcctgaaccctgtagctgggcacacctctgtgttccttcaggagatgcctaactggcagatcatgagactgcctttgccgctactgctcccagccaagcaagacttgctggcctagtggttcctgagtgagaaaggtgcccca

SEQ ID NO: 665381 - DNA, 494 bp, Homo sapiens
tactagcaaaccaaatccagtagcaatatcagaaagctgattcactgtgatgaaataggcttcattcctgggatgtaaggttgattaaatatatgcaaatcaataaatatgatttatcatctaaacagaatcaaaaacaaaaataatatgatcccttcaatggatgcagaaaaagtcttcaataaaattcaacatcccttcctgataaaaaccctcaacagactagacatcaaaagaacatgtcaggaaataatgagatccatctacgacaaactcacggccaacatcatacaaaatgggcaaaaactggaagcattcctcttgagaactggaacaagacaaggtttcctgctctcatcactcctatttaacatagtactagaagtcttaaccagagcaatcagggaggagaaagaaataaaaggcactgaaataggaaaagaaatttcctattcakaaaaccctaaagactctcccaaatggtccttaggaca

SEQ ID NO: 665382 - DNA, 564 bp, Homo sapiens
tatgagttcaattctgaattcacaggtggtataacctggggccagtgactttccagatctgacttacagtttcttattgaaaactgaagagaatktcctactcagcttacctgccaggattcttgtgagatcaaataacataactgactcacatgagggctatttttaaatcgcaaaatgttatgcaaatgtaaatgtaagacttctgttaggcttaatgaatatgcatcatgacattgttaataggaactggaatttttagactgaaaggaaaaatgtagataatgaagtgattttaatggtatgtccatgaaacttacagctcatttttttaaattctaatggctaacacagtacagcatcagtcccagtcagtaaatgcttgaataaaagcaaaaacatcaaaaatattatttttaaaaatttctgttcctactgccagtggcctcattcagcatggcctactttgatggcctttgagccaaacaacttctctttgtattctaacccatccacctcagtagtattgtgtattatctttctaaagcccattcattgatctgc

SEQ ID NO: 665383 - DNA, 564 bp, Homo sapiens
tatgagttcaattctgaattcacaggtggtataacctggggccagtgactttccagatctgacttacagtttcttattgaaaactgaagagaatgtcctactcagcttacctgccaggattcttgtgagatcaaataacataactgactcacatgagggctatttttaaatcgcaaaatgttatgcaaatgtaaatgtaagacttctgttaggcttaatgaatatgcatcatgacattgttaataggaactggaattyttagactgaaaggaaaaatgtagataatgaagtgattttaatggtatgtccatgaaacttacagctcatttttttaaattctaatggctaacacagtacagcatcagtcccagtcagtaaatgcttgaataaaagcaaaaacatcaaaaatattatttttaaaaatttctgttcctactgccagtggcctcattcagcatggcctactttgatggcctttgagccaaacaacttctctttgtattctaacccatccacctcagtagtattgtgtattatctttctaaagcccattcattgatctgc

SEQ ID NO: 665384 - DNA, 564 bp, Homo sapiens
tatgagttcaattctgaattcacaggtggtataacctggggccagtgactttccagatctgacttacagtttcttattgaaaactgaagagaatgtcctactcagcttacctgccaggattcttgtgagatcaaataacataactgactcacatgagggctatttttaaatcgcaaaatgttatgcaaatgtaaatgtaagacttctgttaggcttaatgaatatgcatcatgacattgttaataggaactggaatttttagactgaaaggaaaaatgtagataatgaagtgattttaatsgtatgtccatgaaacttacagctcatttttttaaattctaatggctaacacagtacagcatcagtcccagtcagtaaatgcttgaataaaagcaaaaacatcaaaaatattatttttaaaaatttctgttcctactgccagtggcctcattcagcatggcctactttgatggcctttgagccaaacaacttctctttgtattctaacccatccacctcagtagtattgtgtattatctttctaaagcccattcattgatctgc

SEQ ID NO: 665385 - DNA, 487 bp, Homo sapiens
attccttccctcccttcctgtctcttttcctatctctttctctcttcttctttttattcttcctttcattccttattaactgcataaacaaagctgtgagttaatgctatccttagttcaggacactttaataattttgttccatacaaggcatcatctttttttatttacatgcatatttatttattctctttcatgaaaatctctcatttctctgcctctatatataggaaaccactttaataagtttaaagtagactttgatagttattttattacaagataaatttccttcaatrtgtgtgtgtgtgtgtgtgtgtgtgtgtgtatttttaatttacagaaatgttattaactcattgattgtattattctatcttctcttttccccaagtacttgttttgaaagatctattcatgtttctatgtatttaattgctcaactacttttaattgctgtgacataatcagtggtgtgcatccacat

SEQ ID NO: 665386 - DNA, 487 bp, Homo sapiens
attccttccctcccttcctgtctcttttcctatctctttctctcttcttctttttattcttcctttcattccttattaactgcataaacaaagctgtgagttaatgctatccttagttcaggacactttaataattttgttccatacaaggcatcatctttttttatttacatgcatatttatttattctctttcatgaaaatctctcatttctctgcctctatatataggaaaccactttaataagtttaaagtagactttgatagttattttattacaagataaatttccttcaatatgtgtgtgtgtgtgtgtgtgtgtgtgtgtatttttaatttacagraatgttattaactcattgattgtattattctatcttctcttttccccaagtacttgttttgaaagatctattcatgtttctatgtatttaattgctcaactacttttaattgctgtgacataatcagtggtgtgcatccacat

SEQ ID NO: 665387 - DNA, 557 bp, Homo sapiens
taaaatgcaacaatgggcactctcataaatgtcttcttatggactaggtaataatttccttgggatgtatacctaggaacagaatggccagttagtaggatatgtgcacactaatgtaactaagtactgacagattgttcacgggaataactcctctagttcacatcttatccatacttgggtgaagttcttacctctttgctaagtataaaatcagacttattgatgttttaatatgcatttttctgattaccaatgattttttgtttaattttaatttttagaaacagagtatcactctgttacccaggctggagtccaggggcacaatcatagctcactgctgyctggaactcctaggcacaagtgaccctcccacctcttcctcctgagtagctggcattataagctccagccactgcaccctgctaattttaaacttttggtcattctcttgttaacttattgggagagggtttcctgtatgtaaatatccttttcatacccttggcacatttttccattattaatgtctttttcttgttgatttcataagt

SEQ ID NO: 665388 - DNA, 611 bp, Homo sapiens
tagtttggattctctttgcaaaaatctataaacttataattatcagataaaataaataattactggaatgagaaatatatgccagaataaaagtaaaattgcaaactatatttagcaattaggagtagacttcaatgtctcttacccttggaatatcatatgagggtttttaaatagacatatttacctacttttaacaggtagttctgatggaagaagttatctaaagaaaggctagaagcagagaaaaacatttgcaggagatgtaaattgattgatgtattggtgctgcagactgaaagtttgtgtccccccaaaatgcatatgttaaaatccttgccctccaggtgatggtaatggaaagggggctttttggagatgattaggttatgatgacagtgccctgtgaataggattggtgcsccgtataagagaccccggagagctccctagctgttcttcctctatgtgaggacacagtgagatgatggctgtctatgaatcaggaagaaggctctcatcagacactgaatcatctcccagcaccttgactttgatcttcacagcctcaagaaccataagaaataaatctctgttaactaaaatccacc

SEQ ID NO: 665389 - DNA, 531 bp, Homo sapiens
ttgttaaataagttacttgaatgctgcttccaagaatttgactgggaacacaatcagggagaagactatgtaacccacattattaccccattaaatattttccatgatttcttggttttctgtggttccacaaaaacaagcaaaaacataatcctgcatcatcttaaataatattagagmgttttgactgcatgtctactgacagccaatcatagcaatacaaggaacaaaatacccactatccctgaccttctggaacagtgttgtactagggaggttaaaactctatgcattggagccctttatcaaacaatgtttagctctctttggttctttaaggattcacatttgtagcgaatagctagaaataccagtgcagtatttggcattgcatttaatgaaatacaaagagactgaaattttttgattggcttctgtattttttttcaggtcattttcatcacgttggacataaatgacccaacttgtattctggtctggaaagaggaggcaactctcagtttggcagac

SEQ ID NO: 665390 - DNA, 690 bp, Homo sapiens
tgacataaaactaaatctatcaataaaaaattattagttcagtttataaaagccatcctattaatgtagcctaaaggactcagatacttgagttcatggtaagtctagttcttttgagtatgtaggtacaataatccagatttgattttagatgtaaactttttgctatttttgtttctgttccaagtgtagaattctaattttttagctgttctgtttgttttgaaacttggttagtattcttatcatacataattgaagtgtaaatgtcaccgtattcctttaaaaacaaatgccaattaaagtgagagatgttggcaacaggaacgggctcacttcatttattataacatgttttgaccttttcattattttggtggtaattattctattttttgcaaccaacacaaactcagatggattatttgatacagtactttaatttgactcagaggtcatactttccttttacttggatagatcrttgatgcatttcttacctctatttctaagccttcttttattaatagctaatttataggtttgttcattggaatttcagaagaaaatcaacaaatgtaatagcttaaattctctgtctggattattaatttacttccattaataccagttttaatatttatattgttgcattgctattgggggttcacttttctttcctctaacaga

SEQ ID NO: 665391 - DNA, 576 bp, Homo sapiens
ttatctctacctaagccaaatagaaagccagtattaccagaagaatgcaatacattctaatgaataacaaagtcctcaaggaaaattaaacccagataaatgggatcagagattgcatcagtggatataactggtaatatatacatatgtgtgtgtatattttatatacacataggtgtatgtatatgtgtatatctacaaataagaaccagatatgaatgattaaaggatacaccaaacaagtaacatagcagaagctgtgagcaatgaattgataaatgcttgcctatggacagttggtgaagtaaataatttatttagccatagaaaaaacaaatggactgagaagttggaaccaaggaagaaacagagatawggcacatgtgtgaaaaatgcaactctgatcagagtgtaggagagaaaaaaatacaggtgttgacagcaaatgacaaatttctaagttatgtggggaaaaaaatggattaccatattcaaagatgtgattagaagcccagatgtgacctaagagtatccagggccctatttaaggctgtgaaccatctgcaacagacaacc

SEQ ID NO: 665392 - DNA, 607 bp, Homo sapiens
ttcagttgagcatttaaatccagacactgaattttggttttgtcagcttcatatcaacccactcagaaaatatgaatgtgaagaaaaaggtttcagtgattgaaattggtttccatattgtggatcagttcatgagcatttggacatgagtcatttcatgttgaacaaactatgctttcctctttaagcgtaggcttaaaataaaattaattctcatagggttcatttcattattctaggctggaataggcaatacctttgctggagtaagcaatgcaataatgccaattatttgcatgatttagttattatctacctatgttactatatctgctaatttttgagcattaatttctaaatcatttgatatatgtaaggaaacacgtatcttaaatcaggagttggcaaactttttctataaagagataagcagtaaacatgtttggctttgaggcaatattatctccgtgacarctagtcaactttgttcttttagtgtttcagtagctatgagtaacatgcaaataaatcagaggggctgtgttctgataaaactttacaaaagcagggagtaggctggatttggcatatgggccacagttcgcta

SEQ ID NO: 665393 - DNA, 530 bp, Homo sapiens
ctgttgggaatgtaaattaatgttggcattatgaaaaataatatggaggtccctcaaaaaattaaaaatagaactatcatatgagccagcaatcccactactgtatatgtatccaaaagaaatgaaatcagtatgtccaagagatagctgcaccctcatgttcattgcaacattattcttcatagagaagatatgaaatcaacacaagtgtctatcaacagatgaacagataaagaaaaaaaatatatatatacacacacacamagaaatactaatcatcaacaaaaatgaatgaaatcctgtcattgatggtaacatggataaactttgatgacattgtgttaactgaaaatacaagaacagaaaaccgagtacagcatgatgtcacacattcgtggaattttaaaaagctgatctcatagaattacagagtagagtaacgcttgacagtggctgagaagagtagggagtaggaaggaatggggaaagattgttcaacagatacaacattacagatatataacagaaat

SEQ ID NO: 665394 - DNA, 596 bp, Homo sapiens
atttcttccctgtactatttccagatttcaaattattttcacatatcagaccttagctgatagtcttaaatattctgaagtcccagacaatctgaagtacaccgaatttggcaatctgctagagaaaataaagaatggcatcgggaaaaattattcctctgaaatctgtctgttttcctgaataaaatatttctcactggtcacaatgactatgattatttatactttctcaacatgcctcaaatatattgaaccttcccatttagcaaaggtctttgcctcctatgtcctaggcaaatccaatgccatcaaacaggaaacatggatcttgtgacatgcttgttctttctgtccttctagggactataatttttgaatcacagagcaagttcatagttaatttggctaattactgacagatagctctttagaagatctgtactaagttacagtcaactagcagagctcaatatcccctgcttatgtatacttttctcaacagttagctaatctaatttttactttatgccaatcagatgtgcaaagctagmtttcgttgttggctttcatttggattttcctgatcactaaggagt

SEQ ID NO: 665395 - DNA, 631 bp, Homo sapiens
tctcttgtagtcacagcagaggaatccaccattgtgaattttgtgcttgcattctgttgctttttttctttgtacaaatatttagtacaatgtctcatacatatttaaaatatatccttctataacttgcttatgtgtccttttgtgacttgtttatttcactaaacattatgctggtgaaatttatgttgctacataaagttttaatttatttattttcaaaactttatagtattttattaattcactacaatttgtttatttgttcttagattgatagaccatagagccttttcataaaaacaattcaattctaaatattcttatatattccaccaggtacatattgtcaaacatttctccgtggcctaactaacacttgatactgcaggctttttcatttattttaatacggtaggaataaaataatgtttcrttatgattcaatttgtaaatcattgactgtgtacaaggttgagttttcctattgtataagccacgcctttttcctttattataaaatacccatttgtgtcttctgcttatactttaactgttttgtgtttttatcttaaagatctataaatctttcatatggacttcaaatactatggctttgtctgttattttc

SEQ ID NO: 665396 - DNA, 597 bp, Homo sapiens
gggattacaggcatgagccaccatgcctggccttaatttttaaatatttttaataaaatattttgctatgcatatgttttcgttttattttaatgtatttaatatttttttatttctccaagttcataaatacatttctcaatattttaacttccgaactacatttataacaacattcaaagtaatgtcagttaatttagttttgacagaataaactttaaaaggtttgctttgatatctttaactgcataaaattaaaataaaactttttggaattaactgaccttctctttaaagcatctgtgacacagatgtagatatggaataaattagatctgctgaaatatttttctgtcaatggacacaacaccatagtagctatttcttcatttttcatacgtaaacttaaattataaagtgaatgaaatttgtgaatgaaaacacaattagatctaaatgaaaggtcatgttttatagagtgatatgtgcctgcactttctgtactcatatgtgtctctgaattcagttttcttatatsaactactaacttttgcaatagagtctaatgtttcttctgcagatttctacctactagtt

SEQ ID NO: 665397 - DNA, 599 bp, Homo sapiens
gtagaaataacttatttctaaaaaataaaaatgaaaaataaataaaaataaaaaaataaaaaataaaaaaataaaaacgggagcttctctgcacaagccctctttttgcctgctgccattcgtgtaagatgtgacttaactcctgtttgtcttccctccatgattgtgaggcctcctcagtcatgtggaactgtaagttcaataaacctctttcttttgtaaattgcccagtctctggtatgtctttatcaacagcatgaaaactaactaatacaccatcttttaaagtacaaattgtctaaatagagaaacattcatttaaaaaaatctactaaatcttggtaayctgcttcctaacttgtgccccagcccagctctgtgttacagaagctctactcaaagcatgtacagccagaaaggcatggaggttctcattctcccagcttcaagtctgagatgatagtttcacatcaggaggggcaggctgttgtttcttatcacccctctctttctccagtctccagtcatgggatgagaactttattccatggccagcaggccaataatactgagcctctgatcacccacacgcaggctga

SEQ ID NO: 665398 - DNA, 529 bp, Homo sapiens
tgacttaactcctgtttgtcttccctccatgattgtgaggcctcctcagtcatgtggaactgtaagttcaataaacctctttcttttgtaaattgcccagtctctggtatgtctttatcaacagcatgaaaactaactaatacaccatcttttaaagtacaaattgtctaaatagagaaacattcatttaaaaaaatctactaaatcttggtaacctgcttcctaacttgtgccccagcccagctctgtgttacagaagctctactcaaagcatgtacagccagaaaggcatggaggttctcattctcccagcttcaagtctgagatgatagtttcacatcaggaggggcaggctgttgtttcttatcacscctctctttctccagtctccagtcatgggatgagaactttattccatggccagcaggccaataatactgagcctctgatcacccacacgcaggctgacctttagggtggaggttccatatgggagaggcagacattccttccccaagtgcccatcatg

SEQ ID NO: 665399 - DNA, 599 bp, Homo sapiens
gtagaaataacttatttctaaaaaataaaaatgaaaaataaataaaaataaaaaaataaaaaataaaaaaataaaaacgggagcttctctgcacaagccctctttttgcctgctgccattcgtgtaagatgtgacttaactcctgtttgtcttccctccatgattgtgaggcctcctcagtcatgtggaactgtaagttcaataaacctctttcttttgtaaattgcccagtctctggtatgtctttatcaacagcatgaaaactaactaatacaccatcttttaaagtacaaattgtctaaatagagaaacattcatttaaaaaaatctactaaatcttggtaacctgcttcctaacttgtgccccagcccagctctgtgttacagaagctctactcaaagcatgtacagccagaaaggcatggaggttctcattctcccagcttcaagtctgagatgatagtttcacatcaggaggggcaggctgttgtttcttatcacccctctctttctccagtctccagtcatgggatgagaactttattccatggmcagcaggccaataatactgagcctctgatcacccacacgcaggctga

SEQ ID NO: 665400 - DNA, 589 bp, Homo sapiens
ttgttgaaaacagtggagatattggtggaaggcaattaaagagattggtaattccaggacacaagcaacatcgcagaatagccagaagtttaatagagagaaccataagaagaggcagccaagaagagccctcctgggtcacagtcaactttgaggatcttgatgactgtgcacctgcctaagctgtcacccactcaggagcaatcacggtaggacatggggcagacttgacagcattaaccaaactgcactcatcaacacaggatagaagcttcactggcaaaatgggcttaaaagcaacctctgaccaaacactggctaaacaataggtctctctgactcaragacacctcctaggaaactaggcttaaaaataaaattacacacatccttgatattgtagaatgtatacatgccataggctgcagccctttgggaaagatcaaggagggaagaaccatcctaaaattccctggcaaaatgtgggcaaaaacaaacatgtaaactccctgaaacatgagagcagcctgcaagccacatatatatccaatgctaaaagatacatatctaactgactaagggagattaa

SEQ ID NO: 665401 - DNA, 528 bp, Homo sapiens
atctcacaaacacagaaatatgtgacaaaatccaacactctttcatgataaaaatattcagcttattaggagtagaaaagaactttcttaccctggtaaaacctttagtatacatcatacttaatggcaaatgactgaaagatttctccataagatcaggagtaaaacaagaacattcactcttgccatctctaatgaacattgcattatgagatttagctggggaattgggcaagaaaatgaaataaaagggctctaaactgagaaggaagaagtaaaactatttatttggagatgacataatcttgtaaataaaaattcaaataacccctgccygcccaccacacacaaacaaaagtatgagatctaaagaaaaacatttagcaaggttgcaagacacaagattaatatacaaaaatcagtagaaatgaactactagtaaacattcagaaaatgaatttacataaatcattgcatttaaaatagcataaaaataatacaatatataggagtaaatgtaacaaaaga

SEQ ID NO: 665402 - DNA, 620 bp, Homo sapiens
agtctaggtatcaatgccaggatgagctgtcttctgtttaggggaatcaccaggctgacatcaaggtgtcagctggggctgtgatggtgctgggggcttgggattctcttccaagttcactggttcttgcagaactccttttttggcagtcgtgtgactgaagttactgtgttctcgttggctcttaaccaggggacactctaggctcctagaggcctctctcaggtctttgccacgtggactcttcctctcacaacatgactctttactttcttttaagcaagtgaaaaaatgataaagaccttaaggaattaggtcagacmcactcaggataatctgcattttgatgaattcaaaggcaactgattgggacctttagttatatgtgtgaaattcattttgccatataacctggcatggttgtaggagtgatattctatcatattcacatgcacacacacacacaccccatataaaatatatatatatatatataaaacaataggtaaaaaattataatctcaatgttaaataagtacttccaactggtttggaaacacttattttaactaatattaaataatataatacatgtgaaaagggttctatatgcactgcta

SEQ ID NO: 665403 - DNA, 618 bp, Homo sapiens
aaatgaagtaatactgctctcatacagctttaccatttgaagaattgtgccaaagctttaagttaaacatgaagcacctgtaagtatcaggatgactctggactaacattgttttcccatctctttcwaatgagttgctgttcctctaaatgtactcattaaaacattttacaggaatgtgtaaaacccgttccagttttagggtatctaatttggtggttaaaaaattagaatatgcattgcacttctctctgtaagcaatacaccctgcaaatcaaaatgaacgctttctaatttcaacttgagattgaagaaactgaaaaaggaaaatagaccaaaacaaaaacccatataaaacaaaatggaggaatcttattacgttcttttattaaattgtgtacttagaaattttatttttccagcatcaatttaacaaatgtgggtttcttgccatgaatttagctctctcttacctcctcaagctttaagaatagacattaaagtgcacgataagggcttcaagctgtaatttccattgaggttcttgaagtcataaattgcaagtgggaaactaaagatgaaattacaacctttctaatatcccaaccaggtatgttt

SEQ ID NO: 665404 - DNA, 566 bp, Homo sapiens
aaaatcattagtcaattgaagaaagcctgcaaaatgacagagatgcaaatagaaaaaaaaatcagaaacaacagagaaagtagaagaaagctttataaaaatatatgatcaatgcccttaaaaacagtactattcaaataactcagccctgtgtggtggctcaggcctgtaatcccagaactttgggaggctgaggtagggctgcagaaggatcacttgagcccagagccagaccctgtctcaaaaataaatgaataaacaaaaaaaattctttttgtggtctttatgaatgaattgtatccttactagtgaaaaaagttctccataaataaactaatacaaaaggcaggcacaatagaagacaagtttgataattgaaggctccatgaagaaagtccagtgtttcactaatcggaacatattttaatgcgtcatacaagtaatttccaagaactgaattacacaagtctctaatttgtaaagatccacgaagttaccaagtttytaacacaatgaagaaagaagcttcctcgtagaggtattatattgtgaaatgtgaggatatg

SEQ ID NO: 665405 - DNA, 526 bp, Homo sapiens
agtgtgggaaaggattaggaataagtctcataaaaagtaacacrtttaagaacggcatccaattactcaagaaaaagactggaagccagaaggtagtaattgaattcctttaaaattcagtggggagataatatacctggctaacctgtgaataaattatgttaacatcaaaacattttcagacataaagcattttttaaagttttactccaatgtgtcctttcttagaaagtttctggaggttctgattctgcaaagtgaaatcacactaagaaacgagaagagaaattatccagggaacaacatccaacacaggagattgctgattgagaacaaccaggagaacaaatgtgtacttcaaccagcaagcaaccaggatacattggagcagtaggctcagaaatgatcaatatataaatcaagttatatacatgttctcctactgatatcaaatctcagatattacaccttaatcccaaatagaaaaattaattgtttcaaattttttaaaagaaaatggttaatt

SEQ ID NO: 665406 - DNA, 526 bp, Homo sapiens
agtgtgggaaaggattaggaataagtctcataaaaagtaacacgtttaagaacggcatccaattactcaagaaaaagactggaagccagaaggtagtaattgaattcctttaaaattcagtggggagataatatacctggctaacctgtgaataaattatgttaacatcaaaacattttcagacataaagcatyttttaaagttttactccaatgtgtcctttcttagaaagtttctggaggttctgattctgcaaagtgaaatcacactaagaaacgagaagagaaattatccagggaacaacatccaacacaggagattgctgattgagaacaaccaggagaacaaatgtgtacttcaaccagcaagcaaccaggatacattggagcagtaggctcagaaatgatcaatatataaatcaagttatatacatgttctcctactgatatcaaatctcagatattacaccttaatcccaaatagaaaaattaattgtttcaaattttttaaaagaaaatggttaatt

SEQ ID NO: 665407 - DNA, 621 bp, Homo sapiens
tcagaaatgatcaatatataaatcaagttatatacatgttctcctactgatatcaaatctcagatattacaccttaatcccaaatagaaaaattaattgtttcaaatttttwaaaagaaaatggttaattatagaggatgtggcataaatttccctgcaatttattattatttgttcctctaatctcgtaagaaatatctgctcgatatcaagagtgaatttcaggcttttatgatgttgatgctaaaaatttagatacaaatatagatcttttatattaccaattttatactattattactaaaatgcattattttgtatttggtatcatcatatagtgacatttaataactgttgaagatgtgtagagataatggttttggtggtatatgtgataaattgatttaatgtttgttttgctgaaaaaagtaagaagtactttaaaaaactgaagagaagctttttactccttttatatattttccctgaaacttttagccaccacagtcatcaaccattgatcattttgcagacacacacacacacacacacacacacacacacacacacacacacacacacaatgtcagttacaggtgaaagcataagacgaagacaaaa

SEQ ID NO: 665408 - DNA, 491 bp, Homo sapiens
gttcattcattgattatttcactcagtctttattcattaaattttgatgagtatctgttgaatataagatgttaggccatacattgtaggagtamaattattatagattaatagatacatgtgatgagtgttattattgaggaaaacacaagatacagaggaaacagaacttggcaagtaaaacaaaatttgccacagtaattggttcagaagaggaaatctagtctaggcttatctaatacaaatgtaagtcaagatttttgttctgtgatttggaaaagaaaaaaatgtccctcttcgacatgaataagaatttcagtagccttggtggttgctggctgttgactcacaaccacagagagaatctgcctttggtcgaggaagcagaatcgcagagcagagagatgaaaggaagcttaataatgctactttatagcatcattaagtaaccagataaacttttttaaaaaaaatctcaaaatattactatt

SEQ ID NO: 665409 - DNA, 574 bp, Homo sapiens
aaaattaattacagaaatttatacctggtgttagacgtgggtttttactaaagtttaatttacaaacctttttatcacttttggtttattttatattttaatggggatatttcagctttctttagggtatgctacaatgaagaacaacccccaaatttcagtgacttacaawataaagatttatgtcttaccattgttacatagtttcatgttcctgtgactcggattcatactgttttcatttaaagagccaggccaggccaggcatgatggctcacatctgtaatccccgagctttgggaggccaaggtgagagaactgcttgagcccaagagtttaagatcagcctgggcaacatagtgagactctgtctctacaaaataatttaaaaataaaaaaatagctgaatactgtgcagccataaaaaagaatgagatcctgtcctttgtgggaacactaatggagctagaggccattatccttagcaaactgatacaggaacagaaaacaaaatactgcatgttctcacttgtaagtgggagctaaatgatgagaacacatggacacatagagg

SEQ ID NO: 665410 - DNA, 638 bp, Homo sapiens
gccttttgctcaatgaaacaaaaatcttaaattgatgatttctaaaccacaaaatagaataataacctatgagatagaaaaatagacaaatctggccgggcgcggtggctcacgcctgttatcccagcactttgggaggccgaggcaggcggattacctgaggtcaggagttcgggaccagcctgcccaaaatggtgagaccctgtctctactaaaaatacaaaaattagcccaagaaaatacaaaaagtaagccaagatcacgccactgcactcaagcctggccgacagagcaagactctgtctcaaaaaataaaaataaaagaaagaaaaataaaaatagacaaatctttyttatttctaagcagttaatactatactttggctttttttccttcacatggaccaaaagtgttagttaaaagtttctattagaaagaatgtccactaagaagtaagcttgatctatttcgtttttacggctgatgtcattttgctattgtaagttggaccgtgttaagtgaaaatcgatgcaactagattttatatggtttaaatagtagctaacaaaaaatattttaagaaaaaattgatgaggtgttttcaaacactgcaggtcttcctgtcttgcacaagggt

SEQ ID NO: 665411 - DNA, 450 bp, Homo sapiens
actgtatgatatagtttggatgtttgtcccctccaaatctcatgttgaaatgtgattcccagtgttggaggtggggcctggtgggaggtgattggatcatggggcgggggtggttcttcatgaatggtttacccattccctgggtgatgagtgagttctcacttggttcatgtgagatctggttgtttaaaagagtttgggaccttccccttctccctctcttgttcccattctcrccatgtgacacactggcttcccttcaccttccacactgattgaaagctacctgaggcctcaccagaagcccagtagatgctggcatcatgcttgtgcagcctgcagaactgtgatccagttaaacctttttctttataaattacccaacctcaagcattttttatagcaatgcaaaaatggactaatacagaagatcagtataaggagtggggc

SEQ ID NO: 665412 - DNA, 590 bp, Homo sapiens
tggggcagccatgtttcatgctgggaataggcgtcgggcttttccactgcacctgcttgagcgaatagcggtgcccactggtggttttctgttgattgtgaagactcttgatgagtgtatggagatcatktggaactctaaaaatgacatgttacacttcctttcgggagttctattcccagaatagcacagttctttgaaatcctcatttaaatgagcctcatgatttgtggaaggtgagaatgcacacacctgctttgcaaattgataaactatgccctaaattcataacaggtggtttgcttgaagtagagtagtgagtcagcagtggggctatcaatagaatccagtcaatagttctgtcgctcaccctctgacctcgcttttgatgttagtctagttggaaaaaaaaaaaagtagtaggaggagattgatggttttatcagctgaggccattgcctttctctgtgtgtatgtgtgtgtacacattgatatgtttgtgtgtgtttctgtgtttgcctgtgttttctgaatcatttttgccaagtggtatcttcttcctacttcccagatggtagttctgatttttt

SEQ ID NO: 665413 - DNA, 460 bp, Homo sapiens
agcacagataagctgtaagatgtttagctttgttaaggaggttaggacagtaggaaaatttgaccattattgaaaatattcaatacaaagccaaactgaaatgtatctttctgctcagattaaagccatttttgccaatgtctctgactccgtattttgatcaattccttttcagtcgcatggtagttttgtccgcttatatcatcctgccgggaaaaaaattagttytgaaagtgttttaaacagaacttactcagagaatattgaaaatgcaaccattgtgatgttgatgttatgcgatggatcctctgtgtggaaatcgttctgaaatgtctttggatgatgaattgtacggagacaagtgtggcctcaatttaccttaatttgttgggaaataagagatacatagaactacaccagtccaaatcccatctagatttgtgctatacattttgtttat

SEQ ID NO: 665414 - DNA, 601 bp, Homo sapiens
agtaaaaaaaaaaaattaaggtaaatttaacagattaaaatgaacttatttaattrgggtggagggaggagtggttgtttcaggactaaaatattttggtaaacacaatctttttttttgttacagcccatttagctaatgaaagtgtcactacaatgaaagaaatttgtatccctaattgttttgggtataaacccatctgaattggttcacttttaattctaattttagaaatatagcaactgttaaatgcaaatctaatactagatcataaattacaatttaacaaactttgaaaaacatttcatgaaattaaggtaccactgaagttcagttagcatactaaacttaaggaaaaatatttctcggtaaatatttcagaaaaaatacaatatagaaaataatagatggctaaatattgtatttgattttaaatattaaggcaagaggacatcttaaaaaccataggacagttgaaaagtaagtatatagctattttataaatcaaaataagaatgtgtacttcggattgtgttatgaatgaaatcaactgcatttttttttctcctgaaagtcaaagtggaaataaaatatttgacaa

SEQ ID NO: 665415 - DNA, 601 bp, Homo sapiens
agtaaaaaaaaaaaattaaggtaaatttaacagattaaaatgaacttatttaattggggtggagggaggagtggttgtttcaggactaaaatattttggtaaacacaatctttttttttgttacagcccatttagctaatgaaagtgtcactacaatgaaagaaatttgyatccctaattgttttgggtataaacccatctgaattggttcacttttaattctaattttagaaatatagcaactgttaaatgcaaatctaatactagatcataaattacaatttaacaaactttgaaaaacatttcatgaaattaaggtaccactgaagttcagttagcatactaaacttaaggaaaaatatttctcggtaaatatttcagaaaaaatacaatatagaaaataatagatggctaaatattgtatttgattttaaatattaaggcaagaggacatcttaaaaaccataggacagttgaaaagtaagtatatagctattttataaatcaaaataagaatgtgtacttcggattgtgttatgaatgaaatcaactgcatttttttttctcctgaaagtcaaagtggaaataaaatatttgacaa

SEQ ID NO: 665416 - DNA, 621 bp, Homo sapiens
tatgatttatgaatatataattaatatccaatgaaaaaacagccttctcatrtcatacacacaataaactcagacccatagacataaatgtaaaagttaaaacaataaaacttttagaaagaaacctgagagtaaatcttcatgactttgggttatgcaaagccatattagatataacactaaaagcacaagtgacaaaacaaaaaattagatatattggatgttattgaaattcagaatttttgtgctgaaaatgatacgatgagcaaagtgaaaagacaacctaaagaatgagggaaagcacttgcaaattttatatctagtaagggacatgcatcaagaatgtgtaaagagttattacagctaaataataaaaagcccaattaaaatgggcagagaacttgaatatgtctatttttctaaagaagatatacaaatgaccaataagtatatgaaaaaatactcaacattcttagctatcagagcaaagcagattgaaaccactatgaggtgccaccttgtacccaccagcaaggctgtaataaaaaagacagataataacaagtgttggtgaggatgtggaaaaattggaaccttaatatactgctggtgggaatgtta

SEQ ID NO: 665417 - DNA, 576 bp, Homo sapiens
gaaagacactttcctataaaagttggggctaaaatccagagcacaaaagcccatttaatctgaatttcatgtatatctgaatttcaaggtgaagagtcctataaagactaatgaaatatataattgattcattcaacagatccgtattaagcacccattgtgctggttatggtgatagatgcttttccatgttagatgctcttagaattcctactcctccaactacagtaggatggggctaattaattactgccttcattcaataaatatttatcgagcagctgctgttgggctgacactgygcaagctatgtaggctctgaggatgcagagagagggatcctgcttctacttttaaggagctgtcagtctggtcaggggaatattacaagtaaagggagagcttcagattattttggtaagtgcttccataggggtaagcacagggcgtaggaggaatgaaaatgagggaaaggaacccaagctgagatttgttttctgtgggaggtggagaatagatctcaaagcaggtgaagcttagagcattttgaagaatgagttaaagttggaaatgaga

SEQ ID NO: 665418 - DNA, 596 bp, Homo sapiens
ggggtaagcacagggcgtaggaggaatgaaaatgagggaaaggaacccaagctgagatttgttttctgtgggaggtggagaatagatctcaaagcaggtgaagcttagagcattttgaagaatgagttaaagttggaaatgagagtatgggagcagagacatcctgggcatagaaacatgaggatctgaaaaaagaaaagaggtaaccacgcattggttgggtatggctggaagcggagatgggcagggtggggatgtggagaaagctgaggctagaggtagtgttgaatacatgtgtcaagagttcaggagagagagggatggagaagctgccctgctggccatcagtatggaggtgggagttggagctgtgggttaagatttgcagagacagcatatggactcagtgtgctagtccattctcrtgcggctaataaagacatacccaaaactgcctaatttattaaggaaagagtttcaatggactcacagttccacatggctagggaggcctcatgatcatggcagaaggcaaaggaggagcaaaggcacatcttacgtggtggcaggcaagagagcctgtgcaggggagctgt

SEQ ID NO: 665419 - DNA, 593 bp, Homo sapiens
gaaaatgaggctgtgttgtcatggaggacaagggaaggaacttggtcagtggccacgtgttctgctgagaggatggcaaaagaggactgaaaagcctccactgtatgcagcaactaggaacaagttattgtgtttcttagacacttttgcctctgagctacagtcaggtctcagatgctctgagaatctggtccscacttgaaatgaatttcagaagcatgagctttttttttacccctttggcttagttatggcaggattcctgttcacaaggtcttgtagttttttagtgttttctttgtgtttatgtaacttccttgcatactctgtcatctccagactctatcctgtgtcttaaatttatattaatttaccaataatctcttagggaaaaagtttacacgtctttattaactatcaacatgtggttcgggatgtctcttctagaaatcagggacacataattagcttgtgtcttaaattgatgttttcaacactattcttaatgcaggtgcacaaacctttatctggaattgtaaaaaccaaaccatctaaaactggaatgtttttcttgtcgttaagattgttttaac

SEQ ID NO: 665420 - DNA, 591 bp, Homo sapiens
ataatctcttagggaaaaagtttacacgtctttattaactatcaacatgtggttcgggatgtctcttctagaaatcagggacacataattagcttgtgtcttaaattgatgttttcaacactattcttaatgcaggtgcacaaacctttatctggaattgtaaaaaccaaaccatctaaaactggaatgtttttcttgtcgttaagattgttttaactgagatgaggttatttagagtgtttacttatctctctgttagtttgaataatcatgttttaattattaatgtgttttattacaaggtgtttcctcagactccactggggtattaaataatacatggtacatgtaccatattgtctttttaaaatctgaamgaacctgaatcttgaaacatatctagtcccaagggttccaacaatggacttggcatgtctaagctagtgactcatctgggctatttctgatttcttaagtgaacctgactttcctgcctgctttgtggccccccagagccttctagtgtcatagaagagggagctggtggtattgtaattgtatgttggtaacctgtagccaggcatgggcaga

SEQ ID NO: 665421 - DNA, 622 bp, Homo sapiens
tgttcctctgtacatgaaacatctctttttcctctactkttaaaaaatatattatttttagagcaattttagctttatggaactggagagcagaaagtaccaagaggtcccatatactcttacctcttcctgctttgtttcccctgttaacatcttagattggtgtggtacgtttgttacaattgatgaactgatattggtaccttattgaattagggttctctagagggacagaactaataggatagatgtatatataaaggggagtttattaaggggtatcaactcacacaatcaatgggtcccacaataggccgtctgcaagctgaggagaaaggaagccagtccgagttcgaaagctgaagaacttggagtccgatgtttgagggcaggaagcatccggcatgggagaaagatgtagtctgggaggctagtcctgtctagccttttcatgttcttctgcctgctttttattctgattagattgtgcccacccagattaacagtgggtctgcctttcccactccactgactcaaatgttaatctcctttggcagcaccctcacaaacacacccacaaacaatactgtgcatccttcaatcaagctgacactcagtgtta

SEQ ID NO: 665422 - DNA, 622 bp, Homo sapiens
tgttcctctgtacatgaaacatctctttttcctctactgttaaaaaatatattatttttagagcaattttagctttatggaactggagagcagaaagtaccaagaggtcccatatactcttacctcttcctgctttgtttcccctgttaacatcttagattggtgtggtacgtttgttacaattgatgaactgatattggtaccttattgaattagggttctctagagggacagaactaataggatagatgtatatataaaggggagtttattaaggggtatcaactcacacaatcaatgggtcccacaataggccgtctgcaagctgaggagaaaggaagccagtccgagttcgaaagctgaagaacttggagtccgatgtttgagggcaggaagcatccggcatgggagaaagatgtagtctgggaggctagtcctgtctagccttttcatgttcttctgcctgctttttattctgattagattgtgcccacccagattaacagtgggtctgcctttcccactccactgactcaaatgttaatctcctttggcagcaccctcacaaacacacccacaaacaatactgtgyatccttcaatcaagctgacactcagtgtta

SEQ ID NO: 665423 - DNA, 629 bp, Homo sapiens
ttcctcattactgaggtcaaatctttctgaagagtttaccctgtgcactgttaataatgaggtttccattctagttggaacaggcactattygtggctctcagtgagccctgggtactgttcctgccaatcatttcaagtggttctttccatgattctgaatcctcacatgcatgtattgatcagtattccgctaaacactcaaatactgtatatctctggagttctttctcttggcagttttcctctttaatactgtttctgtgagctcttagtccttgacctccctggacatcttactccatcttctcaaattagggaaaccaccccagccttgtcttgagtcctcttctctgagctgtggcctggtaattttctctagggagccagcttggacaatcataggacttacctttctcatttctcacctctcaggaatccctgtttttttgtttactagagttcagtatcttgagaaccattgtttatgcccccatctttgcctgttttatgtctatgtggtggtaaatttggtacttgttattccaccttgatcagaaacagaagtgtccttgataaattcttaatggttttaaaggttgcctgtggtttctcttttttttttttttt

SEQ ID NO: 665424 - DNA, 629 bp, Homo sapiens
ttcctcattactgaggtcaaatctttctgaagagtttaccctgtgcactgttaataatgaggtttccattctagttggaacaggcactattcgtggctctcagtgagccctgggtactgttcctgccaatcatttcaagtggttctttccatgattctgaatcctcacatgcatgtattgatcagtattccgctaaacactcaaatactgtatatctctggagttctttctcttggcagktttcctctttaatactgtttctgtgagctcttagtccttgacctccctggacatcttactccatcttctcaaattagggaaaccaccccagccttgtcttgagtcctcttctctgagctgtggcctggtaattttctctagggagccagcttggacaatcataggacttacctttctcatttctcacctctcaggaatccctgtttttttgtttactagagttcagtatcttgagaaccattgtttatgcccccatctttgcctgttttatgtctatgtggtggtaaatttggtacttgttattccaccttgatcagaaacagaagtgtccttgataaattcttaatggttttaaaggttgcctgtggtttctcttttttttttttttt

SEQ ID NO: 665425 - DNA, 629 bp, Homo sapiens
ttcctcattactgaggtcaaatctttctgaagagtttaccctgtgcactgttaataatgaggtttccattctagttggaacaggcactattcgtggctctcagtgagccctgggtactgttcctgccaatcatttcaagtggttctttccatgattctgaatcctcacatgcatgtattgatcagtattccgctaaacactcaaatactgtatatctctggagttctttctcttggcagttttcctctttaatactgtttctgtgagctcttagtccttgacctccctggacatcttactccatcttctcaaattagggaaaccaccccagccttgtcttgagtcctcttctctgagctgtggcctggtaattttctctagggagccagcttggacaatcataggacttacctttctcatttctcacctctcaggaatccctgkttttttgtttactagagttcagtatcttgagaaccattgtttatgcccccatctttgcctgttttatgtctatgtggtggtaaatttggtacttgttattccaccttgatcagaaacagaagtgtccttgataaattcttaatggttttaaaggttgcctgtggtttctcttttttttttttttt

SEQ ID NO: 665426 - DNA, 645 bp, Homo sapiens
tgttaaaatctcacttaggtttcattaagccactttttttcctattttttgaaaggtctattttttccttccaaagaatttgttttaacatgtagttaacgtatctttgttagttattaactaggaagaacatttaagtggaatcacccattttcctaactttaaatatatattttttatatttcacagtttcagaaattttagaaaaatgactgagtatctatgaatattattacgcttataatgcctaactagctctggatgtaggacattggcaaaataatatgctgtgaagtatcacagactttgttcttctcttcttttagttctagaagcatcacatagcaaaaaaggaaaattaaarctctcagtgtaacttgttctgttttaatttttaagtggcttatttaattttgtagttggttgtataaacaactaatatagaaatgagtctaattgtgcagatatttttaatttgtgtccttaagttgctttttatagagaacagacacattggttgtcagtgcttaaaggtttccaatttcttacctcctttttgttgattgcaaagaaaatctgaacataaactgtagtatctgtgattatgctggtcaaagcaagagaaatggtccaaatttttttttt

SEQ ID NO: 665427 - DNA, 508 bp, Homo sapiens
gtaggttcagttgtaatatcttccctttcatttctgattttgagttcccttttttttcttarttcagctaagggtttgttgattttgtttatcttttcagaaaaacaactcagttttttcagtttttaaaattgttcttccattctctagtccattttttttctgatcttacctttactattttcttccttctgctaattttttgtttagtatttttttatttttctgtttcttgaggtatatagttaggttttttatttgagatctttctcctttaatgtacgtatttattgctttaaacttctcttctagtactgctttcctgagtcacatatgatttcgtatgttgtattttttgtgtcttgataaatattaatttcctttttgattcattctttgacctcataattatttgcgtgtattatttaatttccatgtatttgtgaatttcccattttttctgttatttcagttttatttcattgtgactgaaaaatgtatttgtaat

SEQ ID NO: 665428 - DNA, 432 bp, Homo sapiens
cttgctttcctttaggctatatatattttaaagtttaaagaatttacacatgccattctgtctggatttaggcaaggggacaaagaaactggaatggtgttttcctaataacataggtaatagtaataataataatacagataatgatcattggtaaytattgtttatttagcaattagtattgccaagcattttacatgcattgttattcgaagtattttacatgcattatttgatttctttatgtaatgttcttgtgttgctcattgacagtgattgctttggggaaggatggatatcagttggaacaaaaaagccaatattcagctttgagataaaaaattgattaaaaataaaaatttcacagtgagacaatagtttttaaaagaagcccagctttgagagaaggcgggagagagaaagaatatttcg

SEQ ID NO: 665429 - DNA, 387 bp, Homo sapiens
atgctaggatggtaataaaaacaaatctgaagctctctgtaagtatgaattgctgtggaaatgtttaacacctaagtttgagagctccctaaacatacatcactatttcaaaagctgcagaagatttccttcatgctttttcactttaccaatgactgtgtaacatatggrtatatatatatttaacatatatagctctgagtcttatttttagtagaagctctggagccattctatgtttgaaatagtcatagcatggaattttatgactgagaattctaggcagccctcagtaaaccttggtagtccacatagaaacactcagtaaatgctttttgcctggttgatagttcttccttcagtcttgcagcatgggtgtattagtcc

SEQ ID NO: 665430 - DNA, 591 bp, Homo sapiens
caacttattgggctcaagcaatccttcagcctcagtttcctaagtagctwggacttcagttgcaagctaccacaccaagttaatttttctattttttctagagatggggggtctcactatgttgcctaggctggtctcgaattcctggcctcaaggagtcctcctacgttggccactcaaagtccagggttaacaggtgtgagctactgctcctggcttaatgtcagctttattgaatgaaattgctatgtgattaaaaactgcttatcttttttgtttttccccagtaagcattgactacagagtggtaatttatagttgccactccacaaaagtgcagaacatttgatgggaacagggtgatgaagagaacctacttttagggcataaaccctttgaatgtttcttttcaaaattatcttgaagcaaaatccaaatcatagcattacaagacattacagaaagtatggtgaagctttcaatattttaccttgactgtttaacagaaaggttttttaaaggtttgcatttgatcttcccaaatgcctccaccccttctgcccctaaacaattaatgcctattaaagctat

SEQ ID NO: 665431 - DNA, 576 bp, Homo sapiens
gaaacattcaaattaatttttaaaaaacgctatatcaacaaacataaatgagtagtgattttgacagcaccagtgctcaaactttgcagtttaagtaacagggaatcataatggctttttttctttaaaactaggagaatgatcaaaattcattttttacaaaatttgccattttgatgaactgtcaatttttgtaaaaaatgaattttttcattttcgttttgatgaacagagattatagaaaccaaggggatatgaggccaagaatatgagcygtactaatttgaagatttggacaagaagatgctggctcaaattcagagattttgggttgcatatgaaaacaaagttttctaccaaacatcacatatgctcactcaaaagtgggagttgaacagtgagaacacatggacacaggaaggggaacatcacacaccggggcctgtgggggtgtggggggcaaggggagggagagcattaggacaaatacctaatgcatgtggggcttaaaacctagatccagattgatgggtgcagcaaatcaccatggcacatgtatacctatgtaacaaacct

SEQ ID NO: 665432 - DNA, 599 bp, Homo sapiens
gaatgatggaagaattattaaggaaaacatgtcatttctggcttaaaaagtttaaggtaccaaaaagatggccgtgggagctaaagccactggaatctcagagagaaccttgtaaatctgtgacgcactgaagcttagtaacttacacaaaatatttgcagagaaaaaaaaaacccgaaaaactttgagtggcgaaatgggatgtaacaaatggcaaaaggatctttactgttgttactatgcagggaacttatgtgataacattgtttaacatctttttaacagttctggatagaatttatccatyaacttaaccaatttactgagtacataatatatgctaggtgttgttttttgcatgatttttaataggatttgttattgagaattcactatgtgctcagcacacttctaggcaatggggataaaatagagaactaaacagacaatccctgccatccagggagcctccattctagagcaggagacaggtgtaaacctcatataaaatcaggttatggtgagcaaacagaatgaattgagtctgggtaagaagagcatatgaagcgaactaggtatgtagtatgtgagggaactag

SEQ ID NO: 665433 - DNA, 617 bp, Homo sapiens
ttggtactttttgtctttttttgttgttgatctgtctggctagaggattatttgtctatccacctacctatctgtgttttttccaaatatctcatttttggtttaattaatttatcrctattgtttttctgttcttgagttcattaatttctgttattattattttctttgtttttcttgctttgggaataatttgttctttcttattttctattatggatgtataattttccctctcagcaatgctttagctgtatctaataagtatgaatgtattttgtttttattttcattcaattaaaaatattttctaatttcccttgttactcctctttacttaattggttatttaaaagtgtgttgattaagttccaaatattgggaatattctatatatttttctgttgttgatttctagttttattccattatggcttgagcacatactttccgttattttagtttttaaaaattaattaaggtttgttttattaccctgtcctgaattgttggatatttcatgtgcacttgaaaagattgtatattctgttactggagagagtattctataaattacaagtttcttgaggctattttttctgattttctaatactta

SEQ ID NO: 665434 - DNA, 604 bp, Homo sapiens
tctccttgagataagttgcctctttttaacttttggactagttggttgctgagtttaagaaaatatgtgatttgaccacttatataaattttgttgttgtttaaagagtgggagcattatttccaactgtctacatcttaagtggaagctggaacatagagtttatatgcttaacactacactgtgaaattgaattggacattcttattaaactgggtagcatgtttgggctgagggataattgtgtaaagaacatattggtcttccattaaagagttctgtgatgtgtaagatatatgtaaccaatcctataaaaaaagtttgtgagaagttatagttatgtacgtgataacttttgtgatgattttgccagaggtgatcagataaagttcttgtcaggatgagtcagaatttaataagtgaatgaaaggagaaaggcattccacctggaggaaatgtcrtgaatgctgacatgtgaacaagcctgacattttcagggatggatcatgaggctagagctaaggctgtgattgggaaggtctttggtttttgtgttaagaatttagccttcatcctgtgtattagtccattttcacactgctat

SEQ ID NO: 665435 - DNA, 631 bp, Homo sapiens
agtctaggttccctatgtggccttgtcatgggtgaagatgaggacacaatttttttctgtgctgtttggctggagtagagcaggtcctatctaaacattttctggcttactaggctgcccttttcctagtcctttgggaagaaagagcaagcctttattgagacttttgttttggtcrgtgtacattgacatttttgtgttgccagcttcttcagcttcaggtctgggatatatgaggtaaaagagcccagggaactcacgactgtgttgttccttgagtcccaaggttcctatccattctgccttcttctctgtacttctcagtcttctgatctctgttttatagacaatgtctagggtttagggtggtacttagagggaagaagagggaaaagtatgctccctttagcttcctggaagttttcacattagtccttaaacagcattatgactttgaattccacccacttctttccatttcacaggcaaaataagagcagtagaaaatgataaagagtggtgtgggtgtgtaagtagatatgaggaggaacatttctctataaagagaggtgttatactatggccccttttaaccaatcaaatatgtattgaacacctaccacgtacaaaa

SEQ ID NO: 665436 - DNA, 604 bp, Homo sapiens
tgtgggtggcctcattaccactgggttgtggtgaaagtcttgggtctctactagacctcccttgacatcacctaaatggggagggggaggtgtgcctcatgacttccaggcaggggtggtagatgaggcttcccagatggtctccagtgaacactgtgtgggtgggggatactcacctctggcatcagggatagaagttccagttcctagcttggccttgtctggcatgccttgtgagagtattgggttgcctcattacagattggtgaggatggaagtctaggttccctatgtggccttgtcatgggtgaagatgaggacacaatttttttctgtgctgtttggctggagtagagcaggtcctatctaaacattttctggcttactaggctgcccttttcctagtcctttgggaagaaagagcaagcctttattgagacttttgttttggtcggtgtacattgacatttttgtgttgccagcttcttcagcttcaggtctgggatatatgaggtaaaagagcccagggaactcacractgtgttgttccttgagtcccaaggttcctatccattctgccttcttctctgtacttctcagtctt

SEQ ID NO: 665437 - DNA, 631 bp, Homo sapiens
agtctaggttccctatgtggccttgtcatgggtgaagatgaggacacaatttttttctgtgctgtttggctggagtagagcaggtcctatctaaacattttctggcttactaggctgcccttttcctagtcctttgggaagaaagagcaagcctttattgagacttttgttttggtcggtgtacattgacatttttgtgttgccagcttcttcagcttcaggtctgggatatatgaggtaaaagagcccagggaactcacgactgtgttgttccttgagtcccaaggttcctatccattctgccttcttctctgtacttctcagtcttctgatctctgttttatagacaatgtctagggtttagggtggtacttagagggaagaagagggaaaagwatgctccctttagcttcctggaagttttcacattagtccttaaacagcattatgactttgaattccacccacttctttccatttcacaggcaaaataagagcagtagaaaatgataaagagtggtgtgggtgtgtaagtagatatgaggaggaacatttctctataaagagaggtgttatactatggccccttttaaccaatcaaatatgtattgaacacctaccacgtacaaaa

SEQ ID NO: 665438 - DNA, 587 bp, Homo sapiens
ttttttctattcttaacataattaggaatggattagaggaattagaggcaagttatcctccagataagcttaaatcccattttaacaattctcaaggaataaaaaaaattttctttattagtggaatcacttgataatttttttttaaaaaagctcagaagttttccttgccctataaaaagtaagaggagggatatctttttttcaattacccagccaaaaggggaagaagccagagctagacaggaactacaaaatcaataaggtcttttttcatgtatcttatttcttcttcctgaggaatattcttacctgtgtgtttgtgtgttgtttatttatttatttataaaaatatggagatattatcctcttcttccctcttccattcttttttcttyggtaaatctcctttctttcttcgctggtaccctcttcccatatctgcccctgaggagagcgagtcttgtttctgaaaaggagccttacagtgggaggagtttctaaaatgtgattataagttcctcttccctttgaactcatgttaattatgctaagggctggtctaggtcattgctaatggagttctt

SEQ ID NO: 665439 - DNA, 455 bp, Homo sapiens
tcttttttcttcggtaaatctcctttctttcttcgctggtaccctcttcccatatctgcccctgaggagagcgagtcttgtttctgaaaaggagccttacagtgggaggagtttctaaaatgtgattataagttcctcttccctttgaactcatgttaattatgctaagggctggtctaggtcattgctaatggagttcttagtgctctttacatttcctagtttgtaagtttrtgaaacatttttaaaacagaaaaatatagagtaatataacaaagagtcacagattgccactttgccagatcttaacattttgtcatatttaattcagatttattttaaagaagccatccaggacagagggaattgaaatcccctaagaagccctttttgttttctttcttttctctactcactggggtaaaacaaatctaaatttggaaattatgattccc

SEQ ID NO: 665440 - DNA, 613 bp, Homo sapiens
gtgttccagaaccagcctcattgcaacccactcagaggaatagcacctgtcagacagtttctcttcctcagatgcctgagcccaattctgtggtgcttccgatttctgatatttctgataatttgactgcttccctttggttcctcagtcctaggggtgctagctgcttcatgcagttgtaatctctggcctatttccctattcttcttcctattcatttgacatccagtacctgtgaaaccaataccctgtattaaataaattgcctctgttgaaataatttctgcttccctgaaatttgaccaatagtgtartgaaagtattgtcaaagcatttgtatagattataaaatagtctatgttaagtgcacaaaacttagattctgcaggtaaactgccactttctggaaattataggtaactgatgaagcagacatctatgtcttacccatatgtgatattcaccagccaaacaaataaatataacatgtcaggtgatgaaaagtgccatgtagaaaaataaagcaggataaggggatacaaattaattagatgaatgctaccttaatagggtggtcctatattttataggatgatctctctgagaaggcagc

SEQ ID NO: 665441 - DNA, 582 bp, Homo sapiens
atgagctttcacacggaaagtgcctaagacaagagacttgccaagaatccttattggttttgtagatcacttcaggtgaagaacttcttaattgtgaatgttagcaataataagtagagagtgacatccttaactatatagtagttatctatatagtagttaactacgttgtaaccttaacttatggtagactttttacatatattatttaatcatcattgaaatgttatgaggtatatccagagtggtggtagattattattcctatttttaaataaaaggtgatcattttagggaggttaagtagcttgttcagtgtcactrtatggtaaagaagctgggttttcaagccacatgtatctgactcaaaacatcaaggcattctcctcatggtgatggttgtcccaaagggggttgaagtgcccccacttccagcccatgcctttgctacaagaaattcagctcaacagcgtttactggcaatgaaaaaattcctgggcattatggtttctgagagtggacttacacattcctaggtcgagtttaaggagtttatgggaaaataggctgtatttgcagtct

SEQ ID NO: 665442 - DNA, 631 bp, Homo sapiens
atggatcacaatgagtggggggaatgtctcccatgatccatacaattgtcatatcaaagtatatttcaaactgttgcaattacccattttcttaatctgtttatgttgctataactaaatacttgagactgagtartttataaagaaaagacatttatttctcacagttctggaggttgggatatccaagatcaaggcactggtatctggtgtctggtgtctggtgaaggccttcttgctgcatcctcacatggcagaaggtggaagggcaagagagcaaattcactgagtgagctcactatgtgaagcctcttttgtaagtgtcttagtcctattcaggaaggaggagccctcatggcctaatcacctcttaaagtccccacctcttaatactaccactttggcaacacctggattttgaaggagacacagtcaaaccatagcccccattttcttttctctttcatttgctagtttctaagctttgtagaggcagcagcatgtctgtcttggttactactgtaacatcagagccagtataccgcatagcatgtagaaggtactcagagaatatatgagaataaatgaataacagcttctccttctagtaatgtattggcttttcctttaa

SEQ ID NO: 665443 - DNA, 631 bp, Homo sapiens
atggatcacaatgagtggggggaatgtctcccatgatccatacaattgtcatatcaaagtatatttcaaactgttgcaattacccattttcttaatctgtttatgttgctataactaaatacttgagactgagtaatttataaagaaaagacatttatttctcacagttctggaggttgggatatccaagatcaaggcactggtatctggtgtctggtgtctggtgaaggccttcttgctgcatcctcacatggcagaaggtggaagggcaagagagcaaattcactgagtgagctcactatgtgaagcctcttttgtaagtgtcttagtcctattcaggaaggaggagccctcatggcctaatcacctcttaaagtccccacctcttaatactaccactttggcaacacctggattttgaaggagacacagtcaaaycatagcccccattttcttttctctttcatttgctagtttctaagctttgtagaggcagcagcatgtctgtcttggttactactgtaacatcagagccagtataccgcatagcatgtagaaggtactcagagaatatatgagaataaatgaataacagcttctccttctagtaatgtattggcttttcctttaa

SEQ ID NO: 665444 - DNA, 449 bp, Homo sapiens
gtgtcccgtcccaaattcatatgttgaaatcctaacccccagagcaatagtgctgggaggtggggcccttggctttgattaagtcatgtgagtggacccctcctgaatgggattagtgcccttataaaataggcgaaaggagctcatttgccccttcaaccacataaagacacagcaagaagtcaccatctatgaactaagaaatggaccttcatcagacaccaaatctgttggtgcattgatctttgacttccccatctccagaactgtcaaaattaaattwatgttttttataaattacccagtttatggtattttcttatagcaaactgaacaaactaagacaaatatttagcccctaacatttagagaccaaaagtacattagtagtggccaaggactaggaggagaggatgagaaatgactactgctaatgggtactctgtttc

SEQ ID NO: 665445 - DNA, 575 bp, Homo sapiens
tgttatagcatgcatcagtacttcctttttattgtcacattgcatgatattgtatccacagcacttttgaaaataaatattgtatgtagtcaaaagtcaagggtaacatttgtacatatcacattatagcattttgttttcattaataatatttcatctttgaaatcattcattgcaatagtgaaacatgcatggtatcatcgtatgtgagtatttatttataaaacattttataataatctcaacacgatcattaaaatacaatcacaaatatatatatatatttttttttgagatggagtctcgctctgttgcccaggctggagtacagtggtgcgrtctcagctcactgcaagctccgcctcctgggttcacaccattctcctgcctcagcctcctgagtagctgggactacaagcaccagccaccacacccagctaattttgtttttgtatttttagtagagatggggtttcaccatgttagccaggatggtctcgatctcctgaccttgtgatctgccctcctcggtctcccaaagtgctgggattacaggtgtgaacaaatacattttt

SEQ ID NO: 665446 - DNA, 580 bp, Homo sapiens
tggccaggcacaggtggttcaggacggtaatstcagcattttgggaggccaaggcatgaggattaattcagcccagaagttcaagaccagcctgggcaatataggaagactcctcctctacaaataattttgaaattttcttggtgtggtggcacatgccacatagtggtcccagctacctaggaggctgaggcaggattgcctgagctggggaggtcaatgctgcagtgagccatgattgtgccactgcactctagcctgggcaacagagcgagaccctgaatcgtgtgtgtgtgtgtgtgtgtgtgtgtgtgtgtgtgtgtgtgtgtatatatatagagagagagagagagtcactgttgatagatgtgcttattgcattcccagagatggcttaaatataaatgagttcccttctatcttttcactgccatccagtaattgctcgtgattttacaggtcacaggcacatgaaaatcttcaacacccccagcaactccagcaccttcactggcttcatcctcctgggcttcccttgccccagggagggacagatcctcctcgttgtgctcttcactgt

SEQ ID NO: 665447 - DNA, 524 bp, Homo sapiens
atatatttcatttcctcaaatttcatctctccttcattttgaagttcaatgaagtaattggtaaatatctatcgatgtattgtctatctatatcctctataacagtgtagacaatcattttttaacaaatatttgagaaatacctattatcttcctcagactatgtggggcactggcgataaagagtgaacttgaagtacaagagcaaaaawcctgagtcctgaaagtacccggctgtttgtaaaaactgaaagaaggccagtgttatattgctgaagttttgaggaggaagggtgtacatgttatgtgtgtgcatgcatgtgtatagagaggagacagtcagagaggcaaattccaatggctttggaaacataatttagctgaaagttggcccagaggtctgagttagttcagcagaacagactgattccagctttcacctctagaagtcccctctgtttgttttttgttttgttttgtttgttgttttggtttttgttttgggggttgtattgaggcagagt

SEQ ID NO: 665448 - DNA, 483 bp, Homo sapiens
atataagacacattttcttccctcataggattcacagtcttgtgatcgagaaaattggaaggttttctttttgttaagtagcaaaagttcagtgagaggggaaggcctaattacagtggaagctcacgagaagctgcatgtatgtaagtatggaacttgtgtgaaagaggttgtaagcacagcacaggcattgtctttttgcaagtgcacctcaggttacagaatagaagtgcttctagaaattattttacaccatcgtataatcaaccactgctagtggttactactaaggtcccagagacaaagcaagtatgaccataaaatataatataggctgggcgtggtggctatgcctataatccgagcactttgggaggccgaggtgggtggatcacctgagatcaggagttcgagactagcctggccaacatggtgaaacccygtctctactaaaaatacaaaaaaaaaaatagccgggtgtgg

SEQ ID NO: 665449 - DNA, 483 bp, Homo sapiens
catgggtgatagagtaaggccctgtctcaaaaataaacaaataaataaataaaaattaaaaattaatttattgtttttcatttaggtttttaaatgattctgctaaaaaattatcctagtwactttgtaattatatttattagtagtattattatgaacactaacagctatgaatgttgcaggtcctaatatattccaggaactgcactaggcactacaacatgtactaggaaactgtacttcaacaatactttcacaaaagctcagcaaaacaatggtaacttgcctagaggcacatagtatgctgtacagtatttgaacccaagtcaatctgattttatcatttattttaagtaagtaccttatataacaggattacttcattaagtattactggagtgagtctatatatatctatatctatgtatatctatgtatatacatgtatatctatgtatatatctatatctatgtatagatcta

SEQ ID NO: 665450 - DNA, 611 bp, Homo sapiens
gttggccaggatggtctcaatctcctcacctagtgatgcgcccacttcggcctcccaaagtgctgggattacaggcgtgagccaccgcgcccggccaggagattctttattttatgttcactataacaaaattaagcaaacaatatatagataaaaaaatttttaagtgtttgcaggttaggcaccaagtatgaagcaagtctagttcccttatataataaagatttgcttcatatctttttatttgagcccaaaacaagtatgtaatctctgtgaagtcttgaccttgttggctcctgtctgtgtatactcaatgtttaacccagagtctggcacatagtaggtgcatagttgatgcataactgacaaatgtttgttaattatatggaattcttttaaaaaaraatgaagtttattctggagagaaaatcacacacaaatatacacaaatacataaactcagatacacacatgtacacacatattctttctcctcctcctccattaacctcccacccccatccccaggtagatcagttccttaaagggaggatatctccacaaaggggaaagtgtttatggtatcttttagataactatcctgacttctg

SEQ ID NO: 665451 - DNA, 635 bp, Homo sapiens
ccaaatattctgaactttaacaaggatatttgaggacacagaaataagcctgctggaccaatagtttctagaaaattgttagcaaaatatctaagttatttatcttgtctcaactcctgatttagmaaatatcagaaagatctttctgttctctgcacatcctgaggtgactcttttattcattatttaatttatggaaaagcaagataatgaagggacaaattataaagtttaggacttaatttctagcaaaaataaaggcacatggctttattactagagaaattgatttacccaacagcaagctccctcaagagctaagtcatgatgtagaatagtacaatttgttggagaaggaggctgacaagcagggaaaatggtggcctgccaaagaagtcataggtaagggacataacagctgccttcagttatttaagacctcactaccaccatcatgggagaggaattagacttattttgtgtagtttcaacaaagtcaaagtttacctgctgacttggggagtaccaagatcaatgggtaaaagtaataaaggatacaaagtttgctcaccataaagaagggctttgagagaactagagctcctcacgagaaaaaggggctggattattcagca

SEQ ID NO: 665452 - DNA, 557 bp, Homo sapiens
gcctgccggtgctaggtgatgtaatgctcccaaaccgtgtttgtcaaatctttccaccaaagcatgtttagcaagagtggtcagagaacatggggtatkgggggataatatttctttaaattcaaaattgtatctcaaaaattgtcataaattatacttcctaattcatagtacatacatatttggtgtgatataaaattatctttctaggtaaaattggcccctcaggaagacatttaatctggggcttttacgtatcctatagcacatgctgtttgagcacaactcaaggagaccatggggtttcctcagagttaatataacatgttatttttaataatccctacaggaaatgttaacaaaaatatcaattaaacccccaggcaagatgtatgaagatccctagggacagcacagaaagttacagaatcacaagaacatgaagggagacctgagaattctcaacagtgcctcaaatgaggcataaattaagaccaacacatagttcaacaccctcagtgagaaacaagccactagactcttagggtacaagagaa

SEQ ID NO: 665453 - DNA, 557 bp, Homo sapiens
gcctgccggtgctaggtgatgtaatgctcccaaaccgtgtttgtcaaatctttccaccaaagcatgtttagcaagagtggtcagagaacatggggtattgggggataatatttctttaaattcaaaattgtatctcaaaaattrtcataaattatacttcctaattcatagtacatacatatttggtgtgatataaaattatctttctaggtaaaattggcccctcaggaagacatttaatctggggcttttacgtatcctatagcacatgctgtttgagcacaactcaaggagaccatggggtttcctcagagttaatataacatgttatttttaataatccctacaggaaatgttaacaaaaatatcaattaaacccccaggcaagatgtatgaagatccctagggacagcacagaaagttacagaatcacaagaacatgaagggagacctgagaattctcaacagtgcctcaaatgaggcataaattaagaccaacacatagttcaacaccctcagtgagaaacaagccactagactcttagggtacaagagaa

SEQ ID NO: 665454 - DNA, 557 bp, Homo sapiens
gcctgccggtgctaggtgatgtaatgctcccaaaccgtgtttgtcaaatctttccaccaaagcatgtttagcaagagtggtcagagaacatggggtattgggggataatatttctttaaattcaaaattgtatctcaaaaattgtcataaattatacttcctaattcatagtacatacatatttggtgtgatataaaattatctttctaggtaaaattggcccctcaggaagacatttaatctggggcttttacgtatcctatagcrcatgctgtttgagcacaactcaaggagaccatggggtttcctcagagttaatataacatgttatttttaataatccctacaggaaatgttaacaaaaatatcaattaaacccccaggcaagatgtatgaagatccctagggacagcacagaaagttacagaatcacaagaacatgaagggagacctgagaattctcaacagtgcctcaaatgaggcataaattaagaccaacacatagttcaacaccctcagtgagaaacaagccactagactcttagggtacaagagaa

SEQ ID NO: 665455 - DNA, 557 bp, Homo sapiens
gcctgccggtgctaggtgatgtaatgctcccaaaccgtgtttgtcaaatctttccaccaaagcatgtttagcaagagtggtcagagaacatggggtattgggggataatatttctttaaattcaaaattgtatctcaaaaattgtcataaattatacttcctaattcatagtacatacatatttggtgtgatataaaattatctttctaggtaaaattggcccctcaggaagacatttaatctggggcttttacgtatcctatagcacatgctgtttgagcacaactcaaggagaccatggggtttcctcagagttaatataacatgttatttttaataatccctayaggaaatgttaacaaaaatatcaattaaacccccaggcaagatgtatgaagatccctagggacagcacagaaagttacagaatcacaagaacatgaagggagacctgagaattctcaacagtgcctcaaatgaggcataaattaagaccaacacatagttcaacaccctcagtgagaaacaagccactagactcttagggtacaagagaa

SEQ ID NO: 665456 - DNA, 571 bp, Homo sapiens
atacacgacagatggactactcacctatacatttcttcattcaacatgcttcagagattgagtatcaaagaatattggtctatctttcagctcaaaaaccaaaagaaaaaaaatccctcagagtgttgagatcaccatgcaattcacactttccaaaagaagtacactaatcatccacaggtcttctccttctcaggaagtgcctgaggcaccaggaatgctatgacgtttgtagagattttgagcttaacartatggaactagctttatccactgggactaaaaccaaaagaaaattggaattttttttaatcttctctctgttttcctctctctgtccctttcattactcactttgcaccttcaggagaagtgacatttaaaaaaaaagaaaagataaaaataaaatcaatgtttttgtggactaagaactcacatagatttagtggtgaatatattaggaactgtttcttacaaatatgttggaaattatctgtgaaatttatttaccatgctttccctgtggctaattgtttttctgcaaggtttttgtttgtttgttgtttttaat

SEQ ID NO: 665457 - DNA, 408 bp, Homo sapiens
ttggtctcactgggacctgcagaccagagctgttcctattcggccatcttggcctctcctcctttgcccatattttaaaatagagtttctcatactttttttttttttttttttttttggcttgtacaggggttttttttttwaaaaagaaaaaaaaaagaaaaagaaaatatagaatggctatatgcattataaataatttcttctagttctaacccttttttaaaaaatagtgaaagatggccaggcgtcgtggcatatgcctgtaatcccagcactttgggaggccgaagcaggcagatcacttgaggtcaggagttttgagaccagcctggctatcatagcgaaaccctgaaactactaaaaaaaaaaaatagaaaagttagccaggtgtggtggtgcacccct

SEQ ID NO: 665458 - DNA, 571 bp, Homo sapiens
aggtttacttgtatattctctctggagccattgataaataagaaggtatcagtttgattcctttgagtacaggtgagggaaatcctaacccaaaaaggcttaagccaaaagcaggatttagtaaatcataaaactgaggagtctaggagtcatattgccaagcaagtcatcaaaatccagttttatctgctctatagccttcattttggagccattatcacacatctcctttgattccaaatgtgatttatataatcttgtgttcaaattcaagaagaataagtccttttttccaaaagtcccagctagtctrtgcattagctagtgactaatgatgttgatccaacttcctgaatctatgtatgtagccaagcagggtatgattggctaaacttgtcatattcccaacctagaatcagatggaagttgacttcatcttaactataggaagagctagattcacagataaaaatcaagagctattattggaagcaggatgaatgaatccaaggtggctcaaaaaaaaacccaagtgtccactacaaggagcattgctatcatttcttcgtag

SEQ ID NO: 665459 - DNA, 569 bp, Homo sapiens
tatactgactaatatcatttggaccaytacatagatttcatagatagcactgttttcatgcatgccctctggattgtggcaggtggagggatatagtgggaacaaaatgttttctaaagtttttgacacgaagttgatttgtcagtactttaaaaatatttgttttccataattccatacgagcttacatttttctttctaataattttctccccataatcggaagataaaaatctcaggttttttgttttcctttgttgtttttcgtacattccctgggctggtgaattacaatctagcatagataatttgtatatttgtttaaataaaatcagtttagttgtcttccttaaagagctgtcatcaaccaaaatatgtgtctttctttacacaaagttatgtctgttaaatattaaaaccataaaaacagaatgtttagattatttacataatctgcaaaatgagagagttgttatactggatataatattagcagctgccatttgggattgtgttttgacacctgttctaaatatgtggcctcattttgctctgagtatccctgaatt

SEQ ID NO: 665460 - DNA, 508 bp, Homo sapiens
ctcttatgctggcatctgatttatgctgttactgtatcaatctattttaaaacagagcttaaatagagctcctaaaatattaaaaattggccttatttgctgtttcccaggattaccatctactacttcaactttgctcctaagactaaaataaatctaattgttacatatcagaacataataaaaatatttctctgaaaaactaattgatagacactattagcctagactgtttttcataatctcatcattagaycaagtgcatattaacagtgaacaaatagaaatacatgtttgaaatagctattgttttttaattaaattccttctcggaggtttacttaacatgcagtagagtaagaacagtttactaaaatccaagcattgtgatttaacactgtgtttctttgaatttttttttttaaatcaaggcttatagattagaaccattaatactgaaacactacagcaacatttcacctgtccagatccactggtacaatacttc

SEQ ID NO: 665461 - DNA, 568 bp, Homo sapiens
ttatgtgagtcatgtgtcatgtgagtctcttgaagacagaagatgcttgaytggtgaattcttatccattctgccattctgtaccttttagatggagcatttaggccatttacattcaacattaatattgagatgtgaggtactattctgttaatcatgctatttattgcctgaataccttgtagtttattattattattattgttttataggtcctgtgagatttacactttaagaaggttctattttggtgtattttgaggatttgtttcatgatttagagctccttttagcagttgttgtagtgctggcttagtagtggcaaattctctcagcattcatttgtctgaaaaagactatcttttcttcatttatgaagcttagttttgctggatacaaaattcttggctgataattgttttgtttaaggagactaaagataggaccccaatcccttctagctcgtagggtttctactgagaaatctgctcttaatctgttaaggttttcctttataggttatttgatgcttttgcctcacagctctaaagactatttccttcgtctt

SEQ ID NO: 665462 - DNA, 609 bp, Homo sapiens
tacgcaaaatactatgcaaccatattgaaaaatgaggtaggtcactgaaaagctatattatagacttcttaagtgggaaaaagtgtgatctcacttatataaagaaaaaatgtatacatagcacttctaaatttcagtccaaaaaactgaaatgtatttttaagaatgtcactttatttctctagagctagatataatatctacatggaatttmtattcaaccaagtggcaaaacttaatcttcaccaatttgatgtcctacttcccagggttacttttaagtttcagggggtttagagtttggcaaggcattcaatagacaaatacacctattccctagaataggtatctatacatgctggcatccatgagtcatactttttcccatctgctcttttgatcatttcaccaaggatcaatatttaactggtacccaccaactatagccaggataatgttttagccagttgtcaaagcactgaaatacttctaagccagttggtacacagatgctgcccaaaacactgctccacccaccagacccacccaccccaactctcctccacccttggagccacccttacctctcccacaatccattaactaaag

SEQ ID NO: 665463 - DNA, 609 bp, Homo sapiens
tacgcaaaatactatgcaaccatattgaaaaatgaggtaggtcactgaaaagctatattatagacttcttaagtgggaaaaagtgtgatctcacttatataaagaaaaaatgtatacatagcacttctaaatttcagtccaaaaaactgaaatgtatttttaagaatgtcactttatttctctagagctagatataatatctacatggaatttatattcaaccaagtggcaaaacttaatcttcaccaatttgatgtcctacttcccagggttacttttaagtttcagggggtttagagtttggcaaggcattcaatagacaaatacacctattccctagaataggtatctatacatgctggcatccatgagtcatactttttcccatctgctcttttgatcatttcaccaaggatcaatatttaactggtacccaccaactatagccaggataatgttttagccagttgtcaaagcactgaaatacttctaagccagttggtacacagatgctgcccaaaacactgctccacccaccagacccacccmccccaactctcctccacccttggagccacccttacctctcccacaatccattaactaaag

SEQ ID NO: 665464 - DNA, 587 bp, Homo sapiens
atgtgagtacacagcaagaaggcagcaggctgtgaaccaggaaatgggccctcccagaccctgaatctacaggcaccttgatcttggacttccagcctccagacctatgagaaataaatttcttggccgggtgcagtggctcacacctgtaatcccagcattttgggaggccaaggcaggagaatcacctgaagtcaggagtttgagaccagcctggtcaacatggtgaaaccccatctctactaaaaataaaaaaaaatagcagggcatggtggtgcatgcctgtaatcccagctactaggaggctgaggcaggagaatcgcttgagcctgggaggcagaggttgcagtgagccaagatcacgccattgccctccagcctgggtgacaagagcaaaactctgtctcaaaaaaaaaaaaaaaattttttcttgttcataagctacccagtctatggtagtttgttatggcaatacaaacaaattaaaamataaccaaccacttttttagggaagctaaatgtataaggccttattaaagattatcgcatagtttttaaaaccatggactttggagaaataaatccaa

SEQ ID NO: 665465 - DNA, 505 bp, Homo sapiens
ggggctccctatgaataacaaaagacatttctgtaactcaggaaattccaagtgtgtcaggaactggagacaaagatcaaagatactgcttgtatttcatattataccacaccactgaactacagtgcagtgcttcccactttccttttatgaagatcttaaaggtaaggagatagaaataaataaatawatatatatatatatatatatatatatatatatatatatagtaattaacttttagaatattaccaactctcctgcccctttatccacataatttgtctttgttgcaatgtagtatcctaccaaggttctgttaaaggatttgcacaaaggtctgcagggctctgtgaaaatgttgatgggttacacagtcttcattcatggttaattattctgcccattttccttgatgtggcatcatgcagtggtgaatttatgataaacatgtaatcgtcctacaaattcttcctgcctgctgaacagacaaaatcaattcact

SEQ ID NO: 665466 - DNA, 508 bp, Homo sapiens
tcatatgctgcatattgtcaatagaaatactggaggagcaactgggaagcaggcactcagaaattttttttgagtggtaaagagggtcctgatcttagatgctttcagtcagagctgcagtatacagttggataggttgttcactgcacaaggttaaccagctaagggcactaattggggcagaaaatccagcctgtattctacttgasaagccatcaactccaacaccgctctgtatctgcccacaggaagcaatgccttttttcaaattcctacaaaggccctgtacaaacttcagatagtcttgatttaaataatgacagagtaataatgtctgacaggttacatctcaggagcaagaaaaattgccctaccaatctgattccaccagagagtaaaagaaatagtgaagactgtctattcttaaaatgaaaacactgaggttggagatggtttttctctggattctcaacatagggtgatgtgcttacaaaataattttttttaa

SEQ ID NO: 665467 - DNA, 508 bp, Homo sapiens
tcatatgctgcatattgtcaatagaaatactggaggagcaactgggaagcaggcactcagaaattttttttgagtggtaaagagggtcctgatcttagatgctttcagtcagagctgcagtatacagttggataggttgttcactgcacaaggttaaccagctaagggcactaattggggcagaaaatccagcctgtattctacttgacaagccatcaactccaacaccgctctgtatctgcccacaggaagcaatgccttttttcaaattcctacaaaggccytgtacaaacttcagatagtcttgatttaaataatgacagagtaataatgtctgacaggttacatctcaggagcaagaaaaattgccctaccaatctgattccaccagagagtaaaagaaatagtgaagactgtctattcttaaaatgaaaacactgaggttggagatggtttttctctggattctcaacatagggtgatgtgcttacaaaataattttttttaa

SEQ ID NO: 665468 - DNA, 613 bp, Homo sapiens
aggaggaagggagccgaggaggcccaagagcggcgggcgacctgacamcaccctgccctcccagccagaggggcaggggggaaccccgcgcgcggcgccggtgcagcccgggcttccggggcggcgcacgcggccggggggcggggcgggggccgaagcaccgcctacgtcgggctgcgtgacaatggggccggcggcagaacgcagctgcggcggctgcgggtctcgtgggggcggagcggtcgccgctgccgccgcagctcgggtcgggatttgaaagattagaaacttcgggtggagagggcggcggcgttgaatgtgtggcggaagcgctgggggtcacggctccgcgcgccgccggacagccggcggcgtctccacagcatgaattacccgggccgcgggtccccacggagccccgagcataacggccgaggcggcggcggcggcgcctgggagctgggctcagacgcgaggccagcgttcggcggcggcgtctgctgcttcgagcacctgcccggcggggacccggacgacggcgacgtgcccctggcccctgctgcgcggggaacccgggctgcatttggcgccgggcaccgacgaccacaaccac

SEQ ID NO: 665469 - DNA, 613 bp, Homo sapiens
aggaggaagggagccgaggaggcccaagagcggcgggcgacctgacaccaccctgccctcccagccagaggggcaggggggaaccccgcgcgcggcgccggtgcagcccgggcttccggggcggcgcacgcggccggggggcggggcgggggccgaagcaccgcctacgtcgggctgcgtgacaatggggccggcggcagaacgcagctgcggcgrctgcgggtctcgtgggggcggagcggtcgccgctgccgccgcagctcgggtcgggatttgaaagattagaaacttcgggtggagagggcggcggcgttgaatgtgtggcggaagcgctgggggtcacggctccgcgcgccgccggacagccggcggcgtctccacagcatgaattacccgggccgcgggtccccacggagccccgagcataacggccgaggcggcggcggcggcgcctgggagctgggctcagacgcgaggccagcgttcggcggcggcgtctgctgcttcgagcacctgcccggcggggacccggacgacggcgacgtgcccctggcccctgctgcgcggggaacccgggctgcatttggcgccgggcaccgacgaccacaaccac

SEQ ID NO: 665470 - DNA, 584 bp, Homo sapiens
aggttcagatatatgtggaggaaggatgagggtcaccacctgcagttaggtcatggcacaggtggaggatgagtggccagaatgggctatcccctatcctcagagacactgtggcctcccagatctgggtgggacaggtgagatcagaaatagggtaatagctaatcatttgatcattacccagcaagamtctcattcagcctgtgaaccaagggtaatgaatagttccagctttccactgaagctagattgaatggatacaaccattgtatggatacaaccaagctcatagatccaatatgggatatacaggacggggtaggacaagaccaggctccacaacgtaagagctgagtggcttcaggcaagtctcttatctttattatcctgcagctacaaaatgggtaggaacagtgggttttcacaaggcttgagtgtcatagtggatgtcaaatgctttgtgaattctcaggtcctaagcactgaaagactgttaagcttgtccctgtggccaggtgggtttgctctgaccacagacacagactgcctgtgttgccttggcctgcctcctgcaggcatggcag

SEQ ID NO: 665471 - DNA, 584 bp, Homo sapiens
aggttcagatatatgtggaggaaggatgagggtcaccacctgcagttaggtcatggcacaggtggaggatgagtggccagaatgggctatcccctatcctcagagacactgtggcctcccagatctgggtgggacaggtgagatcagaaatagggtaatagctaatcatttgatcattacccagcaagactctcattcagcctgtraaccaagggtaatgaatagttccagctttccactgaagctagattgaatggatacaaccattgtatggatacaaccaagctcatagatccaatatgggatatacaggacggggtaggacaagaccaggctccacaacgtaagagctgagtggcttcaggcaagtctcttatctttattatcctgcagctacaaaatgggtaggaacagtgggttttcacaaggcttgagtgtcatagtggatgtcaaatgctttgtgaattctcaggtcctaagcactgaaagactgttaagcttgtccctgtggccaggtgggtttgctctgaccacagacacagactgcctgtgttgccttggcctgcctcctgcaggcatggcag

SEQ ID NO: 665472 - DNA, 539 bp, Homo sapiens
cattaaaaatactgattcctgggcccaacccctccttcttcatagccctgacatgattaatctggggtgtggtgagggcattagagcttaagcattccctaggtgattctaatgtgcatacagggtttagaaccactgctgtctggtgactttcttttactggcttgaacttgctggttcagtgtttagagaacaagcttattcacaattgtgcaactgtgttcctgactgctagcgtcaaataggctcccaacaagggccagaggagcctggcctatacagaaataataatasccctggttatgaaggagcttctgtgggccaggaatgttatctctaatcttcaccataccctgttaccctaatttgaatttaggaaactgagtctcaaagaaagtgagtgacctttcaaaggtcacacaactccaaagtggtaaaactaaaatttgaaattatgtctggtttcaaagccatgaactttttcttccttccaaacccagggaacttttgttcccaatctatgtgagctgtgatgattg

SEQ ID NO: 665473 - DNA, 652 bp, Homo sapiens
aaaacctgcagaagtctattgacacatgctgtgctcgtcatgcaggacaagcctcagttcaaaagtatccctgccarggcagcatctcaggagccttgcctaaacagtattttaacaaacagtcataaattctgcagtgacaagacaaaggagaggacagtttccgtctttaaaaggcaggaaaatgtgggaagtaaaatctgttcccagatttatctggtgcctgctggtatcttctctgggctgataagcaagtgcagccttcagcaaggaaggatttcccttctgccatcaggcaagtacaggctaaggcagagtgttccctctgtgtttacagtgtctttaacttaacaatcctccccattttggggagaaatattttggtttcctttaatgtgaaatagaggccaagacattcatttttccacatgaaaatctagttgttgcatttccatttgttaaagaaaactttgtttctcctcactgaatagctgtgacatatttttaaaaaatcaattgcctatataagtgtgaatttatctctggaccctttagtgtgttttattgatatatttatttatttatcctatgcgaataccacacctacttgattattgtaactttacactacattttgaaatcaagttttata

SEQ ID NO: 665474 - DNA, 652 bp, Homo sapiens
aaaacctgcagaagtctattgacacatgctgtgctcgtcatgcaggacaagcctcagttcaaaagtatccctgccaaggcagcatctcaggagccttgcctaaacagtattttaacaaacagtcataaattctgcagtgacaagacaaaggagaggacagtttccgtctttaaaaggcaggaaaatgtgggaagtaaaatctgttcccagatttatctggtgcctgctggtatcttctctgggctgataagcaagtgcagccttcagcaaggaaggatttcccttctgccatcaggcaagtacaggctaaggcagagtgttccctctgtgtttacagtgtctttaacttaacaatcctccccattttggggagaaatattttggtttcctttaatgtgaaatagaggccaagacattcatttttccacatgaaaatctagttgttgcattwccatttgttaaagaaaactttgtttctcctcactgaatagctgtgacatatttttaaaaaatcaattgcctatataagtgtgaatttatctctggaccctttagtgtgttttattgatatatttatttatttatcctatgcgaataccacacctacttgattattgtaactttacactacattttgaaatcaagttttata

SEQ ID NO: 665475 - DNA, 592 bp, Homo sapiens
aactaggccggcggcggcggtggggctgctcagggctctctggggtccgctctccgctcccgctaccgatcgaactgaatgcttaaagtttttatgtcctaccggttatgacaacttcaggtacaacgtgcacttgggacagtttaaagatagttaatgatagtggatataaatacgtattttaaatagtaatcgtcttcatcatttcaattttttccccttttagctgacttctctggagkgatcacatcacctcaccactgtgtcactttgcagtgtggctgaccaagagcttgttcttgtggtgggctgctcatcagcccagccatttccctgttgtttttggtcagtgggagattagcagacatgacacaagaagatgctgcagatgggcttgggcattggagcttgtcctcttgcacctatgccatcaccatgaggaaaacaagcctgggcaagtctaccaatcccaggatgaggctgagggtcctgtgtagcagatgagctgacagctgctggagtcccaggtaagctgaccgctgtggagtcccagacaggtgagtccagccaagatcagtggagccccttagcc

SEQ ID NO: 665476 - DNA, 583 bp, Homo sapiens
gtatttttaatctatttttgttattctagcacctacttttatagtccatgtacttcagactcctctctaagactacgaccaaagtgagtcataatatttatcatatttagtaatatttatttatcactaaatattagtaccaaatagaggaagtttaacatgaaatttactaaacaaatatctgttacttttactcatgtctcacacaaaattacgaaattagtctttcatttgtttttcccacatatgatgcacaaaaatatctgtaaatatacaattttacatcacctatgactctaatttaaatgtctcagtcctaaactcaaagccttacatttctattcacttccccctccatctttcctttttttwaaaattttattattatacttaaagttttagggtacatgtgcacaatgtgcaggtttgttacatatgtatacatgtgccatgttggtgtgctgcacccattaactcgtcatttagcattaggtatatctcctaatgctatccctccaccctacccccaccccacaacagtccctggtgtgtgatgatccccttcctgtgtccatgtgttctc

SEQ ID NO: 665477 - DNA, 584 bp, Homo sapiens
cacccaggagacataaccctcttcatcctataataataggaataggtttaaagggcatcaggcaaaagtctcctagccctcagtggtgtcaaaattttgatgtcttccagggacttcatcgcctaatctgagactgactgactgactgactgactatacatacacatactgactacatatctgactacatatactgactgtatatacatactatactgacaatatacaccctatactgactatacatacacactgactataattgactatatatgcacacacaaatacacacgcatatatatatattcattataatttagatatatagaaagatttatgaagttgtattagatatttatcatattttcctgccctacatcaaatccctcttattcacataatagcagttggggatatcttgtctttccccattctcagttcatataaatggatctacccctggctctgagcttccatatgcctcakgccttgtccattagagcataacacctgatgaccagaggcatttaattgagtaatgagcataacccaagctacaggaccaaagaaactcaatcccaggg

SEQ ID NO: 665478 - DNA, 443 bp, Homo sapiens
ctatacattaaacaataacagctttattcaaaacatgtaagacttccacaagggctgttttgctttatagtatgacaagtgctaccttgttggcattctaaagtgaacggtgatgtggagaaaggcagtcctttccattctaaaaaggaaaatatttgcatctactctaataattttctgtcaagttaagaaaaaggactgttctcattatttgtgttctccccaaagcaggcacagaatatgtaggaaatgaaaaaaaaaatgtttagaagagctcgttttcatgcactacggattctaaccttgtctccaagagccaaggttgatgcatyccatgctaaattaaatctaagatgtatgcagtaatgaaaagggtagcattccatgaaaaattccacttttcagttaaagtacctagcgtttattaaatatgcaaaaattac

SEQ ID NO: 665479 - DNA, 601 bp, Homo sapiens
ccaccaagaagaaatctctaaacttccagataaagaattcagaaagttattaagcttctcaagataccagagaaaggtgaaaaataaaaaagtttaaaaaaatacaagatatggattaaaaatgtttcagagaaatagatattataaagaaaaaacaatcacaacttctgcaaataaaacaaacacttagagaagtacaaaatgcactggaaagtttcaaccatagaatcgaataagcagaagaaagaacttcagagcttgaagataaggcttttgaattaaccctgcagaaaaagacaaagaaaaaaataatttaaaaaaatgagaagactccaagaaatttgggataygttaaatgaccaattataagaagaattggtgttcctgaggaagaagacaaatctaaaagtttggaaaacatatttgagggaataatcaagttaaacttccctggccttgctagacatctaggcatccaaatatagaagctcaaagaacatctcgcaaattcattgcaaaaagttcatcacccaagcacatagttatcaggttatctaaagtcaagacaaaggaaagaatctaaagagctatgaggcaaaaa

SEQ ID NO: 665480 - DNA, 601 bp, Homo sapiens
ccaccaagaagaaatctctaaacttccagataaagaattcagaaagttattaagcttctcaagataccagagaaaggtgaaaaataaaaaagtttaaaaaaatacaagatatggattaaaaatgtttcagagaaatagatattataaagaaaaaacaatcacaacttctgcaaataaaacaaacacttagagaagtacaaaatgcactggaaagtttcaaccatagaatcgaataagcagaagaaagaacttcagagcttgaagataaggcttttgaattaaccctgcagaaaaagacaaagaaaaaaataatttaaaaaaatgagaagactccaagaaatttgggatacgttaaatgaccaattmtaagaagaattggtgttcctgaggaagaagacaaatctaaaagtttggaaaacatatttgagggaataatcaagttaaacttccctggccttgctagacatctaggcatccaaatatagaagctcaaagaacatctcgcaaattcattgcaaaaagttcatcacccaagcacatagttatcaggttatctaaagtcaagacaaaggaaagaatctaaagagctatgaggcaaaaa

SEQ ID NO: 665481 - DNA, 469 bp, Homo sapiens
cacagtgaaataaaattaaaaattaactccaaaaggaacctcaagactatacaaatacatggaaattaaataatctgctcctgaatgatctttgggtcaataataaaattaagatagtaatttaaaaattatttgaactgaaccataatagtgacataacttaccaaaacccctgagacacagaaaaagcagtgctaagagaaaagttcatagcattaaatgtttacatgaaaaagtctgaaagaatacaaatagaaaatctaaggtcacacctcaaggaactagagaaacaggaacaaaccaaacccaaacccagcagaagaaaagaaataacaaagctcagagcagaactaaatgaaattgaaacaaacaaaaawtaaagacaaatgaaacaaaaagttggtccttcgaaaagataaacaaaattgatagaccattagcaagattaaccaagaaaagaagagagaag

SEQ ID NO: 665482 - DNA, 604 bp, Homo sapiens
ggatctaattaaaataaagagcttctgcacagcaaaagaaactaccatcagagtgaatttttaaccatataccctcttcctcttcatgcagataycaaaaaccagtagaacaaaaagaaaatgagagaaggttaaacaatatatttagttcctccactcttggtgcaacaacttttgcttttttatccataacttcctctcttcccaattagttatacagaaatcattctctctatctaagtagaaaaagaaaatgaataaagattaactataccatatgcttacgtttgatataaaacatgacccaaaatagtatttttaaattatacaggatcttaattatctcttacacaaaacctgtatttcataactaattgaaagttaaattctaatatttggcactggaatgtataaatgttggcaacacatagatatagagccttcggttttggctaatttgagccattattctgactcacataaaccttaatatttcagttagcctcactaggctccctattccatttggaaagagcaggacaaacaattcactttcagacaagatctttgcttctcttgatatataaaagtggtctgctttccc

SEQ ID NO: 665483 - DNA, 607 bp, Homo sapiens
aaaatgttttggaaacactacagtatctgttcacatagaaactagaaagcctgaccatcaaaaggaataaataagccatttgggttctttttttcaagagtggttgcttatctagatatttagctgaagccatgcttgctggctacaattattggctgcatacacctggctcaggtattattctttaataatgcctaagatgattgtctgattgtctgtttaccttggtacttaaactggtcaacaaaactattaactgggaaaaaccaaaggcatagaatggaaagaactgcctttgtttaaacagtaggtagtccctataaataacacaccaaattacaaattgcatacagatgtggttcatttaaccttcattcaactgtyattgaatttccactctgtgtcaggtgttacaaagttcctgtctccaacttggtgttgatccaactctccatttttcactgttctgtctccaagccttcttctcttctgaattgcacaccagtagcaatctaataaactaaatgcaaagagaaatccttgaaagttctctccttgaaatagacaggcaccatgacctactggaaagaacacagactttaggcaa

SEQ ID NO: 665484 - DNA, 516 bp, Homo sapiens
aattgctacttgtttccctttatggaagtggagtaagggagtggggagagcacaggaatattaacctaacggaactctctttacatgggaggaagcattaggagtagagaagtttcccatcctaccttaaatactgactaaaccacagtgaaagtttaaataaatcttttgccacatttttagtcagcttaaaaaattatactaccactattgaattaagacccttaaatacagtcatgcattgtttagcaacagggatatattctgagaaatgtgtcattaggcaacttcatcattgtgtgggcatcacagagtgtactcacacaaacytaaatggtctactactgcacctttaggctatatgatatagcttattgctcctagactacaaagctgtgcagcatgttaccgtactgagtgctgtaggcaagcataacacaatgttaagtatttgcatatctaaacatagaaagcatacagtaaaaatacaatataggaaattttttaaaagttaca

SEQ ID NO: 665485 - DNA, 621 bp, Homo sapiens
gtatacaccatacattttctgaccactatatagttcagattgcttaaattcacagacatcttttttaaaatctgtacatattccaccacatatctcaaactattccttatcattagttcttgttctctttaagaaagatactatgataaatttggcgttattgtcaggtacttctgatgctgaagaagccaattattatatagtgcatatgtgatgtgttatgaatgcacaatttatatttaaaatggagaattcttttcctttacatttatttagtgggtatcaccatggtaactgagcactttcacaaagcctaatttatgacacaaaaaacataaagaaaagaaagagcttatactktccatattttgcatattgacagaaaaacttcttggttgacacatatttggggaggaaagaaagagatgcaggagatgatatggacaaaagcaatctcttttaatatgtaaagattctgacttctcaaacctatgttgtaagaaaaacttccccaggaaaaaaactttttcacaaagaataattcaatctcacgatagaaagggccacagaaataatctctcctaaccctcttgttttaaagatgagatccctgaagcttag

SEQ ID NO: 665486 - DNA, 541 bp, Homo sapiens
agcggtcaaatcctgcgggccgtcaattctttaaaaagttttattaaaacacagccattcatgtatgtattgtctctgactgttttcattctttaatagcagagttcactataccttgactatcagcctattgctgagtagcttttgtgatgaaaagcacatcactgtcagacttcaaatggtctagaaaaacacatattaatatataacacaaaatactttcaaaggtcccaatagtgkggccagagtcagctaatcagacaggaaaagcaatttcataatctgaaaaagtgttaatggaagggaggcaatattatatacctccaagatgtaggcagcctgccagaaatgggtgagggctccaatcccatgtgatgtgtcttccatttctggaggacaaatgggttaacttttggcaggagttgcaagtcttctatgcagaaatgtcctctgcatcagaaacatagagtcctttactttgtgcccaatctgtgatggtgaatgtgttgccatgcccagggtaaggatggaaccaggaagc

SEQ ID NO: 665487 - DNA, 502 bp, Homo sapiens
agtttgtctccaaaaaatctcaaagaagctcaagaatctcttataacaaccatgaataatttttttaaaaaaagaaagaaaagtcagaagactttattttcatctctaaacgggtctaagattcagatgatagactgcaggaggcacaaagtcatatgatggcattttggttgccattctttttaarcaagcattatataacctacccctcatctcttgagtaaatcaagcaagtgctagccatttgcctggtttctgtctatgtggtttcaaattttcctccttgacactcagtagtagtttttctataaatattatcacacagaagtaagaaccttctggtctccccagggcaaattttaataatacttgttaccatagggtggacctgagcctgaccaccagattgaaaagatagtcttcctgcccagaggagaattagatacaatcagggcaccattcagacagctgcctttgaatttacttctgagttctcaggctg

SEQ ID NO: 665488 - DNA, 502 bp, Homo sapiens
agtttgtctccaaaaaatctcaaagaagctcaagaatctcttataacaaccatgaataatttttttaaaaaaagaaagaaaagtcagaagactttattttcatctctaaacgggtctaagattcagatgatagactgcaggaggcacaaagtcatatgatggcattttggttgccattctttttaaacaagcattatataacctacccctcatctcttgagtaaatcaagcaagtgctagccatttgcctggtttctgtctatgtggtttcaaattttcctccttgacactcagtagtagtttttctataaatattatcacacagaagtaagaaccttctggtctccccagggcaaattttaataatacttgttaccatagggtgkacctgagcctgaccaccagattgaaaagatagtcttcctgcccagaggagaattagatacaatcagggcaccattcagacagctgcctttgaatttacttctgagttctcaggctg

SEQ ID NO: 665489 - DNA, 607 bp, Homo sapiens
cctagctccatgaggatctctgaatctgcaagatattacagagtcggccccaccttaagcaaggaggccaaccttttagagcccctctcccatcagagaagtgttagctgcaggctgcactgggaaggaagcaggtcatggctcccagggaggtggctccttattcagacaaatatttagagaatatttgctcrgttgtgaggcattggcagcaaacatcaacagcagctgttgaattgagtgcactggcagttaaagaggacctggatagagcatgaactgtatccacaacaaaaattttaaaataaactttggagaattcaaatggaaaaacatcatatgaatgagggacaccaatgtccaccatatgaatgagggatgccaagaagtctaagaaagatgacaataatgaaagagaatggtattagtagccatccataatagatgtttctgaccattgcaacagaaacgacaaaactgaaaatagagcaaggtggagtagttacaaacagtgtggtcaatttattgtcagatatataaatagaatacagaagtctccatttatccacaggggatacattccaagaccaccagtggatgcctgaaa

SEQ ID NO: 665490 - DNA, 557 bp, Homo sapiens
gacaaatatttttcatccttacatttttgtgtgcataaatagcatttcttgagatcagagcattttgcactatcccaaggtttacactatgaagataaaatgtacaagtaattcctgcttatttatcatatctttctggaaattattttgtgaataagattttcaagagtgaatcaaagttgcccattgaaagactaccttaccaatagtgaacctgacaaagactccagcatcaaataaatcatagatataactaacagtactttgaagacatagtaagaagtttaaagttttttaacattaaaataatattttaatttaaacaataaaatataattcatgttctataaaattatttaaaatctctaaataatactctaatcattaaggattctaaatgacatggaaaatgtttctgaaaaactgaatctactctgctggatataatatatttaacagttatgtttcaagaaatttggcrggtggctcccatgcagggacaatggctaagccttgggcctggcaacacattccctccatgctaaatagcaaaaggc

SEQ ID NO: 665491 - DNA, 607 bp, Homo sapiens
cctagctccatgaggatctctgaatctgcaagatattacagagtcggccccaccttaagcaaggaggccaaccttttagagcccctctcccatcagagaagtgttagctgcaggctgcactgggaaggaagcaggtcatggctcccagggaggtggctccttattcagacaaatatttagagaatatttgctcagttgtgaggcattggcagcaaacatcaacagcagctgttgaattgagtgcactggcagttaaagaggacctggatagagcatgaactgtatccacaacaaaaattttaaaataaactttggagaattcaaatggaaaaacatcatatgaatgagggacaccaatgtccaccatatgaatgagggatgccaagaagtctaagaaagatgacaataatgaaagagaatggtattagtagccatccataatagrtgtttctgaccattgcaacagaaacgacaaaactgaaaatagagcaaggtggagtagttacaaacagtgtggtcaatttattgtcagatatataaatagaatacagaagtctccatttatccacaggggatacattccaagaccaccagtggatgcctgaaa

SEQ ID NO: 665492 - DNA, 602 bp, Homo sapiens
ctataaaaatgttgtaagaaaatcttgttgcatactgtttcattctgtctcccttgcaacaactatgggggaacttcctttagacttcaaggccacagcctcccctcgagctggtatatgttatcatatggacaatttgaatcttgcaacttgtcctgattccctcttggttttggctcattaggaaattcaaaattgatgtggtgtcccaccttcagacactgtgagaattttatagcacatatctctagttctctctcttatagccccattttattattcttccttattttcctttcaccttgtcttttatattttttcagtcattatggcttaygcagtatacttgtgcttgtctctttagaacttaggagaggtatttgtaagagtgtcatgatgtttttaaaaaaagaagaaaaggctctccagggaaatgtttcccagattctcaaatgtatttgccaatgaacctcctctaacagtacagaaccattgaccccaattcctgcaccaattcttaccaagctaaacatatcactggtctacctggatttacattgcgaatgagtgctaggttctcttatggtatgtacagcttgtaa

SEQ ID NO: 665493 - DNA, 584 bp, Homo sapiens
caggttcatacaacatattaatgtaataaaaatgtctcctagaaataggagtgctttttaaagatactactaatccacaaaaattactcaacatttcattttcagccataaaacatatttacacatacttatacaatactaactatggaatttaacccaacagtttccaattacttacattaagagacacaagaaatcactacaaactaaaactagcccaatccttgaagataattcttraagtgtggtctacagaccacctgtttcagagctacctaggaagtctgcttagagtgcaaattcatgggacatagtcagacttctagaattagaatttctggggttggaaccctggaatctgatttctttttaagtaagttcccttgattcttgagtgcagtaaagttgaagaatcacagcacatggagaaggcaagtgaaataaaaaagtcagacttgtagtgagagtccttgtaacaggcactgcatagcacacaaggagtgcaacaagttactgtagtccacataggcagctggcaaaatgaggtagggtatccacaactgcatcaatgcaactgggtttga

SEQ ID NO: 665494 - DNA, 578 bp, Homo sapiens
gttctcccttgacttctctaacatcatccaaaaataaagatatttatttcccatctcttttactagatcttttgactctgctcatccttaaaatgtttgtgcccacctgtcttttcaccttacaattcttccttaatgtttaaatttagtctcataaatttacatctataaatgtatgactctcaaatcagcacctctagcatcagatacttctgaactccacaaccaaatatctagtaacctactgtaatttctaccttgatatcttttgtcctgtgggtcatatcttgataaaagaaattatctrtgtaatcactcatgccagaaatcggggaattatttttgaaccctcataattcatcacttcccatgtctcatcagagcactaggtctcatcagtacaaagcctgtacactaggtcttgtcagtacaaagccagtacactaggttttgtcagtacaaagtcagtataaagcactctctactttattgccttcccgccatctgcgtgtgctaccactgccttcataggaagcacattgtctcttcacttaggacagacaagttaaaaaaaattt

SEQ ID NO: 665495 - DNA, 582 bp, Homo sapiens
tatggctttatttctgggttctctatcctgttacattgatctatgtgtccatttttgtatcaatatcatgttgctttggttactatggccttgtagtatatatagtttgaagtcagataatgtcatgcctccagctttattatttttgcttaggatcgctttgggcattcaggctatttttcaattccatatgaattttacaattgttttttctaattttgtyaaaaatgatatggtaatttgataggaattgtatgcaatctgtagatttgggcagtatagttcattttaatgatattgattctccctacccatgaacatgggaggtttttccaattatttttgtcatgtacgatgtctttcaactgtgttttgtagttcttcttgtagaggtctttcacctccctggttaaatgtattccaatgtagatctgccaatttcttcttctagccatggccctctgttacgcaggaagtatatagttcttttgggatatgcttgatctcaacattggtaacctccgtgttctatatctccttatattaatatcaattattcccaatccttacactatctacctc

SEQ ID NO: 665496 - DNA, 524 bp, Homo sapiens
aagggaaagattctactttgactactttttcattttgtcactgatattgttagctatatatttatttccactcttttttcttactggtgayagacaagtaaacttcagataagttctgcaatttgagttacaaagcccaagttttctggttgtaaaattataatacatatgtcttcaggagcccaaacacatttttctctgaaatgtttccgtgttgaaacaactgcaggacattgaaaaaggcatcaaagaaaactagctaaaaatctgcgtgagatttctttttttcaacttaatacagaaaagctatctgcccattaaactttgtgaatgtattaaaactatctgagtcactcaatagctactagaactgatagcccagaaaatttttaataattttaactacaaactgcacaagaagatagcaatcagtttaagtgggatagcagaggaggacaatggtcttggaaaatgacatgaattttggtctgacaagtaatagacaaagtttgtttctgtgtaaa

SEQ ID NO: 665497 - DNA, 524 bp, Homo sapiens
aagggaaagattctactttgactactttttcattttgtcactgatattgttagctatatatttatttccactcttttttcttactggtgacagacaagtaaacttcagataagttctgcaatttgagttacaaagcccaagttttctggttgtaaaattataatacatatgtcttcaggagcccaaacacatttttctctgaaatgtttccgtgttgaaacaactgcaggacattgaaaaaggcatcaaagaaaactagctaaaaatmtgcgtgagatttctttttttcaacttaatacagaaaagctatctgcccattaaactttgtgaatgtattaaaactatctgagtcactcaatagctactagaactgatagcccagaaaatttttaataattttaactacaaactgcacaagaagatagcaatcagtttaagtgggatagcagaggaggacaatggtcttggaaaatgacatgaattttggtctgacaagtaatagacaaagtttgtttctgtgtaaa

SEQ ID NO: 665498 - DNA, 590 bp, Homo sapiens
tgtagcatttctctagagtagtggtactcaaatgagtgtggtttttcccccaaggacatttggcaaatctagagatatttttggttgtaaaaattaggtggtgggttctactgtcatccagtggatagaggcctgagatgccactaaacatttacaatgcaccagatcacccctccacaacgaagaattgtccagccccaaatgtcagtaatgctaggtttgagaaaccttgctcttaagataagtcttagtttcaaactgaactttcatcgccaagattagtacaaaggaattttatcatggttctttctgaatatatcactcttcccttatttaaagggggcaattttatctacagacccaaatcaaatattcttccttattttaaataaaattctgaagtatttaagcttcacaggggctacacatcagtatctgctgagaaaaytgaaactagatttcttggctcgggctcagtggctctcgcctgtaaccccaacactttgggaggccaatgcaggtggattatatatatatatatatatgcagccaaatttggcccatcaaatcccagaggagctgggaccatt

SEQ ID NO: 665499 - DNA, 502 bp, Homo sapiens
tgaatttcagcagaggcctcttctgcagtggtctcttcagctaatggagattgaacttcagcatgagcctcttctgcagaagtctcctcagatagtggagaccgagcttcggcaggagtttcatctgcaggaggctccgtagctgctagaagctgaatttcagcagaggcctcttctgcagtggtctctttaggtaatggagactgaaattcagtaggagcctcttctgcaggggtctccatagctgttgaaagctgaagttctcgagcctcttctctaggagcctcttcaggtaatagaggctgaacatcagcaagggtctcttcaacagtgggaggctctactttagctgrggcctcttcaagggcgccctcagctggtaaaggctgtacttcaatgggagccttttgtgctgagggagaccgaatttcaccaagaagctctactgaaggagacttttcagctggtggaggcagaatttcagcaggaggctcttctgaag

SEQ ID NO: 665500 - DNA, 601 bp, Homo sapiens
gtccatttcaatgaaattgaattctcaatttccagtccttatatctttatgttttcctctcttgtctgtctttttcatacaagccattttgacaggggtgagatgatacctcactgtggttttgattggcatttctctgattagtgatgttgagcattttctcatatcactgtttaccatttctatgccatcttttaagcaatgtctattcagatattttgcccattttttgtataaatttatgyggtacaagtataattttgttacatagatatattgcatgtggtggagtcagagattttagtgttacaattacctgaataatataaattgtacccattaggtaatttcttatcatcccccacttccatctcccacacacttctgagtctccattgttacatcattcaacactctgcatccatgtggatgctttatttagctcccacttataagtgagaagatgcattgcctttctgtttctgagttgtttctgttaaaataatggcctccagttccattcatgttgcagcaaaagacatgattttacttttttaaattttctaccaggttaagctttattattttttaattttaatta

SEQ ID NO: 665501 - DNA, 400 bp, Homo sapiens
cctgccaagccatgtgcgagatataatctcccggtgtgccatttgctcagaccattggaaaagtgcagtatttgggtgggagtgtcccatttttttccaggtacagcctgtcacggmttcctttggctaggaaagggaaatcccccaaccccatccgcttcccgggtgaggcaatgccccgccctgcttcagctgaccctccatggactgcacccactgtccaaccagtcccagtgagatgaatcaggtacttcagttggaaatgcagaaatcacccatcttctgtgttgatcacactgggagctgcagactggagctgttcttattctgccattttgaaactcctagcaattttatcattttttatggctgaaaagcattctaacatgtatatacacta

SEQ ID NO: 665502 - DNA, 586 bp, Homo sapiens
tgtatatacactacattggctttatccagtcatccaatgacggacacttaagctgattccttatctttgctactgtgaatattgytgcggtaaacatactagtataggtatctttttggaacaatgattgcccgttctttaatttgataatttgggtttgtttttttttctagtgagttgtttgagctccttgtatattctggttatcaatctcttgtcacatgattagtttgcaaatgatttctccaatgctatggttgtcttttcactttgctggctgtttcctttgctgtgcagaagatttttagcttgatgcgatcccatttgtctgtttttgctttggttgcctgtgcttgcccagaccaatgtcctggagtatttttactagtttcatagtgttatatcttagatttaagtctttaatccattttaatttgattcttgtgtatggtgagagataggagtctactttcattcttttgcatatagtgatccagttttcccaacaccattcattgaaaagactatcttttcccccattgtgtgttcctgttgtctttctcaaaaatgatttgattgtatgtaa

SEQ ID NO: 665503 - DNA, 586 bp, Homo sapiens
tgtatatacactacattggctttatccagtcatccaatgacggacacttaagctgattccttatctttgctactgtgaatattgttgcggtaaacatactagtataggtatctttttggaacaatgattgcccgttctttaatttgataatttgggtttgtttttttttctagtgagttgtttgagctccttgtatattctggttatcaatctcttgtcacatgattagtttgcaaatgatttctccaatgctatggttgtcttttcactttgctggctgtttcctttgctgtgcasaagatttttagcttgatgcgatcccatttgtctgtttttgctttggttgcctgtgcttgcccagaccaatgtcctggagtatttttactagtttcatagtgttatatcttagatttaagtctttaatccattttaatttgattcttgtgtatggtgagagataggagtctactttcattcttttgcatatagtgatccagttttcccaacaccattcattgaaaagactatcttttcccccattgtgtgttcctgttgtctttctcaaaaatgatttgattgtatgtaa

SEQ ID NO: 665504 - DNA, 623 bp, Homo sapiens
atagtttttcataatagtctctaagaattatttgtattgctgatgttttggatgtcgggtctcctttcttgcttctgattttatttatttcaatcatctcctttttttaagtctagccaaaggtttgttgattttatttttcaaaaaaccctttttggttttgctgatctgtattgttttttagtctccatttyatttatttctgtgctgatatttattatttctttccttgtactaattttgggttttgtttgttcttgcctttctaattccttgcagtgcatcattaggttgtttatttgaaggctttctacttttatcatacaggcattattgctataaacttccttcttagtactgctttgccatatcccatagatgctgatttgttgtattttcatttacatttgtttcaagaaattttaaatttcttaatttcttcattgattcattggttgttccggaacatgttgtttaatttccacgtgtttgtgtattttcgaaggttcctcttgttactgatgtctaatttgattccattgtggccagaaaaggtactttatatggtttttatctttttaaattgattcagacttgctttgtagcctggtctattctaaaga

SEQ ID NO: 665505 - DNA, 623 bp, Homo sapiens
atagtttttcataatagtctctaagaattatttgtattgctgatgttttggatgtcgggtctcctttcttgcttctgattttatttatttcaatcatctcctttttttaagtctagccaaaggtttgttgattttatttttcaaaaaaccctttttggttttgctgatctgtattgttttttagtctccatttcatttatttctgtgctgatatttattatttctttccttgtactaattttgggttttgtttgttcttgcctttctaattccttgcagtgcatcattaggttgtttatttgaaggctttctacttttatcatacaggcattattgctataaacttycttcttagtactgctttgccatatcccatagatgctgatttgttgtattttcatttacatttgtttcaagaaattttaaatttcttaatttcttcattgattcattggttgttccggaacatgttgtttaatttccacgtgtttgtgtattttcgaaggttcctcttgttactgatgtctaatttgattccattgtggccagaaaaggtactttatatggtttttatctttttaaattgattcagacttgctttgtagcctggtctattctaaaga

SEQ ID NO: 665506 - DNA, 583 bp, Homo sapiens
tatttcaaattcttggtcagagagctcacatatcaccatcttgttagaatcagtcatttaatttttactttgtcctcatggggaggtaatggttttctgtttgctgttgtttcttgagggcatatgtctatgtctttctattgaataattaattatttattctagtttactctgtctggcttgtttgggcttttactgaatatgtttgcttagcaaatcttgtaggtcactgcctccttgttgatgctgagtgacatcttagacccaggttcacttcagctataataaatggtcagagtgctgcctgtcccaagtgggggatgttccaaagggattatcccagcagtgtgggaagagtgactaggggtttttgtccagtggatccaaagaacataccttctacagtgtgctgctgctgaacagtcattctgatttgrcatctcctttggccaagttacacagcagagtttctaggattaggaaatggtagtaccagctcccctcattgtctctgcctgtcctcaaagatatttctctattcaggcagtcatgatgcttcctatgagaactcaagaaggtggag

SEQ ID NO: 665507 - DNA, 650 bp, Homo sapiens
atggctcatacctgtaatcccagcactttgggtaactgaggcaagtggatggcttgagctcaggagtttgagaccagcctgggcaacatggtgaaaccctggctctacaaaaaaatttaaaaataagccaggcatggtggctcatgcctgtagtctcagctacatgggaggctgagatgggaggatcgcttgagctcaggaggcagagatgacaggagtcaagattgcgccactgcacaccagcctgggtgacagagggagaccctgtctcaaaaacaaaacccaaaaaacaaaaaacacatcacattgtgcaacttacatgtatacaatttttatgtgtagaatatataaagtttctaaaatatgcacacaacttaccaacaattctactttcaagaaacttgaatttttgaaataattatttcctgaagaaatatttttgagcacctatatattccaatgactgctgctaggtwttagggaaacaaaaaaactagacattgcttcttgccttcatgtaccttacagtttagtgggagaaactgaatatataaacaagtttaaaatcaagtttaaaaagtatattaagtagtgaagagagcatatactttacctaggttaataggagctgaaggggtttgtaagagaga

SEQ ID NO: 665508 - DNA, 533 bp, Homo sapiens
aaaaaacaaaaaacacatcacattgtgcaacttacatgtatacaatttttatgtgtagaatatataaagtttctaaaatatgcacacaacttaccaacaattctactttcaagaaacttgaatttttgaaataattatttcctgaagaaatatttttgagcacctatatattccaatgactgctgctaggtattagggaaacaaaaaaactagacattgcttcttgccttcatgtaccttacagtttagtgggagaaactgaatatataaacaagtttaaaatcaagtttaaaaagtatattaagtagtgaagagagcatatactttacctaggttaatrggagctgaaggggtttgtaagagagagcttctattagagaaagcaaaaaagagtcacattaggaggcaaatgccatgttctagaaactgtaagaaaactgctgtggctggagggaaggccaagtaaggaaagcatgcatgagatatgcttgaacaagtagacaggagcctgatgatgcagcgacttacagatt

SEQ ID NO: 665509 - DNA, 565 bp, Homo sapiens
gatctcgccaggctggaatcaatgtcagctgcaccttcagttaaagcagagatggatgtagcaggccatcagtatattgacaatgtctgaaatcttttgtgagggttagggaaatgcccaaagtaaaaggattgaattggatgggatcaatgaaagattagaaaaggaatcaaatgagtatgagagttgaccaagatggcctatgtcgccctcagcttgactaaatttcagataggcttcttctctgggacctgttttyttagagcatttatttaaaaaataaactcgcaattgtaaattctttccctgctcctctaagatataaatctttctttctaaaagcaaatctttctaaaagcgtcctgccagttttacaatccaggactgctttctcaaggacctgggagccatccttttgaaatgcagtcacctaagaagatagtgcccctatcttccattctctgtgggatgatagaagactacattcagctccaaactgtaaaactaccttctgtcatgaatacatgagaaaatttacttttcctttcggtaaggccaattagca

SEQ ID NO: 665510 - DNA, 574 bp, Homo sapiens
atgaggtgcacttagcagagatctgatggaggcagaatagtgaagttctcccagctcctttactgaagagttgcttcgagctggctgagtctctcagacaaacatcacagcttttataagatccctctcacttagctttctccatacagcattcccactttttcttgcctccaaaccaatattctccttcccctttcagcctagggataatgatgttactagcctcaaggtaacctttgtgatttccctatactctgctcagacatctataactagttctcattaaactcttcttaaattamacaaatagagcattttcctgcaaagccagtgaatgatgcacttatcatatttagggatctgaggatgttattatgtcataaactttgaagtcactggtatatgatttaaattataactcccagataagaatgcacagttaccagtactctttgtctaagtgttttagattaatagtatttatttcagattaaatcagaatttagctagagaaataaaggaggtgaaaaggaagtttatgtcagttctttttaatgcaccatatgggaaaatc

SEQ ID NO: 665511 - DNA, 574 bp, Homo sapiens
atgaggtgcacttagcagagatctgatggaggcagaatagtgaagttctcccagctcctttactgaagagttgcttcgagctggctgagtctctcagacaaacatcacagcttttataagatccctctcacttagctttctccatacagcattcccactttttcttgcctccaaaccaatattctccttcccctttcagcctagggataatgatgttactagcctcaaggtaacctttgtgatttccctatactctgctcagacatctataactagttctcattaaactcttcttaaattacacaaatagagcattttcctgcaaagccagtgaatgatgcacttatcatatttagggatctgaggatgttattatgtcataaactttgaagtcactggtatatgatttaaattataactcccagataagaatgcacagttaccagtactctttgtctaagtgttttagattaatagtatttatttcagattaaatcagaatttagctagagaaataaaggaggtgaaaaggmagtttatgtcagttctttttaatgcaccatatgggaaaatc

SEQ ID NO: 665512 - DNA, 517 bp, Homo sapiens
gtatacgtcatttgatgtatacaaatatcaaaatgatgtatacctggtggaactttaaaaaatgacaacatatttactgattttgttaaaaagtcggcttctttttgttaaaaagaaggctcaaaggataggggctgtcccatgtgagataattcagataaagcttggaaaaggagagagtccaagatcagccccagggacgatccgtaggtgactaatgctctcctcatccagtaataaatggattcatccatacactagtcatcatctgcataaatctcccagattgctcatgttcttttttccaattatctaaagaaatattttagaactttgggcagtactaaaaaaataaatctctattaatgacctactatgtgtcaggaacagtactaagcacatcatataaattatttaacaaatatttgartgtggtggacagaataatggccctcccaaatatgtccatgtcctaatactcagaatctgtgaatatgttagtgcatatggcaaagga

SEQ ID NO: 665513 - DNA, 548 bp, Homo sapiens
gcagtgtctcagttcaagcaaagaaacacatggtatactgtttagctcattcattcactcaccaaacatttttaaatgcctactatattctgggcactggtgaccactgaacaaaataacaaagtctccacttttgcggttgacattttggtagggtgaggccaataataaataaatagacaaatatttaatatttgaggtggtaaaaaatgctttgaaggaaaataaatcagtgatggggtggagagaaatgggtgcagaagcagtagagatggaggctgtgtagataaagcatgagcagtagagccacactgccagcacctgagtcctatctctgcttcttactaaacctatgatctcaggcaagttacttagcctctctgtacctcagttactttacgcgtcagatgcagataatggtgacaaaaatatcaacttcatggaattgctgtaaagattaaataaaygggtatctataaagtgcttagaataatatctggtgtataataagttccatattgttaaagagtggtatcatataatgacag

SEQ ID NO: 665514 - DNA, 371 bp, Homo sapiens
ggataccaaagctgtgtaaaaatagtcgtacatgcattattcctaatagcaaaaactcagaaacaactcaaatattcctcagcaaaaataggtcatgcaatgcaataatataaagcaatkaaaaacaataaaccaagatttcctgtttctgcttagggtagaaagatgtgaaaagagttgctcctatctaaacaaaaaagaaaaagctgaataataaaaaaaatcataattttcattaacccattaaggagctgaagtggcaagaaaaatcagcaagcctgaaatctaaagaaagaaagatatttccatgcagaaaaagagagagcacaggatgaagtcaggcttccagaaaagcaggtaaaaaagaattc

SEQ ID NO: 665515 - DNA, 569 bp, Homo sapiens
tacaacatatctaattccacctaccacaaagacaatacttactttaaagagatttttgaaagaagaaattgatagcattcccaaggattctataacatgaaaaagtagatgagtgtcactctgacaaggaaatgaatcagacttagcataatcaatgaaacaaaatctattttttagcatttacaaatgggatcataatgggccaacagagattggatagtctaattctacctgtgagagaatgaaagtctgtttaaaggagattctctttcatttctcataatgttcatctcttccttctacactgcaatcaggctaaagaaaatgaggtattaccgagatctctctatattagctcacagaaacacactctgggcagaaactcccacagctgattatcccaaatgaggaacgtagactacttctgcccccctacccctggatctgactacatattggttttgtccccagttcttctatttgggggataaaatgaaattacrgtttcacatactatataactaccatagagctaccacatgaatacattgtgaacccactttttggct

SEQ ID NO: 665516 - DNA, 566 bp, Homo sapiens
atttaaaccatcaactttattgtttcaatcttgtaacatttctttctgaatatcctgtccaaaaagaaagtttttgccragatttgctttactttcatataatctttggagtgttagcagtttcatatgagcttatcagagtgttatgaaagtgaactgtggtcatagtgttaaaaatttttttgagctattgctttatgctacttcaaaagcacaagaaagaatggtcttaataacaacaatgccaaagcaataccaacaatatcagtacaggtgtgtgattcctaatcaaagaaatctcttcactgtggataagggtgaaaatgtaattggaatgtttagttcaggtaatatgaggaattcccagcaaaaggaattgatttaaggtagtgcctatataagtcaaaaactaaagtcatctttctgtattcttttaccatctgccgtgaaattgcatcagtctttttcaggaaaaaaaaactggcacaaataaatctaagttcactgggaaaaagagtttgtgtttacgacagtgcccagtgtgctggtattgcttaataaatgtc

SEQ ID NO: 665517 - DNA, 566 bp, Homo sapiens
atttaaaccatcaactttattgtttcaatcttgtaacatttctttctgaatatcctgtccaaaaagaaagtttttgccgagatttgctttactttcatataatctttggagygttagcagtttcatatgagcttatcagagtgttatgaaagtgaactgtggtcatagtgttaaaaatttttttgagctattgctttatgctacttcaaaagcacaagaaagaatggtcttaataacaacaatgccaaagcaataccaacaatatcagtacaggtgtgtgattcctaatcaaagaaatctcttcactgtggataagggtgaaaatgtaattggaatgtttagttcaggtaatatgaggaattcccagcaaaaggaattgatttaaggtagtgcctatataagtcaaaaactaaagtcatctttctgtattcttttaccatctgccgtgaaattgcatcagtctttttcaggaaaaaaaaactggcacaaataaatctaagttcactgggaaaaagagtttgtgtttacgacagtgcccagtgtgctggtattgcttaataaatgtc

SEQ ID NO: 665518 - DNA, 479 bp, Homo sapiens
aatgaatctacaaaaaagttacaaagtgtgttgtttttctttttgttttgcttttttggggttttttggtttgcttttagcttattggagagaagcctcggaaataatttaattactgttagcaactaaataataaaaagtcatttcatactgatagtgacaggagacagacaaattcctaggcagacagggacggagtgaaacctgaccttcaatccaaggaccatttaaaacctaaaaaccgagctgccagttctggacagagtccataatcagagtgaaaacttctatccccatcttaccccctctctcttgattggcttcttcygaatgttggcttttaaccactcaaatgacgatttttccaagaccatccatgggccaatcatcatgcactcaccccattctaagcccatgaaaactccccggacttggcctgatgcagtggctaacgcctgtaatcccagcgctttcggagg

SEQ ID NO: 665519 - DNA, 537 bp, Homo sapiens
cttgggccatgttcccaggacctcgtgaggctttgtcgtgggcatgtccttaaccttggcaaaataaacttctaaattaactgagacttgtctcagatattttttggcttaaagatcctaaaaataactggcttggatccagttataaaccccttatgtctgactgggtcagattaaaaaccaatagtaaatggtaacattgcaggaggtgcaaactttagcatttagaaatttgcagagatttttgtattttaactcctttctttcttgtgtgcttatatgaggaaagacatcrgctaagttgatttaggggatatgagagtcaaagcaaagattcaagataaaaatgagatctttactttcttaagaactaagtaatctaccttctggctgtgtctacatttacatgtataagtattagcccagaattagcaaatgcttatagaaatggcaaaatcttactaaatgtaatgtaaaatacaatgtaacattccaaatgaacaatactgcactttaaaaagtgcatttgaaaatgaa

SEQ ID NO: 665520 - DNA, 469 bp, Homo sapiens
gtacgtagtgaactgtagcctaactgcacatgtaagctgactgtaacttactcttgtgccaatcactgagytttggccaattaaaggcagccaactgtttaaacagtgttcaaataaggcaaacactgagcaataccaaatccgtttctgtacctcacttccgttattttagatgttattttcatttttctgtctataaatattccaccactttgcaatgctggaggctctctgagctattctgacttgagaggccaatcaattttcagatagttctttgcttaatttaacattgttaaatttaatttttctacatagtttttcatttaatagtataatttcaaaaagcttacctatttttttttaatacactgttttgtgacagtaattttctgtaaatgttttgaaaggatactcttatcttctgccatttgtcatttctggtgagaggagggcttgtctaattatt

SEQ ID NO: 665521 - DNA, 469 bp, Homo sapiens
gtacgtagtgaactgtagcctaactgcacatgtaagctgactgtaacttactcttgtgccaatcactgagctttggccaattaaaggcagccaactgtttaaacagtgttcaaataaggcaaacactgagcaataccaaatccgtttctgtacctcacttccgttattttagatgttattttcatttttctgtctataaatattccaccactttgcaatgctggaggctctctgagctattctgacttgagaggccaatcaattttcagatagttctttgcttaatttaacattgttaaatttaatttttctacatagtttttcatttaatagtataawttcaaaaagcttacctatttttttttaatacactgttttgtgacagtaattttctgtaaatgttttgaaaggatactcttatcttctgccatttgtcatttctggtgagaggagggcttgtctaattatt

SEQ ID NO: 665522 - DNA, 469 bp, Homo sapiens
gtacgtagtgaactgtagcctaactgcacatgtaagctgactgtaacttactcttgtgccaatcactgagctttggccaattaaaggcagccaactgtttaaacagtgttcaaataaggcaaacactgagcaataccaaatccgtttctgtacctcacttccgttattttagatgttattttcatttttctgtctataaatattccaccactttgcaatgctggaggctctctgagctattctgacttgagaggccaatcaattttcagatagttctttgcttaatttaacattgttaaatttaatttttctacatagtttttcatttaatagtataatttcaaaaagcttacctattttttttwaatacactgttttgtgacagtaattttctgtaaatgttttgaaaggatactcttatcttctgccatttgtcatttctggtgagaggagggcttgtctaattatt

SEQ ID NO: 665523 - DNA, 591 bp, Homo sapiens
gagtactcacctctgatcatctatcactgaagattttaagagctgaattgtagagtcagaaaaaaaataaagaatgagtgcattttaaaatgagaagcggatttaaaaaaagcagaatagtggaggtgaagatttgtcagacttgaagacgtagaagggatagaaaaagattgaggcaaaaagataataatgtcagtctcctttatttctttaaattggaagtgctaaatgtaggggaccacgtctttgtgcataattatttcatgatgcgtatctgtatcaatcagtcaattaaatgcacttacacacacatatgtgtaggtgtgaatttaaacatgtgattttaatgaaaaatcaaaattttcataaatarcaaaaactaattgaaaacgaggatggacacagtccaaatgtcctctgtcatctcggtctcattgtccaggcaccagcaatgcagaatattgacattacaagaaagtaaacacatccatgacacttacgtcactatgtcacatgctgttaatcactagcatgctgtgaaatcagctaacctgctgtaaaatacacagtttttttttttggaaatgtttt

SEQ ID NO: 665524 - DNA, 591 bp, Homo sapiens
gagtactcacctctgatcatctatcactgaagattttaagagctgaattgtagagtcagaaaaaaaataaagaatgagtgcattttaaaatgagaagcggatttaaaaaaagcagaatagtggaggtgaagatttgtcagacttgaagacgtagaagggatagaaaaagattgaggcaaaaagataataatgtcagtctcctttatttctttaaattggaagtgctaaatgtaggggaccacgtctttgtgcataattatttcatgatgcgtatctgtatcaatcagtcaattaaatgcacttacacacacatatgtgtaggtgtgaatttaaacatgtgattttaatgaaaaatcaaaattttcataaataacaaaaactaattgaaaacgaggatggacacagtccaaatgtcctctgtcatctcggtctcattgtccaggcaccagcaatgcagaatattgacattacaagaaagtaaacacatccatgacacttacrtcactatgtcacatgctgttaatcactagcatgctgtgaaatcagctaacctgctgtaaaatacacagtttttttttttggaaatgtttt

SEQ ID NO: 665525 - DNA, 556 bp, Homo sapiens
ccttttattttttatttttcgaaactgatggcgtatctcaacccacagatcaagaaacactatataactgaagtgagacaaatataaaacatacctaagcacaactcactcaaactactaaaatatcaaagacacagaaaattcaaaaagtgattatagatagaaagatatattgttacttaaaatgagtgacaacaaaacatagctcaactctcaacagacacaatggaatctagaagatactggaaaaaagtagatttaaaactattaatagttaaatggtgggtgatagtttcaactatttattggtattcttaatttttatcttgagttcaagcttgcaatgaattgtagtagtcaccttataaaacatgttcataaagtagcagattatagaccttgtttttatgactttgaaaatccacatattcattagtgttcttaagaagacttagakgactggtcaataggtgcagcaaaccaccatggcacatgtatacctatgtaataaacctgcacgttctgcacatgtagccagggtttttttttttcataa

SEQ ID NO: 665526 - DNA, 453 bp, Homo sapiens
taatagaacataaatggttctataataagatggtgagtcagcatgaattccaaagcttgcagctaagaactgaagcaggactctcaagcatgtggaacaaagttgaaaaaaaaatgctgtaggttgggttttcgttttaagctaactgagaacctagagaaatggagacaagtgcacagcctaatgacaaagaatagatccaaataatccatagttatgtaactggatctgtgaaagcatcaatccatcttttgtgatgccatctcttggtattgatggtatcacagatctagttacataactagaaaaataatcaaycatcaccaataacaagagacagcaggcaaaatcacaaaataccttacattattttaacttaaacactgaagaaagtcaaaagcataatggaaatctaaagaggcagaatttaagttttagaaaccatacaagtaa

SEQ ID NO: 665527 - DNA, 645 bp, Homo sapiens
ctgatttcccacaaaatgccagtacacaccatttgcttgagcaagcttaattatggttatcttgagtcttccctcaasccttcaattaatctctttagttccttaagtattctttttttcctcccttcgacatagtaaacttttaccaagcccatttaattagcctgttcaacttacagtcttcatttaaatagactcacgcagacatacaagcacatggaaattaaaaagaatgaaagccctaaagatgttttagtattttttttccatttggggtaaatggaaatcaaaattttaaatagttatacgttggtatcaatgactttattcctcatcataatcatcagagccaacatttattttgcgctctccacatttcgagttctgatgccttacacatatactatcttacttaatcttcccaccttgtctatgaggaaaataatattactatatttattttatagatagaaaatataagggtgagagaatgttcttttcttgctcagggacacacagccaataaggaatacacatggcttcaaattaaagaacagttgtactctactgcctagctttataaaatcaactgtataggcacattttattactgaaaaataaaactgaggtattctgaggacatcc

SEQ ID NO: 665528 - DNA, 645 bp, Homo sapiens
ctgatttcccacaaaatgccagtacacaccatttgcttgagcaagcttaattatggttatcttgagtcttccctcaacccttcaattaatctctttagttccttaagtattctttttttcctcccttcgacatagtaaacttttaccaagcccatttaattagcctgttcaacttacagtcttcatttaaatagactcacgcagacatacaagcacatggaaattaaaaagaatgaaagccctaaagatgttttagtattttttttccatttggggtaaatggaaatcaaaattttaaatagttatacgttggtatcaatgactttattcctcatcataatcatcagagccaacatttattttgcgctctccacatttcgagttctgatgccttacacatatactatcttacttaatcttcccaccttgtctatgaggaaaataatattactatatttattttatagatagaaaatataagggtgagagaakgttcttttcttgctcagggacacacagccaataaggaatacacatggcttcaaattaaagaacagttgtactctactgcctagctttataaaatcaactgtataggcacattttattactgaaaaataaaactgaggtattctgaggacatcc

SEQ ID NO: 665529 - DNA, 618 bp, Homo sapiens
aacagctcagtgaacacttatggaaaattcctcatacctgaaaataatggaattgtattcccatctcttctgatacataccatgttcaaaatggattacaaaaagaagaataagatgtaatttagaatagactgatattaagtagttcttcatggctagcttctactcttgtggtccttgtcatctttaattcaccaccctaggaatttctgatgattttcctgtgtaaagagactctttccactttatgtgttggttttgtttatttgcttgtaaaaagaytccaagacatgcatgcacacaacacacacacacacacacacacacacacacacacaatttattttgcactaaaattctgtgaccaggttgacgtccactctcataattccacagaataccatgtctctcattagatcctgcaatccttcaaggatctccctacttccagggaaaatccttaaaagggttgttagagtctttaccactcatggcacaaccatcattcttctaccagtcaactgaatcctaggtcaggggtcttcccttttctagtccaagccttcactccctctctcctctttcactaaccaagcttagactttcaaagcaaataac

SEQ ID NO: 665530 - DNA, 555 bp, Homo sapiens
gttaagcccatgtaatgaattcatttctgctagtgtatttttctttctcccttccctcccctcccttccctttccttttcttttctttcctttttttgttttcyctggtctctgctagtatatttttcacctctatttaatagaatttcaacttggttctttggcataatttccatgactctacagaaatccccatcttttcaagcatatcgttaacctttatcattcaatcatctagcatttttttcataattatctttaaatccctgtctgataattctgataaatctggatcatctctgactatttcttctcttgacctttggtcacattttcttgcttttcttgtgccttgtaacttttcattacacaccagacattttatataaaaatagattacttattaaattaagtaatattttacttccagaaaaagacatgacaatttttctgttaggacactagaagggagtctgagtcaatccaatatgtaactgagctgggtgtgggctatgatgcagctttaatttaacagttaatcactggcttcaaata

SEQ ID NO: 665531 - DNA, 555 bp, Homo sapiens
gttaagcccatgtaatgaattcatttctgctagtgtatttttctttctcccttccctcccctcccttccctttccttttcttttctttcctttttttgttttccctggtctctgctagtatatttttcacctctatttaatrgaatttcaacttggttctttggcataatttccatgactctacagaaatccccatcttttcaagcatatcgttaacctttatcattcaatcatctagcatttttttcataattatctttaaatccctgtctgataattctgataaatctggatcatctctgactatttcttctcttgacctttggtcacattttcttgcttttcttgtgccttgtaacttttcattacacaccagacattttatataaaaatagattacttattaaattaagtaatattttacttccagaaaaagacatgacaatttttctgttaggacactagaagggagtctgagtcaatccaatatgtaactgagctgggtgtgggctatgatgcagctttaatttaacagttaatcactggcttcaaata

SEQ ID NO: 665532 - DNA, 555 bp, Homo sapiens
gttaagcccatgtaatgaattcatttctgctagtgtatttttctttctcccttccctcccctcccttccctttccttttcttttctttcctttttttgttttccctggtctctgctagtatatttttcacctctatttaatagaatttcaacttggttctttggcataatttccatgactctacagaaatccccatcttttcaagcatatygttaacctttatcattcaatcatctagcatttttttcataattatctttaaatccctgtctgataattctgataaatctggatcatctctgactatttcttctcttgacctttggtcacattttcttgcttttcttgtgccttgtaacttttcattacacaccagacattttatataaaaatagattacttattaaattaagtaatattttacttccagaaaaagacatgacaatttttctgttaggacactagaagggagtctgagtcaatccaatatgtaactgagctgggtgtgggctatgatgcagctttaatttaacagttaatcactggcttcaaata

SEQ ID NO: 665533 - DNA, 612 bp, Homo sapiens
gataagaagagagaacatccaaacaagttcagaatgaaaaaaggagacattacaactgataacacagaaatataaaagattatcataaattattatatttgcatgcttacaaactagaaaacctagagaaaacgataaattcatgagcacaaaatctactaagattgagccacgaagagataaaaaacctgaacagcccaataatgaggagtagcaagattgaacctgtaataataattttaaaaaactcccaaggaaaaaaatcccaggagcaataaaatcacagatgagtactaccaaatatacaaagaaaaactaatttcaattctccagaaactgctccaaaaattgaagaaggaattttttcttaactctttctacaaggccaatattatcctgacaccaaaaccagataaagacacaacaaaaatcaaaactacagaccaatatgcctgatgamcattgatgcaaaacttaataacaaaataccagcaaactgaatccaacagcacatcaaaaaggtaatacaccatgatcaaatggtatttacctcagggatgtaagaatggcttacatatgcaaatcaataaatgtgctacatcacataaacag

SEQ ID NO: 665534 - DNA, 560 bp, Homo sapiens
tgaaataaacaaatcctcttttggttgtttccatcatggtgacggtcccgggaatttcaagctttgaacttagattaaggtagtctcagactgatggtgtccttaggtgcctagcagaaacaaagatatctctctataggaaggtggattcctgttaggctaggatagttcccacaaatacattttaaagtactattaccagaacatgtgtagtcaagtttaaacagacacatgaggaaagaagacaacataagcaagaacaaacagaaataacaaaggccatagaaccacaaatacttaatatttggatttagcaggttataaaacaggtaataaaactatagttattatttaatgaaataaaagataaatttgaaatatcttcgggaaaaattacgttgcrgatatttaaaaaaggaccaaagaataaaataaatttatatggttcagaaattctccactgttttagtcttctggtggcactccatactggtttttagtgctgctacgaattaatttttttttctttgagacggagtctcactctgtcaccaggctgg

SEQ ID NO: 665535 - DNA, 531 bp, Homo sapiens
atttaaaaattttaaattagaatcttactatgtggaaaaatacggtcattgttggaaaatcattttgcctctttttaacagcattcaggcagtttttttttccctttgaaaatagaccttggtctgtgttgttggaaagcatgtaattttcatttgttttttttcacctagtagtgcttaatgataccatgtgaatttttatagtcccagctgcactgaagtgtgtgccctgaaacttcggttggattaagaaaagtagcttggtgtgagggctgaaattggtgaaatgggagaacacagggttgcatctatatatattgcaattaatattgacgagtgggcagaagtccaacattatcctagrgggttggctaatgttctttgtacaccaatgcaagtgagtcttttccctccaggtgtgaatagtttaatttagtaggtcgattagtagaagcaaggggtgttttcttgtattccagtttacattatacactcaacattaactagctgtttaaggtacagtgcattgtt

SEQ ID NO: 665536 - DNA, 552 bp, Homo sapiens
cccacatggaattgcccaccttggaagactctccagaccttgttactgtgggtgcctaggatacctggtcacttggtgcatgatgtggttacaaaacaagacttcgaagatccctttgaaaccacaatatctacgattgagcaaatgttttaaaaataactytaacaaaacaaacttgagtaatttatatttttgagctccttttctactaaccatttaccagggaccaccacttgattgtactatctccatttaatctgtccaacaactctgtgaggagtataattactatcctcattttataaataaggaaaataaatcacataaaagttaagaagcctccctcacccacacagagctcagagtccagcagtcatctagaatttgaaccaagtctgcttctcatgctcagttggatggaaaggaagtagagcaagtccagtccagcctcacaagtggactgtggtatctaaaggagagatgatatccatgggcttctgcagaactgattctactgattctccatgcatccagctgagaacttcagcttcc

SEQ ID NO: 665537 - DNA, 552 bp, Homo sapiens
cccacatggaattgcccaccttggaagactctccagaccttgttactgtgggtgcctaggatacctggtcacttggtgcatgatgtggttacaaaacaagacttcgaagatccctttgaaaccacaatatctacgattgagcaaatgttttaaaaataactttaacaaaacaaacttgagtaatttatatttttgagctccttttctactaaccatttaccagggaccaccacttgattgtactatctccatttaatctgtccaacaactctgtgaggagtataattactrtcctcattttataaataaggaaaataaatcacataaaagttaagaagcctccctcacccacacagagctcagagtccagcagtcatctagaatttgaaccaagtctgcttctcatgctcagttggatggaaaggaagtagagcaagtccagtccagcctcacaagtggactgtggtatctaaaggagagatgatatccatgggcttctgcagaactgattctactgattctccatgcatccagctgagaacttcagcttcc

SEQ ID NO: 665538 - DNA, 552 bp, Homo sapiens
cccacatggaattgcccaccttggaagactctccagaccttgttactgtgggtgcctaggatacctggtcacttggtgcatgatgtggttacaaaacaagacttcgaagatccctttgaaaccacaatatctacgattgagcaaatgttttaaaaataactttaacaaaacaaacttgagtaatttatatttttgagctccttttctactaaccatttaccagggaccaccacttgattgtactatctccatttaatctgtccaacaactctgtgaggagtataattactatcctcattttataaataaggaaaataaatcacataaaagttaagaagcctccctcacccacacagagctcagagtccagcagtcatctagaatttgaaccaagtctgcttctcatgctcagttggatggaaaggaagtagagcaagtccagtccagcctcacaagtggactgtggtatctaaaggasagatgatatccatgggcttctgcagaactgattctactgattctccatgcatccagctgagaacttcagcttcc

SEQ ID NO: 665539 - DNA, 579 bp, Homo sapiens
tgtgtccaacattttggcttgtctgggagataccctagggactcattgctgtcttgcttgacttaaagcactaacagataaatggcaaagtttggaacctgctgaataacaggcaagcaccattgcatgttagacctgcagttctaaagaccaatatcagtgacagcaagagattataaaaggtttgagaggtcctagaacctccagcctggctaattgatgaagacttttctctgcctaaagccagttacacaaagattgtgagaggtggtagtttttgttaaatgcccaagttctggcaaaagttacaaggcatattaaaaaactagaaaacatggtcaaatcaaagaaacccaaaactccagaaattaagactaaataaatgcaatttgtgagctgtctgaaaaagaatctaaaataactcytataaagatattcagtgaactaaaagacataataaactggatgaaatcagaaaaacatgcatgaacaaaaggaaaatatcaacagagagatggaaagcataaaaaataataaaataggaattccacatttgaaaatatcgtaagtacactgaag

SEQ ID NO: 665540 - DNA, 522 bp, Homo sapiens
aagcctcagaagtttgtctttcaagctcactggctattggccacatattggctacaggtgcttctatatgttgctattcacaacatggtaactttctttacccagaactttttttgtaccctaactttggaagtaatattccatcacttgagctgcctttctctctggttttgtttctttgtttatttgtttgtttgtttgcttttcttactagaaagtgaggtattaggtccagcccacaaccaaggggaggggattacttaagggaaagagtgaatactggaagtgagagattattagaagccattttagaggcttcctatcactttggatatcagagcaaaataaagatttctggatagtccaacctatrgagcagatttttgcctctcaacccttaggacctagttaatctaatgaagctcaaagtaccttataatcagtttagtcaggattttttaaaaggagcctgctttgcagattgctgtgcatcaggaatcagcaaacattttttgtaaagag

SEQ ID NO: 665541 - DNA, 590 bp, Homo sapiens
ctggcctgtgaccccaaagttctggctctagcagataggcagacggacagacggacagacatagacaactgagctccactttccagcctgctctctcccaccctgcttttttccagaggcttgttggcaccgtggattgcactttcagctccccacccgcccatctgcaaagtggcctcattggtgtgccatttttactggtccagtcccaactagaaggggcatggcctggccatctaccccagttcctctccatgtccccgtggctctcaagtgtctccaattccagctgtcccagctgccctgcgcaagaggaggcgtgtgtgggcgaggctgctgggttacctattaactcagctgggagttgaagagccgatgggcagcaggcagacttgagtctcctttctgtccatgggctcgggccactgtctyaggtccacccgtggctccaaaatggtctcctggtccgtgatagcaaagatccaggaaatactgcagaggaagatggtgcgagagttcctggccgagttcatgagcacatatgtcatgatggtgagtgggtgggcagcacgaagtgggtggggctccgc

SEQ ID NO: 665542 - DNA, 530 bp, Homo sapiens
ttacaaaaccagttatgagttataaagatgttccaaatgttgatgcatttcattataaaatatttttttaaatcacattcactggtatcaccacttatctagtcagaagtcttgaagttttgaaaagctgacaagttcacggtggcagatacaaatttttgaaaattttaattttcacttaacagctcaaattttataatcagccacaggttttatcagatgtttttctcgayaagctcactttgttcatttttgagaaagtatctttcaaaagcctaactctaaataatttgtctttaattgtttcaagtgaaaaagttattccattaaaaaaaaaatgaccaattcagggacaggcatggtggctcacacctgtaaccccagcactttggaaggctgaggtgggtggatcacttgagcccaggtgtttgagaccagcctggccaacatctcttagtagagaaaccctgtctctactaaaaatacaaaaaatagctgggcgtggtggcatgcacctgtagtcccagtta

SEQ ID NO: 665543 - DNA, 585 bp, Homo sapiens
tatctgtggcacagggagtctctggattattcaaaagtgaggggggttggcatgctgtggaactgcttctgctaagcttgctgtaaggtgaagctactggggaaaaatctgaaggctccaagagcaaggaaggcgggggtgagtgagtaasagccaaagccctggtgatttggaaagagtttgcacctgtagggtccatcgccttctcctcctatcctcccattcaacatttagtccaactttaagaaacactacaaattcccagagaatatgtagaataatctaaataaatctctttcgataaatacgtttccttccaaaaaaaaaaaaaaaaaaaccctagactcctttatttcacagtgtaggttgataaaactatgtgataacaagtggttgataaactgaattagcactttaacaattaactcaaatatcccaatgtaaggagtttaattagacctttcccaaattaaaaacttgatctcaaagttttttcttatcttctgaatttaaagacattagtaatatattatgtattacactgagatatgtcataccagctgtatgtaaaatctgctcaagaga

SEQ ID NO: 665544 - DNA, 511 bp, Homo sapiens
ttctttactcaattaaactctaaagttttcctttcaacatgtataattttcacatcaygaaataataatcttctttaattttttttccaatgtattaaaaatgtaaaaaccatttgcaggctacacaataaatggtagcaggctatagattcccaactcctgatctaagctaatataatatactgttttcttaagcagagttaatgaaattttgcaaaattggatcctccttgctcttttaaactcagtttgtaaatcactcaccattaaaacaatcctggaccctcaaagggttaggtaccactgtgccaattaccacagtgctaatattcagaggaagatctgaagctgagaagcttaaacttttttcccaaggtcactaatacctggcctgggaaagacctaattaaggtgaaacttgagtctttgcattgtagtaggagtccgcctaggtgggagcagagcagagcagataagctcttaaactgtctggatttcagcagctcagctt

SEQ ID NO: 665545 - DNA, 590 bp, Homo sapiens
tatcatctatctgtgtatctacctacctatctatctatgtatctatctacctacctacctacctatccaaccatctatccatatctaatttatctatacttttctacaggtacagctcaaattaacaatatgttgagttccaaaattttattcttattgaaacaatactttaaactcaaaatcaattttctgaacccagaaatattaatgcccattgttacacaactctttcacaatgtatgattattccacatatctcatttgttccattccaaaacttccacaggtgctaagatgatggaaccaattccattttgtaaatagcaagctaagacttgagtgtgatcatatgacttttcctaagaacatgtaagcagaaaatactgctcccagcaatagagtataagacagatgatttcatatcaaaagttcagaaggttgaatggcctaaagaaaagagattaggttttggaacaattgcgcctagggcatacttttcactctttacctcactgaagtgactgctccccgacagatattcagattctttttatgtaaactgcrgcatggacacccatcttgcagattct

SEQ ID NO: 665546 - DNA, 579 bp, Homo sapiens
tgtttgtttgttaaatcttagctcttggagctgttcttatttctttatctcaygcatactccaaaataaaacaaaaaccaccattcaaagaaggcattggtgtgtataatggcttcactgaaggtttgcagtgactaaggcagtttaccttgcagaaccaaacactcattcagctgctgtcctgcattcctgacactggaattttttaaattgacctccttttccacatgatcaaacatcctgttccattgctgaccactgccccctccactctcactgatggcttgccctctctcctttcttgatatcttctccaccctccagattctatgagcatctcatggagcagtcagcatcagttggttgtgcagtttttcacataaaacatttccttgggtcatactcccccacttaaaacagtctctccaggtattttcctaaacaaaggcagttctctctctttgggaaactctggtaccagctgttaaaatgacatttgtttccaacctgctacataattttaaaaagataaatatgctatttattctttagtagctgacatgtctggataatgctgaa

SEQ ID NO: 665547 - DNA, 550 bp, Homo sapiens
gctgaagtggtcagaacttttaattttggccagttttcgtgctttatatatttcatgctttccatgtcaatagtagatgctaattttatggagaaggagcaaagaatgcaaactttttttgagcctcaactttgcgttggtgtcagtgttcagcactgcattgtccctatgcaatcctagtatgaatctcatgagaaaggtctattttgcttcattttacagatgagtatcatgagtcttaaattgtttcaccaactctcaaaactggcaaatgacagagctatgattcaaacagctttgatctcaatccatctaaaattggttccscgaatttattatacctcagaagtacataggaattcttttaaaaatacagattattaggactatctcagatatgctaaaaaaaaaaaaaggaaagagaaaacctctaggggttctcgatttggaaagcttatataagccttcacccctcacttggtgattctgatatgcagccagtttggaaagaataaagtttcgaattgattctgcccctaaatgacactca

SEQ ID NO: 665548 - DNA, 585 bp, Homo sapiens
gaggggctgaccctaaagggacagcatgagagcattttggaggggcaataaaacttctgtaccatgattgtggtggatgtacatctgtgtgcatttctgaaaacccacagaactgtacattcacaggagtaaattttaaagtatgtaaaaaatgtaaaatctgaaaaaaagactgggaaaataattcatgtaaatctgtcccttctgccagaaaaacaacccaaagtgggaaaatgaaatcatcttgattcctgaagtttagtggtgtggttcaggagaaagataacttaattcccctttataaatagcctagttcccatttatttttaattttttaatttttaaaaaaattttttgagacaggctcttactctgtctctcaggctgtggcacagtggcatgatcactgcatactgcagcttcaaactcctggactcaagttatctgtccacctcattcccttgaataggtgggactacagttatgtgccaccatgcctggctaattttttactttttatcctttgtagagacagggycttgctatgttgcccgggctggtctcaaaatcccaaactctggcgat

SEQ ID NO: 665549 - DNA, 598 bp, Homo sapiens
atgaaaaaataagatccaactctaatcacctcacctttaagaacacacatagtttaaaatgaagggatggacaaagatatcccaagcaaaagtgagcaggagagaatatacttatatcagataaaatagtatttaagtgaaaaactggcacaagccaaaggttattatgtattaataaagggatcaatgtatcaagaggatatactaattatwaatgtgtttgcactcaacattgttgcactgaaatattttcaatataaatttaaatgtagtttatattttaaatataaaagaaaatattaacagaacttattatgggaggaaaaaatagctatatggtaatggtaagaaactttcttaccccactttcaacaattaatgggtcatccagacagaaaatcaaaagaaaacagtggacttgaagaacactatagaccagatgcacctaacaaatatatagagaacattccatcaacgtgcaacagagtaaaaacattattttcaaatatggatgaaacattctttaggatagattatatgttaggccacagaataaatcttaacaaatttaagaagaccaaaatcatatcaatcaaac

SEQ ID NO: 665550 - DNA, 627 bp, Homo sapiens
tgggcctatttctggggatctttcttcgctactgaacatcaaaactcaaaccaccacaaaaataactcttccgcaccattttgccttggaaaagtggtaagtttcattttcccgtcccttttagattgcgttataatttctcaaagtgaacatcaacgttataattttctcttccatttcacaaaacacacacttttgtgttctgaaaattccatgttatcaagccttagcaggcagtagggtagagctatctgatctcatcttaattgctttagcctagataagyaactatactgatgataagacccccaaatgagttaataatcattagggcttattcttttctgaactctttgaatttgttttgccagagaggcaacttcagctcttgcctgcgtgtttgtgggaactccccaacaatctcttagtccattgcaagtctgctaattcattcaactctcgttctttttttttttttttaacacctgtgtggagacatagctacagttaattccaataaagtaagtgtctgaatcaaaacttactgtacgtgaacactcatttcaaactgtggacattatgatgggatgaagaaaacaacagagaggagagttagtgaacagcatc

SEQ ID NO: 665551 - DNA, 582 bp, Homo sapiens
ggctggtattctttgcttgtattttatggctcttttcactactagatcaccttaaatgtttctcatcttctctattccagatatatatgttctttcttagactgttcagcagtagacccttgacttacaaccagaaatatgaagaattattgccacaaatggcttataatactatgaaaagatgctcaacttgacttgtagagtaatgtagattacatccagatagcatttctcatgatcagattggcaaaattccaaaagtttgaccacaactctgttgacaaactgtagggggaaatmgatacgtacattgttatttgctgggggaatgcaaaatagcataaagctgatctattaatatgtgggggaatgggcaattcccagtacaattaaatctacagtaaatctgaagattgctagacaaaattcctagaatcctctaggaatctatcccaaagatttactggcaaaatattttttatgaaatatgcgttttactattcattggcacactatttgtagtagcaaaaagctgcaatgactgaaatattcttcattagaggacagttgggtcagctgtgg

SEQ ID NO: 665552 - DNA, 582 bp, Homo sapiens
ggctggtattctttgcttgtattttatggctcttttcactactagatcaccttaaatgtttctcatcttctctattccagatatatatgttctttcttagactgttcagcagtagacccttgacttacaaccagaaatatgaagaattattgccacaaatggcttataatactatgaaaagatgctcaacttgacttgtagagtaatgtagattacatccagatagcatttctcatgatcagattggcaaaattccaaaagtttgaccacaactctgttgacaaactgtagggggaaatcgatacgtacattgttatttgctgggggaatgcaaaatagcataaagctgatctattaatatgtgggggaatgggcaattcccagtacaattaaatctacagtaaatctgaagattgctagacaaaattcctagaatcctctaggaatctatcccaaagatttactggcaaaatattttttatgaaatatgcgttttactattcattggcacactattygtagtagcaaaaagctgcaatgactgaaatattcttcattagaggacagttgggtcagctgtgg

SEQ ID NO: 665553 - DNA, 601 bp, Homo sapiens
aatcacaatgcacttctggttgggttggtacagaaggaatgaatagacagtctaattgatctagcacagtccttagagtctaatagccctgaacttaacccaaactatgacattttggaatagatttatggtacctagttgggcctgtgcagagttttccagagaaataaattaaacatacatgtaacacaaatagcacacaggtatgcatgcatgtcactgagactccccacctygagaaaatctaaaaatagctgcattggtgccctctaactgtgtcaaaatggaaagattttggaaactaaaaattgaccagacatgggtcaccacaccatggagggataggaaataaaactcctagtttctcattctccagaataggagcttcaaaagaacacaatgaaaaagagttatcatttctatcccaaacatggcaaagatagttaaagaagctaagattttaaaagtcttccctgtagaagcctttcctgaatgctccagagatttctactaccattgacagcttcacaaaaggaagcaacaactctttgaggtcctcctgcctggatagtaacataaacatgctctatatgttccaagt

SEQ ID NO: 665554 - DNA, 603 bp, Homo sapiens
tgagaatgtctactttctgggtataagatgtgtagaccctttcgtaaagagctggtctgaatcaacttaagaaagagtcctgctaaaaaggactcctggagaagggccctcaacagaaaagagtcagtgaggggtagtccacaactcggggcctggggcagagggattggaggatatggcaaatggtgagccaggaaggaggcacctcccatgccaatgaagatcaggagtggtctagatcaatagtgtaggtgggaggttatgagtgtatgaagacaatagcagtagattgtggagaaaacaatggatttaggaagcattttaaaagtagtataaggctgagcacagtggctcatgcctataatccgascactttgggaggccaaggagggaggattgcttgagcccatgagtttgagaccagcctgtcacatagggagactttgtctctacaaaaaattcaaaaattgttcaggaatggtggcacatgccattgttccagttactctggaggctgaggtgggagaactgcttgagctcgggaggtcaaggctgcagtgagttacaattacaccactgcactccagccagcctgggccacag

SEQ ID NO: 665555 - DNA, 470 bp, Homo sapiens
aaagatctctacaatgaaaactataaaacgctgttgaaagaaattgaagcatacataaaaaaatggaaaaatactttatgttcatggattggaagaatcaatattgttaaaatgtccatattacccaaagcmatctacagattcaatgcaagccctatcaaaatactaatgacattcttcacagaaatagaaaaaaaaatactaaaatttatatggaaccacagaagacctagaatagtcaaagctattttgagcaaaaagaacaaagctgaaggaatcccagtcctgacttgatctccttatatattgtggttattaatcccttatcaaatgggtagcttgcaaatattttctcccattctctgagttgttttttcactttgttgattatttcctttgctgtgcagaagctttttaacttgatgtgatcccatttgtccatttttgctttgattgcctgtacttgtggg

SEQ ID NO: 665556 - DNA, 570 bp, Homo sapiens
ccttctaatggctgtattgttttatttactctgcttaatgtaacttctaaataaattatgagttatcataagctttctctaaaatatgatgattttgaatcatagaaaaatgattgatgtgctgtaaattatcattcttaggagtagggatctttggagccgtgcagggatctttggagctgtgtttgaatcctaactgaatgacattaaacattaattggatgacactgggcaagttacttaacttctctggtgcctcagctttctcatttgtacaacagtgataataatagtacctacattataggattctcatgaaggtaaaagtttggtttaactttatttctgcatatgagttgtatgcaaaatgtcatcatagaattacagaattagacatggcaaaacctatttgctctttattgaaagatgactrttcttaagtactacttaagttagcataagtaaaatgcctaagttataagtatacaagggaatccttttagaattcaaaggagaaaatacagctaccattcactaggtctggaagcaggatttggaaagcagcagaaa

SEQ ID NO: 665557 - DNA, 527 bp, Homo sapiens
gaactcgcagggggaggaagaagaggagggaaaaaggagggggtggaacccggctgggacctggcargaggtggccacgcgctgagcacgctccgactgtgtgagctagggggcccggcgcgggtgccatcgcagcggggcgcgtgggaaggccagtgtgcacgcgaaggtcccactccaggcgagcgcaggggaggacccggagcccagggaggtgtccgcggacatctctgacatggcggcaaccttcttactggtgtcagcgggtgcacagcttcccttgtccaggacagcctgacattataaataatgagggaatttgggggttccatctaaagaagaaagctttcattttcattcggaagggttgtcaccttcccacgtgtgtggcaatggatcagagaggagaaggcacggggaaggatctgggtaacaggacagagcaggttacgcttggataaagcaatatgtgctaatattgtttctttcctgcctggttggttttatttagaggtacatgcatgtat

SEQ ID NO: 665558 - DNA, 553 bp, Homo sapiens
ttcacttagaataataatcttcacctccatcatggttgctgcaaatgccattatatcattttttttatgactgagtagtattccatgctgtagatataccacattttctttatctattcattggttaatgggcatttaggctggttccatatttttgcaatcacaaattgtgctgctataaacatgcatgtgcaagtgcctttttcatatgacttcttttcctttaggtaaatacccagtagtaggagatcaaatggtagttctgattttaattctttaaggaacctccatactgttttaaatagtggttgtattagttgacattcccaccaacagtgtaaaagtgttcccttttcaccacatccgtgccaacagctattattttttattttctcattatggtcattcttgcaggagtaaagtagtatattattgcgattttaacttacatttccctgmtaattagtgatgttgaggatttttttgtacgatttttggccatttgtatatcttcttttgagaattgtctattcatgtcctttgtccacttttt

SEQ ID NO: 665559 - DNA, 603 bp, Homo sapiens
gcacatgcttgatcctttatgctctagtgtatcttgctgactttagcacagattttgatgctgggtaagaaatcctcactatgggggtcttttgctccccttgtttctgcctcctttcctctgttctgcattgtctagcatttgcccaccaagatggtctgaagaagatgcaacaaaacgatcaggacaaaggcccacaacgatcaaagtgttctccatcttgagccataaggaataagaggcttgcattcattagccctgtggtagaatgcagctgcgagccagccagctgctctgttccacccatgtggtctccactcttattctgagacactcgctacctccaggagaacagcycccatctgctctctagcaaagcctcaccagggacctgaagatgtaaatagagccttggctgaaccaagcccttctcagagtagcaagcatctaagcagatctgcatggcaccatcttcccaacagggaaacgctgcagctttgctcaccaggccattccctaattacctcagtgcagcacagaagccagaaagccccaatgattagcctttatgaaagacattttccaagaggctgcccatgtccc

SEQ ID NO: 665560 - DNA, 611 bp, Homo sapiens
gacttaaatctaagacctgaaaccacaaaaattctagaagataacatcagaaaaattcttctagacattgacttaggcaaagagttcatgaccaagaatccaaaaccaagagaaacaaaaacaaagataaatagatgggatctagtcaaattaaaaagcttctgcacagcaaaagaaataatcagaagagtaaacagacaacccacagagtaggaaaatatagtctcaatctatacacctggcaaaagactgatatccagaatctacaaggaactcaaataaatcagcaagaaaaaaaaatcccatcaaagagtgggcaaaggatatgagtagacaattattaaaagaagatatacaaatggccaacaaacacatgaaaaagtgctcaatatcagtaatcatcagggaaatgcaaattaaaaccacaatgagatgccaccttgctcttgcaagaatggccatgattaaaaaattaaaaaataatggatgttgacataggtgtggtgaaaagggaacagttctacactgctggtgggaatgtaaaactagtacaaccaccatgggaaacagtatrgagattccttaaataactaaaagtagaacaaccgttt

SEQ ID NO: 665561 - DNA, 621 bp, Homo sapiens
tattaattggcctaattttagtaccgttgtgtctcgacagacatagagtgggccaaggaaagggagagagataagggaacagctggttagtggagcagtcagaacacacacatttatcaattcaattcacttttttgtatgggcagggtctatggcaccccaaaacaattacaaaattaaaatcaaggtaactgagcacagataactataacagatataataataagaaaaaaatacttactattgtgataattaccaaaatgtgacagagacacaaagtgagcacatgttcttcaaatatccatataatgtattaaatctataaaattatgtaaagtctttattgtgatatataactaatgagattaaaataaaacawatcattcatgttttatatttttgatatctaataaattatgataattctaaagttggaaatgctgttgggaaatggctgcaaaagaattgcttgatacaagattgccacaaaacttccatttgtaaaagacacaattatctgtgaagcacaataaagtgaagtacaataaaatgagatgagcctgtatttttaaaaaaaaaattatatacaaatggccaatgaacatgtaataagatgcccaa

SEQ ID NO: 665562 - DNA, 621 bp, Homo sapiens
tattaattggcctaattttagtaccgttgtgtctcgacagacatagagtgggccaaggaaagggagagagataagggaacagctggttagtggagcagtcagaacacacacatttatcaattcaattcacttttttgtatgggcagggtctatggcaccccaaaacaattacaaaattaaaatcaaggtaactgagcacagataactataacagatataataataagaaaaaaatacttactattgtgataattaccaaaatgtgacagagacacaaagtgagcacatgttcttcaaatatccatataatgtattaaatctataaaattatgtaaagtctttattgtgatatataactaatgagattaaaataaaacatatcattcatgttttatatttttgatatctaataaattatgataattctaaagttggaaatgctgttgggaaatggctgcaaaagaattgcttgatacaagattgccacaaaacttccatttgtaaaagacacaattatctgtgaagcacaataaagtgaagtacaataaaatgagatgwgcctgtatttttaaaaaaaaaattatatacaaatggccaatgaacatgtaataagatgcccaa

SEQ ID NO: 665563 - DNA, 625 bp, Homo sapiens
tccttacgttacttctgaaatctagtggggctctgtggtgtctgattttccctggctgcttctttagttttgtctgcttttccaggctcagcggtgtgctgatggaagtggaagagcctgaagtcttrcaggactcactggatagatgttattcgactccgtcaatgtactttgaactacctgactcattccagcactacagaagtgtgttttactcatttgaggaacagcacatcagcttcgcccttgacgtggacaataggtttcttactttgatgggaacaagtctccacctggtcttccagatgggagtcatattcccacagtaagcagcccttactaagccgagagatgtcattcctgcaggcaggacctataggcacgtgaagatttgaatgaaactatagttccatttggaagcccagacataggatgggtcagtgggcatggctctattcctattctcagaccatgccagtggcaacctgtgctcagtctgaagacaatggacccaagttaggtgtgacacgttcacataactgtgcagcacatgccgggagtgatcagtcagacattttaatttgaaccacgtatctctgggtagctacaaagttcctcagggatt

SEQ ID NO: 665564 - DNA, 464 bp, Homo sapiens
ttgcttttttctaagcaacaaagttttatgatatcatgaatgaaaaggtccttaattaccttttggtctacatgtcaaggacttctccctcataaaaccagtagtaatcacaacaaaaggaattaaccataaaaagaggtattaaaaatgtatacttgatttttaaatgcaagcatattatttctttacattaaaatttttagatttaaaaagtgtttctggaagctcaatctagaaaagaaagatttaattcttaacacccagtagggcaaaacaaatcagacagaaatgatatatgaatgtaaatgcaattttatttaccacttttgtgctccaaatggcactgccaggaagctgcctgggtttaaaaatttcccgaccttctgaaatgtctgrggacaaggaaggtgggctcacagtattatgggtactccaggcctcctaggatatggcagttgagaaaa

SEQ ID NO: 665565 - DNA, 464 bp, Homo sapiens
ttgcttttttctaagcaacaaagttttatgatatcatgaatgaaaaggtccttaattaccttttggtctacatgtcaaggacttctccctcataaaaccagtagtaatcacaacaaaaggaattaaccataaaaagaggtattaaaaatgtatacttgatttttaaatgcaagcatattatttctttacattaaaatttttagatttaaaaagtgtttctggaagctcaatctagaaaagaaagatttaattcttaacacccagtagggcaaaacaaatcagacagaaatgatatatgaatgtaaatgcaattttatttaccacttttgtgctccaaatggcactgccaggaagctgcctgggtttaaaaatttcccgaccttctgaaatgtctgaggacaaggaaggtgggctcacwgtattatgggtactccaggcctcctaggatatggcagttgagaaaa

SEQ ID NO: 665566 - DNA, 536 bp, Homo sapiens
tattaaaattactttaaggatttagacctttgtctatgctgcttactttctgaaaatatttcagcttatactttatcagtggtggatattagttctatttttactaaactttactaaacatttagtgttacctagggggaaaaaaaagcaatttgataggagtaaagtgtatctcattaaagtcttgtactatactcctgctgatgctgtaacaaatttccacaaatgtastattatataataatgtacatttaaggttttaacagttctggaaatcagaagttcagaatagctcttacagcacgaaaatcatcagaggttctgcagagttgcattctttttagaggctattaggagagaatctgttcaatgcctcttccaatgtctagggcctgcctgcatctcttggctagtggctgcatttctctgatttctgcttccatcgtcatatctccttccatgactcatttgtttccaccttctgtcttataagcaccattgtgattatattggtcctacccaataaatccaggata

SEQ ID NO: 665567 - DNA, 544 bp, Homo sapiens
ctccactggtgctctgctgggccagctaccactgtcgctctgggaagaacatgtctttctctagcacaatgctcaggctgctataactgcaaaactgtaggtgcagtccttcctcagggtgttggagcacaaatgggaagataaattatgtctcctactgtgtgtttcccattggtacctgggtccagaggagcattgtttatagccagagtcgcacaagattcctcttggaaaaagcttctgaagcttttctgtaccactccagaaggacttacagggcaaagtccagtgggaaggctagatctgggtaacagaacagacattgtyatgccctatcattgtgctactgttccctttcttttgagatggggtttcactcccattgctcaggctggagtgcagtggcatgatcttggctcactgcagcctcaacttcctgatttcaagtgatcctcccatctcagccttccatgtagctgggactacagacatgcgccaccatgcccagctaattttttgtatttttagtagagacagggtttca

SEQ ID NO: 665568 - DNA, 604 bp, Homo sapiens
cataattaccaggtgattaactttaatattagttttccaaagtttccctcactgaagagttgccttttctagatgcagagattggctatcctgctttaaaaaagaaacagttatctaaatactaggtttcatgagtaattgtgatgttctttataaaccaaaagarattgctaatactgactttataattggaatttcatactcctggaagatggttgcaatttaatcaaagttgtattagagttttggaaaaaatatactataacttagcactaaattaatagttcaaattttatactgaagtctaatgttactaattccctccagccattaaaaacaaaactcattttgtaatattgttcttttcactggctataatattatagtaatttcttacctccttgacagcctcaaatattataatttacttatctttaattcatgtatttattcaaatttttgtagaaaacctactacttaaacattacctataccatgttctatcttaatataatatttggtatgtagtaaatatagtccatattaactgttattattaatttaaatattattaacattatcattattttcaggcaaatagcca

SEQ ID NO: 665569 - DNA, 604 bp, Homo sapiens
cataattaccaggtgattaactttaatattagttttccaaagtttccctcactgaagagttgccttttctagatgcagagattggctatcctgctttaaaaaagaaacagttatctaaatactaggtttcatgagtaattgtgatgttctttataaaccaaaagaaattgctaatactgactttataattggaatttcatactcctggaagatggttgcaatttaatcaaagttgtattagagttttggaaaaaatatactataacttagcactaaattaatagttcaaattttatactgaagtctaaygttactaattccctccagccattaaaaacaaaactcattttgtaatattgttcttttcactggctataatattatagtaatttcttacctccttgacagcctcaaatattataatttacttatctttaattcatgtatttattcaaatttttgtagaaaacctactacttaaacattacctataccatgttctatcttaatataatatttggtatgtagtaaatatagtccatattaactgttattattaatttaaatattattaacattatcattattttcaggcaaatagcca

SEQ ID NO: 665570 - DNA, 568 bp, Homo sapiens
tcctggctttattttctgctaggccttcttgtgtttcttctgcacacatatgtagactcctggttagccagggatattatggagatattagcaatgctttctgtcagagagtgatcttggtgagaagcacatggagaaagtcagaaaactaagaggaaaatcctttatatgagacagccatttgcttctcactaagatcactctcttacagaaaacactgctagatttttcttcttctccgtcagtttatgtgctccttctccatcagcaaagctgctggctttcatggccagtgctacccctggagaaccacttctgtttgtcatttaataaaaaaaccaaggcagaatattgtgtttaatgtgttcccaattttgcattttatagatgtccaagatgtgtaccaagaccattatgacattgaggtagatgtgaaaaagaattcctgacsaaatataattttatggaaaatctagaaacaaacagaaaactcattatgctaaggcaatatacatgtacaaggtaacaaggttttgaattatggtggtagcaatgggaatgaaaagtg

SEQ ID NO: 665571 - DNA, 550 bp, Homo sapiens
aaataagatgtttagaaaacagtaagtggttaatatgacagcccttttcacagtttgctaatttaatcaagcttttgttttcatcaaaaaagccaactatgcctgagaacattaccaaataattaaatcaaagttctctgttttctgggttgtgagtctcaaaatgctgtaggctaggtctttaaatagaaatgcaaaaatatgaagcttgaaaggattaaccacccatttcaagaagccaatatcttgctgaatcactgagtgaccaagtgtagaggagtcatgaggttggaaattgaatataataaaagtcaatacaatagccttctctttcttgtgtcaagaaaacattttgacattgtgaaggaaaagtttgtcttcayctttcaggttcttcttgtcctcctctctgctcccatctggtataattaggaataattagtaatcttcctccactgtgtccctcctctgtcagtcctggtacaccacaagtatgtgcattttgagaataattcagatattgctaggcaagttcaggtagttagatgca

SEQ ID NO: 665572 - DNA, 562 bp, Homo sapiens
cctgttttcacctctatacgatgataccaattaggaacaagtataaaccactttaataaagtggtctggttaagtaaataagattgtggaggaggcaatgaaactgtatttcatctatttttaataagaataatgtataaactagcacctaatttgctgaatttgttggaagggcattatcaaatgttaacaagtgttatggattgtatgtttgtatacccgtaaaattcatatgttgaaacctaattccccatgtgatggtattaggaagagggactcttgagagatgattaggtcataagtgtggagccctcattaatggaattactgcccttacaaagagctgaagagaccagagcttcctatttaccatgtaaagacacaagaagaaggagccactaccaactacgaaccagaaagtaggccctcaccaggcaccaaatctgcctccatctctgacttctcagcctccagwactgtaagaaataaatttctgttctttataagctagagattccacggtattttgttatagcagcacaaatggacaaagacaacaaat

SEQ ID NO: 665573 - DNA, 541 bp, Homo sapiens
tttttttcttcattttacctttaatatttctagattctctgatggctgtttcacatatgctcatagactattcacagtaatgatgtggcaactttggttttatttcaatacttttccccagccccattggacatagacagatcatggcccttaggcaccaccaaccctattgctttttgctatggctcctgcctgctcactgatgcattatctggattcactgtattttgcacaaaccaccaaattatcaggcaagctctgtggtttcctgtcttcattcattgcagccttcagagacaaagtggcctccaagttgagagaactttatagtcactagcaatctgagatttggtcatataagaagaaaagatcatcatctatgaacaagtgaggtgtaaatggttgctgattagagggagtttaggaatataatgactggtcaagacagaggaataggggatgagtgaaggtggccraggagatggagacatgttatgattaatttttttgtttgtttcacacaattttctaggctgaccac

SEQ ID NO: 665574 - DNA, 528 bp, Homo sapiens
gagccgggcatggtggctcacacctgtaatcccagcactttgggagcctgaggcaggcggattatgagttcaggagttcaagaccaatctgaccaacatggtgaaaccctgtctctattaaaaatacaaaaattagcctggcktggtcatgcgcgcctgtaatcccagctactcaggaggctgaggcaagagaatcgtttgaacccgggaagcggaagttgcagttaacagagattgtgtcactgcactctagcctgggcaacagagggagactccatctaaaagaaaaaaaaaaagaaaaaaagaagaggaaacctaaggtaggaacattatactgtattgcctttctattgtggcatcacaaatttgccagcttaaaatcataactatttcctagctcacagttctgtgtagttgggttctctaatctgagcatcacaaggcgatgggaatcaaggtgtctactgtgctgggtgtttgtctgagggctctagggaaataagttctttagctcattctttttgttgg

SEQ ID NO: 665575 - DNA, 528 bp, Homo sapiens
gagccgggcatggtggctcacacctgtaatcccagcactttgggagcctgaggcaggcggattatgagttcaggagttcaagaccaatctgaccaacatggtgaaaccctgtctctattaaaaatacaaaaattagcctggcgtggtcaygcgcgcctgtaatcccagctactcaggaggctgaggcaagagaatcgtttgaacccgggaagcggaagttgcagttaacagagattgtgtcactgcactctagcctgggcaacagagggagactccatctaaaagaaaaaaaaaaagaaaaaaagaagaggaaacctaaggtaggaacattatactgtattgcctttctattgtggcatcacaaatttgccagcttaaaatcataactatttcctagctcacagttctgtgtagttgggttctctaatctgagcatcacaaggcgatgggaatcaaggtgtctactgtgctgggtgtttgtctgagggctctagggaaataagttctttagctcattctttttgttgg

SEQ ID NO: 665576 - DNA, 294 bp, Homo sapiens
tataattgtcttttattagtgactcataaatcgaggaacactctatctataaaatattgaaaggtgcaccattaggaatagtagaacagtcagtttttataagataacttgagcaggaacaaggaaacaatgtaatataaaaaaaagatgactggttaacatcagggtgycttaggttacttgccttgtaagtgttaaagcagaggcgatttctttatcatgctggctaaaactggtctgtttggggatttggctatcatctctctcctgatttctcagaaggtcagataaaca

SEQ ID NO: 665577 - DNA, 593 bp, Homo sapiens
gtaaacgctacattttctttagtagagactgtttcagttgatctaggaaactgcaaaatcttgctttttctgcttccactattgtttattctttacacggtagcaggatagagtttgtaaaaactttgttaagattatagtcctaccctacttaaagcccactagttgctttccattccaattagaataaaatcaaaaccctgaagtgtgtcttacaaagttgtttgtgatccctgccattttctctaatttcatcttgtacagatcatcctgtcatccttaatggttctgtcacaggtgcctttgccggtgaccagagtttgttctcactctggatactttgcatcagctatctcttctgcctcagactctccttctctagatctgtgcaggatttatactctctcaccatccagttttttctttgaatgtcatttcatctcatacaaggggattttctcaactatcaaatataaagctagtcttttctatcacctcattttgatccattttcttctatcacttatgattggtcaaaaccagctttacgtttgttcwcttgctcacagtctgcttgtgggctactgaatgta

SEQ ID NO: 665578 - DNA, 574 bp, Homo sapiens
gagttatttttgcaggatctttattcagataaggagagctcagagaaagcctcacactgcatctgctgtgccccaagtgccctctggttaagtaatctgtatacaaaagtagcatattttgaggtagcatttcctacactccttcattgtcaaaacatatgttttcattctggccacagcgagtaagttatctccttcccaagaaggcacattttagtttctcaacagctttagttttttcacagtttcttccaatactgggaatacagcagcttttcactagatttgattaattgaaaattcatgtgaagttcctactwaactgtaaatggtttaaatactgggtttacaatttttattctttcacttagcaaatattcattgagccctttatttgtggtgataaggaagtggtgatagtatttttaaaaactgatggtattcttgttgtcaaggaacctatgccctaataatatcagatacataaatttacctttaagttaactagagttttactgcctgtaatagcaaattatttaatcaataaatctttcactattgaaaactttaaaac

SEQ ID NO: 665579 - DNA, 597 bp, Homo sapiens
ataattttaagtgaaagacaccagacataaaaaaaatacagtataatttaaaaagcaggcagaacttaactagtktgttttggaatacatatttccaggaaaactatgaagaaaaataagaaactattcaccataaatgtcaatacagtggttaactctaaggtaaaggaaggtcattttgattttgtaggcacatggaagggtgtcctggggtgggaatgagtgggaaccatattctattccttaaacttggttgtagttacagagatatcaactatatactaacttattaatttgttcatttatgtattatattattttctttttgtctttggcatgtcaaaatgtaaaatacctaattctaaccactaagtaattaatataatatgatatatgtaccgtaatataaatgtttaacggtacctactacataaatatcccttgatatatacttggacagaataaaagcataatatttttatatattctgtattatctctatattaaaatatttgaatatttttatgatatcctcctgaataccttctcttctcttctgaagatcgtgggaaagtttttcatatcccaagattactg

SEQ ID NO: 665580 - DNA, 597 bp, Homo sapiens
ataattttaagtgaaagacaccagacataaaaaaaatacagtataatttaaaaagcaggcagaacttaactagtgtgttttggaatacatatttccaggaaaactatgaagaaaaataagaaactattcaccataaatgtcaatacagtggttaactctaaggtaaaggaaggtcattttgattttgtaggcacatgsaagggtgtcctggggtgggaatgagtgggaaccatattctattccttaaacttggttgtagttacagagatatcaactatatactaacttattaatttgttcatttatgtattatattattttctttttgtctttggcatgtcaaaatgtaaaatacctaattctaaccactaagtaattaatataatatgatatatgtaccgtaatataaatgtttaacggtacctactacataaatatcccttgatatatacttggacagaataaaagcataatatttttatatattctgtattatctctatattaaaatatttgaatatttttatgatatcctcctgaataccttctcttctcttctgaagatcgtgggaaagtttttcatatcccaagattactg

SEQ ID NO: 665581 - DNA, 638 bp, Homo sapiens
atttgccacattactttgtactttctgatttatctggctgtctcctctaccataatacaagcttttctaggaaaaaaacattgtccaacttactgttgatgcttcagaacctggtataattctgggtgcattgcgtacactatacatacattgcatgttgtatatgcactcagtgtgcatttttaaataaaagattaattactatttaataaagtgaggatatgtttgtattcttatttgaggcatatctttatttgctatattgtatgttccttgaagttaagaattttcttgtaatcttaatttattattaagttaacagtacctaacctagtgttcaatttatgttttttgaatttaatttgtgttcaaggtacttatttaatgatagttgaaatgaaatttaatgtatggcaaattatctaycaaatatgcctattaatttatttattcttatttagttttttaccaccctcttcacatatcctggacagaatgtcagattaaattagtttatcactcacagaatataaaagctttaataaatcgtatatcctgaaatctacttactaattaaaccattctagagtttcaaagtatctgtataatgattccatagcagaaatatccaatgcatg

SEQ ID NO: 665582 - DNA, 541 bp, Homo sapiens
tgatagttgaaatgaaatttaatgtatggcaaattatctatcaaatatgcctattaatttatttattcttatttagttttttaccaccctcttcacatatcctggacagaatgtcagattaaattagtttatcactcacagaatataaaagctttaataaatcgtatatcctgaaatctacttactaattaaaccattctagagtttcaaagtatctgtataatgattccatagcagaaatatccaatgcatggtgagtgtgtttatgtaagtgtgtgtatgtgtggatggatggatcgatagatgatagatatatagatagatagatagatagatagatatgtacayagacgcactataaaaattagaactacaaaactctattatcatcatgaaacagtaagagaaaaatgattctaggagaaaaatcctctgaaaagaaattacataacagcaatgccactcctgagaatcttacaaattctaacagttatcatgttcatttttgctagtgccatcaactaacaatgtaaagcaaaaa

SEQ ID NO: 665583 - DNA, 528 bp, Homo sapiens
ttaatttgtgttcaaggtacttatttaatgatagttgaaatgaaatttaatgtatggcaaattatctatcaaatatgcctattaatttatttattcttatttagttttttaccaccctcttcacatatcctggacagaatgtcagattaaattagtttatcactcacagaatataaaagctttaataaatcgtatatcctgaaatctacttactaattaaaccattctagagtttcaaagtatctgtataatgattccatagcagaaatatccaatgcatggtgagtgtgtttatgtaagtgtgtgtatgtgtggatggatggatcgatagatgatagatatatagatagatagatagatagatagatatgtacacagacgcactataaaaattagaactacaaaactctattatcatcatgaaacagtaagagaaaaatgattctaggagaaaaatcctytgaaaagaaattacataacagcaatgccactcctgagaatcttacaaattctaacagttatcatgtt

SEQ ID NO: 665584 - DNA, 610 bp, Homo sapiens
agaaaaaattagataaattcatagctcttttagttttattatattgaataaattgcatagcagacactttactaaaagggaatgatatagcagtgtttgagtaaaactgtttgcatcattgaattattgaattattgtttaagacagaaatcacagtgaaggaaagatgaaaatggagaagataaaagatttctagcgggattatctgttgatcagtacacaaaagagagagctgctagcactattttatttgaatggggtgtcaygatatgaaatgtgtatagctgagataatttggcaaatgttacaataaaactttgcagctgactctgattttactgtaataacatcaaactttatattctaaccatttgcaagggcacataatttttacaaattattacaaacttagctgttcatctctaaagtctagatatctcatgtgagcagtagatgcaatgctaatttgtgggactgtttaaaatcatacatttattggtaaagattgttcctctctgaacagcaattagattgagtaaagagttaatgaccaagctaccatgattttatggtatgtacatttattgtagaaataaggaaattttaaagt

SEQ ID NO: 665585 - DNA, 610 bp, Homo sapiens
agaaaaaattagataaattcatagctcttttagttttattatattgaataaattgcatagcagacactttactaaaagggaatgatatagcagtgtttgagtaaaactgtttgcatcattgaattattgaattattgtttaagacagaaatcacagtgaaggaaagatgaaaatggagaagataaaagatttctagcgggattatctgttgatcagtacacaaaagagagagctgctagcactattttatttgaatggggtgtcatgatatgaaatgtgtatagctgagataatttggcaaatgttacaataaaactttgcagctgactctgattttactgtaataacatcaaaytttatattctaaccatttgcaagggcacataatttttacaaattattacaaacttagctgttcatctctaaagtctagatatctcatgtgagcagtagatgcaatgctaatttgtgggactgtttaaaatcatacatttattggtaaagattgttcctctctgaacagcaattagattgagtaaagagttaatgaccaagctaccatgattttatggtatgtacatttattgtagaaataaggaaattttaaagt

SEQ ID NO: 665586 - DNA, 516 bp, Homo sapiens
gattttgctggtaacgaaacaaagttccagaggaaatagtggcaatctttcaggagttggaaagggaaagagaagrgtcattacaggagacacacaaaactatgaacctaagaatgcaagagatgaagactcacattggtttactgactgatataaaccacaataatatgcacagtgagacaggattcagcagagacagtgagaccagagtactgggctacacagtgggaaatggatactcctgggactgggacactcattccatcctatggagagagtagaagacatgtggaggtgttctccctcccacccagggcttccccgtctcactgaatgggtggtgccccatggaaggggtatctcaagccacccacctgatccctgtgggaagggatgctgttgctgagctgaagtccaccttccctacacagaccttgcatgaacgagggctagggcacacatggcctgtggaacaccaagaagagggacacgaggatgcgttatttcctctgtttg

SEQ ID NO: 665587 - DNA, 579 bp, Homo sapiens
agaacattttcactatctgaaaaaagttctattggacagagcaactagataaatcaaattttactccaaagagggtataaacttggatcacactgtttacacacatgcacatcctgcagaaatacttttactaaaatgaccttcaatgtgacatattgaatgatgttatgaataacacacttgtaaattttggtagcatatttatttattttattatttatttactttttaaattatactttatgttctggggtacatgtgcagaacatgcaggtttgttacataggtatacatgtgccatggtggattgccgcacccctcaacccgtcatctacattaggtatttctcctaatgttatccctcccctagccctccatcccccarcgggccccggtgtgtgattgttcccctccctgtgtgcatgtgttctcactgttcaactcccacttatgagtgagaacatgcggtgtttgattttctgttcttgtgttagtttgctgagaatgatagtttctggtttcatccatgtccctgcaaaggacatgaactcatccttttttatggctgcatggtattcc

SEQ ID NO: 665588 - DNA, 615 bp, Homo sapiens
tttgtaccatttatgaatggctttgtttccctgttttatctcatattttcccaaaatacatggtgtaagttttggtggcttacagaaacatacaaaatataatgaaatgtcagtaactgacaatggatgttgtctaagttagaaaagacaacattcagttaagtatataaattctagaatatccatttaaaaacagtcatataactttattgttatacttcataagctgccttgaatcatataaaaacctgctcttgaaggccagatctttctttggtagattccttgatgtttattcacaaacgartcatctagattttgggtaaatgtacctagtagcattctgaatgcaggtttaaaaatgtgttaatcaggattggtcaatgaaggtcaatattgatcaagattgttttatggttttatgtggatagatgctcttttttactaagaggtcatattggaatgccctttgatttcttcctatgcagtgatgaaaaatcataacaaatactttatttccatattcagttctctctttctctgtatacacacagacacacacgacaaaagatcctagaggagaaaaggaaggaaaggcagaatacttcataccct

SEQ ID NO: 665589 - DNA, 563 bp, Homo sapiens
ttaaggttgcaaatgtgattaagttgctgtcagctgatgttaagatagggaggttatcctagtgggcccaaagtaatcacaaggttcttaaatgtggaggcaggaggcagaagagagagaatcagagggaccatagggtgaaagggattggcctaacgtttttggcttccaaggaggaatgtgccatgagccaagaaatgcaaaagctggaaaggcaagaaaatgtattatttccaggaaactccagaagaaatgcagactgctgacagtttgattttagctcactgagacccattttggacttctgacttcctggactctgtgataaatrtgtgttattttaagccacggagtttacagtcctattgctgtagcagcagtaggaaactaatacaagtattaggtagatgaaatcagattatggatatgaattggtcttgaagacagcaaatggacagacaaatggacatgcttatgagggcgtgtttatgtgttcatctactcattccagtgacagatattgagcactagatgtgggtaaattgttgttccaggtgtggttg

SEQ ID NO: 665590 - DNA, 563 bp, Homo sapiens
ttaaggttgcaaatgtgattaagttgctgtcagctgatgttaagatagggaggttatcctagtgggcccaaagtaatcacaaggttcttaaatgtggaggcaggaggcagaagagagagaatcagagggaccatagggtgaaagggattggcctaacgtttttggcttccaaggaggaatgtgccatgagccaagaaatgcaaaagctggaaaggcaagaaaatgtattatttccaggaaactccagaagaaatgcagactgctgacagtttgattttagctcactgagacccattttggacttctgacttcctggactctgtgataaatgtgtgttattttaagccacggagtttacagtcctattgctgtagcagcartaggaaactaatacaagtattaggtagatgaaatcagattatggatatgaattggtcttgaagacagcaaatggacagacaaatggacatgcttatgagggcgtgtttatgtgttcatctactcattccagtgacagatattgagcactagatgtgggtaaattgttgttccaggtgtggttg

SEQ ID NO: 665591 - DNA, 554 bp, Homo sapiens
ctgcttcctaaaactgtgtctttcctgtaactgctgttcaaaaaatgttttttgaatgaataatgcagtgggaaacataaagccatttaataaagcaaggaagggatattgatgaagtgggattcggggaaggttagtctggtacaattacatgaaggatataagctaatttttcagaatattccaaagttacaaaagaataaaattatgttaatgagactctaaacctgatttatactgtaagtagtagggaggctttagataaagtctttgatctttgagatagaggttaaaggaaattcttctcatttgtatcttctctcctaccaaagtgcatagttcagtatacccactgtaactgatgctaagtaaataagtgcatcatagtcaccaagccacgttgatattcccagatgtggcatttaaatttttggatgacctagtataacaaaaaccaggaracaaactgcatacctaaattcttaattacaagaatactagcacatacagacacatacactttatgattcagtcgatatcaaattatgtgcaat

SEQ ID NO: 665592 - DNA, 554 bp, Homo sapiens
ctgcttcctaaaactgtgtctttcctgtaactgctgttcaaaaaatgttttttgaatgaataatgcagtgggaaacataaagccatttaataaagcaaggaagggatattgatgaagtgggattcggggaaggttagtctggtacaattacatgaaggatataagctaatttttcagaatattccaaagttacaaaagaataaaattatgttaatgagactctaaacctgatttatactgtaagtagtagggaggctttagataaagtctttgatctttgagatagaggttaaaggaaattcttctcatttgtatcttctctcctaccaaagtgcatagttcagtatacccactgtaactgatgctaagtaaataagtgcatcatagtcaccaagccacgttgatattcccagatgtggcatttaaatttttggatgacctagtataacaaaaaccaggaawcaaactgcatacctaaattcttaattacaagaatactagcacatacagacacatacactttatgattcagtcgatatcaaattatgtgcaat

SEQ ID NO: 665593 - DNA, 471 bp, Homo sapiens
tgtgttggcgcatgcctgtratcccagctactggggatgctgaggcaggagaaacgcttgaacctgggaggcggaggttgcgatgagccgagattgtgccattgcactccagcctgggcaacaagagcgaaactccatctaaaaaaaaaaacacgtagaccctaatagcatagttactgccactcattgattgccttaagctcttcatgtaattcatataagaccaccaaaacctaagtgttaatactccccacttgttttttgttttgttttgttttttaataagcatattgaggttcagaaagaaaaaatgactttcttaaaaccacactgttagtgaaacagctgggattgaagatcaaggcgattgcctcaagtggttctttttccctactgcttattcatgttcattggaggcaactttatcgtttaaggtactgtgatggctagctacacgtgtcaacttagcca

SEQ ID NO: 665594 - DNA, 590 bp, Homo sapiens
tataattagatatgatcctgatacattttataatagtcaaagtagtttcttttcaaataagcaaataatggacaaaaagctatttcttaactatgatgatacttactgcccagatgaacatttgccaggatatttttcaatgcagcaaaagtstatttagaagtagagacttaactcttgtgttctggaattccaggaatcctggtgatttctctgaaataaaaagtcatttttccatttaaatatgcaccatgacactcatgtagtacatttgccagaaattgcaggttttcctttgatgattctacaaactagtttttcaaattcaaacctgggcagtgtgtactttcagtgaggaaagatgtccaaaaattttttaaccagaacttccctgcttcctgagactatgtgcagtagtgagtttctggggaaagtgtccttcagtaaaattaataagattgtgaggcctgctttgagttactgttatctgatttcattccacaagtctggcttatcatatatgtccattcttaattcatgctctgaacaaaaccttgcagatatgtgattgtaaatgtgaatactactgg

SEQ ID NO: 665595 - DNA, 584 bp, Homo sapiens
ataaggtacttcatttccccaaagcatagtttcctcctctttaaatgaagataatgacttataaawtgtatagttgctgtgggaatttagttgaatgatatgaaaaaatgcacaataatgtcaactacttgtgtcccaaattccagttccaccacttaataactctgtattccagcaaattgctgtactatgccttagtatttccacctgcaatggtacctaactcatgcatatgaaatgcttaggagggtgctggtcatagtgagccctcagtaagtgttattattattattggtaaaatgttcaagtaatggtagcaccgatttcctccccttccttttcctcttctttctccttgttctgttctcttcctcttacttttgctactactactgcaaagtcagctgatgtacacgttttcaggaggtatgttttaataataaaggaagtaagaaaaaagccataaaattatttcttaaatataaccttgtcccatttcactcttctgtagtgcccatcctccctcttcaagtgcatctcattctctccagcaggtgccacactagcttcctgtcttttgtcat

SEQ ID NO: 665596 - DNA, 584 bp, Homo sapiens
ataaggtacttcatttccccaaagcatagtttcctcctctttaaatgaagataatgacttataaattgtatagttgctgtgggaatttagttgaatgatatgaaaaaatgcasaataatgtcaactacttgtgtcccaaattccagttccaccacttaataactctgtattccagcaaattgctgtactatgccttagtatttccacctgcaatggtacctaactcatgcatatgaaatgcttaggagggtgctggtcatagtgagccctcagtaagtgttattattattattggtaaaatgttcaagtaatggtagcaccgatttcctccccttccttttcctcttctttctccttgttctgttctcttcctcttacttttgctactactactgcaaagtcagctgatgtacacgttttcaggaggtatgttttaataataaaggaagtaagaaaaaagccataaaattatttcttaaatataaccttgtcccatttcactcttctgtagtgcccatcctccctcttcaagtgcatctcattctctccagcaggtgccacactagcttcctgtcttttgtcat

SEQ ID NO: 665597 - DNA, 631 bp, Homo sapiens
attaactcacaagtcaaaagtccagtctcatccaaatatcgaaatcatatatggctgagagtcattgtatgattcgccctgaggcaaatttctctccagttgtgagcctgtgaaatcaaacaaattatgcattttgaaaatacagtggtggaacagacacggggtagatattcctctttcaaaagggagaaatgggaaggaagaaaagagtacaagtygcaataagtccacaacaaaacagggcaaacattaaatcttaaggcttgtgaataatcttcttagattccatgtcctgcctttgcagcacactggggtgagggttaggctttcaagtttgcaggcattccagccctcatgactttgctgggcacagcccttatgggttggagtggcatactcatgactctcccaggctggagttgaatgcaagttgtatctacagttctgagttcttgtgggtgcctgtactcccatggcttcactgggcattgcccaagtagggactctctacctgggcctcaatgctgtccgaggaagcctttgaaatctagatggatgtagctatgcccctgctgcttgtgcactctgtgcatgggtagagatgacaccacacagacaccaccaaggttta

SEQ ID NO: 665598 - DNA, 593 bp, Homo sapiens
tgaacacacaaatgataagaaaacaaaacagccttagtactgatagggagaaagttttagtggtctggatagaagatcaaagcagccacaacatacccttaagccaaatcctaatccagagtaaggtcctaactctcttyaattctgtgaatgctgagagaggtgaggaagctacagaagaaaagttgaaagctaacagagtttgtttcataaggtttaaagaaagaagccatcaccataaaataaaagtgcaaggtgtagcagcaagtgctgatgtagaagcatcagcaagttatccagaagatctagctaagatcattgatgaaggtggcttcactaaataacagattttcaatgaagacaaaacatccttctatcggaagaagaagcatctaggattttcacagctagagaggagaatgcctggcttcaaagcctccaagcagaggctgactcccttgttaggggctaaagcagctggtaactttaagttgaagccagtgctcattgaccattctgaaaatcctggggcctttaagatgtatgctaaatctgttctgtctgtgctccataaatggaataaaacctgtgtg

SEQ ID NO: 665599 - DNA, 567 bp, Homo sapiens
atgtgtatttctatatcttgtaggacaacaaactttagaatctcatagccaaaatctgccatttcacattcaaaactttaatttcaaaagattccaggcagacttttctttaattagatatattcttttttgtcttagatatcttttcccatttattttattttatttttgctgtaattcaaatagatgggataaagttaaggtacaaatttaaaattatgaaggaaaacmgttttttaaacaatcagattttgaactcaatagaaaggagagtggctaaaaaaaaagagaggtctaagcagaagatagcttatgggtcagattctagccctgcctttagaaaaacagagtggagtaaattaaagtcttgtcttgaatgagaaaaggaagttattttgtcaatacagtgtagagaagaagactaaccggagtgacttttgtgtttctaaatttggaccttgaagatttctgaagttggtagacacctggtgttaggcattcctttacaaaagaagcattggggccacacagtggctcatgcctgtactcccagcactttgggaggcc

SEQ ID NO: 665600 - DNA, 567 bp, Homo sapiens
atgtgtatttctatatcttgtaggacaacaaactttagaatctcatagccaaaatctgccatttcacattcaaaactttaatttcaaaagattccaggcagacttttctttaattagatatattcttttttgtcttagatatcttttcccatttattttattttatttttgctgtaattcaaatagatgggataaagttaaggtacaaatttaaaattatgaaggaaaaccgttttttaaacaatcagattttgaactcaatagaaaggagagtggctaaaaaaaaagagagrtctaagcagaagatagcttatgggtcagattctagccctgcctttagaaaaacagagtggagtaaattaaagtcttgtcttgaatgagaaaaggaagttattttgtcaatacagtgtagagaagaagactaaccggagtgacttttgtgtttctaaatttggaccttgaagatttctgaagttggtagacacctggtgttaggcattcctttacaaaagaagcattggggccacacagtggctcatgcctgtactcccagcactttgggaggcc

SEQ ID NO: 665601 - DNA, 564 bp, Homo sapiens
ttgtgtacttagtattttttcttaggcatttcctattatcctctcaagccagttttccatcaggctaaaaccaattatgcttctacatttttgtttcattttctcttgaagtgtctacaataatctaaattctgccagcactgatggtcagatttcagcttcccagttactaaattcacagcagtcctgaaaatcatttctcccactccctcttccttggacacttcctcccagggttttgtgaaagcatattcacagataaggacatttataactgcttgttttgttttgaggcatgcccttgagatacttcccagaaatggaaaattatatttttggcatctacatactcaacaattgctgatagygtattgggagaaaagaaaggttggtatgaaagcataaagcacctagaggtgagctgacagtgcttttaggaagtaagagagagagatataggtaactttgatatgtttagttgtacttcctttctcctccacctttattatgtcctctgaaagatactggtgctgaggagattctaagaatatcttcacaaattct

SEQ ID NO: 665602 - DNA, 566 bp, Homo sapiens
tcttttctgcttgattttaacaactaactgcaaggcaacattagatacagacaacatacttagaatagtggcgaaagaggaaggaaaacggtcattcacggaatatggttcaagtacccattacataatagcacaacaaacttaatcaaagccagagagctttgggcagctgtgatctggcctgcttatgcctggaataaaatgtctttccgcgctctcattaggcacattggcaagacggctgcaccaggccagagctcatttggccagcaatcatacctttctagcaagtatctgggctaacgacctcaagagagcaatcagacatttgtgctgtggctgatggagtaatactgactggctattcctgactgggaggaatacagaaaaatcayccctggaaacactagctaaactctaacatgcagagaaatatggagcaattggcaattatttaaaactttaatagtattttatttaattcactattcagaaggtataactcactgttcttgttcatcaaccaatgcagggtattcataagtctttttgtagagtgtaggtgt

SEQ ID NO: 665603 - DNA, 490 bp, Homo sapiens
caccaccatgccctgctaatttttaaaaaaaatttatgtggagacttggtctcactgtgctgcccaggctaacacctttttgttcttttttgtttgtttgtttgtttgagacagagtcttagagtcttgctctgtcacccaggctgcagtgcagtgatgcaatctctgctcactgcaacctcagccttctcagttcaagcgattctcccgacttagcctcccaagtagttgggattacaaccatgcaccactatgcctggctatttttgtatttttagtagggaaagggtttcatcatgttggatagtctggtttcaaactcctgacctcaagtgatctgcctgcctcggcctttcaaagtgctggggttacaggcrtaagccatcctgcccagcctaacatctttaaatacagatcttttgattccacctgtcttgaaaatttgtctacctctgtccctgacaaaccttctactattttcactatatca

SEQ ID NO: 665604 - DNA, 490 bp, Homo sapiens
caccaccatgccctgctaatttttaaaaaaaatttatgtggagacttggtctcactgtgctgcccaggctaacacctttttgttcttttttgtttgtttgtttgtttgagacagagtcttagagtcttgctctgtcacccaggctgcagtgcagtgatgcaatctctgctcactgcaacctcagccttctcagttcaagcgattctcccgacttagcctcccaagtagttgggattacaaccatgcaccactatgcctggctatttttgtatttttagtagggaaagggtttcatcatgttggatagtctggtttcaaactcctgacctcaagtgatctgcctgcctcggcctttcaaagtgctggggttacaggcgyaagccatcctgcccagcctaacatctttaaatacagatcttttgattccacctgtcttgaaaatttgtctacctctgtccctgacaaaccttctactattttcactatatca

SEQ ID NO: 665605 - DNA, 520 bp, Homo sapiens
cttctcccaacctttttgcctgaagcaggccataaaagaattatctgaccttcctctgatgcaggtcacaagaccctcattctagagacactctcccaggctgggtgccgcagctgatgcctgtaatctcagcacttcgggaggccgaggtgggccgattactggagggcaggagttcaagaccagcctggccaacatggcaaaaccccatctctactaaacatacaaaaattagccaggcgtggcagtgcgctcctgtggtcccagctactcacaagtytgaggcaggagaattgcttgaacccaggaggcagaagatgtggtgagccgagattgcaccactgcactccagcctgggcgacagaatgagactctgtctcaaaaaaaaaaaaaaaaaaaaaaaaagccacagagacaccctccctatacctagaggaaaggaatatcattatctctgaagacacaggaacacagaagaatctgaacaaacagttctcgctaagttacccccagtttatta

SEQ ID NO: 665606 - DNA, 641 bp, Homo sapiens
atcaactattatttgtttttgctgttgccctagtattgttgctgacatctgaatttaaatgttacctcgatgttacccgaatacaataaagctttccttttgatatttcatacagctgacaatggtgaggacagacacaaagatgagctaagatcctcacagctgcagctgtgatcacattattgaacaatcagcattttaggcaacttytattgtccaccatcctcagcacacctctcattttggacgaggggtaggggtgggcagggctggggatgagtgtataggatctctctgaacttgtgcttgacacccagagaaattctggcttggcccttaagctagcacccaccccagtttccttcctagcttaaccggggagaggagttggggtgaagagactatctgtgtaggagcaggccatttgatgacacgtccatgtggcaggccagaggttccctaccctcacgagtgtcagcctcacctgcagggcttgctgatgctgctggtcttgaatgacactttgagaactataagaggcaagaaccttgacatcaactttctgtcattcatctttagcatgcctatcatacagactcttctgcattttggtcatttttcagtacattctgaagtcttgg

SEQ ID NO: 665607 - DNA, 578 bp, Homo sapiens
gcagaaattgctatgtcatttgctcagttatctatggagagatttatcttttgtttttgttttgttaactattttcaccattttatactgtaaatattttttctcagattactgtttatggtattttatkgtgttttttttgttgtttgtttatttgttgtttttttttttctgagacacggtctcactgtgttatccaggatggagtgcagtggtgtgatctgggctcactgcaacctccacctcccgggctggagccatccttccagctcggcctcttaagtagctgggaccacaggtatgcaccaccaggcctggctaattttttttttttttttttgtagagacgggggtttccccatattgcccaggctggtctcgaactcctgggctcaagtagtcctcccaccttggtctcccaaagtgctgggattacaggcgtgagctactacatctggcctatggtgggttttttaaaaaacacaaattttgaagggtatactcattttatcccatttttttctttgttttctacatttggctttgcccttaaggcatttgtgcacagtattatacaa

SEQ ID NO: 665608 - DNA, 599 bp, Homo sapiens
agtgcatagaagtaaaaagtagaacagaagatactagaggatgggaaaggtagagggaaagggagagatttgttaaaggatataaaattacagctagataggacgaataaattctagtgttctatagcaccataggatgactatatagatatagtttcaaatagctagaatgagaatattgaatgttcacaacacaaagaaatgataaatgagatggatttgctaattaccctaatctgatcactatacatcatatgtatcaaaacatcactatgtaccccatagatatgtacaattatggcttccatttaagacattttaaaaatatgattctaaaaaaattaaaaatttaaaaagcaaaacaccccaccgatatggtttggatttgtatccctgcccaaatctcatgtcgaattgtaatccccaaagttggagaaggggcctggtaagaggtgactgaatcatgggrgtggatttccttcttgctcttctcatgatagtgagtgagttcttataatatctggttatttaaaagtatactgtagcaactccccctttcctctcttcctcctgctctggccatgtgaatatgtgcctat

SEQ ID NO: 665609 - DNA, 533 bp, Homo sapiens
agtatctccaaaattgggcatggaaggcaaacttgaagacaagaaaattcattaaagttgacataggaagctacattcataaatcctcttcctcattgtttgttgcaggctgcagtctcttccatatctgagcaaaaaaactttctccacactagaaaaaaaaaatcaaaaaccatagaggccagattcagggatgatagacagagctgagaaaaggtatccatattgaaaatggggattaagtgaaagtcaaattactgaatggtgaaaattctgacccccrtacccccacctcaaaatattcaacatatacccttctccccatatgactccaaggacctgacacaggcttttataattcagtaaaagatttaagattcctttgggaaaatacaccagcccaaaagataagactcaaaattctgacagtttggggttctctgataaaatgactaagccagatcatcctacaccaaaatccaccattcgacagcacactgactatcctcatacctctcccttaactatgaatg

SEQ ID NO: 665610 - DNA, 585 bp, Homo sapiens
tgggcaaaattcaccttcccagtgctaaaaaaaaaaaaaaaaaaaggctccaaagattactgaacaccaactagctcttgagaaaccacacagggatgagttaagtgtaaatgaatcacaaacattcagattaaatttctcctcaactgcaccagagtttaaaggccaagagaaaaatgtatttgaggcgaaatacattttggcttttgcagaacctaaaacatttttaatgagcttgaagtccttcaaataacttaaaattcawtggaattctttctctcaaattcagcattcagcgtggtgacatacatacagctgcctttctagatctgtttcaccttagagaagaaattgcttttgttttttactagtaacttcttgatccaatgtgatcaagcacagctgagacaaatgccaggacaatgtttaaattattattctaggggcctatgatgcaaactgtagaactcaaaattctatactcaatgttggacagaagattaacaaccctaagaggtaagacatgaaaataaagcaatctgtttttgaaactttgtatttcaaatactagggggtctatagcag

SEQ ID NO: 665611 - DNA, 585 bp, Homo sapiens
tgggcaaaattcaccttcccagtgctaaaaaaaaaaaaaaaaaaaggctccaaagattactgaacaccaactagctcttgagaaaccacacagggatgagttaagtgtaaatgaatcacaaacattcagattaaatttctcctcaactgcaccagagtttaaaggccaagagaaaaatgtatttgaggcgaaatacattttggcttttgcagaacctaaaacatttttaatgagcttgaagtccttcaaataacttaaaattcaatggaattctttctctcaaattcagcattcagcgtggtgacatacatacagctgcctttctagatctgtttcaccttagagaagaaattgcttttgttttttactagtaacttcttgatccaatgtgatcaagcacagctgagacaaatgccaggacaatgtttaaattattattctaggggcctakgatgcaaactgtagaactcaaaattctatactcaatgttggacagaagattaacaaccctaagaggtaagacatgaaaataaagcaatctgtttttgaaactttgtatttcaaatactagggggtctatagcag

SEQ ID NO: 665612 - DNA, 552 bp, Homo sapiens
atctcatctgactcacaggaagaaaaaagaaaagttggctgctgccaaaatggaaacactttctggaaaattcttgaagatattcctaaaatctcaaatgggcaagtgaatgtaccctgagaaaaaacttggaatttcccaaaatataaacaaggtgaattttttaaaaagtgttaagatgatggaaataaatatgctaatgacactatataaaggaacattttttttcctcttctaatttcatttgcttttaatacctgagcttttgcttaaggagtccctgccaagcagggggcagtggtggtcccagaatttctatatagaaggtgcttatggcagactatctggatattaggagagactggagacttgaagactacattagtcagggttctccagagaaaacagaaccaatagaatgggtaaatatattgattaagaaactggctcacacagttatggaggctggcaagtccaaaatctgcagagacaacatcycagatcaaaggcagtcaggcagagagaattccctcttgctcaggggagggtcag

SEQ ID NO: 665613 - DNA, 543 bp, Homo sapiens
cttccccactacaccccctcttttcatggggataggtgaagtgataaaaatggaagagaagaggagctcatgggggaaccgcttggcaggggcacttacgccagtgtaaacctcagaccagtctgggcaacagaatcccctcaaagtcactctgcattcttcctgtacagcctttaaaagtagtatcgctggcaccatctgccccccgttaggcagtcctgctgttgaaatttctgagctgcaggaatgttatccatttcagtatgttcacattaaaatcagtgcagaaaggaaaaatcttcaytagctgcttcagcagaactcagaaagagcagcacagcagcgttcctttctcctgagccctgaaattcgtggtaaagcaccgtcttgtgggttcccaaagagatttgcttacaaagatcggtgtaggcgaggctgattgggtctccggagatctcatcctctgacagctcgctgcaccccgcggaatctcgctttaggtgtgtaactgcctgcctgacacctgacccttgctctccgcag

SEQ ID NO: 665614 - DNA, 457 bp, Homo sapiens
gcttccaataacaattgcatagagttgttaagtgcagtatttacaaatatttaccaagcacccacagtatgcaagcatgtgtttagcactgcggatacagttctgatcacgataaatctttgtaggtaatttaaagttgggaaaatttgtaattttttcccattccttcagaataacaaaaatcacatttttgcctagattctgataagaaaaaagagttttctaaagcttttgctttcactccaattaaaacaacaatggtcattaaaatgctctcagactgtcactggtgatcagaaggttaattattttaaaatgtaaatcctgagttgtaatccctattgaasctgtttggaacaactccccctgccgaggctgagctgtgtgggcggccccgaaaggctcatttttcttactgcgcagacctgcctctctgttgtgaaataaaaatggaaat

SEQ ID NO: 665615 - DNA, 392 bp, Homo sapiens
catcatctgagttcatgttctattttatttcagtcatcagggttcctttatccctatgtaatagtcactattggctttaagtaaaaatggccttcttaaagcaaaacttaagacacctcaatggagtattattttctaacaggaggacaaaattatgatgtagtcatgaaagcccagacagcttcctcagtcatatgactgcctcttttcattaatayctgaaatattaaaccataaacttagacatgtaaacttttctcaatttctaattttggggtacaatttttatacatttgctgaggtaaagttgaattgtgtttaaaaataaatcttttatgataaaagattctagcttaatcaaaactactggaattaacaagagaattttataa

SEQ ID NO: 665616 - DNA, 364 bp, Homo sapiens
tttatatttttagtagagacagggtttcaccgttttggtcaggttggtctcgaactcctgacctcaggtgattcaaccatcttggcctcccaaaatgctgggattacaggtgtgagccactgcacctggccagcatccccattttagtcataagaaaacttagatcacaaaggtagcatgtggcacagtcacaattttttcaattaccatgggtttataaaagaaaaaatgacagtgaaaagattttatgtatcctcaagaaaactatgattaaaatgaaaattaaactttgtttctaacrtatctgtgatagcaacatattttggggtcacttaagtgggtatagtgaaatactttggaaaaa

SEQ ID NO: 665617 - DNA, 597 bp, Homo sapiens
ccaacaatccttgcactgttgagacaaaagtgctggctctacatactccctccctttcctgcctaacttcctcaactcctcaaggagggtcctgctcgtatcacaggcatcacggagcctcactttgcaggcagaggaggcaacaaatacctctccttctgccccttctgtctcctcagacaggtatgacataactggtagatgctcgaggaggaagcaactgtggaggagagactcttggacatccttgctgttctctctcctttcctagaggaaacagctggaggtccttttatgtggggagctcatttgcctttgtaaaatcaaatggaatcaggaattcagtagttgtctctttgaggcttactcaagtcaggactttaaaagaatgactggaagagtccaagcaygtttcccagctaagacttcaagggatctgcatgtgacagggagttggggtagcaactctcttcaggaataaagagtgtactagaatacacagagtggccagaggatccccaaagctgaaaccctagggagttccatctctgcatcaggttactgtgtcaaaaggaaacgcctcctcccccaacaaaa

SEQ ID NO: 665618 - DNA, 526 bp, Homo sapiens
tttcccttgattccctaagcctaggagaggagctcctcctaagtgctcccaagcacccactgcttccccatcatggcattctccattttatatagtaatcatctgtttgaattccctgaggaaattataaactacatgattagcattctatctattaatacataaatgtgaacaacttaaagaatgacygaaaaattaacaattctattttgattttttttaattattcacaaaaaacaaaaaagtctggatgatcattcaccaaaatattgttaattcttatctcttggtaacaggattatgtttgatttttattttcttcattataccttttggtgtatctaaatttttgtagcacatttgatttttgtaatttaaagaatgtatacagtaatcattttgaagaaaaaacataactcttactataataataactaacatcagtagttatggtgtagtcacccatattatggtatagtcaccatattgttattattttgtactgtaatttatagtttatcatgca

SEQ ID NO: 665619 - DNA, 571 bp, Homo sapiens
tgtgtttcctctcctcccagcaggttgacttccatctcttccttgaggaatcccagctcaaactcagtgaaggtcagggtttataagacttccaggaggctggcagcctccacatacttcctggtccctatctggacctggaagaaccacccccagtccttccagagttccccagaactaagctcccttacaggacacacaggaggtggggcattttcttccaaagcccctgaaggtgaaagatgtcaattcttctgtttctctgcaagtcaagacacctgctgtacttagctgtagttgttgagtgcaggaaagactgaacatcttattcatttatttgtttttgctggaagcacaaggattcagccatagctggtcatgcacaggtgtagtcaactttgttgattatctacccaaaatttcttycttttttaaaatactcttaacttttattttagattcagggggtacacgtgcagatttgttacatgagtacattttgtgatgctgaggtttggggggatcctatcacccaggcagtgagcatagtatccaatagttagtttttcaa

SEQ ID NO: 665620 - DNA, 574 bp, Homo sapiens
gcacagtctgcccagcagctagtaagccttagaaatctttgccaagtgagagactgatggatgtgctctgggaaacaacggatccctgagttgtatgcagtgtgtccccaacatgtctcccttgtgaccacagcccatgtccatggcccacgggatgactggctgtctactgcttgaagatctacaacttcccagttttaccccaaccagccagtcttcactccaaccagccagtatttactccaaccagccagtctttcccagccatggatgtaatttacacattagcctacacccarctggagggcctgctcagtgttcaaaccaaaatggtgaatggtcttaggtgctttcacactacagtgccagaatactacagttgcaacagagaccatatagcctgcaagcctgaactatttattctctggccctttacagaaaaggtttgccaacacctgctctaaaggagagaggataacaatagcagaaggaaacttgggttcaagtgctgtttctgccaacggctcagcaaattgcaaataagcaaaatggagcccagcaagtaaaatactgg

SEQ ID NO: 665621 - DNA, 499 bp, Homo sapiens
atattgataagatgtttttatgatcaggctgtttggtcctttttccagtgggatgtcattgtggtgtttcttggaactttgcccagcaagataccataggaaagtttctttagttggacctgtgtccgccttgtgttacgaygattaggcaagatttttctcatggcccgaacccccgtggaatgtttcactttgatcaaggtctgcaaaatagcagggtgcttactaaatggtggtttggactcacattcttgccttctactttagtataaaaggaagaggggcattgttgattatctggctgcttgctgccgaataggggagctgtaatcagggtttgggttttgaagcagggggtgacggacttcagagttgttttcctggaggcactggtaccggacttggcagaggagaaggatggtatcaatgtgttgctgggtggctgcctggagaggggagtttagccttcgggagataaagcaggatatgaaggtgagta

SEQ ID NO: 665622 - DNA, 618 bp, Homo sapiens
ttttctctcctacagcatttggccttgcaaagtctgtcctccgtaggatcatgctcctcctggcttgtcatgatctctgctatcatttactgaacactgtattgtacattttatatatatatgctcacaaaaaccctaaacataagttttattattcttattttacagataagctgaggggtgggtagattaagttgtactgaaaggcgtacagtgggtggaaccaagaatcgcaccctggtttatctctctccaaagtccacgttggtttctgtttttaaaataattatcctgaatacaatgaagtgaaaaaattattccagatccaatgaatttgttatgttaagtgacttcttaccgtagtactttgggacaccctaccaatcatgagtcaccatgttagggtgggctgtttatatgtttgtcaagaagacagcaagaaaacagactgtatttcagtctatctatctatctatcatctatctatctatctatctatctatctrtcatctatctatctatctatcatctatctacctatctctctctccatctagtctacctattatctatctattaatatgatctgtctatctatctatctatctatctaatcta

SEQ ID NO: 665623 - DNA, 562 bp, Homo sapiens
tccctagtctggtgggaaaggcaggactgtagtaaacgaaataatcaaactcatacagaattggcatgtaagcaggttcagtgagttttatgcaatgtggggacatcatatactaaaggacttatatttacagtggatcagtgttagggatggttcctagaggaggaaagttttgagcaataagatggccrtggcttggctaggaccgtagcctgtgtgtgagcatctgtgattatgcattcttgattcttaggggacaggacttaggagcccatgtccccagaggtcttagttcaactggctgggggtggtgaggtagggcctggaggtccgacctctcaaaataggagaataaagacaaatcagctgaccacctagttttccccaagggctggctgggtcaggttgcaatttcgtttctgtcagcacatcccagaagccagggactgtcaggtgtcccccaagattaagacgactatataatttatcatttaaatgaggactttggagacagtaggtgtgttattaatcattatgctgggcccataggcataaaccaggc

SEQ ID NO: 665624 - DNA, 478 bp, Homo sapiens
aagctgctaagttttggagtaacatgttacagtgcaacagacaactaatatatacttgaaagtattttcaagttgtggtttcgtcctgctgatagggtaaaattctgtctctcccatgcttccttgaggatctactgaaggttgggaccaaggtgggactggaaacaaaggtggtgagttaaagaataayaacaatagttggtcattaaattctatttcattcctaatacaatcccataacaatatcacatggtaaaaccctagcaaagtgactattgtctataattttaattatttgcttaaccagtcagatcttgatgattttcttttctggggttagtttgggcatcactaagctcaagcaaccaagggataccacaccctctccacctaaagaaaagaaccaaatccccatcctcccactgcctgagagtattacagccaatctctccagcagcagctctttcttggtggcccc

SEQ ID NO: 665625 - DNA, 564 bp, Homo sapiens
acagatctatgatatgtcagatctatgatatgccgtgaggcagatatcataactctgagttcttcagatgaatcagggtgcatctgaaaactgcaagacactagattctacttgaaagctagaaagaaattctgagatcatttattccaaataccctcactttgcacatgaaaaaattaggtgtggggttgggggagaaatgacaacagtgtagaaatagcataggagtttctatttaaaaaccttagctttatgttctggttttcacttactagaggtacaatcttgaagtgcttaacctcatgttcttttctgtaagatggaaataagaacctgttctgatgrctcacacggtcttatgataatcaaatgaaataaggtttgagaaactgttttgtcgactttacattaatgcgtattattactgttgcccaagttggtaaatggaaaagctaaaactggaactcaggtctcctgagtgcactctatcagtttgaaaaactactcctaggctactcagctgacctcagaggtcaatttattattaaccccgggacataggaa

SEQ ID NO: 665626 - DNA, 542 bp, Homo sapiens
tggtgccactgcactccatccagcctgggtgacaaagcgagactccctctaaaaaaaaaaaaaaaaaaaaaaatctaaaatggatctgcagggacggtttgggctttgtttcctttagtctctgggtccacctcatttttgggttagcttcatccttatactgatagcaagatgactgtagcatttccagccattacatacaggcacagcaatatccagaaagaactgtcttttgtaataaattcttactttgaatggaaaactctttagcatttagaattcactcattcaacagttatttattgagcacctgataagtgtaaggcagtactctaaagcttgaaatgyagctatgagcaaaatgacagacctccctgttacaactcactcaaataaatgggtcacacagcaccctgtagccaaccagtggaaataggactgggaccactatgattgactgacacccaatccaagatcttaaaaaataaataaataaataaaaaatctcccgctaagttatgtagaggagggatagtcccttg

SEQ ID NO: 665627 - DNA, 602 bp, Homo sapiens
tgtgctttgtcaagtctcttgtttgcttggtttaaatcccacttccaacttcttaaagtctaattacagaattgtcttgagtttattgatgtttaacttctagggcggtctatgaatgtcatcgaaatgtcgataacttattcttctagcagaaagaaatcctctaggatatgctgaaccttctgaaaatgattttcttacctctatttacaagtatctcaattttaaaatcacatttctcaaagtaaagcaaaaatagccaatgaagaatatttctaaaactcaagtgaataaaagctgctttattacaattttactctattcacgttttggcatgcactttctctttttatttagctaataattactctttgggaaaaatgcatcatttaaacatttataaaatttaattttaagacttttgatttatgatagcttcttaagtgattatgaaatctatttttgtagaatattcagaaataacattcatgtaaatgacttcagtttatcttgttagaagtatctatgaaacaaaactttcccaagtaawtttacttaagttatccttggaatgataattaaacacaaagacatggtaaatt

SEQ ID NO: 665628 - DNA, 539 bp, Homo sapiens
taatataaatggaccttcctttatgtatttcatccaggctttgttttttgaaagaaatctgaatataccccaaagttttgagaaaacacwtccttccccaacatgtaaaatgagctttaattaaggcagaacggcaccgaaaaaaatattttccaattatgttgatataattgtttccacagcatgatgtctcccggtatcagctttagcaggcagtggagacatggtgatattgggctattaccactgcaggcctgctcttaaattagacatggcatttggaaagcaagttctacttcaacattcttaaacaaatatagatgaaaacttttgtctctatttagacttcccactgagcttcattaattcatggctgtctggcccttttggtccccgctggaaggccatagctgtaatgatgagatacaaactcaactgaatattcaacttcacaacctggcaagatgcctggagcaaggcagtgacagctcgctattcacatttctatgtaaattttgacacttactaactgaaagagt

SEQ ID NO: 665629 - DNA, 615 bp, Homo sapiens
aattttcaaattggacataaaacattgactaagatcatatgctgctgcataaaatatttaatacatatcraaaggttataatttaattaattttaacaaaatattagtaaattaaatctagcaactcaaaagataatacattacaaccaagtagggtttatctcacctgatttaacatttaaaaatcaatcaacatagcccaccaaattaacacaataagaaaacaaaattacagattccataatctcatttgtcaaaacccaaaagctattctacataaaaatttttggcaaattaggaatagaaaggagcttcctcaaacagataaagcacatctacaaaattatcacatcatattaatgatgaaaaactagatttgattctactgagttcaggaacaagccaaggctatttcactatctctattcaacattagaacggggttcccagccattgcaatatacaagaaaaagaaataaagtataatcagcttggaaaggacaaaattaaactgtctactagaaaacaacaaacttgtcaaagataaaatcctaagaaattttaaaaagagagaaattagctaagtaattaaatttattatcattattaaaaatt

SEQ ID NO: 665630 - DNA, 615 bp, Homo sapiens
aattttcaaattggacataaaacattgactaagatcatatgctgctgcataaaatatttaatacatatcgaaaggttataatttaattaattttaacaaaatattagtaaattaaatctagcaactcaaaagataatacattacaaccaagtagggtttatctcacctgatttaacatttaaaaatcaatcaacatagcccaccaaattaacacaataagaaaacaaaattacagattccataatctcatttgtcaaaacccaaaagctattctacataaaaatttttggcaaattaggaatagaaaggagcttccycaaacagataaagcacatctacaaaattatcacatcatattaatgatgaaaaactagatttgattctactgagttcaggaacaagccaaggctatttcactatctctattcaacattagaacggggttcccagccattgcaatatacaagaaaaagaaataaagtataatcagcttggaaaggacaaaattaaactgtctactagaaaacaacaaacttgtcaaagataaaatcctaagaaattttaaaaagagagaaattagctaagtaattaaatttattatcattattaaaaatt

SEQ ID NO: 665631 - DNA, 431 bp, Homo sapiens
tcactttcaatttgtatgcactttaaaatttggacttaagttactagaaagtgatagtttttaccttttcaaactaattaaactaaaatatattcagcagggagttgcagcaccagtaagagatagtgctggatagtgtttttatttcatgttctaccayctatgttttatttcagtctctgatcagccatctgccagccacatcaccccaatattggcaagggatttgttcaaccccacaattacttagtgagactggcaggctgctccccagtgcttagaaaagaatggttttgagcttctatctaattgtaaaactgattagttacacagtcctcatgggtgacttataatccccattttaatactttgagtttgaaaatagaaactctataataatatcaaaagctattttcatttgtccacttaat

SEQ ID NO: 665632 - DNA, 431 bp, Homo sapiens
tcactttcaatttgtatgcactttaaaatttggacttaagttactagaaagtgatagtttttaccttttcaaactaattaaactaaaatatattcagcagggagttgcagcaccagtaagagatagtgctggatagtgtttttatttcatgttctaccatctatgttttatttcagtctctgatcagccatctgccagccacatcaccccaatattggcaagggatttgttcaaccccacaattacttagtgagactggcaggctgctccccagtgcttagaaaagaatggttttgagcttctatctaattgtaaaactgattagttacacagtcctcatgggtgacttataatccccattttaatactttgagtttgaaaatagaaactctataataatatmaaaagctattttcatttgtccacttaat

SEQ ID NO: 665633 - DNA, 475 bp, Homo sapiens
ctatatttaagtatgagaacagccaactacggaaacactttggccattcccgtcagtgcaatgtggagtcccacatgggcgccttctgctagttcaccccctggtggtaacacaaaattcattcatgagctatggcaccatttctcctttgtagtcctacccactaacatctgtcagatactactcacttttcaaagcccaacacccataaagttatatatcaaaagcttggaggtccaaaatttcaggaatcttggttctaatgtaaagcaaagtatgtcaaatggaacayagtaatacttgctcttaccatcctttgattcaagtgaatttagtacaggaatgcataggcaatctctttaacaattgttctaattttccctcaatatcattttttgctaatcttatcttttgcttttctgattttaagtaacctcttctgtttttacaaactggttgggcctttaatatattt

SEQ ID NO: 665634 - DNA, 590 bp, Homo sapiens
cttaacatcactaatcatcagggaaatgcaaatcaaaaccacaatgagatggctaactttgttggaatgactcttatcaaaaaaatgaaaaataacaaatgttggcaaggatgtggagaaaagggaactcttatacactgttggtgggaatgtcagttagtacagacgttatgggaaacagtatcagagttttcaaaaaactacaaatagaaatactatatgatccagtaatcctactgctgggtatttatctaaaggaaagaaaatcagtatatcaaagagatatctgtgctcccatgtttattgcagcactctttacaatagycatgatatggagtcaacttaagtctttatcagcagatgaatggataaagaaaatgttcatatatacacagtggaatactattcagccttgagagaataaaatcctgtcatttatggcaacatggatgaacctggagtacatcatgttaattgaagtgagtcagacacagaaatacaaatatcacatgttctcactcatatgtgagagataacaagtttcgcttctaaaaataaagagtagaattgtggctcttcaaggctgagaa

SEQ ID NO: 665635 - DNA, 494 bp, Homo sapiens
gtttctgagcccctcagataacatcttaacgaattctacttaaccacagcttacctctcagttttyttgtcaggtgattagaatggggatgaaactagttcagacaccaccaagaaaatattgctcagtaaaaaaaaaaaaaaaaaaaaaaaaaaaaattacctctaaaaatatctccaatgtaagtaggtcagtgtgacaactccttaatagataaattgactccaacattcactgtggtctggctccccatttctctctatctcaaagcctactaatctctcgtgctaggctcttctagccacatgaaccttcttgcctcaacatgccaggcacaaggggctatgtgctttctgctttttcttatatttggaaacctgtccttcaaatatgcacgtggctactctttagctctttgcttaaatgtcagctttctggtgaaatttttcctgactatcctttttaaaattataccatcatcaacacgcattacc

SEQ ID NO: 665636 - DNA, 568 bp, Homo sapiens
ttgtgaggacatatttatcagtctagtactaccttgtaacagtacaaaagtacattcacattattttttctaaaggagcttagttcctagagggaaaaatacaytcttctcaaagttttataataataattaacataccctacatgatgtttgtgagactcaaataaggaaaacaatggaatatgctatataagagcaacatattattgtcaaagttttatttctttttctctatctttcaaacaaatcataatctgctttggtttttaaaagtagtttagtcgtagaatactctgttcacataatttatgtattcacattaatcacataatttataaatcataaaatatgacgatagtggtaataatataaacaatgatctaaaagtatgttaaaagttataatcttcgcatcgcactctcatgaagtaggttaatagacaatacatggcttgcctaattgcacatagaaatgactgtttgggccaaggattcaaatctggggcatgcaggcagaagtcctgttctcttgatgttcattctatgctctttaaataaaccccatttta

SEQ ID NO: 665637 - DNA, 580 bp, Homo sapiens
aatggttgaaatttatattttaagatgtctcatggtctatgttctttccctgctgggtgacactcaatgaatactccaccttctgaatgaccatacctttatggtagaagctgggtagaaggatgacaaataccttaactgcacgtcttatgttcagggaattccttgggaattccatcaaagtagttctgcctcaaaaatggctaagggcaaatcctgtgataaaattagtgttctcttttkgctttttgccactattatttacgttcactcattcaagaaattttctgagcttcaaaaacatatttgtatcaaattggaacagtcattataatataaaattagccactttcaagccctggtgttcatctttcacaatccaggcaaatttaaaccttttcttatgtatttcttgattcggtagaaataaattcttcccttctttgtcctcctttggaaataattgatgtctgtcttattttgcttattatattcagcctttcactgcaactggggatattcatctctcaataccagattatacactcttaaggcttttgtgccactcagtttcccatat

SEQ ID NO: 665638 - DNA, 530 bp, Homo sapiens
cctgggcacaggcgcctagatatttcattaaacattattctggttgtatccgtgaggatgtttctggatgagatgaacctttgaatacagattgagttaagcagtttgccctccccaatgtgggtggacttcatccaatcccttgaaggcctgactagagcaaaaggtggagtaagggagaatccactctctgactgactgtgtttgagcttggacatgagtgttctgccttggagctcagactggaatttacttagatcattagcttttctggttctcaggtctttgaactcagactagaaatataccattggctctcctgggtctcaagttgccaattgcagattgcggattttgggacttctcagcctttgtaacaatgtaaacmaataccatatgcatataagccatatatatgcatatatgctcctaatttgttgtttctctggagaactaagactaatacaccctcataataagtttatcaatccaagaaagagagaaaagtgcgcttaaaatgcacatgctac

SEQ ID NO: 665639 - DNA, 593 bp, Homo sapiens
aattcataaataatgaagataatatagggagtctggctagagtacagaccatttaaaagttcctggtttctttcaagattaaataacttctcagaaatcagtatgcagttctgatgcttttcccccataccacaatacacccaccacttcattatttatagagacctaggtcgyatgactgaagatgactctgttcccagagctgaaacttctggggatgactgatcaattccattatttctaatactctaaaccacatactctaacctagcattagtttgatcccagactccaggggttcctagggttcttttgaaagaagggtagagtggctggtggagaaagcttgatttccatccaatgggaacatttttatttatattattaaaatctacacattaaacttatgaaattgaaggtgacgtcaaactaaggtgagctgataaatcttgagggaaaagcgtacattgtcagagattttactcttataatgcaaagctctttagtgcttaagagcattagtgttgtcataagaaaaccttggtcatggctttgacatttaccagctgtatgacctcaaacaagttatttaa

SEQ ID NO: 665640 - DNA, 347 bp, Homo sapiens
gaaaagaggtatttttaaatctatcgagaatattctaaagcttggtaagaaaataatattatatgttatatacatgtatacatatatatgcagaataactgattttaacatttttagaaggtactagacaacaaatcaggcaaagatttgttaatttaaatttaaattaaatttaaagcttgaaaaggaaggagactttaaaatgatattatttgaagaacatgtttgttaacttaaaaaagcaatggaaacctacagtgaaaataatatwtatgataatatagtttaattggtgactcgatacaaagttaatttgcagaaaaaatagacatgttatgtaaacaaca

SEQ ID NO: 665641 - DNA, 544 bp, Homo sapiens
atcttccttaacaaaaatatttttattccttttgcatgtatcctgcaaagattaaagttaaagccacaaggtgagtgctctcttatatctgagaattcaaaacattatacagaaagcttagtcctgacactcctaatttgttatacaactatgctttgttggaattttgcttataattgtttgtaatttctaaatcattgcrttttcaaggatggattcccaaagctcatggatcagaatcttttaaagcattagtcttattgcttacatacctgttgtgggtcgaagtgtatcacctgccaaattcaaatgttgatgttctaacccccagtgcctcagaggtccatcctaccctcgtatgacctcatcttacctcatgacatctgcaacaatcttaagattactggtgacgcaatgaggtaagatgaggtcatactggagtaggatgagcctttactccagtatgactagtgttcttagcaaagggaaaaatctggacactgttacactcacaggaaaaactctctgtgaatatgaagacaga

SEQ ID NO: 665642 - DNA, 544 bp, Homo sapiens
atcttccttaacaaaaatatttttattccttttgcatgtatcctgcaaagattaaagttaaagccacaaggtgagtgctctcttatatctgagaattcaaaacattatacagaaagcttagtcctgacactcctaatttgttatacaactatgctttgttggaattttgcttataattgtttgtaatttctaaatcattgcgttttcaaggatggattcccaaagctcatggatcagaatcttttaaagcattagtcttattgcttacatacctgttgtgggtcgaagtgtatcacctgccaaattcaaatgttgatgttctaacccccagtgcctcagaggtccatcctaccctcgtatgacctcatcttacctcatgacatctgcaacaatcttaagattactggtgaygcaatgaggtaagatgaggtcatactggagtaggatgagcctttactccagtatgactagtgttcttagcaaagggaaaaatctggacactgttacactcacaggaaaaactctctgtgaatatgaagacaga

SEQ ID NO: 665643 - DNA, 544 bp, Homo sapiens
atcttccttaacaaaaatatttttattccttttgcatgtatcctgcaaagattaaagttaaagccacaaggtgagtgctctcttatatctgagaattcaaaacattatacagaaagcttagtcctgacactcctaatttgttatacaactatgctttgttggaattttgcttataattgtttgtaatttctaaatcattgcgttttcaaggatggattcccaaagctcatggatcagaatcttttaaagcattagtcttattgcttacatacctgttgtgggtcgaagtgtatcacctgccaaattcaaatgttgatgttctaacccccagtgcctcagaggtccatcctaccctcgtatgacctcatcttacctcatgacatctgcaacaatcttaagattactggtgacgcaatgaggtaagatgaggtcatactggagtaggatgagcctttactccagtatgactagtgttcttagcaaagggaaaaatctggacactgttayactcacaggaaaaactctctgtgaatatgaagacaga

SEQ ID NO: 665644 - DNA, 544 bp, Homo sapiens
atcttccttaacaaaaatatttttattccttttgcatgtatcctgcaaagattaaagttaaagccacaaggtgagtgctctcttatatctgagaattcaaaacattatacagaaagcttagtcctgacactcctaatttgttatacaactatgctttgttggaattttgcttataattgtttgtaatttctaaatcattgcgttttcaaggatggattcccaaagctcatggatcagaatcttttaaagcattagtcttattgcttacatacctgttgtgggtcgaagtgtatcacctgccaaattcaaatgttgatgttctaacccccagtgcctcagaggtccatcctaccctcgtatgacctcatcttacctcatgacatctgcaacaatcttaagattactggtgacgcaatgaggtaagatgaggtcatactggagtaggatgagcctttactccagtatgactagtgttcttagcaaagggaaaaatctggacactgttacactcacaggraaaactctctgtgaatatgaagacaga

SEQ ID NO: 665645 - DNA, 540 bp, Homo sapiens
gtaaatttgaatctaaaattttctatgttaaagccaaacatgtaaaaaaaaaaaactataggtaaataatccactttttactctattgctgcttttaaaaagatttaattaaatatcagtgttatagatttaattatatccttctcaaattcatatttgaagttctcacccccagtgttactggctttggtgacagggctttwaaggaggcaattaaggttacctgaagtcataaggatggggccttaatcctataggactaatatccttataagaaggggaagagagcccacagctttttcctagtgtgcagcacagggggacagccgcatgaaaaggcagccttttgcaagccacagaaaggggcctcatcagaaaccaactctggcggcatattgatcatgtatttctaacctctagaactgtgagaaaacaaatttctgtggtctaagccacccagtctgtggcattttgttatgacagcccaaggaaactaataaaatgagcaattaaatatgtttccctatttctgattagttt

SEQ ID NO: 665646 - DNA, 581 bp, Homo sapiens
acctaaagaatgccagacactgtataagtaccaagataaagacccccagaaaagcataaaaagtagcccatgtgctcactggagttttaaaacaaattatctacgaatatgaagaccatacatagacmttagctatactctggaccagccatttttagagattgaaaacttaaaatcccaaatgacaaaatgaagttttgtgctctccttgagtagggtctggatcaatagagaggttcagatgctcagtcagacttttgtaattgaagaatctcagatgtttaaactcccttggatttgcacacacttgggaaaaagccaggagcttctgtatctcttcctatgattcacctggatccatcttccaccgtatcttcaccacccggccctcttttcccagtccttcctgctgtcctcatccttgtcttgttcactatttcaagcttccaaccttctgctccctcactcacttcactttcttaatcagctcttaatatctgtcagaactcttttcttggtaaatacaggaacaaacaagagctggctaattgatgataagtaaagtcatgcatcagagaccc

SEQ ID NO: 665647 - DNA, 500 bp, Homo sapiens
aaattaattcaagacctatcattgtttctaatttgctgtttagctcatttaaattaaaaattttagttgtarctatcacttctaatattttaattacataattttttagattgcagtactttgataaatctattcacattgtgttttattttcttgaacattttcctcatagttattttaaagttaataagtgacaaagttaaatgactgataataatctatatacttctgttgtctgtattttggcatacttttaatcttttgaacctctcggtaggcatgctgtaattttttttgtaaattctgggctgagtgtatgaaacattgtagaggctgtagatattatgtatttttctccctcaagagaaaaaaatacataatgttcttttagaagagcaccttgactaagtctgtaattgaaataattcatgcctgagtgaggtctggcctagtcttgttcgcatttattctgagaagtaacttttcaggaaactaaactg

SEQ ID NO: 665648 - DNA, 556 bp, Homo sapiens
gtactttgataaatctattcacattgtgttttattttcttgaacattttcctcatagttattttaaagttaataagtgacaaagttaaatgactgataataatctatatacttctgttgtctgtattttggcatacttttaatcttttgaacctctcggtaggcatgctgtaattttttttgtaaattctgggctgagtgtatgaaacattgtagaggctgtagatattatgtatttttctccctcaagagaaaaaaayacataatgttcttttagaagagcaccttgactaagtctgtaattgaaataattcatgcctgagtgaggtctggcctagtcttgttcgcatttattctgagaagtaacttttcaggaaactaaactgaaacccagagatatttgccagggtccctgctccttggtaggccctacatttctaatgcttcttttcctgagaccatcagaaatttttcattagatttttaacccattatctgctattcccttggttttaagaagaaaagcattagggaacatcaggctcatttcaatgaat

SEQ ID NO: 665649 - DNA, 567 bp, Homo sapiens
attatgtatttttctccctcaagagaaaaaaatacataatgttcttttagaagagcaccttgactaagtctgtaattgaaataattcatgcctgagtgaggtctggcctagtcttgttcgcatttattctgagaagtaacttttcaggaaactaaactgaaacccagagatatttgccagggtccctgctccttggtaggccctacatttctaatgcttcttttcctgagaccatcagaaatttttcattagatttttaacccattatctgctattcccttggttttaagaagaaaagcattagggaacatcaggctcatttcaatgaatttatctaatctatggtatcttgttctctcaagtcatggctccttggacatgctctgatgccttcaaggagctatatttaaacacatcgtatcctgaattctaawttttttgtgtgagattgcaggtttaataaaatcatacagcatggtcagatgcaaaagtctcaaagttgttgctaattgtgcagttcatgttagcagcttttaatacttttacttttttaacatcactgcgcta

SEQ ID NO: 665650 - DNA, 494 bp, Homo sapiens
aaacttacatgggaaaaagaaaataagaaaaaaaacagacaagagatctaatacttgaaaaatayttagtatatagcaaatatttcaaacacaccaaagcactttgtattagttctttttcatgctgctaataaagacatactggagaatgggtgattcataaatgatagagttttaactgactcacagttctacatggctgacgaggcctcacaatcatgatggaaggcaaaggagaagcaaaggcacttcttacatggtggcaggcaagagagcttgtgcccgggaactcccatgtataaaaccatcagatctcatgagacttattcactactacaagaacagtatgagggaagccacctgcatgattcagttatctccacctggccctgtccttggcacatagagattattataattcaaggtgaggattgggtgaagacacagccaaaccacgtcatacttaaaccccagaactccacgtagcatgagaa

SEQ ID NO: 665651 - DNA, 494 bp, Homo sapiens
aaacttacatgggaaaaagaaaataagaaaaaaaacagacaagagatctaatacttgaaaaatacttagtatatagcaaatatttcaaacacaccaaagcactttgtattagttctttttcatgctgctaataaagacatactggagaatgggtgattcataaatgatagagttttaactgactcacagttctacatggctgacgaggcctcacaatcatgatggaaggcaaaggagaagcaaaggcacttcttacatggtggcaggcaagagagcttgtgcccgggaactcccatgtataaaaccatcagatctcatgagacttattcactactacaagaacagtatgagggaagccacctgcatgattcagttatctccacctggccctgtccttggcacatagagattattataattcaaggtgaggattgggtgaagacacagccaaaccacrtcatacttaaaccccagaactccacgtagcatgagaa

SEQ ID NO: 665652 - DNA, 609 bp, Homo sapiens
aatatctacaaaatacctacagctaacttaytttactaaccatatttacttaatggtaagaaactccaagcttttctgacaagatcaggaataaggcaagaataccctctcttcattgtttttcaaaatcatactggaagtcttagttaatgcaataaaacaagaaaaggaaataacagatttactgattaggaaataaataaaactggttgcaaatgacatgaatatatagaaaatccaaaagaactgacaaaattctcctggaactaatcaacaactacacatggtgaggttacatgatacaaggttaatatacaaaaggccaatattttctacataaatttagtcttaatgttgtcaataggttttttgaaactgtgactttaagtgaaacgatgtaacatcatttcatttagtatagttttgttaaaatgttcatgagagaaaaaaaatttttttaattcatatgtcctttcacttaaagttgcagtttcaaagaacctattaatgatgttaattgaagacttattgtacctgcaataaaattgaaatttgaaataaaaacaatatcatttgtagtagcacactccaaaaataaaatatgtagat

SEQ ID NO: 665653 - DNA, 609 bp, Homo sapiens
aatatctacaaaatacctacagctaacttattttactaaccatatttacttaatggtragaaactccaagcttttctgacaagatcaggaataaggcaagaataccctctcttcattgtttttcaaaatcatactggaagtcttagttaatgcaataaaacaagaaaaggaaataacagatttactgattaggaaataaataaaactggttgcaaatgacatgaatatatagaaaatccaaaagaactgacaaaattctcctggaactaatcaacaactacacatggtgaggttacatgatacaaggttaatatacaaaaggccaatattttctacataaatttagtcttaatgttgtcaataggttttttgaaactgtgactttaagtgaaacgatgtaacatcatttcatttagtatagttttgttaaaatgttcatgagagaaaaaaaatttttttaattcatatgtcctttcacttaaagttgcagtttcaaagaacctattaatgatgttaattgaagacttattgtacctgcaataaaattgaaatttgaaataaaaacaatatcatttgtagtagcacactccaaaaataaaatatgtagat

SEQ ID NO: 665654 - DNA, 592 bp, Homo sapiens
gaacacttgaattcaaatcttacttcaatctctaaaacttatgactttggacaaatcatgtaatgtcttgaagaagcaaaatgatcaaagtccccttctatccatcaaatggtaaattattttaaagtcattaatataaatttactttgtagtcattgaagagatggagaattcattttaacaaatacattgaatactttgccaaggtgtttaatgtgyctatcttttgggaaaagtgcagagatacaacaagaaatatttttatatcattagcaatttcccatcctggttcccaagctaagacctttcattgtggtatcttaaacccaagatgtgggaatatataggaaaagtttctttcatcataatattaatattagctattaaagctaccatgaaacctatagctgaacacattgatactttattttttactctaaattttactatatgttcagttttactcattttatgttatgaatttattgacggtgggaagggttttatataaatacactcaggttttagaagacttctataaatgagagaaaagactatttcctgggattcaggataacaagcaagttgcaat

SEQ ID NO: 665655 - DNA, 550 bp, Homo sapiens
taagggttgttctccttttcacctagactgagaaaccctgaatcctgcatctttaaggtccctccatctctaggatcatatagctattgcatagctgaggaaacctagtaacaaaggatgtaatgatgattatgctgattgtattagcctgctatcacgatgctaataaagacatacctgagaccgggtaatttggaaaggaragacatttaattgactcacagttccgcatggctggggaggcctcaggaaacttacaatcacggcagaaagggaagcaaacaagtctttcttcacatggtggcaacaaaaagaaatgacaagcaaaagggggaaaagcctcttataaaaccatcggaactcataagaactcattcactatcatgagaacagcaacatgggggtaactgcctccatgattcaattacctcccactgggtccctcccacccacaatacatggggattctgggaactatagttcaagatgagatttgggttgtgaaaacagccaaccatatcactgatatttaataataatttcaatatca

SEQ ID NO: 665656 - DNA, 569 bp, Homo sapiens
tctcctgtactatgaaaatatttatactggctactttaaagtttttctcccaatccaatgcctaggcccttcaaaaaataaattttattgcctgccttctcccatgcccctagtgtagggggcgcattttcttgcttcttggcatgttccatcgttttttaaactgtatatttttggataatatatcttagcaactctggataccaattttatttatccctgggagatgtgatgttgtttgcttgattgtttatttggctggtgacttggctggactgactctgaagtctataactcttgcaatgtgcagtctttgatatctctaaaaagattgttttttaatttttttatctaggatacctatggtatgtcgctgtattgaaatacacctcttattggttaaagattgtgcttaagccctcttatttaccactgaatgggtgtgtggcttggaggctgctatcacccttcaacaagcttacattttttcactcacattcagagcttgaacytacactctttgttcactcctgaaaggcccaactattgggcatgcacagggtcttcca

SEQ ID NO: 665657 - DNA, 619 bp, Homo sapiens
gtgaagtcttagtgcctacattctaatcccagttctctcagtgaccaacaaaaaaccttaaagcaagtgagtgaacctctctggacttcattttcctcacctgtaaaattagaaaaataatagcataagaggttgtcattaaaaaagggcaattgataattgtttggcacctaaaataaatccactaaaacagagtccagaaattttgagcaaatggtcaaaagtatgattatgactttatcttaaaaataaaattagaattataaaaataagtattttgaaatattactaatatttagattatagctttcagtatataccaagtattagaatgaacaaagtgtcaagtcatggagttaggaggacaaaacaaaatgctaggataatacggttcacgttgcatttckcatttttaagaatatattccatgacttctaaaattattccaagactttactactcaaatctttcttttttagcatgtttattatgttgtgatccacgtcaattttatcttctccaattgttaactggccacattcccaaattctcatttatcaatggcttttctgttgacaacttcattaaattctacatcttttgcaaattttactattat

SEQ ID NO: 665658 - DNA, 630 bp, Homo sapiens
tgactggggagggtgcctgagagaaatatgatggaaggaccgggtaaacacacctgtagacttgtcacctgtcctaaggtgagagtaggggctggggctgtgaagaaggacttttgtttgtgtacctaccatgtgctaggtaggtgctggtagtttagygcatgtattttttaaaagttaggcattgttactaccattctgcaggaaataggctcagagaggtatgagtaagtcatcaatatgcacttaaaaataaatctagtgttgctatactcaggtgatacttatagtaaaatttctactgtggccttttggtgtgtttccctagtcttttttagaaattcatatggaaggctgaccgcggtggctgacacctgtaatcccttttttagaaattcatatggaaggctgaccatggtggctcacacctgtacatcgggaggccgaggcaggtgcatcactttgagctcaggagttctagaccagccagggcaacatggtgaaaccctgtctctacaaaaatacaaaaattagccaagcattggttgtgggtgcccatcatcctagctactcaggaggctgaggctggagaattgcttgagccctgggagtggaagttgccgtgagccg

SEQ ID NO: 665659 - DNA, 590 bp, Homo sapiens
atgccattgcaatccagcctgggcaacaagagcgatactccgttcaaaaaaaaaaggtgggaatgctgctctgctcccttcacccctctgacaatctgctgaccaccaaactgttgggaacccctctgtcctcatgacctagggcaaagctatcggtggtgacttgggaatttcccagggatagagaaccagctggctagctcctgtaggaattcatgtactcccctgacccaaactgagatgacaggtgcaatactggtgtagatacctagtggacctctgccctgcctagggtttctccgcccttgagtcatcacaccaccagaaccctcacaaatataacttacaacccactctggctttggcaagcacaggagactgatgggcccccaggaagttgtgaggcccctggagatctaaccaccagcatgggctaccaacaagggagtgcagcctaccaaagtccccttaggacaaagggaatgtggatgcagcactgattgctgaaggaggcagtgccaacaccaggaaatgaacatggagagagggacatctcccacccrtccaatgccatacactattgcagacac

SEQ ID NO: 665660 - DNA, 628 bp, Homo sapiens
ctggcaaaatggatagacaattttgcaacatctggcatgcccatctgtgtcctttcctctacgtggcataaacctgagcaactttggagaaaccccttactccaaggctccaccctcagggatggaaacagaagaatgagccatgcattgaatgttctggcttatctgggggctgcccaagggattagtttctgtctcacctaacagaaatcagtgctgacaggaccaggtcaagcatttggaagccactaaaaacagaggtgagtagcaggttagagtcrcagttccacaggcagacaccagaaggagtaagagatcagaaaaggtttgagaggtcctagatcctccagcagggttgattggtgaaggtctttccctgtatgaagccaaagactaggaaaggtcttcaaatggccaagttctagcaaaacattttaagacatccaaagaaacagagaaatttggcacaaaggatcaaataaaactccagaaatcaattctgaagaaatatgatctactagttgcctgaaaaggaatttaaaataactatcataaagatgctaccaaaaggataacaaacactatcataaagatgctatctaaaagataacaaacactgggccgagtg

SEQ ID NO: 665661 - DNA, 628 bp, Homo sapiens
ctggcaaaatggatagacaattttgcaacatctggcatgcccatctgtgtcctttcctctacgtggcataaacctgagcaactttggagaaaccccttactccaaggctccaccctcagggatggaaacagaagaatgagccatgcattgaatgttctggcttatctgggggctgcccaagggattagtttctgtctcacctaacagaaatcagtgctgacaggaccaggtcaagcatttggaagccactaaaaacagaggtgagtagcaggttagagtcgcagttccacaggcagacaccagaaggagtaagagatcagaaaaggtttgagaggtcctagatcctccagcagggttgattggtgaaggtctttccctgtatgaagccaaagactaggaaaggtcttcaaatggccaagttctagcaaaacattttaagacatccaaagaaacagagaaatttggcacaaaggatcaaataaaactccagaaatcaattctgaagaaatatgatctactagttgcctgaaaaggaatttaaaataactatyataaagatgctaccaaaaggataacaaacactatcataaagatgctatctaaaagataacaaacactgggccgagtg

SEQ ID NO: 665662 - DNA, 474 bp, Homo sapiens
cacacacacacacacacacacacatttatttttcacaacattcaggtttatactgtacaaactttagcaaccttcatgtttttccaccagtgttttcattgaaaatatttttcaccgttccacagcatgattgtaatggctgtgtaatgttccattgcaccaatgtcccattatttatttaactaatctactgatggatacttaggttatttccagcattctgtgattacagcacaatgctgccaaagacgtgctctttccgctatacatgtgcctgttaattatccyatccccaaacacatctgaggacatgagggaaagatggtgggagaggcaataggaacagggaacatgtctctggggcaggagaggggattgaaatgggagacgttctttaatgtccaaaaagagaacaggatagaactctggcttctaaggtcttcccattctggcttagagtttctgccaatgaac

SEQ ID NO: 665663 - DNA, 584 bp, Homo sapiens
ccatttcctgggcccatctcacaaagcagtgactagcaaggtayattagtttcctaaggctgctgtaatatcacacactgggtgacttaaaataacagaaattcattgtcttgtcattctagaggctagaagtgaaacatcaaggtgtcggcagggttggttccctctgagggctgtgaggaagaatctgttccaagcctctctcctaacttctggtagccccaggcactcactggctttgtagatagccgtcttcctagatcttattgcatcatctttccactctgtatctgtctctgtgtccaaatttctcctttttataaggacactagtcaaattggattagggcccattctaactatttcattttaacttgatcatctctgcaaagaccctgtctccaaataaagtgacattcttaggtactgagggtgaggactgtaacgtatcctgtacaaatggatacggtgcaaccccaaacagtgaggcagccttgtagagtaggttcttccttctcgctgctggccccagatgggtctggtcttccttccatttagcccatgtttcccttctgttcagcaggt

SEQ ID NO: 665664 - DNA, 584 bp, Homo sapiens
ccatttcctgggcccatctcacaaagcagtgactagcaaggtatattagtttcctaaggctgctgtaatrtcacacactgggtgacttaaaataacagaaattcattgtcttgtcattctagaggctagaagtgaaacatcaaggtgtcggcagggttggttccctctgagggctgtgaggaagaatctgttccaagcctctctcctaacttctggtagccccaggcactcactggctttgtagatagccgtcttcctagatcttattgcatcatctttccactctgtatctgtctctgtgtccaaatttctcctttttataaggacactagtcaaattggattagggcccattctaactatttcattttaacttgatcatctctgcaaagaccctgtctccaaataaagtgacattcttaggtactgagggtgaggactgtaacgtatcctgtacaaatggatacggtgcaaccccaaacagtgaggcagccttgtagagtaggttcttccttctcgctgctggccccagatgggtctggtcttccttccatttagcccatgtttcccttctgttcagcaggt

SEQ ID NO: 665665 - DNA, 584 bp, Homo sapiens
ccatttcctgggcccatctcacaaagcagtgactagcaaggtatattagtttcctaaggctgctgtaatatcacacactgggtgacttaaaataacagaaattcattgtcttgtcattctagaggctagaagtgaaacatcaaggtgtcggcagggttggttccctctgagggctgtgaggaagaatctgttccaagcctctctcctaacttctggtagccccaggcactcactggctttgtagatagccgtcttcctagatcttattgcatcatctttccactctgtatctgtctctgtgtccaaatttctcctttttataaggacactagtcaaattggattagggcccattctaackatttcattttaacttgatcatctctgcaaagaccctgtctccaaataaagtgacattcttaggtactgagggtgaggactgtaacgtatcctgtacaaatggatacggtgcaaccccaaacagtgaggcagccttgtagagtaggttcttccttctcgctgctggccccagatgggtctggtcttccttccatttagcccatgtttcccttctgttcagcaggt

SEQ ID NO: 665666 - DNA, 581 bp, Homo sapiens
attgattgctgtggttcctttaaccctttgtgggaagggggaggcttccccatttccaggcctctttgcttcccctgcccctgtcaccaccattttatgcattcaaaaactgttattttattttatttttatttttatttgttaaatggtccttttcctagactgccagggtcagcaaacagaagtgtctgttcaaagagggagggctggacgggaagagggctgctaggcccggtcagagaggacttcaggcagggagcrtggaagctgtggacaggacagcttttagctctgggagcaggtgctggagccaagtcacacacaggtagcagtcagtgaggttcacatccaggaacctttttacagaaacccctctctctctctgtacagctgtataagcaccagcacaggctccgacaacatgcaggtgaggaaggggacagaagggcctaagatcccaccatggagagagagggaggagaggggaggggggcttgtagcatcagcttatcagaaggaccccctggtgcaccagaagattgtagtcctgggtgaacaagagctgccctcgggggttagca

SEQ ID NO: 665667 - DNA, 647 bp, Homo sapiens
tcgcaacaacaactacaacaacagcaaactcctaggaataaacataaccatgcaggtgaaagatttctacactgaaaactataaaactttgatgaaagaaactgaagaggatacaaataagtagaagtgttcatagaytggaagaatttatgtttttaaaatggccatactacccaaagcaatgagatttaatacaatccctatcaaaataccaatgacattcttcacagataaagaaaaaacaaaccataaaatttatgtgaaatcataaaagattccattggagtgtgaagctggaggcctcacactacctggcttgaaaatatattacaaagctattgtaaccaaaacatcatggtagtgacatagaaactgatccatagaccaatagaatagaatgtaaaacccagaaacaaatcaacaaccctgatccttgacaaaggtgccaaggacacacattggagaaaagacagtctctttaataaatgatgctagcaaaattggatattctatgcagaagaatgagaccagatccctaactctcaccgtatacaaaaattaacttaaaatggattaaaatcttaaatataaaacacaaaaactatgaaactagtagaagaaaacataaagaaaatccttcccaatat

SEQ ID NO: 665668 - DNA, 697 bp, Homo sapiens
atgctcaacatcactaatcatcagagaaatgcaaatcaaaaccaaaggagataacacctcacttcagctaggatggctattatcaaaaagattttttaaaaatgctggcaaggatagagagaaagaatactcatatgctgttggtgggaatgtaaagtagtacagccattatggaaaacagtatggmggttcctcagaaaaaagtaaaaatagaactaccatatgacctcacagtcccactgctgagtttatacccagaataaaggaaatcaatatgttgaagagatatatgcactctcatgtttattgcagcactattcacaatagccaagatatgaaacatatctaagtgtccatcaatggatgaatggatattgaaaatgtggtatatatacacaatgggacactattcagccataaaaacaaatgaaatcctacgatttgagacaacatgaatgaacctggaggagatcatgatacatgaaataagccagacacagaaaagacaagcactgcatgatctcactcatacatggaatctattttttttaagctgatatcacagaagcaaagaatagaacagtggttaccaaagacttcagatagaggaaaagaggaggataggagaagttggtcaatgggtacgaagttacaattagatagaaggagtaaattctggtgttctattgcacagtat

SEQ ID NO: 665669 - DNA, 602 bp, Homo sapiens
gcattttggcagtttcttactaagctaaacattgtcttaccatataatccagttatcacactcctaggtatttacacaaatgtattgaaaacttatgtccacaaaaatctgtgtacatatatctatagccgatttactcataattgataaaaattgaaagcaacaaagatatccttgaataggtgtaatgctgacatacttttatgtttccaatgttgtaaaaggygatactatagagattaaaaatatcagtggcttccagagttggcggggcagtgttaaagagatggaatgaatagctggcatacacgggatttttatggagtgaaactattctgtattgtgctgcaatggtagatacatgacatgtgtttttcaaatccatagaaatgtacaacacaaagggtgaacctcaatgtaaactatgaattgagttagtaacaatgtattgatattgattcatcaattgtatcaactgtacctaccaatgcaagatgttaataataggggagaatgtgggtaggggagacaggaagtaaatggaagcttcctgtactttctattcagtttttctgtaagcctaataatgttccaaaaaataa

SEQ ID NO: 665670 - DNA, 585 bp, Homo sapiens
agcatctctggacccacctgaggttttgaggaacttgctttcctgaagtaaaaaaaaaaaacacaggcctgggtggcttttccacctgctaattgtacagccccagaaccttgtgtaaacacagacagtagcaagggattggttacagcaggccttgggtgagactcagtgctgttctggctgcaggtgtgacccaacaaagtcacagtggtggtggccacaggggtgcttgtgtcacttcactcccaagcctcaattcttgccctttgtgcacctacaggcttaacaccacatagaagtcttggcagcttccagcttgcaccctctggagcagtgatctgagacatatctggggctcttttagccacagctggagctggagtggctggaatgcagggagcagtgtccttaggttgcacagggcagtgaggcctgaagaccgaggcccagcccatgaaaccatttttccctcctaggtttctgggcctgtgatgggaggggctgcygtgaaggtctctgaaatgccctggaggcattttccccattgtcttggctatgaacatttggctcctctttacttatgca

SEQ ID NO: 665671 - DNA, 614 bp, Homo sapiens
atggggactcagatacctaacactttgccaccaggtactcctccttcaatgccagccwaattataaacttgggctccttcgtttataaagtagtgatacacaagcgtactaaatgagattttatagaaaatccacttatatgtcacaattctaagttcctttccatgctgagatccattttcccaggctttggaacttatgagagggaaagggcaattctcaatgtttccatagtaatagaacaggagtcagtattactatgcaagcactgagaagactccaatcagaagtgaacagtttagcctctgttgtacttcagaatcaccatgtcctggatacaatgacagcccaagaaggaggagcttatgcaatcattggtgaggaaccctgcttatgtgtaaatcactagggacagacagaatctaatctgaactttttgaaagacaaaataaacactcttcatcttataaatgaggctaaaccattcaattggactgacccattgccagtgataggagattggttgaatgcagtatgggtaaatgtgtttagatttgttcttttctgcttattaattctccttctaatctgtgttcttctctccctttgcagac

SEQ ID NO: 665672 - DNA, 614 bp, Homo sapiens
atggggactcagatacctaacactttgccaccaggtactcctccttcaatgccagccaaattataaacttgggctccttcgtttataaagtagtgatacacaagcgtactaaatgagattttatagaaaatccacttatatgtcacaattctaagttcctttccatgctgagatccattttcccaggctttggaacttatgagagggaaagggcaattctcaatgtttccatagtaatagaacaggagtcagtattactatgcaagcactgagaagactccaatcagaagtgaacagtttagcctctgttgtacttcagaatcaccatgtcctggatacaatgacagcccaagaaggaggagcttatgcaatcattggtgaggaaccctgcttatgtgtaaatcactagggacagacagaatctaatctgaactttttgaaagacaaaataaacactcttcatyttataaatgaggctaaaccattcaattggactgacccattgccagtgataggagattggttgaatgcagtatgggtaaatgtgtttagatttgttcttttctgcttattaattctccttctaatctgtgttcttctctccctttgcagac

SEQ ID NO: 665673 - DNA, 579 bp, Homo sapiens
taataatgtactcatgtactcatggggagaagagagctaaggaagtcattactgtggaactgtctctgacttaatgtctgatggggccaataatgcctttactgactactttcatggatgtttatagactcaagtgagataatacaatttgaaaaaataaaaaggcttttgctgtttacagacttaaaaaataccgagaaattttatgttatgctttggcttgggcatcttgctaaatattatattaaagaaactgaaatgaggaaaagaatcaaatctgtagtagctttatttttatgtatacagagacccatcattcattagatggtgactgtgtccttggagaatcttcattaagtaatcagttamactgaatccagagctccaaatagatcctggttttcataacatcagagtgttgaactaatttaattataagagcaaaatgccaggagccaaaaggattcaaaggagaggaaaaagaataattagataagctgccagacataaaatatgaacaaccattatcaccaagaatatgaagaacataatcctacaaacaacaacaaaaaaaacacc

SEQ ID NO: 665674 - DNA, 573 bp, Homo sapiens
gaaatttttgtttcatttggaaaactaactttatttaaaactggattattctgttttattatatctcatttccaaagccttgccagtgcctacttcttcccaggtaaaatttttgcatagtgctaccaaaatatgcagttcttccagtgtactatggcatttcctttctctatactgtcactcgcatggcatgctttgcatagaaagtcttgatcctattccatacatacctattcagttgtgaaattaacatcaaagaatattttcctccatctcttaacttctgagcagtttcttatgttagtaacygctgaatgcttctatctaaactcttcaatgatgtgacattggcaaagttacgtgttctctttgagtatcaattccccaaattgtaaattaaggatatactagtatatacattctatgataaccacattccattctatgattatcataattattattattcaataagactgcataatatgtgttgagcactgtacttgcctcataatttctcagtaaatgtttattataattattattggacacaaaattattattggatcacaa

SEQ ID NO: 665675 - DNA, 600 bp, Homo sapiens
ggattagctagacctgcccagcgattccagccctgagaaccagacagaatggaggtatagccgacagctggctgggagggggctgacggtcctcactgccaccaggcttagttggagacagattccccgggctgtagagagacaacagtagaagcaaagagaccagttaggagtctaggtgagaggcagcggcagcctggactaacatggtaacagtggagctattgagagtggtcacatttggaagatgttttgtaggaagtgtcaacaaagtttcttattgattagatgtagggaatgtgagaaagagaaggcggggggaacacgtagattttgggtcaaagcaataaatattccattgacagaattgagacagcaagttggtggaggaggggaacggggtagcaagaagcaaatgtttcatattggacattttaagattcctatttgacatttaagwgtaactcttgaaaaagcaatggatatatgaagaatcctagactagagatacaaatttgccaatcatcatatagatgtggtatttagagtcaggggactagaaagaacaatgtaagggggaagtacagatagaaaaaggtc

SEQ ID NO: 665676 - DNA, 554 bp, Homo sapiens
ggaaaagactctagaagctgtagaataaacccctttattttaccagtgaggaaattaggattctcagagtagagttacttttcttaactctgctcattcagtgtcttaggaatttgatttccagagcagacctatcccctaggaagaaagggccaagccagctaccctgccatacagggcaccttggcattcacttttgtgcctcccatcccgacctgattcccagggcccctgcgcctttggtgcactgacagaatcaaagtgtgagcctgactgcaccgtgaactcgtgggcttccctaggaagcagtgtcctcgtttctcctcactgaagcaggaatgggtcacacgccttcatccatctctaagctctccatccacttggctctgttatgtctgatcttccagcctctctgtttcatttcccttgactgtctggtgtgttccyacaggatgctgaagtgggagagacaagcacaggtgatgtccaggccagcctagggggaccctctggaggatgtctcccccaaccccaggtctcatgttacagagaca

SEQ ID NO: 665677 - DNA, 554 bp, Homo sapiens
tgtgtgtagaccaggaagctaacgtaggaaaattaagaggatagggaagtttaattctcttctatagaatattagccccttacctccttacccatcccttgagacagattagatcttaaaatgcctttcatctctggtagacaggttgcagcaccaataggctaaaatattcatgggcaacagcctgcaaattccaacaagccacattaactgcttagatatactgacgataccaaggttaccaccaaacgccatcaactcatagtaccatatgatctgcttactatgcaaatgtgtacatatgtgtgaagtctgattattataaataactcatttcccagctgcgtacacactctacagaaaaaatgacacattgcctgactatcactaaaagatgccaagtgaatgtgatttataaaatcagtcttccaaacctgtttctcctgattttaggttctgtggggaacataaaaggaartcccaagtgaaatgagagttgtctgacattcaataaacaggtttattggtggacactacaatgctagaaaccaagg

SEQ ID NO: 665678 - DNA, 568 bp, Homo sapiens
tatgctgatgccatctcctcttcataaacagattgtctcagaggctatgagaagttaaatgttcacctcaggtcatagacagctaggatcagaactcaggcccctgaataatatactacagcagtgtcactttcaccacacactttggggtttgatatttaaatttttacctcattagctatgtctttcaaaaaaaaaaaaaaaaaacaccacaaacttaaaaataaaaatactgtaattaaatttaccacctgtatttctaatgmtatcacaggaaaaataataccacagtacagtaaataaacacagcagtgctgttccacattgcttcctcaaaatatttctaggtagaggcctattaattgttcttgcagtacataaggaagcttttaaatacagtatatgagcatcatcaaataaaggcttttttcccatggcaggaatcttttagatgcatatttggacatagttgtcagcatctcccagttacaaaattttgacaaattctgagtttagatgtatatttcacacaccattagaatacactagaatatattataaattccct

SEQ ID NO: 665679 - DNA, 570 bp, Homo sapiens
attcaatgattcatttaaataaaacttttaaatcatttgagcattgttttggtctacatccaggtgtcattttaacaattgatatatggagaacacagaatttaattactgccactaacagcatactaaaatagcattgttaagtaatgatttattatcttttgaaactagagtaagtgaacacagaatagtacacgtgttgcattagataatttcaagttataacaaattgctggatctagatgcataactaaatattaatttaaatacttattaaattttcaaaaatgacaaaataaaaaatcctgaaagtagtgtaacaaaaatagtaatattagtaatttaaatttgtgcaccatttcttagtgtaaaaatcaaaacataattttagttgactttttaaattttatttttatttattcatttttttgagacggagtctcactctgtcaccaggctggagtgcagtggcatgatctcggmtcactgcaatctctgcctcccgggttcaaatgattctcctgccttagtctcctgagtagctggtactacagatgtgtgccaccacgc

SEQ ID NO: 665680 - DNA, 416 bp, Homo sapiens
ccattcatgaggaatccgaccgcatgatccaaacacctcccaccaggccccacctccaacattgggaattatatttcaacgtaatatttgagcagggacgaacatttaaactatatgagttaccttgtataagtccttcaatttagaaaaactggatgtcaaaataggatgcatccttagcttttgactaaggtgtaaagactggatggtatgttccaaggtgagtgggtttagttaaacarcttatacatattgaggctataagaggttaaggtgattggagacgacaaaatttctttgtgtagaactctgattcctaaccaacctgggaggggtgaggggcatgggatgagtgagttttcctcacttcaggtctactgaggggggccagattctttcctgcatttggaagacac

SEQ ID NO: 665681 - DNA, 570 bp, Homo sapiens
atatgagttgcatgttttgatctacttgggcaatctctgtcttttaattggcatatttagactattgacattccaagtgattattgatatacttggattaatatataccatatttgttactgtttatttgttgctctggctttttgtttctatttttgtcttatactcttttttctgcctattgttgttttaattgagcattttatatcattttgcttgtyctttttccttaaaaactgttttatttcctttcttaggtttttttccccatggttgccctagagtttgcaatatacatttacgagtaatgcaacccacttttgaataagatgataataacaaaataataccaattcccttttcctgtccttcatatccccactgttattcgttttattatatacatacttacataagaatatgccatacaagatataaatataagcatacaaaatttaatatgttattgctcttattattttgaacaaacatctatttgtcaattaagaatgagaaaaaaaataaaagtttttattttatattaactatttcttcttggatgttctttct

SEQ ID NO: 665682 - DNA, 497 bp, Homo sapiens
agatagctggaaataccctcgctcccaaatgtcagtttttaaaaagctagaaagacaatacctttgaacctgtcttgaatgttccttttcctaaccrttggaatagtggagaggcaaccaaccgtcccagagtctagggagagacgggtgcctgcagggagagacaagagctgcaaacactggcttttctgggcagatgcagcggactccataagcagactcctgctagggctggtgggtaaataggtggagcctggttgagtgtgtacttcaatgagagggtgaatcccctgggggaagtggactataaatacagaggggccccccatgcttgcaggcttttccttcatgaactcctctaggtggtcacagaagactgggaaaatcctaggaaaatctgcaggatggggatggaggcatcagaggcaagaaactcagagtgaattcttctctttctcccctatgaaacaaaatcattaatctgtggggacaaaagc

SEQ ID NO: 665683 - DNA, 497 bp, Homo sapiens
agatagctggaaataccctcgctcccaaatgtcagtttttaaaaagctagaaagacaatacctttgaacctgtcttgaatgttccttttcctaaccgttggaatagtggagaggcaaccaaccgtcccagagtctagggagagacgggtgcctgcagggagagacaagagctgcaaacactggcttttctgggcagatgcagcggactccataagcagactcctgctagggctggtgggtaaataggtggagcctggttgagtgtgtacttcaatgagagggtgaatcccctgggggaagtggactataaatacagrggggccccccatgcttgcaggcttttccttcatgaactcctctaggtggtcacagaagactgggaaaatcctaggaaaatctgcaggatggggatggaggcatcagaggcaagaaactcagagtgaattcttctctttctcccctatgaaacaaaatcattaatctgtggggacaaaagc

SEQ ID NO: 665684 - DNA, 473 bp, Homo sapiens
tggcaaacatcccctctgaaaaaaaaaatcagaacaaaaactacccccaaatagggaaaactctacaaatggcttaactgtgtatacagtcaagatcctataacctaggtctctgtatctaaaggcagaatttacgtgtgaattaatctcatttttgtttctgctgactccatagaaactgtgctctccayggcttcctcaagatgagcaaacaagagtgatacagatttttctgagatggacagtgcctctcactgaccccgcccccagtatcctacgaccaaggaaaagaatctcatgtgtcatttctgtgggccacggtagttaaggaaactccatgtattttcatctggagcctcacagcaaccctgacaagtggctaagtggggacaatgtgaagctcggctgcccttccccaaggccctggtcttgacagtcctcaggggctggaggcccccctcatccatgtcccc

SEQ ID NO: 665685 - DNA, 266 bp, Homo sapiens
tcctttttctaaaaataactgctggaaatgtgagccttactctaatcacgccaactgagaatgctgccttcttcactttttatgtgtttgtcagtaaaacacayacacacacgcacaaatacacacacacttcaactgagaccacttcatactgctttcttatataggtgtcaattctcctttggccttgagctatcttttccctttaggaagatatcttctttcctcccagaccatcaggaaattctgggggcctgggtagtcag

SEQ ID NO: 665686 - DNA, 628 bp, Homo sapiens
cagtcaccatgctgccctctctgactctcactttcctgcctccctctttccctggtaaggacccagtgattccatggggcccaactagctaatccaggattctctcccatctcaagatgcttaattcaaacacatctacaaagttctttttgctawgcatatacggtaacatattcccaggttccagggactaggacatggaaaccttgtcgggaggaggcattatcatgcctaccaagtgaccctgttatggaggccagggattagtatgctattgctttcaaaggaatttctaacaagaaaaggatagaaggagaaccaaatatttcaaaacctttgaaaataatccagttcaaattccatttctcaagttttttaaacctaaaatgagggcaatacagaaactgaatggtggggtggtcatatgccagcatttaaacccctttccaagtatggaaaattcccaccttaggagttttggtgggaatgaggacagcttttcctcactgggaacaaatatactaggtacgagttgagtagtgtatctgaaatgcttgggaccagaagtgtttcagattttggacttctttttggaattttggaatatttgcaccaagtttactacccc

SEQ ID NO: 665687 - DNA, 562 bp, Homo sapiens
atgcttttttgggactaaattcaaaaagtaactctcaagggggaagacacatggaggagagccttaagtcattcaatagatcatgtacttatgatgaccagatagtctttaacctggtattttatgtcttgttaaccccggccttgttcataaaagtatctactataattttgctgaaggaaggactaaacgaatgaggatgctttctagaaacttttctcagctgacattctcaattggtgttcaaccacccttatctagaggagacacaggatttccataacaatacctaagaccctcttcctcctcagctccaacacccacctacaagattggcagatcctacataattacccacacagtgagcactttctatttctcctgattcttcaytcttcttccctaccagcaagtttatatcctgtcagaaattattatttgtgcttctctttcctgcacctagtccaaagccaaaggtgaaaggtgatgggagtgagcaggaggtcatggagcttatccctgaggacctacatggagggcatcttggaagttcaccgagaag

SEQ ID NO: 665688 - DNA, 497 bp, Homo sapiens
actccagctcaccaacagtttgggacacgtgagtaatttggatagaaagactgttctggctcagacatttgggttatttcagtttcaaaagtgtcagttctcacctggacagaaaaggtagacaagaagggcttggctttaataaagtacatgaactctagacagtttttaatacaatgagattagcacaggtccataaaccaacagattcaaagacaccagaccatggctaaagaaaatcaggcagtagctttcaaggaaatggaatatattctttcactttgggctattacatttcattagggtttcttcagattttgcgaaaatagggacattgaactaatttcttccaggcagatataggaaattcttgacttggtggtatgaaaaaatgacatgaaaaaaagtgactgtgggtgcaatgtattggcrtttataagcacgtatgggacaattaaaatataacaggctggcacagaaccttgaagacctaaagt

SEQ ID NO: 665689 - DNA, 650 bp, Homo sapiens
tccccggcatgtactgagctctgtgcttttgtgttttgacttcgttctccagcaacaataactttccaagtacagcgggctgagtgaaaaacacaatcactgattgatggtcagacccctatggtgttttgaacctttaaagaagctaaggctggtggctgatttgcggttgaaaggggctaaatgttctctcctggagttcagggaaccagctgcttcctgagctggcaaaggagagaaaaccttgagacagagcagcttcaatttgcatgagatgtactaagcaatcctccaattagctggctgttgcctctcttgatggctaccttggggaggagatgggggttgtgaactttgaagtggattattaattattcatgcctccttcgccctgatggaggtaacctgcatctcaggagccaggtccagcattcattatcttcctgtctgtgtttgcaataaaataacactgaatattaatcctttcaccttcattcttaactccctcttcccccttctctagtctctagacagattatgcagaatcatgcctctcctttaattcttctcatccctygtcctcctacatcatttattgtttattcaattatttggaggcccattaaactgagaattaagttcaagggcta

SEQ ID NO: 665690 - DNA, 600 bp, Homo sapiens
cagaagacttgttttcttgtcaggtgtgggtgtttgtgtgtgtgagtgcaaacctatgtctgtctgtgcattacttttctttcagggagccaatacacaaatctacacaaatcggtacttctgaaaatttaagttaattaaatgagagatcactaagttaagtcttcataacaaagaataatctcattatatatcaaaaagggattaattcagaggtgggttaagattagcttgcagaagacttggtatgaagattttttttaactgaaaaggtaaaacataaagaatgttatcacgacacggtaatagttaattgaccaaatgtaacgatagtcactgagctaatgcaagaaatgtatttggtcaatcttggggattctcaccattaccttcttgacttggttctagctttttttctttcttcttcatattctctctctttatcttactttctctttctttctttttcttttttattaactaaaacacatagtttacacttgggttcacacttttaatcatacagtctataggtttgacatatgtataaygttatgtactcaccactgtagtatcatacaagatgatttcagtgcccta

SEQ ID NO: 665691 - DNA, 632 bp, Homo sapiens
aagaccattttaccatttttggcaatcttttttacactctcatagattcccaaaatgcctttcaaatctcagtatacatgcctgcttgtctgcccattggtgattatcagataaacgttccgagtgtttcaatgagccaatttatcggagcatccactggtaggttcaagttgtaggtttgcctggtgtttrttccttagcagaagaaaggaacaaacacttattaacaccttaacaccctcacaagtgcaagacattggcttatgtaattcatatcaattaattgtatattacacatatacatattatggcctcttttatgattaaggaaatggaggcatatattttaagtaggtcttcttggtacaatatagcacttacgtttttctgagcagcagaacctaagacctaattgaggatggatagaggtagactcagtaagattagctgtaaaattatccccactaatacttggctgctttggaatgtgaatgaaaaatgtgaacatagtagactaccttagctttttatatcacaaagcgatatgaataagcaagcaatatgaataagcaatatgaacatttgttgagtacgatgactctgagtccagtaactaaccaagatcacataaa

SEQ ID NO: 665692 - DNA, 571 bp, Homo sapiens
ggagttcagaaagttaaggatctataaggttggcacttcaatgatcattgatatgaagttgccatcactgatcatagagaaactggtggactggaagcttatgcatacatgggtaaattaccagagtttagaagatgataatgagaccaaggagagggtggtttaaaagccggtgaaaactggtcacatattgtcttggtatgattccaaatcttaaagctgcctatgggctaatgatcagattttgggtagtggtgctttagctggattttggctcctacagatgagcatctttgtacgtggcacaaattgcacaatcaaacccagtgagcctatattaattggtggtatgaattttaaatgagaaaacacattgagaaatgataaaacatcaatggtcagccaagacttggcaaatatactaccacaycccacaaattctcgcaataatgatatcagattgtggatatccacaatctagaatatatatcctctcacccttagagaattataatcatcctaaggctataaccaccagaagaacagtgatgtgaattaaatagactgacac

SEQ ID NO: 665693 - DNA, 563 bp, Homo sapiens
tggaaatgtctactactacatcccgagtttcctgggagaactaaaccttactagtctctgcattcccagcatgtagtacagtgcctggcacataatacatttttaaatacattttgttgaaagaatgaataaattgggtcagaattcagtcttacggagttgaagctatcctttattttcaaatccttctgtatcagaagtttctattgaattttaggggtaggacataaatgccactttgtacacagttcagccacagacactaacatcatcttactctgttgttttaactgaattctggggcaatggacgtggtccccttgattaactgattgacaaataatctacaaatgggtgactggattggtttgactgcatgggagctgctctgactcattcyacctcatcctttctgcaaactctcaagataatgagcctctcagagtttcattcattctaaaatagactgctagaaaagggaaattaaaattatttataagaaagcctgggagaaaaaaacattctacaattcttgactgcaatgataggggactcatttagaa

SEQ ID NO: 665694 - DNA, 572 bp, Homo sapiens
ggctttgaataactggagtgaagagaactctcttgatttttaaaatatttcctcttgttccatctgcaggaggcagagctttatttatttatttttttccatcttaaaaacaggttttgttgcgtttgrtccacattcagtatttcacattattacatggtgcagagcccctggatgggggtccctgtgcagtacttggtggggcgtgtggcagggggagatggagcagaatacctggtcaggctcggaaagggagaaggagggctggggctccttaaaacctactgaggggcgagacggggtggctcacccctgtaatcccagcaatttaagaggctgaggcaggtggatcactggaggccaggagttcgagaccagcctggccaacatggcgaaaccccgtctctactaaaaatacaaaaattagccagacatggtggtgtgctacttgggaggctgaggcaggagaatcgcttgagcccgtgaggtaaaggtgcagtgagctgagattgcaccgctgcactccagcctgggtgacagaaagagaacctgctccccacccacctgccccc

SEQ ID NO: 665695 - DNA, 637 bp, Homo sapiens
ccatgctattttggctactagagctttgaggtataacttgaagtcaggtaatgtratacccccagctttgttatttttgctgtatattgttatgaggaactcagaaagttcaatggcaaaaacccaaatagttcaatttaaaaatgggcaaataatctgaatagacatttctcaaaagaagacatacaaatggccaaaaggtatatgaaaaaatgctcaacgttactaatcagaggaatacaaatcaaaaccacaatgatatgtcatctaaccctagttaaaataactattatccaaaagacagaaaataaattctggtgaggatgcagagaatggagaatgctcatacactgttggtgtgaatataaattggcacagtcactttagaaaatagtattaagattcctcaaaaataaaaaaacacaaatactgtatgattcagcaatcccactgctgggtacatattcaaaagaagcaaatcagtttattgaagaaccattggcactctcatgcttattgcagcactatttgtaatagctgagatatggaatcatccgggtgtctacaaataaatagataaagaaaatgtgttaagtatacacaatgggatattattccaacataaaaagtaagatct

SEQ ID NO: 665696 - DNA, 637 bp, Homo sapiens
ggacttttcttgccagtgacttgcaggtgacataatgtgagtgctccagttctctcacttggaatctcagagaatataatgttggtgatgaaaatcaaagacaygtagactttctatgtgaacaacagattccccatgaatgcactgtgaaatacataaattgctatgttagtttctttttgtacattgacttttggtgtaaataccctgaggaggactgacagccatagccaacttctcagtgcattgcataaaaataatgaaatcacttttgcctcacgtttgttgttgcattagacctaatggggtaattgatgttgagcttggctttttacatatacaagcttgagatgaggcagaaccaaggatgtggatttagttaaccttattttaaagcagttacttaacctctattttagatcactatgttaaaaagaaacaatcttatgtgggacagcaaagacagaacagagaattaatcgttttctctctttttgtctttgatcagttattcaatcagttgaccaatttttgacttaatacacacaactcctagatgccattgggctaaataatgttgggtatgaaaaaaaggagggctaagttctaacatatgaggagcaaggtggtgttggct

SEQ ID NO: 665697 - DNA, 637 bp, Homo sapiens
ggacttttcttgccagtgacttgcaggtgacataatgtgagtgctccagttctctcacttggaatctcagagaatataatgttggtgatgaaaatcaaagacacgtagactttctatgtgaacaacagattccccatgaatgcactgtgaaatacataaattgctatgttagtttctttttgtacattgacttttggtgtaaataccctgaggaggactgacagccatagccaacttctcagtgcattgcataaaaataatgaaatcacttttgcctcacgtttgttgttgcattagacctaayggggtaattgatgttgagcttggctttttacatatacaagcttgagatgaggcagaaccaaggatgtggatttagttaaccttattttaaagcagttacttaacctctattttagatcactatgttaaaaagaaacaatcttatgtgggacagcaaagacagaacagagaattaatcgttttctctctttttgtctttgatcagttattcaatcagttgaccaatttttgacttaatacacacaactcctagatgccattgggctaaataatgttgggtatgaaaaaaaggagggctaagttctaacatatgaggagcaaggtggtgttggct

SEQ ID NO: 665698 - DNA, 515 bp, Homo sapiens
tcttgaggaattaattcatagttcttcactgcaagcagagaagctgtgtctagtagttcaagcaaaatgaatttattttatcrtgtagctcacagaattactgggagaacagaagaaaagaccagcatgcctcactcagaacatatctgtcaagcaaactgctgtccccactgccaaacaccagattctagagttggtatgactactaattctggaccagacactcaaccttgcatcccacacagtacctgctgccatgaacaaacagagagctctccattctttctctcttgcatcactagctactgggtcaaagtcaaaccaggatataaatcttactggaggtccctcagtcaatgtcaagtaaataagcaatgctaaaaaagcaatcagagagcattgccattttctaaagcaggtctttgctgtccactcaaactaataaactgtggaattctccaaatatgaaagggggttcaaccactgagcagcttaaataagagataaattgtcac

SEQ ID NO: 665699 - DNA, 515 bp, Homo sapiens
tcttgaggaattaattcatagttcttcactgcaagcagagaagctgtgtctagtagttcaagcaaaatgaatttattttatcgtgtagctcacagaattactgggagaacagaagaaaagaccagcatgcctcactcagaacatatctgtcaagcaaactgctgtccccactgccaaacaccagattctagagttggtatgactactaattctggaccagacactcaaccttgcatcccacacagtacctgctgccatgaacaaacagagagctctccattctttctctcttgcatcactagctactgggtcaaagtcaaaccaggatataaatcttactggaggtccctcagtcaatgtcaagtaaataagcaatgctaaaaaagcaawcagagagcattgccattttctaaagcaggtctttgctgtccactcaaactaataaactgtggaattctccaaatatgaaagggggttcaaccactgagcagcttaaataagagataaattgtcac

SEQ ID NO: 665700 - DNA, 303 bp, Homo sapiens
ctagctactgggtcaaagtcaaaccaggatataaatcttactggaggtccctcagtcaatgtcaagtaaataagcaatgctaaaaaagcaatcagagagcattgccattttctaaagcaggtctttgstgtccactcaaactaataaactgtggaattctccaaatatgaaagggggttcaaccactgagcagcttaaataagagataaattgtcacatacaaatcaaagtaaatattttcctgcaaggcttgtttattcatatatacctatatgggacatggtgaaggaattttagactaca

SEQ ID NO: 665701 - DNA, 527 bp, Homo sapiens
tggtatgactactaattctggaccagacactcaaccttgcatcccacacagtacctgctgccatgaacaaacagagagctctccattctttctctcttgcatcactagctactgggtcaaagtcaaaccaggatataaatcttactggaggtccctcagtcaatgtcaagtaaataagcaatgctaaaaaagcaatcagagagcattgccattttctaaagcaggtctttgctgtccactcaaactaataaactgtggaattctccaaatatgaaagggggttcaaccactgagcagcttaaataagagataaattgtcacatacaaatcaaagtaaatattttcctgcaaggcttgtttattcatatatacctatatgggacatggtgaaggaattttagactacatctttatggtttattctttgtaaggttacaattatccagccaaccagctaattttrtacttctacttcatctacttatatgagaggttttcagattattttatattatatttcccttttc

SEQ ID NO: 665702 - DNA, 634 bp, Homo sapiens
tctttgtaaggttacaattatccagccaaccagctaattttgtacttctacttcatctacttatatgagaggttttcagattattttatattatatttcccttttcagagaccaaacaggaaactattgggttgatttcactgttgggtttatttttcactggaaaaataaaacttttttgaatattttcatacttatggaaaacattttggcagatgacagaaaagttttgttttctaaaaaactcaatatattctaaccagaatagtattttaaacatcttagattatattacaaatgaagaataattagaaaacttttagtgaagcaatcactaatattgagtggcataacagagcatacagaattaaaaaaaawggaaattatagaaattaaaaattatgacccactgaaaacagaaatatagcttggaatgtgttctaaaactttcaaacaataaaacttccatgtaattcttatatcgaacaaactataaaaatgcttatgcaagtttgggattaatcttctacagagataagaaaaatgatttttaaccactacaaacataaggaataaaatacacatgccaaaacatttaacatttttactggtgtactcaaaaggagctacttta

SEQ ID NO: 665703 - DNA, 595 bp, Homo sapiens
aacactcaagtgaacaggtgctttaagtcctagttttgctgatgaagaaacagagattcaaagaaactgattttgtcaaagattgcctaattctgaagtcaggatagggtatcagagatctagaagtttctcttattaccactgctgccccactgaggccatagctagtaatacaattaagaaataagctgggcatggtggctcmcgcctgtaatcccaacactttgggaggctgaggtgactggattacctgagattgtgagtttgagaccagtgtgaccaacatggaaaaccccatctctactaaaaataaaaaaaaaatttgctgggtgtggtggtgcatgcctgtaattccagctacctgggaggctgaggcaggagaactgcttgaacccaggaggcggaggttgctgtgggctgagatggcgccattgcactccagcctgggcaacaagagtgaaactccgtctcaaaaaaaaaaagaaataatggtcaaacatgaggtttttgaaggtagagcgactacttgggttccagtttccattgccatttccagcctgtgtgactgcagccacgctacttttcaggaaggaag

SEQ ID NO: 665704 - DNA, 595 bp, Homo sapiens
aacactcaagtgaacaggtgctttaagtcctagttttgctgatgaagaaacagagattcaaagaaactgattttgtcaaagattgcctaattctgaagtcaggatagggtatcagagatctagaagtttctcttattaccactgctgccccactgaggccatagctagtaatacaattaagaaataagctgggcatggtggctcccgcctgtaatcccaacactttgggaggctgaggtgactggattacctgagattgtgagtttgagaccagygtgaccaacatggaaaaccccatctctactaaaaataaaaaaaaaatttgctgggtgtggtggtgcatgcctgtaattccagctacctgggaggctgaggcaggagaactgcttgaacccaggaggcggaggttgctgtgggctgagatggcgccattgcactccagcctgggcaacaagagtgaaactccgtctcaaaaaaaaaaagaaataatggtcaaacatgaggtttttgaaggtagagcgactacttgggttccagtttccattgccatttccagcctgtgtgactgcagccacgctacttttcaggaaggaag

SEQ ID NO: 665705 - DNA, 603 bp, Homo sapiens
aatcatttgtacattaaaatgcctattttaggctgggtgaggtggctcacacctgcaatcctagaactttgggaggtagatgtaagaggattgcttgaggcaaggaattcaagaccagcctgggcaacatagcgagatctcatttctacagataaaacataaaataaaaaattagttgggtgtggtggcatgtatagccgtagctactcaggaggctcaggcagggatcatttgagcccaagaattsaaggctgcagtgagccatgattgtaccactgcacttcagcctaggtgacagagtgagacccagcctttagataaaaaaaaagaagtcctattttaaatgagcgatcagtaaagggagctattgcaaattattcattctaatcccaaacagagtgacaaagttgttactacaagagacccaactcacccccactggttgttcttggtccatgcactgaaattagttttctgaatcacttataaaatattgaaccatccaagatttggtactttccctttagctttagaactgagtcagtaacccatattgctgttagaagttacccttcaatcttcaaactgtaactcacatttctg

SEQ ID NO: 665706 - DNA, 538 bp, Homo sapiens
accacaaactgttctggtaagactatataggaaaggagctcttcaagaaacagaaaaccacactgacagatcctttgggcccaaggctccaataataacccaacacattcagctctttgtcttgaataggtgatcttatggggaagaagtaagaagtggggagawattcaaaacagttggttaattatattcatttggtcatgggcttgatgtatgttagagcttcacaatattttagatttcctggaaaaaaccttgaagatatgctagttaattcatttattttacagattagtccactaagtcccaatgagtctgaatgacagggaaaagtaagagttggtagcacattttggattagaacttgggtttttttgaatttcagggcattgacattttgctacatgagaagacgtaagcaaggctattagaggatataagacataggagagggttaagccataaaaacttaaagcagacctacaaattacaagaacttgggttcaattgttccagactgaagatgtccatttgccta

SEQ ID NO: 665707 - DNA, 547 bp, Homo sapiens
tgccgcctgttcttcccaggactgcctgcctggccattcccacagggggccaaccctgtagctgccattgccccacctgagtgttttgttggtgctctgggagcagttcacccctccctgttacagccagtgcttgggtttaagagccagaaggcaaatctcctggcctagccccagttctccagcacttgagcacactgcccaggggaatggagatgaggtctgtagtctgtctgacyttgagtggtggggaggagccccactgcaacaacacagagaaggatatggcatgaattcctgtagtgacatgggaggtgggcaccgctctctatgagaccagactggaaatggtatggcctgatgcccctgctttctgctccagcgagtctcatggcccagcatgcctagaccagcttggcgatctgggtatggacagcttgggactagctagctgttcaagcctgccactggggtggacactggagggagacccactgggtcaggaatgtgggagttgggtgggccctaagatcacctgctgggcaga

SEQ ID NO: 665708 - DNA, 541 bp, Homo sapiens
tgtaagtcccaggcctgttgtttataagacttatggtacccttatgcaaatcacttcatctcttaggaactcaattttcttaattataaaataaacaatcttagatcaaatgacacctcaattctcttctaaagttaatattcaagcattttctctgggtcacaycaaaggcctgctccacaggctgttgtattagcacagcattatggtgagtccatgaagcatcaagattttcatctttgtgcattttcattgtctacaagcaaaagatgacagattgaaggcctgaattttattttcaaagtcacataaccaggccagagcttaaatgtaatgttgaaaaataaagtagtaatgtgctctattgaattggggcttggggcctataatagaaattattatactttatggggcagagattgagagttgttctcaaaaaaatattgggatttcttcagtcaaaatgaacttaaaaagattttcacacaatttcacaggtggctatagtagagttttgagtattttaaaccaatcatcaata

SEQ ID NO: 665709 - DNA, 442 bp, Homo sapiens
taatgttgttaactcatttggtttcctttgtcatcagttgcctattatgcatttaaaaatattctggctaggctcagtggctcatgcctgtaataccaacattttgggaggccgagatgggcagmtcacttgagcttgggagtttgagaccagcctaggaaacatggtgaagccctgtctctactaaaaatgcaaaaaattagccaggcatggtggcatgtgcctgtagtcccagctattcaggaggctgaggtgggaggattgcttgagcccgggaggtcaaggctgcagtaagctgagatcatgccactgcattccatcctgggcaatggaagtgagactttgtcttaaaaaaaaaaaaaaaaaaaaaaaaaaagtcattctgttgccagaatgacaaagggatccatggaacaaaatatctaagaatttctgctgtaag

SEQ ID NO: 665710 - DNA, 554 bp, Homo sapiens
aagggagagtaaaattggtccatctcaccctaactctaaaggatccatttgaactgaagatttgtgcttcccatcccacaacataagcctctgtaccaatagtttccagttcccagaaagaaacacttccatcaggagacagtaaataatttaaacactgcactttaaaccatgattgtcgtttagtttcttcagcttttttatactaatggatcagcaagcaaagaaagaagctaatgaactagtaatgtcatcagccttgattaccatgaaaaactagggttgctaccagataacgggggtgagggagaagtatgtctgaaacctggggattaatttgggtatcctttccttcttccatgcccagtgatggcaaacaggcaatcacagaaaccatggcccaccaaaggccaggcaactacaggctcaactccctatgcaaactcttatgctagaaaaatgttgttcataaataatttaaaatgttgaaaaaagaggaagaattaaataaaggaaaaagygaaacaaaaatgaagcaaagcagaaagggttag

SEQ ID NO: 665711 - DNA, 624 bp, Homo sapiens
attaattagtgctggctatcattttgatgaaataagataatgttggtggagaatcgtctacaaagtaagtgccttattatatagaatcagtaaaatttgagtcattcatagtgatatcagatccttttttattatcaaataaaaacgtgaacctttttgctctttttttcccattggctactaggaactcagagctagatttaatgctcaattgtaatasgtgcgcaaccttacgctgttggatttatgcatgtatataaaatgctacaaccatcttctgtactataaaatgctacaatcctcttttgaaagtaggcaggctatagataactttttttttggtagtagcaatatactaagaacaaaatattttaaaaacaaaaatatgtgactttttttcctttttttgtaaggcaggtcgtactcgagatatattcatcttactgtgttacctgtgttacagaaacaacttctgtaggagtcagacattcttctagaaggaaggaactaactgaaataatacttcaaaaacactcactatttaagtaactgaagatctttaaagttttacacactattttcatgttttaatgacttcattctcctctcactaaagctacttcc

SEQ ID NO: 665712 - DNA, 624 bp, Homo sapiens
attaattagtgctggctatcattttgatgaaataagataatgttggtggagaatcgtctacaaagtaagtgccttattatatagaatcagtaaaatttgagtcattcatagtgatatcagatccttttttattatcaaataaaaacgtgaacctttttgctctttttttcccattggctactaggaactcagagctagatttaatgctcaattgtaatacstgcgcaaccttacgctgttggatttatgcatgtatataaaatgctacaaccatcttctgtactataaaatgctacaatcctcttttgaaagtaggcaggctatagataactttttttttggtagtagcaatatactaagaacaaaatattttaaaaacaaaaatatgtgactttttttcctttttttgtaaggcaggtcgtactcgagatatattcatcttactgtgttacctgtgttacagaaacaacttctgtaggagtcagacattcttctagaaggaaggaactaactgaaataatacttcaaaaacactcactatttaagtaactgaagatctttaaagttttacacactattttcatgttttaatgacttcattctcctctcactaaagctacttcc

SEQ ID NO: 665713 - DNA, 535 bp, Homo sapiens
aaattttctgattaattgaacaaaaatcatcccaattcctttgtatttaagaataccataattttgataccacagtaaaaattgcttttttcttctttgaatgtattctaatgttgttagtataaattataagaatcaatattagagagcactcttttcttcataatgaatatataaagagtaaactttctttttcagctttaagctctctttgcaggcttagattttattctggtttatagatttgcagtttgattaatgccttttgttctaagtaaggacacttcttagtccagattacagttcctcagtttgctcacttaaattgcatttttcatagcagttgactgaattttatgaatgctgmgtgcttgtggtcatttgaactttttgttgttgttgttcccatgaaattataccctagaattatttggagctaaacaatctatgaatgaaaaagaaaagtcagccataagcctcctttttttcaactggcttttcggatgctaccaaataaaaccattaaatacattat

SEQ ID NO: 665714 - DNA, 602 bp, Homo sapiens
acaatcaaaattctctcaaacttttctgaatcttatctcccattaagacgcccttacactaaccacagcaaccctctttctcatctcaaatttccttctaacataagcatgtaaatatgagctaaagtgctactgttataatctccaattcacttaacttatggggatcaaagtaaattatcatctattaagcagaactgtttgctggaatggaaacctgatttaggagtcagaaaacytgggttcaattcaattcatctattttcgaatctcacatgctgtcaagttgaagttctgaatatagtacttgtggttgaaaactctgaatttctcatcatattagtagtaattgattcaaagatctactaaaatgcactgagaattcaaaataccctttatggttcatgtcaagatgtgccaactacaaaatgctatgaaatcaatataaccttggaagtaaaactgcagtttgctaagtaaatttcaggagatttccacaacagaggtcacaaatttagtgacatttttgacacaaaataaaagacatgaactacttttccttaatacacaaaggattttaaattattttttggaaatatcat

SEQ ID NO: 665715 - DNA, 566 bp, Homo sapiens
tgatatagcttattgctcctagactacaaagctgtgcagcatgttaccgtactgagtgctgtaggcaagcataacacaatgttaagtatttgcatatctaaacatagaaagcatacagtaaaaatacaatataggaaattttttaaaagttacacctgtttagggcacttaccatgaatggggcttgcaccactggaagctgctttatgtgagtcagtgagtgagtaagtggtgagtgaatgtgacggcctaggatactactgtatgcaactgtagactacaaacactgtacacatactctacactgaatttatttttaaaaaattcttttctcaataataaactaaccttagcttgctgtaactatttcgctttataaactttttaatttttttttaactttttgactcttttgtaataacacttagcttaaacacaaacacatcctaaaaatgtacaaaaaatattttctttcttcatatccttattccatgagttttttttctatttaattttttttttactttttaaaytttattgttaaaaactaaaacccaggctaggtg

SEQ ID NO: 665716 - DNA, 507 bp, Homo sapiens
gctcattccttcccttccctctggtctctgcttatatatacccttaccagagaggccattcctgctggcctgactactctatatgaagagaacacttcccacttacacctgtcactcttcttcctctttcctggttttgtttccccttcagagcattaatggttacctgacataatcatttgccccctgccactagaatatgagctccatgaaaagagagagacattatctgctttgaccactggcacaacctccatcacccagaacattatctcacacatctamtatgttagttcttccaattagtatttttttatgttttaacatctctaaattggggctgcatcttataacatgcaacattttgtctttcttagtagtccataaaacagtggtctgtatcgtaattgacatcttagacacaataaaatatggtagtttgcattcaaaacatatttcacaagaccaaataaatcccattttttatattttcagaagaagtatggg

SEQ ID NO: 665717 - DNA, 549 bp, Homo sapiens
ccaagttcccaggaagctaggccaagggttgattcaggtgatgttcccactgtgtcacactctcaaccctcctatagttgtaaaagtactcactcctttaaatcttctcccacctcagagtggatgaggtttgtttcccaggatgctccgtcaatatttagagcaacctctttttttcctttctcattaaacwgttataaatctagtgcccgggtgccaaatcatcaggtccaaggtccccacagccatctcctaggattcttcggagcccttcaagaattggaactcctaatgcctaacagagtgcccccagaatttatgagatggttaggcaaatttatgtgcacctgaacctcactgtataaccatcagtgtcaagattatatgaacaactagtcaattgtaggtgacaatgatcatacacacacatttaaaactattttgatactgtgatgtgtttagtcttctttgttctaaatatttgacccaagccatctttcaccttaacttttcttaagttaaaacacttagttttttacatagtttttt

SEQ ID NO: 665718 - DNA, 549 bp, Homo sapiens
ccaagttcccaggaagctaggccaagggttgattcaggtgatgttcccactgtgtcacactctcaaccctcctatagttgtaaaagtactcactcctttaaatcttctcccacctcagagtggatgaggtttgtttcccaggatgctccgtcaatatttagagcaacctctttttttcctttctcattaaacagttataaatctastgcccgggtgccaaatcatcaggtccaaggtccccacagccatctcctaggattcttcggagcccttcaagaattggaactcctaatgcctaacagagtgcccccagaatttatgagatggttaggcaaatttatgtgcacctgaacctcactgtataaccatcagtgtcaagattatatgaacaactagtcaattgtaggtgacaatgatcatacacacacatttaaaactattttgatactgtgatgtgtttagtcttctttgttctaaatatttgacccaagccatctttcaccttaacttttcttaagttaaaacacttagttttttacatagtttttt

SEQ ID NO: 665719 - DNA, 518 bp, Homo sapiens
aagaagtaaaattatctctgtttgcagatgatatacggttacatgtagaaaactctgaagatgacacacacgcacacacaatatacaagtaataaatgatttctgcaatgtcaaagaatacaaaagcaacaaaaaaatcacttgtttctatacactaacaataaccaatctgaaaataaaattaagaaaaacatcccatttactatagcatcattctaaaattcatatggaatttcaagggactctgaaatagccaaaacaatctggaaaaataaagtttgagacctcacactttcctgatttcaaaacsttctacaaagcaacagtaattaagacgctgttgtactagcatgaagacagatacatagaccaattgaacagaaaacgagccaaaaaataaactcttgaatatatgaccaaatgatttttgacaaaggtgtcaagattacataatggtaaaaggacagcatcttcaacaaattgtcttgggaagactagataaccacatgtaaaagaat

SEQ ID NO: 665720 - DNA, 590 bp, Homo sapiens
gcttcttacatttttagaaacacaaaggttcgtttttaaattcctctatttttaatcttctgtcacagtgataagctgtgaattttaatttatcactttaccacttcttcaaaacaagaaaaaagccaaggaatttatttctgaaggataaacacaatamggtttctgttgtaatacgcatctttaaaatgtagaactgtaattatttcaaagagtgcaccaaaattagcacttactggtcaatagattttgtttctcttaatttttttctttaaagtagaatttcatgcagaacttacaaatacatgtagcaaagcacaaatgcttttaaattatttcaagagaattaatcaatacaagaaattctattatcaactgaaattctaaaaataaaattcaattttacagttataaaacataaatattaggtttagagcaaataatgaatacaatagattatgaactcagtgtgttgaaggatttgctgatgaagtaaaatgtcatgaataaacaaatacgaactttatgagatgtgtctatcaaatcatgctctgtttctgaaattacacagaagcatgaaatagttagaa

SEQ ID NO: 665721 - DNA, 590 bp, Homo sapiens
gcttcttacatttttagaaacacaaaggttcgtttttaaattcctctatttttaatcttctgtcacagtgataagctgtgaattttaatttatcactttaccacttcttcaaaacaagaaaaaagccaaggaatttatttctgaaggataaacacaataaggtttctgttgtaatacgcatctttaaaatgtagaactgtaattatttcaaasagtgcaccaaaattagcacttactggtcaatagattttgtttctcttaatttttttctttaaagtagaatttcatgcagaacttacaaatacatgtagcaaagcacaaatgcttttaaattatttcaagagaattaatcaatacaagaaattctattatcaactgaaattctaaaaataaaattcaattttacagttataaaacataaatattaggtttagagcaaataatgaatacaatagattatgaactcagtgtgttgaaggatttgctgatgaagtaaaatgtcatgaataaacaaatacgaactttatgagatgtgtctatcaaatcatgctctgtttctgaaattacacagaagcatgaaatagttagaa

SEQ ID NO: 665722 - DNA, 633 bp, Homo sapiens
attactttttctccctgtacttttctttttgttctctctttagttcaagtaggcaactagattgtgctctttactcaagataaatacggaacaaagaggacagtagcttacaatttttctattatcttccaaagcctgatctctggagttttatagaggggattaagagtagaggatccccaaacattgacagtgtattagtcagaaacatgaaaagaaaaagatttcctcccaggagaaaaaaatacaagggatttcttctgggtggagaaagagagagaaagacagagacagagagagagacaaagagagaaaaagaattctgtgggtctacagaatatggaagagcccatcagtaaaaccatcagggtaggcagcaaagcccctgaaaggtaagaactgtaggcagtagaaaggcagacaggaacacagagagccttgctgaagattgtggaggcttaataagcctgtggactgacragctttgtaaacaaggatgataaatatctcattgacaatcagtgtaagaaaaggctgtggatcctggaggctcactcctttccaccctctgtgatgtggctggaactatggcagacactggaggactctctctctgtctctctagtttgaggt

SEQ ID NO: 665723 - DNA, 332 bp, Homo sapiens
ttaccaaggcaacaaaatgtttccagaaatcctcccagaaatttatttcatcttatttctcattcgccgtaattgagtcaggtkgccagccctcacttcaaggaaggccggataagtaggtgacagcctgaccataaatggcttagagtctcagccttagactaatcatgatacaccatgatacaccatctggaactgggcacgggatggggcaagaaagaaatgcaaagtaaatattgactttaaaactaaaaggcttattatgtttctctatttcttaaattaaatgtaagcttcttgagattatatctgtttcactattttattccccc

SEQ ID NO: 665724 - DNA, 565 bp, Homo sapiens
ggcactccttttcccttttctcagtagtgtaatggagatatcattttttaaaatattttcagatgcattttgatatcatgtaaataacattgtcctgtgactcactgcccactccttgacctagaaaggactgacaccaactggaacagtatacttactgctcagcactgactgagaaattagatttttaaaaaatccctaagaagataatggtctagaaagcaagccttgacagaaaaagaaactctttttttttttttttttgaaacagtgtcttgctctgtggcccaggctgaattgcatcatggcycaccacagcctagaactcctcaactcaagccatcttcctgcctcagcctccccagtagctggactatgggcaggtgccaccacacctggctaattttttactttttcttctgtagatacagggtcatgatatgttgcccaggatggtctcgaactcttggcctcatgcaatccttccacctaggcctcccaagtgctgggattacaagcatgagccactgcacctagcttttgtaatttatttagttttttagag

SEQ ID NO: 665725 - DNA, 603 bp, Homo sapiens
tggtcaaagaataggcccaggtaaacatcctgcatgactcagtgagtttataacataggcgcacaattccatgtaaaatgtaaacacagctatgtagtcataacatgggaaggccatcacttggctctaggccactattgtctgtaaaaggtataattgccctgctgacacggtacaggcatactcacacccagagagagaaagagatagagggccaaaacggtccatctttgaagacggacagtggggagccaggacacagctcrgcttatttgcacccagagggaaagatttaagctgctgaccctgaagtcaagagagagccagctgtgcagctgtgcatgagagtggccagagcaggcagccacagagacagggacagacagacagcgtaagagggctactaaataaagccatatttcacctacctctggacccccgagtgttctttcagctatctgtcactcatccacccatttccttccagacctcagcatgagctggaacccgaccctggacctgacaaccatggtggtgccaaatctacaagggtgaccaagctctgcctgatgcaagaaaataaagtgcgattttgtctgccac

SEQ ID NO: 665726 - DNA, 560 bp, Homo sapiens
ggttttaaaatatcatgaaatccattgcaaaggtgaggtctaattctcttctccttaagtgtgggtggatttagtgacttagaatatggcagaagtatcagcttgtatctcctgagactggatcataaaagacagccttcctacttgttctctctcttccttggatggctcattctgaggaacactaactgctatgtcatgaaaatatagcctgtattaatcagcttggtctctcacaccataggctgtgtgacttaaacaacagaaattgatttttcacagttctggagactgggatgttcaagagcaaggtgctaacctattaagttcctggtgagagttcttttcctggcttacagatagccaccttcttgctgtgtcctctcatgggagagctctgttgtctcttcctctttttataagagcatcagcctratcatattagggacccatccttaagacttcatttaacctttttcacctcctcacaggccctgtctctaaatacagtcacatttggggttagtatttcaacatataaatttcagggggacacaaag

SEQ ID NO: 665727 - DNA, 625 bp, Homo sapiens
caaggtgctaacctattaagttcctggtgagagttcttttcctggcttacagatagccaccttcttgctgtgtcctctcatgggagagctctgttgtctcttcctctttttataagagcatcagcctgatcatattagggacccatccttaagacttcatttaacctttttcacctcctcacaggccctgtctctaaatacagtcacatttggggttagtatttcaacatataaatttcagggggacacaaagatgcagtctataacacaaccctgtggaaaggttaatgtggkaggagactaaggcccctgccaacagccatgtgagtgaaccagcttgcaggcagttcttctagctccagtcaagccttcggattactgtacccctggtcaatatcttgaatgcaacctcataagaaatcttgaggcagagtcacccagctaagttgatcctatatatcttactgtaagtatctaaatatcttacaatgtgagaaaataaatacttattgtttaagttgctattttgggggaaaatttggcagcaatagatagtaagtggtaaaacaggaattagaagccagatttttctaactgttgaagtgtatatgctctttccactacc

SEQ ID NO: 665728 - DNA, 625 bp, Homo sapiens
caaggtgctaacctattaagttcctggtgagagttcttttcctggcttacagatagccaccttcttgctgtgtcctctcatgggagagctctgttgtctcttcctctttttataagagcatcagcctgatcatattagggacccatccttaagacttcatttaacctttttcacctcctcacaggccctgtctctaaatacagtcacatttggggttagtatttcaacatataaatttcagggggacacaaagatgcagtctataacacaaccctgtggaaaggttaatgtgggaggagactaaggcccctgccaacagccatgtgagtgaaccagcttgcaggcagttcttctagctccagtcaagccttcggattactgtacccctggtcaatatcttgaatgcaacctcataagaaatcttgaggcagagtcacccagctaagttgatcctatatatcttactgtaagtatctaaatatcttacaatgtgagaaaataaatacttattgtttaagttgctattttgggggaaaayttggcagcaatagatagtaagtggtaaaacaggaattagaagccagatttttctaactgttgaagtgtatatgctctttccactacc

SEQ ID NO: 665729 - DNA, 582 bp, Homo sapiens
taaccaaaacaacatagtactgggataaaaacagacatatagaagaatggaacagaataaggaatccagagataaatctatacatcaacagtgaactcattttcaacaaaggtgccaagaacattggggaaagaacagtctcttcaataaatggtgctgggaaaactggatttccatatgcagaaaaatcaaactagatccctctctctcaccatatacaaaaatcaaatcaaaatggattcaagattaaatctgagacctcaaactgtgaaactactaaacaaaaacattgaggaaactctctgggacattggtctgggcaaagatttatcaagtaataccccaaaggcacaggcaaccaaaccaaaaatgcacaaatgggatcacattaagttaaaaagcttctgcacagcaaaggaaacaatcaacaacgtgaagagaaaacccacaaatggggagaaaatattygcaaactatccatctgacaaggaattaataaccagaatatataaggagctcaaacaattaaataggaaaaaatctaataatctgattttaaaatgggcaaaagacctgaataga

SEQ ID NO: 665730 - DNA, 575 bp, Homo sapiens
gagaacccccatgcactgttgaagggaatgtaaattagtacaaccactatggagaacagcatggaggttcctcaaaaaattaaagacagaactaccatagaatccagcaatccactgctaggtatattcccaaaagaaaggacatcagtatgtcaaagcaatatctgaacgcctatgtttactgtagcactagtcataataggcaagatttggaagcaacctaagtgtccatcaacagatgaatggataaagaaaatgtggtacgtgcaaaccayagaatactattcagccatataaaagaatgagatcctgtcatttgcaacaacatggatggaactggagtcattatattaagtgaaagaagccaggcacaggaagacaaacatcgcacattctcacttatttgtggaagctaaaaattaagacaattgaactaatggagagagacagtagaaggatggttaccagagactgggaaggatggggtcggggaaggtggggatggctaatagatacaaaaaaatagatagaatgactaagatctagcatttatagcacatcagggtgactacagt

SEQ ID NO: 665731 - DNA, 643 bp, Homo sapiens
gaaggtggggatggctaatagatacaaaaaaatagatagaatgactaagatctagcatttatagcacatcagggtgactacagtcaacaataatgtattgtacatttaaaaataattaaaagcataattagattgtttataacacagaaaaattataaatgcttgaggttatacattctacaaattttgcctmaattaaatccacagatgatgtgactccagagcatttatataagaccactacctgccccagctgaatgatggctgacaggagatgggggaagacaccttgtccttgcttttagccatatgtagtccctacacatgacttactctaggttataaaggctgaccactgagtcaggaaacacaaatacagaataaatactttattggcaacacattataatatacattaaaataatagtatctgtatttccaaatgctatggccaccctgtacataaaacagtgtgaataattatagtccctatgctctgagagtcgataaactaaaataaataaatacttgttgcagataaaagcacaaaattggcaagaaaatttagccaaaataaccatgtcaaactcatagctaaaaattcaaaagaaaaatgtatgtgtcagcaaatatgtccagtttt

SEQ ID NO: 665732 - DNA, 658 bp, Homo sapiens
ggattttaataatcaagtggrcaggatgacccattctgtggataccactcagccttttttcccagccaactctgcatccacccaatgggcccatgaacaaagtggccatggtggcagggatgaaggtttcgcatgggctcatcaatatggacttccactcaccaaggctgacctggctacagccaatgctgagtgcccaatttcccatcagcagagaccaacactgaggcctcaatatggcaccattcctcagggtgatcagccagctacgtggtggctggttgattatattggacctcttcatggaaagggcagaggtttgttctcactggaacagatatttactccagatatgagtttgtctatcctgcatgcaatgattctgccaagactaccacccatggactcacggaatgccttatccaccgtcatggtattccacacagcattgcctctgaccaaggcactcactttatggctaaagaagtgcagcagtgggctcatggtcacgggattcactagtcttaccatgttctccatcatcctgaagcacctggatgcatctggttgtgcactttgcatagaaggaaaaacgcccagatgtgcgatctgatagatctgataagcatctgatagaacggtggaatggccttttgaa

SEQ ID NO: 665733 - DNA, 658 bp, Homo sapiens
ggattttaataatcaagtggacaggatgacccattctgtggataccactcagccttttttcccagccamctctgcatccacccaatgggcccatgaacaaagtggccatggtggcagggatgaaggtttcgcatgggctcatcaatatggacttccactcaccaaggctgacctggctacagccaatgctgagtgcccaatttcccatcagcagagaccaacactgaggcctcaatatggcaccattcctcagggtgatcagccagctacgtggtggctggttgattatattggacctcttcatggaaagggcagaggtttgttctcactggaacagatatttactccagatatgagtttgtctatcctgcatgcaatgattctgccaagactaccacccatggactcacggaatgccttatccaccgtcatggtattccacacagcattgcctctgaccaaggcactcactttatggctaaagaagtgcagcagtgggctcatggtcacgggattcactagtcttaccatgttctccatcatcctgaagcacctggatgcatctggttgtgcactttgcatagaaggaaaaacgcccagatgtgcgatctgatagatctgataagcatctgatagaacggtggaatggccttttgaa

SEQ ID NO: 665734 - DNA, 658 bp, Homo sapiens
ggattttaataatcaagtggacaggatgacccattctgtggataccactcagccttttttcccagccaactctgcatccacccaatgggcccatgaacaaagtggccatggtggcagggatgaaggtttcgcatgggctcatcaatatggacttccactcaccaaggctgacctggctacagccamtgctgagtgcccaatttcccatcagcagagaccaacactgaggcctcaatatggcaccattcctcagggtgatcagccagctacgtggtggctggttgattatattggacctcttcatggaaagggcagaggtttgttctcactggaacagatatttactccagatatgagtttgtctatcctgcatgcaatgattctgccaagactaccacccatggactcacggaatgccttatccaccgtcatggtattccacacagcattgcctctgaccaaggcactcactttatggctaaagaagtgcagcagtgggctcatggtcacgggattcactagtcttaccatgttctccatcatcctgaagcacctggatgcatctggttgtgcactttgcatagaaggaaaaacgcccagatgtgcgatctgatagatctgataagcatctgatagaacggtggaatggccttttgaa

SEQ ID NO: 665735 - DNA, 583 bp, Homo sapiens
aatccaatgtagattttataaaatagctgttaaatgtcaagctcctgaaaaccaaaattattaagtcttcatttataagaggatatttttagtgaataaaatattcaatgtgaaaagatctttatttgtacaagtaacagttagtgaactatttttaaagtgaattatcaaaggatctattttgttctgtattttctaaaaatgttagtaggagtaatttagtgccaaatatttttaaaagaaaagggcaaataatttatttaaagttttttctgaattaagatcaacttcttagtgaatgaagaatagctaaactattattaaactctatgtttttaagtatctgttcccatacagaatgggtattctttgaatccaaaatraacttctcttgtttgaagaaaaatgttaatataaccactactgtaaattttattcatgaaaagccatggtgtttagttacatacaccatcccaacaacaaatccaagaaactgaattcatttatatcttttcaattacattttctaatagcacattgtatacaaggaaaaaaatagtaaagagaatgatcattaaaaata

SEQ ID NO: 665736 - DNA, 491 bp, Homo sapiens
gaacagtgcctgacactattagctatactttttttcatttactaagcaattactttatataaagcccttttcatgattcaactcctttaatctaacaataacaacaaaaaaaaaaaacataagaaaaggctatcaggatgggcatggtggctcacgcctgtaatcccagtgctttgggaggccaaagtaggcagatcactggaggctaggagtttggagaccrgtctgggaaatatagtgagaccctgtctctataaatgtttttttaaaaaattagccaggcttggtggcatacacctgtagtcttagctacccaggaggctgaggtgggaggattacatgagcccaagagttagaggttacagtgaactatgatagcaccactgtaccccagcttgggtaatagagcaagactctgtctcttaaaaaaaaaaaaaagctatcattattctcattccacagatgaggaaaattaagttcagatgaagttc

SEQ ID NO: 665737 - DNA, 665 bp, Homo sapiens
tgtcctcatacctcaggccaaaggataatataggagccctggaaaactgcattctcccttgcagttttcctatactctgcccttatccttggaaatattctttttactaagtactcttgaaattaaccagtttgaggatgccaattgtttccaatacagctggcattttctgagggctgagtatgccctattcagaatatgaacttattcaaagttctcagtttatatgaaaacactgacattcatgggattaataacaagcccaggcaaagattaacaatggctagatgaggagtagagtggtcagacagcatccattcagcctcacaccagtgctcactggcaattgtgtaaggtgaaggcatagtcacagaacttatgagaacagtgaatgtggtagatacattacacagattwtaaaatgtgaggaaagcaaaacattttcaggttgatatgtcatgcttcttcatgcttataaattatatttccatggtgacatcaaccttttttgcatatggtattccacttcgattgaagctttaagccattttttggttgtaattataaaatataaagaaagagatgcttgctacaataaaaactgcctaaatggcaaatctaagctttcagagaggtaccatctgtttttcctcattgagaggtat

SEQ ID NO: 665738 - DNA, 665 bp, Homo sapiens
tgtcctcatacctcaggccaaaggataatataggagccctggaaaactgcattctcccttgcagttttcctatactctgcccttatccttggaaatattctttttactaagtactcttgaaattaaccagtttgaggatgccaattgtttccaatacagctggcattttctgagggctgagtatgccctattcagaatatgaacttattcaaagttctcagtttatatgaaaacactgacattcatgggattaataacaagcccaggcaaagattaacaatggctagatgaggagtagagtggtcagacagcatccattcagcctcacaccagtgctcactggcaattgtgtaaggtgaaggcatagtcacagaacttatgagaacagtgaatgtggtagatacattacacagattttaaaatgtgaggaaagcaaaacattttcaggttgataygtcatgcttcttcatgcttataaattatatttccatggtgacatcaaccttttttgcatatggtattccacttcgattgaagctttaagccattttttggttgtaattataaaatataaagaaagagatgcttgctacaataaaaactgcctaaatggcaaatctaagctttcagagaggtaccatctgtttttcctcattgagaggtat

SEQ ID NO: 665739 - DNA, 638 bp, Homo sapiens
taattaattctaccttgcagacactatgacatccaaatatctgttcccagtaatggaacagaatagaacaattttataacaattttggtgtagaaatttaacatgagtgtattaaaacggattcccactttttccagaatttgaaggtaggaggaaacagtccttttcttttttcctcttgaagttcaatcggcattttgttttaaattgaggtaaaattaacatataaaattaaccatcagccattgtaaagtgtacaattcaatggtatttagtaaattcacggtgttgtgcagctatmactgctaactagttccaagatattccatcaccccggaaggaaaccctgtacccagataagtagttattttgatccttatttacatttactctctaatttctctttgaaaaagaataaaagaacctaagtttaaattacagcataagaacttgatgtgttttcatttcttctgcaacttgttgattcacaaaaattggtaaagatttgaagctgaaatgaggcgagtcttagcaaaatgaaaccaggattgaaagtcctggaaggaagaaacccaaaaagagattgaggaaaaaatcaaaataattcacaattctgtccaggccccatccttgtcaga

SEQ ID NO: 665740 - DNA, 578 bp, Homo sapiens
ccacccctgctcttctctcacaggaagaaagtaagtacagtaatgtaaaggaagacttggagtttacaatcagaacctggaccctaaagaacagtgactgcaaaggcaaagaaagtaaaaaaggaattggccattagacgttcctgagcatccaagatgaacattttgtagtgcaaaaagacttttgtgaaaagctgatacctcaatctttactactgtatttttaaaaatgaaggttgttattgcaagtttaaaaaggtaacagaattttaactgttgcttattaaagcaacttcttgtaaacatttatcattaatatttaaaagatcaaattcattcaactaagaattagagtttaagactctaaacctgatttttgccatggattccttctggccaagaaattwaagcacatgtgatcaatataacaatataatcctaaaccttgacagttggagaagccaatgcagaactgatgggaaaggaccaattatttatagtttcccaacaaaagttctaagattttttacctctgcatcagtgcatttctatttatatcaaaaggtgctaaaatgatt

SEQ ID NO: 665741 - DNA, 591 bp, Homo sapiens
aggcaactatgctgcttccaaaactcccagaaacaaagttttaattccgtgattagtattagtctttttagggatggagttgggttgggaggaacaactttttggtttaaaaaggatggggatattactggaattggccatttaaaagcatttattttttattaggcaggcatggtggtacccgcctatagtcccaactacttgggaggctaaagtgggaggatcacctgagcccaaaagatagaggctgcaatgagctgcaacaatcatgacactgcactccatcatgggcaacagagtgaaaccttgtctcaaaaaaaaaaaaaaaagcatttgctttgtatctaaaattaggtataatttatacatttgaatatacaaatatttattggaagtttactaggtgccagaaggaaacaaaacagtgtttctgatckcatggattttacatgatagtgagggaatgcaaaaataaaatcattaacaaataaatatgtcaggtagcattaaattttgagaagaaaaataaagcagtgaaggggaacagagcagcaggaatgtacccagtattttaaattgaatgatcaagga

SEQ ID NO: 665742 - DNA, 635 bp, Homo sapiens
ttgaaactagggctataagaatttgctgctgacttggatgtgagggaaggagagtaagggtgaggaagactccaaagtgaatggtgactggtggagctatttactaggatggactcaagagagtggagggggcagtgtggagtgaagagggaaggaaatcaagaatttgttcatctcaacttccaaagaggaaaaaggaaaagcctaatcttccactgttaaaaaggaagatgagaggtaatttttcattttacaaaaaaaaaaaaaaaaaaaaaaaaaaaggacctgtattcatagagtaacatccctatgtcctggcctattagaatatcgccattagaagactttttaaaatcaaggagcacattctcaattttagttggaagtscgatcacctcttggtaatttgactctccaaaggtcagactaaataaatccaggagcaaaggccttctgaaggtccatggcccctctcgtctgtgataaaactcaacccgcctgtaggtggaagattctacaccactgaggattctaattatcctgcctgtaaaagataatctcactggttaacttcacatgactttcttttttttaaatttgaaatgtgactaccttcagctccaggatgtgacagg

SEQ ID NO: 665743 - DNA, 635 bp, Homo sapiens
ttgaaactagggctataagaatttgctgctgacttggatgtgagggaaggagagtaagggtgaggaagactccaaagtgaatggtgactggtggagctatttactaggatggactcaagagagtggagggggcagtgtggagtgaagagggaaggaaatcaagaatttgttcatctcaacttccaaagaggaaaaaggaaaagcctaatcttccactgttaaaaaggaagatgagaggtaatttttcattttacaaaaaaaaaaaaaaaaaaaaaaaaaaaggacctgtattcatagagtaacatccctatgtcctggcctattagaatatcgccattagaagactttttaaaatcaaggagcacattctcaattttagttggaagtccgatcacctcttggtaatttgactctccaaaggtcagactaaataaatccaggagcwaaggccttctgaaggtccatggcccctctcgtctgtgataaaactcaacccgcctgtaggtggaagattctacaccactgaggattctaattatcctgcctgtaaaagataatctcactggttaacttcacatgactttcttttttttaaatttgaaatgtgactaccttcagctccaggatgtgacagg

SEQ ID NO: 665744 - DNA, 603 bp, Homo sapiens
tgataactcacctccttgatttttcatgattatatctgagtcaagtagtttaaaattaatctgtttttccttttccaatatccacctttctgccttttgacaaatggtttatacattttaaaaactgaatctagtaggattcacagagttactggtgctttactgttaatttttggcagctgaatcacaaggtcatttygtaatacctatcttgtcaaaggtggaagctgcaatgaactagagtgtcccatgttttatagatgctggagcagtgatgtcgagacaaaactctgtgcccgggggactacagagcacaaagaggatggatccagccctgtaactaccatttcttaatattatttccagcatataccactgactcatcactcaggccagcacgtcccaaactggatcaataggtggcacgcagggtaaaaagtgcagatggggaattcagagctcaaatcattttgcaaaatcttaggttcaagaacattgaccaggtttatttaccatgggacttctcggggcttttgatattctgacatctgggatgactctctgagagggagttctacagaataagaatggcatttcccaaac

SEQ ID NO: 665745 - DNA, 603 bp, Homo sapiens
tgataactcacctccttgatttttcatgattatatctgagtcaagtagtttaaaattaatctgtttttccttttccaatatccacctttctgccttttgacaaatggtttatacattttaaaaactgaatctagtaggattcacagagttactggtgctttactgttaatttttggcagctgaatcacaaggtcatttcgtaatacctatcttgtcaaaggtggaagctgcaatgaactrgagtgtcccatgttttatagatgctggagcagtgatgtcgagacaaaactctgtgcccgggggactacagagcacaaagaggatggatccagccctgtaactaccatttcttaatattatttccagcatataccactgactcatcactcaggccagcacgtcccaaactggatcaataggtggcacgcagggtaaaaagtgcagatggggaattcagagctcaaatcattttgcaaaatcttaggttcaagaacattgaccaggtttatttaccatgggacttctcggggcttttgatattctgacatctgggatgactctctgagagggagttctacagaataagaatggcatttcccaaac

SEQ ID NO: 665746 - DNA, 456 bp, Homo sapiens
tggggttaattgaggaaataccttccatggcaattcaatcaaaatggaaacatgaggaaccattaaaactgtgagtcaagaggactgatgtgactgggtttgcatgttggaaagactgccccataacagtgtgggataggcattgaaagaaagtagggttgaggkcaggagcagagtggacacactcaaaatatttgagtttgtttttttttttaactttaagttctgggatgcatgtgcagatcgtgcaggttacataggtatacatatgccatgtggtttgctgcacccaccaacctgtcatccaggttttaagccctacatgcatcaagtgtttgtcctaatgctctccctcccctcacccccgacaggccccagtgtgtgatgctcccatccctgtgtccatgtgttctcattgttctatatgaggggtttctatagcagttggcagtcagg

SEQ ID NO: 665747 - DNA, 552 bp, Homo sapiens
ttctggccctttatgcctcttctgtgattcaattagttcactgctgcttcttgcttcttacagtaattgttgactctcagcttcactcttcacctcaactgagctgggggccattcataaacatcaggttaacctagaagctttcttttgtctcctcttttgctagttcctcagagagggcatgaaaggagctgagccactctctggagcctaattctacatccttcaccttctattaagttacattctgctaccttggttaagactctgctgacttttaragccctcggctcttttagcactgaatttttgtccttattcatttatatagaagcggggtagacatttagggtaactttaaaccaggtatataataaagtattctaactcagagcaggacatagcacaaataaatcgaatgccccgaagggaatggaaaagaaaatctatttccagaatatttgcattctattaacaagcacttcaggtcaggtactcaacaactttgcatgcattatagcgctagatgtgttcccaaattcacttaggtga

SEQ ID NO: 665748 - DNA, 600 bp, Homo sapiens
cctggctaattttttgtacttttggtagagacagggtttcaccacgttggccaggctggtcttgaactcctggactcaagtgatccacctgtctcggcttccgaaagtgctgggattacagacgtgagccactgtgcccggccctccttcacttttgtgctccgatatctcattgccccaccctggtcccagccctggtaacaagggttaaatgaaaaaatccctgtaaatcatttagtgtctggcacatagcaagctttccacacaggctagccattattatcattttgtagtcgtgactctctgcttcaggaattgtgctagggatgcctaaaaccatgtcaatttccctttttaagcagatgcakcaggagatatatctatgtatacacacactatatagaacatatttttatacttcatatatattaaaatttatacctgtgactttaaccaagcattgtgccctttagtgatatttcactgggaggtcgtcactgattctggcgatgctgtcatttcttacaacatatttgtagctgcttgttatgagttccctgtagtaccttccttcaaccatcttcaccagaggaaattttt

SEQ ID NO: 665749 - DNA, 622 bp, Homo sapiens
tgaacaacttgtcatctttctgggagacctcggtgattctcagcatgctcccagccaagaacaacttgactggagatcagggcttcagctgcatcatttttctcctctcattcaccttcagatcgtgacaccttttcagtaacctagaaaacaaatatccaagaaatcygaatgtcactgcttaggcattataaacagctttagaacgtacctttctcccttaaatgactgcttgtaccaccaaagatgccgtgatgaaaacacatactacatatttgcatcttcattgttctggtcataaatttccagcactgctctgtggtcctgaatgcagaacatctttgttagcacagagtaggaatttaaatgcatctgggaaacaaaatcagtcaataacaatgttcttctacatcagatggagcttataaatgtgattaaaataccaacctataaaaacaatgtgcatataaatccttacaataagagcactttctagtgatagttttccaggatttttcattgtctcctcaatttctacaagtggacaaagcttaagagaatgatttctagatctttatcttataatgcaattttttatcaaataccagaacaatcatcagcc

SEQ ID NO: 665750 - DNA, 605 bp, Homo sapiens
ctaagtaggtcaataaagcctctcattgaattgtttgcctgcattatagctaacattttagagtagtgtttttcaaactctatgagccataggataagtctcttgacatggcatttagcagacaatggattcctcccctatagtttaaagggaagcatcttcattcataagaaagcatgggaaatatggcttacatgccaaaacattgtaaccatagcaggaattgccaactaggcaatgtacatccatggtttctcttagagtgaaaaatacctttttttcattcctaagagaattatactctaaatatgagaaaagtgcattctattctacctctcaacagacaaacaagaatatttgtaatttactataatttattcctgtcattttccctcatgaaatgtgtttggatgtgcttggctgatgttyattataaagctcactgcgcactgggactctgggctgtatatgcatatgttgtttacagaatccaaaggcctggaacacaatggtactcaaaaacatagctgcctcggggaaattctccagtgaccgaacaattaaagaatatgcccaaaacatctggaacgtggaaccttcagatc

SEQ ID NO: 665751 - DNA, 532 bp, Homo sapiens
tctctgccacagtgactcactgacacccctgagaatgttggattttctcaagtgtgttgacatagaaaaatatattgacaactgtctatttggaagcattcttaaattctctaactgtaacaggctaacttgataaattctagtcattggatttgctgtcacattagtaaggtggatggtagacgagttttcattatatggggaaaagggcctagaagtcagagatgcctcaagaaatgttaggctggttttttgtttgtttgtttgttttacaggatgtcactctgtmacacaggctggagtgcagtggcacaatcacagttgactgcaacctcaacctcccaggctcaagtgatcctcctacttcagcctcacgtgtagttgggatgacaggcacgtgcccccacgcctggctaattttaaaattttttggtagagatggtgtctccctgtgttgcccgggctggtttcaaacttctgggctcaagctatcctctcacttcagcctcccaaagtgctaggattataggca

SEQ ID NO: 665752 - DNA, 593 bp, Homo sapiens
gagaaatttaaaatgctcttttttaagttaaatgctgtaagttttagtgaacgtgacaatgaaatggtagataatgttctactcttggaaaaaacaagagaattctttattttgtcagaaagatctaacagccaaagcacttcccctttaattcacacagttaattcaaagcatcagttggtcatcatgctttaggacacaatgggacacatagaaactccctcctgatcaaaaggacgcatggagaacaaacacttcaaacttgcatcttaaaagtacagtcagccctccatatccatgggttttgcatccatgaattcaaccaacaatggattgaaaatattcggaaacaaaagtctctcctgaacatgtacagacttttttcttactattccttaaaccactggtccccagcctctttggcaccagggascagtttcatggaagacagttgttttccatggagtacaactgtctcctcagtgtctgtgggggattgattccacgattccctgcagataccaaaatccacagatgctcaaatccctgatataaaatggcatagtatcattaatgttatgttattagtaata

SEQ ID NO: 665753 - DNA, 593 bp, Homo sapiens
aggttgttttggtcaacactgactctaagaacaattagaaaagatgtggttggttaaggtatgtatacatatatgtttgaaaggatatgggggctagtggtcagtgagaaactacagaaccaataccaaaagagagaagtccagagagtttgagctgccttttccctcaactcagttgaaagcaatagtggtggctgagagaatcagaaacgagacaaaactttcagcattctgacctaatccaaatgacagaaattagagttcaggatctgacaaaaaagaggaccctagtacatttctcaggcttttggttgtgatctcaaagaactayagtctaggagtaatgtgaactagaaataggccagccatcataaagactgaagaccagcttcagatcagctcaatctctaattagattaaggtgatctgtccctaccataactgcctttcaggagaagagtaaattatatctggaagaagataatatcagttcaaacctcaaatcatttctatgattttccataagccatgtgtagcccttaatcaaaaatagccatacaaagatgagcaaaacacacacacacaaaagcaga

SEQ ID NO: 665754 - DNA, 593 bp, Homo sapiens
aggttgttttggtcaacactgactctaagaacaattagaaaagatgtggttggttaaggtatgtatacatatatgtttgaaaggatatgggggctagtggtcagtgagaaactacagaaccaataccaaaagagagaagtccagagagtttgagctgccttttccctcaactcagttgaaagcaatagtggtggctgagagaatcagaaacgagacaaaactttcagcattctgacctaatccaaatgacagaaattagagttcaggatctgacaaaaaagaggaccctagtacatttctcaggcttttggttgtgatctcaaagaactacagtctaggagtaatgtgaactagaaataggccagccatcataaagactgaagaccagcttcagatcagctcaatctctaattagattaaggtgatctgtccctaccataactgcctttcaggagaagagtaaattatatctggaagaagataatatcagttcaaacctcaaatcatttctatgattttccataagccaygtgtagcccttaatcaaaaatagccatacaaagatgagcaaaacacacacacacaaaagcaga

SEQ ID NO: 665755 - DNA, 419 bp, Homo sapiens
ttagttctttcttttttttttcctctccactccctttgactttttgtccatttgctaatttgtctaaatctgggacaatatcaagatctgaagattattgagagtctagccttttttttttatccttttggtcttttaaactgtatccaccaagggcttataaattaagttctgatgttttaattacacatkacatcatgtatttcagttacttttttaattatacctatgtctacacaggtacatttgagtttcttatcagagacattgtaagcatttgcatgatttaagttgaaaccatctgtgatcttattctttgatttttgtaattgatgaaatgtagacttacctgaaacatgaacaaaggaaaaaagaaagactaatatggagctaatgaaataagagcataaggaattgtt

SEQ ID NO: 665756 - DNA, 589 bp, Homo sapiens
ttcctagcaatggggtgggatcactgctagccgaattagaaacccttaactcctaatgcctaatgaccaaagatctgagtaatcaaaaagtctggactcctcgaagtttcccacagccaagctggttgtgacagagcctaaggctgatttcagcwaagctagacttgtgttcctttgtagcgaacactgcctagcaaatagaatgttaaaatatataagatgcagacctatttgatctcttcaggactatattgtaatcatggatacacatgatgcacatttcatatttccaaaggtttcttttggtttttattttattctttttgctcatcccacattctggaatgaagaaggccacagcatgacagtgcaaaaaggatgcagggacttcaagctgtctttaaaatgacattcttctttgtgcttttatgtttcttattgtttttctgtgcactatggcttcccaacatgctttgttatgaaactcttttcccttgtgtctaatgtactgaaatatcgttacagtctttgtaatgcacattgtctcaagaataaaatgaaatgtgagttttgggatatttgatgggtg

SEQ ID NO: 665757 - DNA, 589 bp, Homo sapiens
ttcctagcaatggggtgggatcactgctagccgaattagaaacccttaactcctaatgcctaatgaccaaagatctgagtaatcaaaaagtctggactcctcgaagtttcccacagccaagctggttgtgacagagcctaaggctgatttcagcaaagctagacttgtgttcctttgtagcgaacactgcctagcaaatagaatgttaaaatatataagatgcagacctatttgatctcttcaggactatattgtaatcatggatacacatgatgcacatttcatatttccaaaggtttcttttggtttttattttattctttttgctcatcccacattctggaatgaagaaggccacagcatgacagtgcaaaaaggatgcagggacttcaagctgtctttaaaatgacattcttctttgtgcttttatgtttcttattgtttttctgtgcactatggcttcccaacatgctttgttatgaaactcttttcccttgtgtctaatgtactgaaatatygttacagtctttgtaatgcacattgtctcaagaataaaatgaaatgtgagttttgggatatttgatgggtg

SEQ ID NO: 665758 - DNA, 634 bp, Homo sapiens
ttttaatggcattttgtgaaaccatcaattgaagcataagacacaattctttgtaaaatggcatttgtatgcaggttctttaaaatcactacatctcagagtataattatttcactgtacagagaagaagcctcttcttcagtgctgtcatttcacagacagcctccaagttcttaattcaaatgcaacaagccaaaaaactgctatccttctggaatgagtttttctgtttaatggataacataaggccccaaatccaatttctcatgcrtgtggtttaggtgcaacaaaagtgcttcttattttgactttcaaattaagtcactttgtatttaatgatatttaattcacaccatttatacaaagtgtgcaatattcctagagtcagagctctgatagcccaaaggcgactttttcctagtctttaatgtttggttttctactgctgtgactcagtggtagagaccctaatgaatgagttcactctcagcaacagcagagcaactcacaagggcagatatctccccctaggaagtgaaaattgatggtggcagggagggagcaaaaaatcatactcttgttatgtataaaacacagatatacacacagtaccaacaggtatacagtatatctg

SEQ ID NO: 665759 - DNA, 634 bp, Homo sapiens
ttttaatggcattttgtgaaaccatcaattgaagcataagacacaattctttgtaaaatggcatttgtatgcaggttctttaaaatcactacatctcagagtataattatttcactgtacagagaagaagcctcttcttcagtgctgtcatttcacagacagcctccaagttcttaattcaaatgcaacaagccaaaaaactgctatccttctggaatgagtttttctgtttaatggataacataaggccccaaatccaatttctcatgcatgtggtttaggtgcaacmaaagtgcttcttattttgactttcaaattaagtcactttgtatttaatgatatttaattcacaccatttatacaaagtgtgcaatattcctagagtcagagctctgatagcccaaaggcgactttttcctagtctttaatgtttggttttctactgctgtgactcagtggtagagaccctaatgaatgagttcactctcagcaacagcagagcaactcacaagggcagatatctccccctaggaagtgaaaattgatggtggcagggagggagcaaaaaatcatactcttgttatgtataaaacacagatatacacacagtaccaacaggtatacagtatatctg

SEQ ID NO: 665760 - DNA, 587 bp, Homo sapiens
gttggtctagaaatgcagatatgtaagagcatggttggactgggagtagattgctgygtcctgaactgcaactccctccagaaaactgtaaggcactggctttgcacaccaattttggtgtggcgaggttcactttccctactgaaacttgccaggcagaaccttgtaattgctgatggtcagtcctgaaagatcatagatacgatttttggcctgaactgggccaaatttttttttaccaaaatgagatcatattctttctcctttgtaacctgcctttttcaactaatgatttccaactctccttgaaaataaatttttttcttagcattttaatagatgctttgtctaaacccatatctaattaacaaccacatattacatcttaccatcagctactcaagtctcttctaatctagagtggtcccctttttattaaaaatacttgtatttttatatgtacatttaacatatacatactagttatacacacacacaccaccacaccacaccatatatatatatatatatatatatatatatatatatatatataattagtataccaataggagcaggggagaatg

SEQ ID NO: 665761 - DNA, 587 bp, Homo sapiens
gttggtctagaaatgcagatatgtaagagcatggttggactgggagtagattgctgcgtcctgaactgcaactccctccagaaaactgtaaggcactggctttgcacaccaattttggtgtggcgaggttcactttccctactgaaacttgccaggcagaaccttgtaattgctgatggtcagtcctgaaagatcatagatacgatttttggcctgaacygggccaaatttttttttaccaaaatgagatcatattctttctcctttgtaacctgcctttttcaactaatgatttccaactctccttgaaaataaatttttttcttagcattttaatagatgctttgtctaaacccatatctaattaacaaccacatattacatcttaccatcagctactcaagtctcttctaatctagagtggtcccctttttattaaaaatacttgtatttttatatgtacatttaacatatacatactagttatacacacacacaccaccacaccacaccatatatatatatatatatatatatatatatatatatatatataattagtataccaataggagcaggggagaatg

SEQ ID NO: 665762 - DNA, 512 bp, Homo sapiens
gttattgtgcaaaacttcatatccttctacaattgtaccattaatcataggttgtactgccagtaaagaatgcatatatatttcatgaaaacaaaaagaaatatttttaattttcttggcacattcctgaaaactgaaaattaaaaatatttagtatcgtgtctggaatttgttccttccggtgggttcttggtctcgctgacttcaagaatgaagtcgcagaccctcacggtgagtgttacagttctyaaagacggtgtgtccggagtttgttccttcagatgttcagatgtgcccagagtttattccttctggcgggttcatggtcttgctgacttcaggagtgaagccgcagacctttgcagtgagtgttacagctcttaaaggtggcgaatccagagttgttttttcttcctggtgggctcctggtctcactggcttcaggagtgaaggtgcagaccttcgcggtgagtgttatagctcataaaggtagtgcggacccaaagagtgag

SEQ ID NO: 665763 - DNA, 541 bp, Homo sapiens
tattcgctaaaaaacctcaggcttgaactgtcctaaatgaatctcacctgttaaatattgcaactgatattcactgtctttcctaattcacttagcagcttgttctggcaaacactaggtggaataccatgtccacaagtgagaaaaaaccatgttcaggcctaaagcagtacccaatctggggctcaatatatatttgtttgtagaccagcatcttttatcttcctttccaaataaggcttacaaaatacttttactagtaatgagatttaggagtagatatttcctttctttccagatggaattttactcttgctgcccaggctggagtacaatgrcacaatctcagctaactgcaacttccgcctcaagggttcaagcgattctcctgcctcagcctcccaagtagctgagattacagacacacaccaccatgcccggctaatttttgtattttaatagagatggaattatactatgttggccaggctggcctctaactcctgacctcaggtgatctgcccacctcagcctcccaaag

SEQ ID NO: 665764 - DNA, 490 bp, Homo sapiens
ccttggcctcccaaagtgctgggattacaggcatgagccaccacacctgaccaagggccctaattatgaattccaattttcttttcttttctttctcttttctcttgtcttctcttttcttttcttttctccttccttycatctcttttcttctttcttccttccttcttttcttttctttctttcttttttttttttttgtagatgatatggggtcttgcttcattgcccaggctggtcttgaacacctggcctcaagcaatcctcctgtcttggcttcccaaagcgctgagattgcagtttgagccatggtgcctggccatgaattccaactttcacactcactggtagtgtgattagagacaagttgctttacttctgtttccttatctgtaaagtaagaataacactggtagtaccctctttggtaattctgttgtatggatttgttcatttgcttatctggaatatttattgagctgcttgtgaa

SEQ ID NO: 665765 - DNA, 526 bp, Homo sapiens
ttgtagtggagcaggttcatatggattttcaagagcccattacgtacatttctctcccctttcacaatcagtgaccttacatttatagcttgacattggccgtggtgggaatatttacaccacagaaatcagcaaatgcttcaaatcagagttttaccacccctggagaactgggttgttaaatgtactattatgtccctagtaatattctaagaagygaagattagaacatataactttgtaaattacattttgaagcaagcacattcttctaggtgtgtttccagagatcctacttctactcttttacagtattaaaaactggagctgatgatcctcctgagttctatttcgaaacttctgtcttttctaaatcaatttcaggatatactggacaacaaagaaagcccaagcaatttgtcttcattcaggcctgtaaggatcacacctctctagcagtgaaagctacctcttcctgtagtttcatcgaatcctttttatttaaatagtttgttggcaataccat

SEQ ID NO: 665766 - DNA, 576 bp, Homo sapiens
tcataggcaagataacccatttttgctagtttaagtggaaaaaggattcattaaattattacacagaatctttggagaggccaacaattcacattttgatgtaattaaaatcacaccacagttggatatagcaggtacagagatttgacacactctgccartatctagatcctggacctctgccagtgctgtctctggagcataaacacctcctgccatcctcatcgcagtgattctatggggagccacttttcttgagtcattctcttcaaattcaaagtttcatacagcggtgggaaaaacctatgtcacatgtcagtattccacctgcaatggaggctgggaaaatgatatttgtctctcttacaaacatgaaacttaggatgtggagaacccccaaatctaggaaggatatttaaaagattctgggcaaacataaaatgtccactagaatagatattgaaaacccatgatgcagatgaaaaatgaaggcttagtgaatttctcaaagtaaagcctgacttcaaactcaattctacatggctccaaggcctaaagctatcatgcttagcagca

SEQ ID NO: 665767 - DNA, 576 bp, Homo sapiens
tcataggcaagataacccatttttgctagtttaagtggaaaaaggattcattaaattattacacagaatctttggagaggccaacaattcacattttgatgtaattaaaatcacaccacagttggatatagcaggtacagagatttgacacactctgccagtatctagatcctggacctctgccagtgctgtctctggagcataaacacctcctgccatcctcatcgcagtgattctatggggagccacttttcttgagtcattctcttcaaattcaaagtttcatacagcggtgggaaaaaccyatgtcacatgtcagtattccacctgcaatggaggctgggaaaatgatatttgtctctcttacaaacatgaaacttaggatgtggagaacccccaaatctaggaaggatatttaaaagattctgggcaaacataaaatgtccactagaatagatattgaaaacccatgatgcagatgaaaaatgaaggcttagtgaatttctcaaagtaaagcctgacttcaaactcaattctacatggctccaaggcctaaagctatcatgcttagcagca

SEQ ID NO: 665768 - DNA, 576 bp, Homo sapiens
tcataggcaagataacccatttttgctagtttaagtggaaaaaggattcattaaattattacacagaatctttggagaggccaacaattcacattttgatgtaattaaaatcacaccacagttggatatagcaggtacagagatttgacacactctgccagtatctagatcctggacctctgccagtgctgtctctggagcataaacacctcctgccatcctcatcgcagtgattctatggggagccacttttcttgagtcattctcttcaaattcaaagtttcatacagcggtgggaaaaacctatgtcacatgtcagtattccacctgcaatggaggctgggaaaatgatatttgtctctcttacaaacatgaaacttaggatgtggagaacccccaaatctaggaaggatrtttaaaagattctgggcaaacataaaatgtccactagaatagatattgaaaacccatgatgcagatgaaaaatgaaggcttagtgaatttctcaaagtaaagcctgacttcaaactcaattctacatggctccaaggcctaaagctatcatgcttagcagca

SEQ ID NO: 665769 - DNA, 576 bp, Homo sapiens
tcataggcaagataacccatttttgctagtttaagtggaaaaaggattcattaaattattacacagaatctttggagaggccaacaattcacattttgatgtaattaaaatcacaccacagttggatatagcaggtacagagatttgacacactctgccagtatctagatcctggacctctgccagtgctgtctctggagcataaacacctcctgccatcctcatcgcagtgattctatggggagccacttttcttgagtcattctcttcaaattcaaagtttcatacagcggtgggaaaaacctatgtcacatgtcagtattccacctgcaatggaggctgggaaaatgatatttgtctctcttacaaacatgaaacttaggatgtggagaacccccaaatctaggaaggatatttaaaagattctgggcaaacataaaatgtccactagaatagatattgaaaacccatgatgcagatgaaaaatgaaggcttagtgaatttctcaaagtaaagcctgacttcaaactcaattctacatggctccaargcctaaagctatcatgcttagcagca

SEQ ID NO: 665770 - DNA, 587 bp, Homo sapiens
agagctctctctatgcaaacaatgagcccctttttctttcccaacttagcttttaaattgctgattaattattctcagtgtcttagtaaaatattttttccaattgagtttaatagtaacattccaattatattatctttataaattttctttcctatttctcaaaggatggatctatattatgctgtcagcaaaagtattcacttctaccgggattccattacagttcaatacctgtgaaagtttaacaactggactgctacgtagtagatactatctgtccttcacctactgtctacaccaaagatggcrgtcctccttttagctggtgacagatgatcttagtctaaaatcccaaccccgtggctacagtcttagactatttctagcactaacagtcaccagatgggttctctggaagcatatattgactggagatgacaatatagtagattcctcaaggattgccactggcatcagcagctgtagtgaacagggaaagaagcaaaattgattagaagaaaaagttgcaatataatgcattatctacagaattcatggtttactctgaagagaattctgaaaat

SEQ ID NO: 665771 - DNA, 596 bp, Homo sapiens
aataaatttggagaaactccccagtgtcttctgttgtgcctctgatcccctctctgctttcctctactctgctctctgcagaggctgaccagtttagactcggcaaatgacctgcttggcctctgtcttakcaccaggtttttgaatatggagcactcagaagagtttgggaaatgggagtaaagtcagtgtccttaatttcctagtaccctctcttcagggttaccactggctgactgttttccgtaagacaaggtaactcttggcagcctgtacattaagatctccttttttggctctattcctctgtcttcaagttctcatcatactcttcttccctttacctcttcagtgtagtaacagaacctcattactagtccccagttaatgccatgataattttcttacatatggccacactttttaagtaatggttttattaaagtctccttaaattaccatttggatatgccatctctttcttgccaagaccctgaaggatacagcagctattggacagatgaggggaagcactcccaatatttcagcttattagctatgtacatttaggcaaattattcaacttctttaagcct

SEQ ID NO: 665772 - DNA, 602 bp, Homo sapiens
ggaaaaaatgtaaaatgaaacattaaaaaaaagaacatatgtatctccacttacatcattcacataaacaaaatgtcattgtgttggcaactatatgctctaaatgtggcttcaatttgaattttacaggagttttgatgttttacatgatgtaccatgtggttggaatctactttttatgtactagatttaaagaagctgatgcttttttaaaaatttttttggtgtatagatggaatatccagcattaattccccacctcccagaattatttatggcaattaggatgatacattaaaaaacagtaagtctttgcttaatgttttcaatcagttcttggaaactgtgactttaagcaaaatgacatataagaaaaccaattttaccagaggttaattgatataacaagagttaagtttgtaaagcacatttctggtttacaaaaaaaaaagagatcaccaaatttctaaacaaaaccaaaacacttctaatattaaacattgaaataaatgtgacctatacatgcctttaagaaagactaataaaaaatkataattctttacccagttgcttgtgaatcagtgagtaatggtggttgtagc

SEQ ID NO: 665773 - DNA, 557 bp, Homo sapiens
attcattcattcaagtgttcatttaaatattaarcatcactaagtgtgtactctcctagcattctgtagaggggtttacattgttataagagttccaggacaggatcaatcaagtggctaccttttgggtaaacatttaagtaaactagaatactattcatatgttcccatcctatttagaatcttaaggtatggaattcctccagtgtttccagaatccttacaacataccagaagcggtgttcagattgcaaaatcatgctaaatgtgggttacttaaccaaatcccctggttccatagagtttccttacttataaaatttattgactaaactgatgtaaaaggtatattttattttctgtttttttttttttaatgtaacctaattattttaactttgcgttttttttttttttgttttttgttttaaatggagttttgctcttgtcacccgggctggagtacaatggcaccatctgggctcactgcaacctccgcctcccgggttcaagcgattcttctgcctcagcctgccgagtagctggggttacagaca

SEQ ID NO: 665774 - DNA, 557 bp, Homo sapiens
attcattcattcaagtgttcatttaaatattaaacatcactaagtgtgtactctcctagcattctgtagaggggtttacattgttataagagttccaggacaggatcaatcaagtggctaccttttgggtaaacatttaagtaaactagaatactattcatatgttcccatcctatttagaatcttaaggtatggaattcctccagtgtttccagaatccttacaacataccagaagcggtgttcagattgcaaaatcatgctaaatgtgggttacttaaccaaatcccctggttccatagagtttccttacttataaaatttattgactaaactgatgtaaaaggtatattttattttctgtttttttttttttaatgtaacmtaattattttaactttgcgttttttttttttttgttttttgttttaaatggagttttgctcttgtcacccgggctggagtacaatggcaccatctgggctcactgcaacctccgcctcccgggttcaagcgattcttctgcctcagcctgccgagtagctggggttacagaca

SEQ ID NO: 665775 - DNA, 557 bp, Homo sapiens
attcattcattcaagtgttcatttaaatattaaacatcactaagtgtgtactctcctagcattctgtagaggggtttacattgttataagagttccaggacaggatcaatcaagtggctaccttttgggtaaacatttaagtaaactagaatactattcatatgttcccatcctatttagaatcttaaggtatggaattcctccagtgtttccagaatccttacaacataccagaagcggtgttcagattgcaaaatcatgctaaatgtgggttacttaaccaaatcccctggttccatagagtttccttacttataaaatttattgactaaactgatgtaaaaggtatattttattttctgtttttttttttttaatgtaacctaattattttaactttgcgttttttttttttttgttttttkttttaaatggagttttgctcttgtcacccgggctggagtacaatggcaccatctgggctcactgcaacctccgcctcccgggttcaagcgattcttctgcctcagcctgccgagtagctggggttacagaca

SEQ ID NO: 665776 - DNA, 637 bp, Homo sapiens
aacctcttcaaaattgccttatttccttaaaaaccttttttgcacttcaggagataggcaactgtgtgatgtcatcttgggagcagactgaaaaccacatcctaagcaaggagtctgttgacctgagttaattggatacctatcctgagatctgtgtagagtgagatgtggtaattgtattgtcttatcccaacataattatgcaattaacttgtatcaccagaatggactgtttgttaacacacaatttatttcaaaggtatcagtactcccaaagacctgcacacattttgtctggcaagatttgacrtgtaattgtgctgaaatgtgctttctagtgaatattcaacctctagtgaccatgatatttaaaaaagaaatgttctcagcatgaggagaaaagaaaggaaaatgactctctcttgaaaaatttaatcaatttacatacttctttcttgctcagcagttttacatttggtgatcctagttcagcaagcattttcttccctcttttgacatgcttgaattcaagctcctgcacaactttctttctttgcaacttattggtatctaggtaattggctacagaaggttttacatttgttttagtagacactgtagagaaaattaacagcag

SEQ ID NO: 665777 - DNA, 637 bp, Homo sapiens
aacctcttcaaaattgccttatttccttaaaaaccttttttgcacttcaggagataggcaactgtgtgatgtcatcttgggagcagactgaaaaccacatcctaagcaaggagtctgttgacctgagttaattggatacctatcctgagatctgtgtagagtgagatgtggtaattgtattgtcttatcccaacataattatgcaattaacttgtatcaccagaatggactgtttgttaacacacaatttatttcaaaggtatcagtactcccaaagacctgcacacattttgtctggcaagatttgacgtgtrattgtgctgaaatgtgctttctagtgaatattcaacctctagtgaccatgatatttaaaaaagaaatgttctcagcatgaggagaaaagaaaggaaaatgactctctcttgaaaaatttaatcaatttacatacttctttcttgctcagcagttttacatttggtgatcctagttcagcaagcattttcttccctcttttgacatgcttgaattcaagctcctgcacaactttctttctttgcaacttattggtatctaggtaattggctacagaaggttttacatttgttttagtagacactgtagagaaaattaacagcag

SEQ ID NO: 665778 - DNA, 605 bp, Homo sapiens
tcaccagaatggactgtttgttaacacacaatttatttcaaaggtatcagtactcccaaagacctgcacacattttgtctggcaagatttgacgtgtaattgtgctgaaatgtgctttctagtgaatattcaacctctagtgaycatgatatttaaaaaagaaatgttctcagcatgaggagaaaagaaaggaaaatgactctctcttgaaaaatttaatcaatttacatacttctttcttgctcagcagttttacatttggtgatcctagttcagcaagcattttcttccctcttttgacatgcttgaattcaagctcctgcacaactttctttctttgcaacttattggtatctaggtaattggctacagaaggttttacatttgttttagtagacactgtagagaaaattaacagcagtatcctgtatttgtatgggcaatagattttccattattccagtggttggaatatcacatttctgccctgaatcactgggagaaaacaagcccacccttcccttgtttcttcatttagacaaaaacatatatgtatatatgtacatacaatacccaaaatagtgtcagcattggatgctgccatt

SEQ ID NO: 665779 - DNA, 637 bp, Homo sapiens
aacctcttcaaaattgccttatttccttaaaaaccttttttgcacttcaggagataggcaactgtgtgatgtcatcttgggagcagactgaaaaccacatcctaagcaaggagtctgttgacctgagttaattggatacctatcctgagatctgtgtagagtgagatgtggtaattgtattgtcttatcccaacataattatgcaattaacttgtatcaccagaatggactgtttgttaacacacaatttatttcaaaggtatcagtactcccaaagacctgcacacattttgtctggcaagatttgacgtgtaattgtgctgaaatgtgctttctagtgaatattcaacctctagtgaccatgatatttaaaaaagaaatgttctcagcatgaggagaaaagaaaggaaaatgactctctcttgaaaaatttaatcaatttacatacttctttcttgctcagcagttttacatttggtgatcctagttcagcaagcattttcttccctcttttgacatgcttgaattcaagctcctgcacaactttctttctttgcaacttattggtatctaggtaattggctacagaaggttttamatttgttttagtagacactgtagagaaaattaacagcag

SEQ ID NO: 665780 - DNA, 588 bp, Homo sapiens
gtagttgaattacaaggcagaatattaagggcaataaaaatcagacatgaggtaaaatatttttaaatagatcaggttataaattaaagatgatttgtcagaaactagacataattcatctttattggaacaacaaagataactttaataagtagtttttagtcaattgtgtttttactttgaatatacgctcatggcatctaaaaggaataatgccaattcttttatggaaataccatttgargctgagaatggtcattctcatgagcatgtgttcatgatctatgttttgtatttaacatttgaaacaagctacaccattgattacaatagtatatgtcaatataggattaggtgactgcagcaaggtggcaaaatagaagattccttggcctcacttcccccacaaaaaaatatacctacaaactatccaaagacaagaataccaccctgaattcaccagaacttgagggagaagtggagaaatcccatgagccccaagaatcaagagatattgtgacttggaagagaaatgctcatcttagactgttactcctctcccatgccagcataacaccactcacagag

SEQ ID NO: 665781 - DNA, 540 bp, Homo sapiens
cccagccatgtggacctgtgagtccattaaacctcctttcctttakgtattacccagtctttggtatgtctttataagcagcatgagaatggactaatacaggtactaaacaaaaagacaagaaataaacaggaatagcctaagagatcatttgaattttggtataataaacatttggctcatgggaaggttgattgtatatactcttggtacatagacctgtgtttatctttgatggacttttagcagcatagttttcttacccatatgaagacctctcaaatatgtccagagtgtaattaaataaaaagttgacaaccaagttgctaggccattaactttatcttgacattgtggatttcttttatgctgtaatgtttgctataatctaatgtttctggtccttttaaattttgggggcccactgaaattcttatctcttttattctaaaatatttattttaaaaccccccttttgctcctctttagtaaatctttttgttaaacttgtatgaaaaatattgttaaaagaattactca

SEQ ID NO: 665782 - DNA, 379 bp, Homo sapiens
caagtcatttaactttgcctacttttcttcctctgcaaaatcaaggaccttgactgcgttatccctaaggtttctgctggttcttatatcccttagtcctaattacaagtaacttatccaatttctaataattaacatttatctgtctttactggattaggtgttaggtaaatagattgcctttatgttagtcatacattcctataggttagtcatatgtccctgcctagaatataactttttagtacagggactatgttccacacctgcttcatattcagtgtagcaataagaaaagtattggaaaaaataaatacataatacwcattaaagtgtagtaaactgatttcaagtatctcttatgtgtggctgtgtttta

SEQ ID NO: 665783 - DNA, 609 bp, Homo sapiens
tctgcagtgcctgttccaactgacagcagcagcttctaaagctgctgctgcctaatttaattaagctaataaaaaagtagaaaaaaatataaaatatttcacttacagactataataccttgaggaaacaggaatctaaaaatcaataaaacatagtggtagaagagaaaaagaaatttatctgtgcctgatttttcttggtagaagaaggatggtgactaaaattatccatatcacctttccaataawcccaggaacagagtctggataaaaagggcagctgcagggaggttttttttgcttgcctaagtaacattaagagaaaagacaaaaatgtcaaatgcagacatacatgttccatcaggaggtgctatggagcaatttaaaaaggattaatagccctgcattgcagctgaaatcaaacagggcattcccatatttcattttgtgttgttgaaaagctaataataagagaaaaatcttccgatgagatgagaattgctcctgaaatatttctaaaggaaacaaaccatcaaaacaatactcaaatgcatcatgcaaatttttgaaacgttaaggattttcaagaaggaaaattagaccacaaaa

SEQ ID NO: 665784 - DNA, 514 bp, Homo sapiens
ttgttgcaggttaacatttggggttaattgacatgtgaacactgtggaattattggccctatgaggacctttaataaggaaattgactctgaactctgcactaatccatttgtctcatcacagtcttataaggaaggactasactttccattagactgtcagttaaaattaccagaaacattttttatgatatctatgccatctctaattcttcttaggctcaactaacttcaaagtaggacaaaagcagagtgagaaagcaggagcactattagatccccaggggaaaaatgcgtgataagtcaggcagctgaagatggtgattgtaattagtatttactgtgaatattatttagattaaaaaacattttatttgttatttcagcactatcacatggggtggttaaacttgcagttatttacaataaaatcaatgtactgagaattatggtcacatagccagaaatactttttttcaaaaaattatttatcttctttatatagtgtctgtgtt

SEQ ID NO: 665785 - DNA, 524 bp, Homo sapiens
gattattatattgtatagaatatatatgtaggtcattatgagttaaggggatgatagaaggaattacaaaaggttacttattttatgttgggcaaccaaataatacctttctggaaagtgggaattgagctaagactataaggaaggataagagctgctgtttgagcatgaggggaaatgtattttggttaaaaaaaaaagccatgtataagttctgaggcaatgaagagtattgtatgttcaaagcaacaaaatgaagactagcatgacaaaagttattctaagtgggaggatatgtagctcgaggtgaagttggacagaaaggtagaaatcaaaaaagaggtaccttattaatcacaggaatttggattcgattttaaatataaaataaagccatttgagagttttaggctggrttagtatattatcctctctgtatttcaacaaagctatactttttatgatacggcatagtgctgcccaataaaaatgtatcataagccactaatgtaaccataatggaa

SEQ ID NO: 665786 - DNA, 524 bp, Homo sapiens
gattattatattgtatagaatatatatgtaggtcattatgagttaaggggatgatagaaggaattacaaaaggttacttattttatgttgggcaaccaaataatacctttctggaaagtgggaattgagctaagactataaggaaggataagagctgctgtttgagcatgaggggaaatgtattttggttaaaaaaaaaagccatgtataagttctgaggcaatgaagagtattgtatgttcaaagcaacaaaatgaagactagcatgacaaaagttattctaagtgggaggatatgtagctcgaggtgaagttggacagaaaggtagaaatcaaaaaagaggtaccttattaatcacaggaatttggattcgattttaaatataaaataaagccatttgagagttttaggctgggttagtatattatcctctctgtatttcaacaaagctatactttttatgatrcggcatagtgctgcccaataaaaatgtatcataagccactaatgtaaccataatggaa

SEQ ID NO: 665787 - DNA, 581 bp, Homo sapiens
taatctactcttggaggataagtgaatggaagcaattaagagtaatcctaaaatctctgggtttttgctatattttcctttttttaatttcacaaatcacccagtagcaacatgaaaaattagaaattaaattgtaaaatcgaaaattgacaaaactcgaaaatgactgctatccccacccaatcaaatccagtaaatatcaagcaagtgtgtggaacaaatagaaacaggagacctagactttcagacatgctaggattgctcaggaaatcaacaccagtgttgtcatatagaactatgcgacttactattttatttaaatatatttaatagacctgtttatatgactcattatgaattttcaaaacataactcaaagttaatggcacacactgaagtgcacaatcaatgatgacttsttttgctatatttggaaaggggtatgtagacttgtattaggaacttttctggtcccagtttgatttcaataagaagcaatagaagcaaagatgaataagagatgccacatgtacagtaaactgcctgctggtaatgtgaacatgagtattatgagcaatggt

SEQ ID NO: 665788 - DNA, 580 bp, Homo sapiens
ctatattcaaagtactgacaatgagcatgatatttacaactgtagaactaaaatataaataaatgtacggattgagatttcaaagaaacatatacatatttcaaatcttgataatgtaggaatgttataagtataaaagttgaaagaagaaatgctagagaagttgagagatggtaaagaacactgatttttctcatcttttattaccagtgatagaatatttttttaatttgataaggaaaacaatggagatataaagatagttaaaagattaaggaaaaactaagaaaataatagaccttgattgtatagtctttgagataaactctacccaattcttttttgtgtgttgtgtgtgtgtgtgtgtgtgtgcgtgtgtgtgtgtgtgtgtgatggagtttcactcttgttgcccaggctggrgtgcagtggtgtgatctgggctcactgcagcctccacctctcctgttcaagcaatactcctaactcagtctcccaactcagtctcccaagtagctgggattacaggcacctgccaacatgcccagctaatttttggtatttttaatagagatggggt

SEQ ID NO: 665789 - DNA, 610 bp, Homo sapiens
gaaaaggtactgaaggaaattaaacatccattcttaataaaaatataaatataatacaatgtatggatatttcattaatattaatacagaataaatatagtctgcatagtgcaaaatggaagaaatgctaggaaaaactgcattgaatttatgaataagataaagatgtccacaatcaccattattatttagaacaaatatagaagttctagccaatacaattatacaagaagaaaaatgaaattagaaaattcaaaaaaaaagaataaacattgttttcgtatatattacattatattgcrtatatattatttgtgtgtttgtgtgtgtatatatatatatatacgtgtatatatatatatatagtctgtgtgtgtgtatcaaccaaaacttttaataaaaaaatgacaattcaaaatttcagtaatgtcgctaggtatttccaagatgttctgtaaaatacattcataaaaagtctactgttacatacaggcttgtttacatacaggcttatttgatcatggaaaggacaaaagaagataattgaaatgttaggaaaagtaaaatagataaaattgtcatataatttaaaacattgctgtttggttct

SEQ ID NO: 665790 - DNA, 619 bp, Homo sapiens
tgtattggaatatgattatctgtaactcactgaaagtttttaatagacgttccttcagttataaaaataatgtataaaatatatgagaaacataattggctcaaatattaagaaaataatttccatattattttatgtaaacttttgatctcagagtctaagatatgtgcctagtatttaaatatgaagaaaataatttatttattggaaagagcacttgaatatggattcttgtcttgcttgtgctaatgctaattacttagtgatatttagtatatttatttctaatattaaatatatgttaaaggataaacagaacaaaatgacatatgtttcagttatctaattctgtgcaacaaaccaccgcaatacttagtagctttagataacaatcatccatattgtgacaaaacacagtttgggtggagtttgaaaggaatggkttttctctgatccatgtagcttcccatcaactggggtgaactgggctagaagacacccttctaagatggcttcttcaaatgcctagcaaagttgttggctgttgtctgggagctcatctggggctgtgatttgggaaggctcaattcctctccatcagggctttttgatgaagata

SEQ ID NO: 665791 - DNA, 579 bp, Homo sapiens
ttatttcatggttatattgatcctaggtagtgagcatagtacccaataggtagtttttcaatccatgacccccatcctctctycctgtgtagtagtctgtagtgtctattgttcccctgtttatgtacatgtgtgttcagtgtttagcttctacttttaagcgaaaacatgcagtatttgcttttctgtccctgtgtcaatttgcttaggataatggctttcagctccatccatgttgctatgaagaatgtgatttgattttttatggccacgtagtattccatggtgtctatataccacattttatttatccagttcttcactgatgggcacctaggttgatttcatgtagtggctattgggaacatcatcgtaatgaacataggagtgcatgtatcattttggtataatgatgtttattcctttgggaatatacctggtaaagggattgcttggtcaaaggttagctctgttttaagttctttgagaaatctccaaactgctttccacagtgcctggactaatttacctccccaccaagagcataagcattccctcttctccacagcctcagcagca

SEQ ID NO: 665792 - DNA, 579 bp, Homo sapiens
ttatttcatggttatattgatcctaggtagtgagcatagtacccaataggtagtttttcaatccatgacccccatcctctcttcctgtgtagtagtctrtagtgtctattgttcccctgtttatgtacatgtgtgttcagtgtttagcttctacttttaagcgaaaacatgcagtatttgcttttctgtccctgtgtcaatttgcttaggataatggctttcagctccatccatgttgctatgaagaatgtgatttgattttttatggccacgtagtattccatggtgtctatataccacattttatttatccagttcttcactgatgggcacctaggttgatttcatgtagtggctattgggaacatcatcgtaatgaacataggagtgcatgtatcattttggtataatgatgtttattcctttgggaatatacctggtaaagggattgcttggtcaaaggttagctctgttttaagttctttgagaaatctccaaactgctttccacagtgcctggactaatttacctccccaccaagagcataagcattccctcttctccacagcctcagcagca

SEQ ID NO: 665793 - DNA, 594 bp, Homo sapiens
gttttggctgttcggctcttttctggttccatacgaattttagaatgtttttttctagttctgtgaagaatgacgttggtcgtttaatagggataatgtcaaatctgtaaattgttttgggccacatagccaatttaataatactgattcttcctgtctatgagcatggatgtttcctcattcatttgtgtcatctctgatttatttcatcagtgttttgtagttctccttgtagtggtatttcaccgccttggttaactgtattcctaggtatttcattttctttgtggctactgaaaatcgggttgttcttgatttgcctctcagcctggatgttattggtgtacagaaatgctactgatttttatatattgattttgtatcctgaaaccttgctaaaatcatttatcaattctagtggccttttgacagtgtctttaggggtttttaagtatagaatcrtatcatcagcaaagagagagactttgacttctttttctatttagatgctttttctttcttttcttgctgattgctcataggactgtacgttgaataggagtggtgagagtggggaaacttgccttgttctag

SEQ ID NO: 665794 - DNA, 475 bp, Homo sapiens
aatttgtttagcagtccatcttattttttcaaggaacaaattattggtttcatttaccttttgtctgggtttttgcatctcaatttcattaagttatgtaattttagttatgtattttcttctgcttgttttgggrtttgttctttttaaagttaacattaatctgagatctttctaacttcttgatgaaagtgtttagggctgtaaactttcctgtttttactgcttttgttacattctggagatgttatttcccaatttttattaattgcaaataattttttcatttctgccttaatttatatgtttacccagaagttgttcaggagcaagttgtttaacttccatgtatttgtgtacttttgagagatcttcttgatattgatttctatttctatcaatcttcttgatttctatttctattgtactgtggtccaataatatacttgatatgatttaaattttttaaaattta

SEQ ID NO: 665795 - DNA, 633 bp, Homo sapiens
tgtttgttttccatttacatggctgatctttcttcatccctttactttgggcgtatgggtgtcattacaggtgagatgggtctcttgaagacaacagagggctgtgtcttgtatttttatccagactaccactctgttttttaagtgggggcattttgcccattttcattcaaagtcagtatccatgtgtgtgattttgatcttgtcatcttttgtttagttggtttttctgtaggttttattgtgagttgctttatagtgcctgttgacaatggactatgtgtttaagtgtgtttctgygatagcaggtatcattctgttgaactcttttaaggctaattgaaacatattccatcagcatttgcttgtcagatgaggatttcattttctctttcatttatgaagcttctttggcacgatatgaaatttgtggttggaaattcttttcttcatgaatgctgaaaattgtcctctaatctcttctggcttgtaagatttctgctgagaggtctgcagctgtcctgatgggattccctttgtatgtaacttgacctgtctgtctagctgcctttaagattttttcttttgcattgaccttgatgaatctgattactaggtgccttggtgatagtc

SEQ ID NO: 665796 - DNA, 617 bp, Homo sapiens
ggggaagggggggaatggttaagcacagcattttgtatctatgcaaagtacttgattgcatcctccaacatccaaccagtactccaaagtgtaactccaaaaagaggctgacaactgtatcttgatacattctcatgtttcattttctaacaaacaaaatgatcttagattttgttgacatccgaaatgctaaagagaattttcctcaaagtacgttaaaaaatgtcgcattaatagcttaaaaataatcaagttagagttgactaaagccaacaattctattacctattttaatgtgagaagatttttttcagaagtatgaaaatgttaaggcaaatataaaatttcttggaagaaagacatgattgtcttctcctcaattatatatgtaatcttctactgaatttagtttgttcmttatcctggttattaggtgcattattcctgtgttcccctaggacaatcaagcaggaagattgtctctggttcctgcttgaagagaatggttcagactgctgtattccagagggctggggtggtttctaaaacgtagaaatgttgaagtttaacattgaaattataatcacctttaagtgatttgatgaattgagaaacac

SEQ ID NO: 665797 - DNA, 640 bp, Homo sapiens
gttagaaaaaaattatcagtgtttttttaatgcttacattagcttgagttactgacacttgaaccaaaatatacttgtaacaaatcaagcagaaaactgtttattggacacaattctgtttatctagtcaacaaacttttctagatcatctaccatgagccagatcataggagaacagacacacaaataccctaactttctaggttttagtcttgcagtgcagacacataaaaggttgatgccacagaaggatggacctgggaaggtctgggcagtcctcatagaggaggaaatgttggagaagacatttgaaagaaggtggacacctaccaaggagacaaggaaatgagaaytgtttcagatgtgtatagagggtgggatggaggaaagggaggaatagaagagcctatggaagcttgaaaaaaacaaaatgtgttcagagatatgaaagcctttgggaagaacagtagtgcagagttcacatttaaggtgagaaggaaaagaaaacaggggcaaagagttatagagtagagggttttatagtctgtgtaattgacttgagactttaggttttgggagatgagcaaatgctacaatgttttaagtaggcagtttgtatgttttttttttaaaaaatgtc

SEQ ID NO: 665798 - DNA, 583 bp, Homo sapiens
ttgggttttttgttttgttttgttttgttttttttgcaacatttcatttgactcttgtattgtcttatcggaatctaagaaagaaataatggatttgcctgtgttatagtactcccagttcctgggtaattcatacttccccaagaagttctttacacttttgaacagttaactttagagagttatgtcaatattttatatttaactgaaatctacctcatcttattatcaattcatttaaaaaaattgaatmatttttcatacaataacctttctaaagttgaatgttaattattgtgtgtctcttgagctttcatttctctaggatattaaacctggagaaaatgttcctaacccttttatgtatcacattcaagcatatttagccatcttaactcctctgttctcatcaggtaaaactttgtcccttaaattgttgcctaacattgtacagaatcctctaggggttatctaaatcctacagaatagaaccaaatgccttcagacctaccagatctggttctaacttttttctaccacaacgtgtattctaattggtgccaaataaattataatctgatgg

SEQ ID NO: 665799 - DNA, 576 bp, Homo sapiens
tcacagcaacaacaaaacactaaatattgatgcttatttaataccttgtttacatataaatatatatgatttataagtgttaaactatgcagtactgtggacagtgaattaaaataaaaatagttataattgccacaagaaaaacaatagtaaaactcagaaatatttttattatttatgaaactttgtatgtgttcaattattgctgatattaaagccaaagaaaactaaatattatcatctttcagctggcatttggaagaagaaattaagtccattcctcagaaaggagaaccatcattctctatatagtctacatgagtattaagcttctgagggcaaaattatacttctttccttaagatatctacagtaactcttacactacttgaaaaaatgtatttgtgggcatattatttcataacatcaccaatgttatatatwttttaagtgaggaaacataacttagggaaaaaaggtaaatgttcagcaccataaaataaatatttctctgatgtgtaattagtactatgcccttcattgttatctgagactaagaaatacagctatggaaag

SEQ ID NO: 665800 - DNA, 448 bp, Homo sapiens
ttaacttttcttcattgagtatgatgttagttgtggacctgtcatatatggcctttactgtgttgcaattcattacttttatwcataatttgttgagattttttatcataacagaatgctgagttttaccagatgcattttctgcatcaatttagttgatcatatgatttttgtccttattctatttatgtgaagtatctaatgtatagatttttaaatgttgagccatcgtgtgtccaaagaataaatccacttgattatggtgaatgatcctttatgatccttttaacatattattgaattcagtttgctggtattttattaagacattttgcatctatattcactatattcatcaggaatataggtctacaattttccttcctttccttccctccttccttccttcctttccttccttccttcctttccttccttcccttccttc

SEQ ID NO: 665801 - DNA, 573 bp, Homo sapiens
cagttactcaggagggtgaggcaggagaatcacttgaacctaggaggtggaggttgcagtgagccaagaccacgccgtggcactccagcctgagcagcagagtgaaactctgtctcaaaaaawaaataaataaataaaaatgaaagttcttaccctctaatcacaaggttggttcccctggcaaccagctctcatctgaaagttatccagtagctcagagccactgggcatctcattagcatacaaaaatacacttattacatttggccatttcaagaattttagacgctgtgtgccaggaaatggggtgagaggcagaccaaatatatatttcttattatgtcacaaatgcagacataaagaatagtataatcaagaagaaattcttgtttcaaatatattctatgtcatattatttgagaatatattctaaattcagaagaaattggaagtagtaaactactttaaaaggaagcccatattaaagtaggtaatataattcagagaaaactgtcatgtaaggagcacacacacaaatataacaaatattactggctatatgccaatgaatgt

SEQ ID NO: 665802 - DNA, 521 bp, Homo sapiens
tctccctgaccacatttaccaccggagccctgcagattcctgtatctggccatgttcctctctccctccctcacttgtctgctcctatctcagacctccaacctttgttcttattcttttaggagcaatatacatttcttctgttaggtagagtcaataagctgtctttagattcactgcctgtttccatgtcaggttgttgagatacacagttctcacttaaagtggcctatcaagatattttctaaataaagatggttcctactctgactggaactcttgakgacggcttaaaaattacattccattcttttttaaattcacacagtgtatgctatggtacttattgcactaaagcaataaaaccagtagactcagtatctacaagtcttacagtacgagaaataaagccttcaaattttcatgtcatgggtactgttttttaacattttaaactcagattcacagaattaaattattctactctatttcatgaaatgctattatattgatttgtataa

SEQ ID NO: 665803 - DNA, 499 bp, Homo sapiens
gtgactggttttccacaaagcatggttcataggaaatgcctcaacacctatctgttggcttatttgaacataattcctgtaatgtttttaaagttttaaaaatttgctatctattcaatttaaaaaggcagaacaggtagatattttctctgctttatagaatcaaaaatttcagctgagacacagctcatgtaggaaccagaattagaccattgttccaaggtgagacaattagasaccattttacataaatgtttccatcttatttaagttctttcaagaaagtagaaatttctagcaagttccttactagctggtcttgtttatcaggaagacttctcttctggctaccctggctcctctgttctgatttaacgtttatttgtcttttctctacacaactggagagatcttttcaaaaccctaaccatgtcggtgctcttgcttaaaacccttcagtgactgcttccccgttgagttgaaagaaacccagaatctt

SEQ ID NO: 665804 - DNA, 504 bp, Homo sapiens
taaggtctgctctaaaaactytggtaataaaaacaaggtactggttatcactttgactattaaacatattagaacaaagtcttggattaaccagtgttctaagggaaaactctaaaaagaggtaacatataacaaaatgtgactttgtgaattgatcccatctggacctgtaccttgattctagtgatgcacaggtctccatcaatctatgccttggggcaagagaagggatttgggagcaaggtaggctgatggcaaactcaagggtcagctactttttagctgtgaaatcataggccaattaatcaacctctctgaaccacatttgcctggttaatacaaagtaggtgatagtagcacagatgctttgcaaaactgtgtgatgactatgtgagataatacatattaagcacatgttgtctatcccagagtagaacactcaaaagatactggtttctttatattttctgagttaacatacatgttttaaaaaactggaaagtc

SEQ ID NO: 665805 - DNA, 453 bp, Homo sapiens
agcatgaacaggtcactcaacatcgctgagcaagcatcctcattcagttcaacacacatagtccaaatacttgtttcaaaacgaagtgctgtgggaggtagaagagatgggttcaatctgcaacagagacgtcttcatgtgaatctgggaccatttctggtcctctcctcaagtcacactgctgtcttttcctctatrggttgcttctgtggtatgggagctgagaggagcttttgattgaatgtatttttgctctgcaatttcaggcgaagtcagctgtaatttcctgcatgttagaggcccaggaaatgtgtagtgatgacaaaacttgccccttaatctgttcctcatcatcagcaggtgggctactagaacgttatttgtgttgagatctggaaataaaaatatggctagtcatgagtgtaaggcaaaggacctcaaagtttctggtgc

SEQ ID NO: 665806 - DNA, 548 bp, Homo sapiens
aattgtttaattgttaagccatgttaagcaattacggaggacaccagatagtttccactcagtttccctttatttctgactgttactttacaaccatctgtgcaggggtaaccctctcatgtgtctctcctccctgattctcactctagcaattcagattcccatttctgattctctgggacacaggtctctaaagagcccatccactccaagtcaacttttcccccagtcctgcccctcctgcatcctcattcctttcccattcacactgaggaggcatttgaaacgatgggtctgtgctccctttaacatgcactcatggcctaggtttcagctccgaaatgaccagaagaaagcttgaaatatatccaccctgatggcaggcattcaacagaggcagtgactgggctccaggtcataggaggccctgatgccacagcgagggcaggggacggtgcagaacacaatgatcttgggctgccttaagtccctcrgtgtcttcatcagctcagccccaagttcagcaaatctcccccagcagagagcac

SEQ ID NO: 665807 - DNA, 573 bp, Homo sapiens
agattatactgcttagtaagctaccctacagtggcacatatgcttacatagaccaaggtttgggacataatgctttaatgtacattttataaaaatgtycctctcactaaaacatgtgactgttctgaataaaatatttctatgcaataagagaattattggaaaaatggtgaaatcatagctatcagaataggaagttctgatttgtagtagtgaaggaaaagcaataacccaaacacctggaatagatggagacaatagggataatgctgttttgttttctttttcaagagtctatggaaattttagcctgtagaagaattccccagtgcatgaaggacactttcaatctgtaccacagattgatgcaagtcctacttgggatgccccaacaataataaaaaatactatctttgcacaatttgcaaactttactgtacttattttgtggaaattatgcattagcctgattctctctcaactatatgacttgtactccaggggtgattataagagaaccatgagtgtttaaggaaacaccaccaatagattataaggtgactatggtgatct

SEQ ID NO: 665808 - DNA, 573 bp, Homo sapiens
agattatactgcttagtaagctaccctacagtggcacatatgcttacatagaccaaggtttgggacataatgctttaatgtacattttataaaaatgttcctctcactaaaacatgtgactgttctgaataaaatatttctatgcaataagagaattattggaaaaatggtgaaatcatagctatcagaataggaagttctgatttgtagtagtgaaggaaaagcaataacccaaacacctggaatagatggagacaatagggataatgctgttttgttttctttttcaagagtctatggaaattttagcmtgtagaagaattccccagtgcatgaaggacactttcaatctgtaccacagattgatgcaagtcctacttgggatgccccaacaataataaaaaatactatctttgcacaatttgcaaactttactgtacttattttgtggaaattatgcattagcctgattctctctcaactatatgacttgtactccaggggtgattataagagaaccatgagtgtttaaggaaacaccaccaatagattataaggtgactatggtgatct

SEQ ID NO: 665809 - DNA, 600 bp, Homo sapiens
aaaaaaaaaaaagaaatgtttactatttcaaatcacttcgaaatataaagacctatgtaggcttgaatcaggatacatagaattagaagtccataagagggcactaaaatgaaagcaaataggatgtttttctcataggattaaaatagcatacccatgaaacccaatattttaagttatttaacattccaaactgcttacctaatgtttagttattttaaaatcacttcaatatattactatctcattaactgttwaattctattttatgtaacatactattttagaaataacatatatttaattactaaatggctagcatattaatttctttaattttttaaatatgtattgcatgtgatcaaaatttttatggaatactaatcaaataataatattttaattctttctatatttgaaaaaattctactatcaaatttatcttttaatttttatatttaatgcaattatttgttttataatttacaaaaagactacttagtcatgcaatgaactacaattttaagtttggcacagcataaccaactctcaatgaatcccgaaaacattggaagaaatacaggtgtaaataattgttag

SEQ ID NO: 665810 - DNA, 607 bp, Homo sapiens
ttattaaatttaatctaggtgtataattttgattatataacccaggtggcatcctctgagacccttgaatttgaatggtgttagttttgatttacaggtttatattcattattattaacatttatatgcatgttttctctttccaaagatatttaattcattytctgtcatttttaactttatattttctatttcttagtgtttattttataattactgtttgtcctatggcatctcagaaaaattgtatccatttctgaagctctgcttcatgaggcgaacggtgtttattattctcgctttctataatggtggttccttttctcagatgtgtaattattttggttatgtgtgtacattcagcttggaatatgagcattcctgtctagttatgtgtacagaagtaaggcaaaagtacaggcctcaagttgggtttgtgaatgtgagcttaaaaagaggataagagtagacttcaaatagagtgtcagggaacacaaaggcactgccagctaacccaatttgatgctacttcactcagaaactctctagcgagggaggagacatttcatttaatttttattctacgaacactcgaaatttagagaaa

SEQ ID NO: 665811 - DNA, 607 bp, Homo sapiens
ttattaaatttaatctaggtgtataattttgattatataacccaggtggcatcctctgagacccttgaatttgaatggtgttagttttgatttacaggtttatattcattattattaacatttatatgcatgttttctctttccaaagatatttaattcattctctgtcatttttaactttatattttctatttcttagtgtttattttataattactrtttgtcctatggcatctcagaaaaattgtatccatttctgaagctctgcttcatgaggcgaacggtgtttattattctcgctttctataatggtggttccttttctcagatgtgtaattattttggttatgtgtgtacattcagcttggaatatgagcattcctgtctagttatgtgtacagaagtaaggcaaaagtacaggcctcaagttgggtttgtgaatgtgagcttaaaaagaggataagagtagacttcaaatagagtgtcagggaacacaaaggcactgccagctaacccaatttgatgctacttcactcagaaactctctagcgagggaggagacatttcatttaatttttattctacgaacactcgaaatttagagaaa

SEQ ID NO: 665812 - DNA, 581 bp, Homo sapiens
attttattaaaaaacttcaatctggcaaagagagaagtacccttctctgggaagtaaaactaaagccaaggagctgtgttaggaaatactkcagtaattaatgcaatttttaaaggttgaattttggaataaaatcatataagacacattagaggaggaatacaaaaatgatagtttggaaaaataattaggagattgaattaataaaaattgtgctcaatttgagagcagataccaagaagacactctttccttttatatatttgacttgggcaattctggtgagtggtcgttatccaccatcaagatacagaaaccgggacaggtgaaatatttaaacagaagtagggtaagataagcacttccattaataacagattaagtgtaatctaataaaggctgttcagagactgttagacacatgtgtcaaatcatacttctaatgtagagaaagggctgtactgtaacaatacagtaagggctgccaatgtgtatgtttaatttatgctgcaaatctgatgagctcatttatgaagaaggggattatattaaaaaataagtaactctgctagggacaaaat

SEQ ID NO: 665813 - DNA, 658 bp, Homo sapiens
ctgcacgtagtgacactttgaaccatagcaaagtgcttagctacctttgtggataatgagaacaggtaatggcagaggtacagcctgctgcttttcctaaggttgtaatcatagtcaaagaatagaatcgagaactagttaagggttgataaacctagattattggagactatttgttttacaatttcacagtgaaggagtgctaacttcatctgaattaagaaaaacaccattctttgacagaaattataatagtaatttttgctgaatgagggataattttattgctattaacacggctacaacctgaaactgttagatctactaaagtttttgctaatgcctcttttagaaacagtacaaaatatatgtttagtacaaagatacagacatatctttgttatgtcaacttgcatatctgatttacttaaaatattttattgcaatatataatttttacaatcttattttgattacccattttcttttggtggcctttacaaatatttattaacttacaatcataactggaatgtattgagtctatccaatgtgctagtagctcttctagtcctttatacacctyaccactaattctcacaacaagcattcaggtgtttattaaaaaaaaaaattgtagagatgggcatctcgttat

SEQ ID NO: 665814 - DNA, 603 bp, Homo sapiens
aatgatggtggtgtttggtgggaattgcaatgaatttgtagattgcttttggtaatatggttgtattcacaatattgattctacccatcagtgagcatgggrtgtgtttccatttgtttgtgtcatccatggtttctttcagcagtgttttgtagttttccttgtagaggtctttcacctctttggttgggtatattactaaatatttgattttatttgcagctattataaaaagggttgagttcgtaatttgattctcaacttggtcactgctggtgtatagaagagctgctaatttgtgtacattaatgtatccagtaactttgctgaattcttttatcagttctaggagctttctggagcagcctttagggttttctaggtaaatgatcatatcgtcagcaaacagtgacagtttgactttctctttaccaatttggatgccctttatttccttctcttgtctgattgctctggctaggacttccagtactatgttgaagaggagtggtgagagtgggaatccttgtcttgctccaattctcagagggaatgctttcaacttttcccatttagtattatgttggctgtgggtttgtcata

SEQ ID NO: 665815 - DNA, 610 bp, Homo sapiens
aacttattttgaaatccagcacagaaaaaagttttagagcttaactctgtcttgaattaagaaagtttagttagttattactaaaaagatttacatactttcaaaatcccactgtgtccaaataaagcatattttgaatatgaaataattatttagggctttaaaaaatcaccatgtgtatggttttctacagcgacttatctgaaacatttcttatgtagccaattacttggatgttattttattttcaataaatattcaaaatatgtagacatttaaatgagtcagttacaatacaaagtagttttaggataatatcaacattaacttgatttccttttcatctattactaactccaattaatcagcaactacttattcaagcagcaagttgggatataagataggatgtaagaaaatcttggtaacctgaagaagtmcagatggaaaagaggtgtataaatagctctctcctgaggattagagtggaattagaaacttgtcttagagaatccatgcttaaaatacaagcactaaatactttgaaattccacttaagtcttgtttaagtgtccctacaatttctggtctccaaagttaggcagtaaac

SEQ ID NO: 665816 - DNA, 603 bp, Homo sapiens
aatgatggtggtgtttggtgggaattgcaatgaatttgtagattgcttttggtaatatggttgtattcacaatattgattctacccatcagtgagcatgggatgtgtttccatttgtttgtgtcatccatggtttctttcagcagtgttttgtagttttccttgtagaggtctttcacctctttggttgggtatattactaaatatttgattttatttgcagctattrtaaaaagggttgagttcgtaatttgattctcaacttggtcactgctggtgtatagaagagctgctaatttgtgtacattaatgtatccagtaactttgctgaattcttttatcagttctaggagctttctggagcagcctttagggttttctaggtaaatgatcatatcgtcagcaaacagtgacagtttgactttctctttaccaatttggatgccctttatttccttctcttgtctgattgctctggctaggacttccagtactatgttgaagaggagtggtgagagtgggaatccttgtcttgctccaattctcagagggaatgctttcaacttttcccatttagtattatgttggctgtgggtttgtcata

SEQ ID NO: 665817 - DNA, 569 bp, Homo sapiens
gacttaggttcccaatatggcaagtctggagagaaagccagtattgtgcttgaggaaagctgccttactgttctgctctcaccttctgttcctcatctcatcagggtttgtttactggatactgaaatactacagaaaatgttttcttgccatttagaagctgctggcctagttccctagtcttctacattgctcagaccctaacattatatggtgacaaaactgaccatacatttcagcacttgaattttctagtttttccagcctagaagaaacrcccaaagctccactggtgtttattttccctaacagaagcccagaattctctgactagcatcagcgaacaccccaaggaaaaaaatatgttggcaattctctgctcagctaagaatggttctgcttctctgaaatttttatttatctagttcttatacctcccatagttatcagataccttaaatccctagctgtattttaaaatgtagctggcttttttaccccctctgctgcaggacgttgtctctgccttacaaagtagttaacttgctattaccagaaatgctaaattg

SEQ ID NO: 665818 - DNA, 653 bp, Homo sapiens
taagtttcaaattattttgataaatacctaggagtgtgatatggtgagactatgtttagttttgcaagaagctgctgaatgatcttccaaagtgactgtactattttacattctcaccagcagcaaatgagagttccttttaataggcataccagcttacagttgatcttgtcagtttttaattaaattttagccattctaataggtgtgcagtagtatctcattgctgctttaatttgcaagtttctgatgatgtatgatgttgaacatattttcacatgttaatttgccatctacakgtcatctttggaaggtatctgttcgggtctaatgccctaaggttgtttatattcttattgtggaattttaaatgttctttgtacattttggatccaagttctctagaaaatctgtggtttgaaaatatctagtgtgtgaattatcttttcatgctcttaactgtctttacagtgtaaaaaattttaatttaataatgttcagtatatcaatttttattgatcatgcatttggagtatctaaaattcatcaacaaacccaagatcatgttaatttttctaagtcttttatccttctttgtacattttagattcagtttgtaggtacctataaaataggtcgctgggattttgaaa

SEQ ID NO: 665819 - DNA, 653 bp, Homo sapiens
taagtttcaaattattttgataaatacctaggagtgtgatatggtgagactatgtttagttttgcaagaagctgctgaatgatcttccaaagtgactgtactattttacattctcaccagcagcaaatgagagttccttttaataggcataccagcttacagttgatcttgtcagtttttaattaaattttagccattctaataggtgtgcagtagtatctcattgctgctttaatttgcaagtttctgatgatgtatgatgttgaacatattttcacatgttaatttgccatctacatgtcatctttggaaggtatctgttcgggtctaatgccctaaggttgtttatattcttattgtggaattttaaatgttctttgtacattttggatccaagttctctagaaaatctgtggtttgaaaatatctagtstgtgaattatcttttcatgctcttaactgtctttacagtgtaaaaaattttaatttaataatgttcagtatatcaatttttattgatcatgcatttggagtatctaaaattcatcaacaaacccaagatcatgttaatttttctaagtcttttatccttctttgtacattttagattcagtttgtaggtacctataaaataggtcgctgggattttgaaa

SEQ ID NO: 665820 - DNA, 653 bp, Homo sapiens
taagtttcaaattattttgataaatacctaggagtgtgatatggtgagactatgtttagttttgcaagaagctgctgaatgatcttccaaagtgactgtactattttacattctcaccagcagcaaatgagagttccttttaataggcataccagcttacagttgatcttgtcagtttttaattaaattttagccattctaataggtgtgcagtagtatctcattgctgctttaatttgcaagtttctgatgatgtatgatgttgaacatattttcacatgttaatttgccatctacatgtcatctttggaaggtatctgttcgggtctaatgccctaaggttgtttatattcttattgtggaattttaaatgttctttgtacattttggatccaagttctctagaaaatctgtggtttgaaaatatctagtgtgtgaattatcttttcatgctcttaactgtctttacagtgtaaaaarttttaatttaataatgttcagtatatcaatttttattgatcatgcatttggagtatctaaaattcatcaacaaacccaagatcatgttaatttttctaagtcttttatccttctttgtacattttagattcagtttgtaggtacctataaaataggtcgctgggattttgaaa

SEQ ID NO: 665821 - DNA, 600 bp, Homo sapiens
tgtttctaattgagtttattcggattctgtctcttcttttcttggttaatctcactaatgttctatcaattttgtttatcttttcagaaaaccagtgttttgtttcatttatcttttgtataattttttgttttaatttcatttagttctgttgtttgttatttattttcttctgggtttgcgtttgatttattctcatttctctagtttcttgaagtgtgagcttagatctgtttgtgctctttcagactttttgatgtaggcatttaattctatgcactttcctcttagcactgcttttgctgtatsccagtggttttgataggttgtatcgctactaccattcagttcaaataattgttttaatttccatcttgatttcattgttgacccaaagatcatttagaagcagattatttaatttccatgtatttttgcaattctgaatgttcctttggaggttaattataaaatgtatttctctgtggtctaagaaagtacttgatataatttccattttcttaagtttattgaggattgttttgtgacctatcatatggcatatcttggtgaatgttccatgtactgatgaaaagaatg

SEQ ID NO: 665822 - DNA, 600 bp, Homo sapiens
tgtttctaattgagtttattcggattctgtctcttcttttcttggttaatctcactaatgttctatcaattttgtttatcttttcagaaaaccagtgttttgtttcatttatcttttgtataattttttgttttaatttcatttagttctgttgtttgttatttattttcttctgggtttgcgtttgatttattctcatttctctagtttcttgaagtgtgagcttagatctgtttgtgctctttcagactttttgatgtaggcatttaattctatgcactttcctcttagcactgcttttgctgtatgccagtggttttgataggttgtatcgctactaccattcagttcaaataattgttttaatttccatcttgatttcattgttgacccaaagatcatttagaagcagattatttaatttccatgtatttttgcaattctgartgttcctttggaggttaattataaaatgtatttctctgtggtctaagaaagtacttgatataatttccattttcttaagtttattgaggattgttttgtgacctatcatatggcatatcttggtgaatgttccatgtactgatgaaaagaatg

SEQ ID NO: 665823 - DNA, 571 bp, Homo sapiens
atatatgcttctatcagcagtttgtgagtgtttcagttgctctacaaacacaattcagtgtcgtcaatattttaaaattatcattcaggttgtgtgtaatgttaaatcattatggttttagctttwcatctctggtaactaatgatattgatcaaatttttcatgtgcttattggccatttgagtatctccctttatgaagtgtttgttcaaaattttcctgcatgggttttgctcaatataatgctattagtagagagaggaagaagactagaaacaagaatattgaaaattttttctgtgctatatagtaatatccaaatttttgctctatacttttgaacttaaactgtgtccttgctttatctgatcattggggttacagaaaaatacctacaggtctatataatttatatatttctttaacttttgttttaaattcgggggtacacgtgcaggatgtgcgggtttgttacataggtaaatgtttgccatattcgtttgctgcacagatcatcctatcacctaggtgatagcccaacatccattagctattcttcctgatgctaacc

SEQ ID NO: 665824 - DNA, 571 bp, Homo sapiens
atatatgcttctatcagcagtttgtgagtgtttcagttgctctacaaacacaattcagtgtcgtcaatattttaaaattatcattcaggttgtgtgtaatgttaaatcattatggttttagcttttcatctctggtaactaatgatattgatcaaatttttcatgtscttattggccatttgagtatctccctttatgaagtgtttgttcaaaattttcctgcatgggttttgctcaatataatgctattagtagagagaggaagaagactagaaacaagaatattgaaaattttttctgtgctatatagtaatatccaaatttttgctctatacttttgaacttaaactgtgtccttgctttatctgatcattggggttacagaaaaatacctacaggtctatataatttatatatttctttaacttttgttttaaattcgggggtacacgtgcaggatgtgcgggtttgttacataggtaaatgtttgccatattcgtttgctgcacagatcatcctatcacctaggtgatagcccaacatccattagctattcttcctgatgctaacc

SEQ ID NO: 665825 - DNA, 553 bp, Homo sapiens
acccaagtcttagggaagtgagattggatcgtaatgtagcaggaggcttaggatctaccctgtggggataaaatagattgtttgcagcttgaagggaggaaaccttaagaaggaaagcctgtgagcatcaggaaaagaatatgtggcttgtaaaagaggtcaaagagattttaattctctaagggaattacctctgttttacttgctatttactatttattagggcctagtctccacaaagttagatatcatctggcagatttatttccagtacaaaggataaccccaaagtatatgttttattgtgattttgcccataataagtgaatacatctgctcttagaatggttccccaatctctccattctctacctgatgatcctagtggatgagaaaattaagaatggaaaatcttaccctccactggctggagcaaatgagctaatgatactgcctacctaactgagccttctatgggacagacacctttatctcaagcttctcgatgttaacaccacaacagcargccctagctttagggacaaagcctgca

SEQ ID NO: 665826 - DNA, 497 bp, Homo sapiens
ctctcattggccattagctgaaacctatgtccttgcctgaggtgcttcagagaataatgactttttccattttctcaatattttgtgatatctctccttgattaggattaactacaatcctactagcaagaactaatgggtgataaatcatgagtatttatattcttatagtagatgatactgaatatcaacaaatatctggcactgaataaagagagtgctgactctgaaaacatttggaacattttgatgtttctaattaagtctaattaaatatctaagtaaagggactaattactaaagttacaataatcatccttttaaaaaggttatttttctaatgggaaatgtaatcacactcatgaggattaaaacaaaccaagttaccattctttatagtattcataaatttgcctattaaagggtrtaaacataaaacatgtttatatttgctctcattttttaaaagtctatgaacagaggtattaaaaatagta

SEQ ID NO: 665827 - DNA, 365 bp, Homo sapiens
attaatgtttgccttgattatggctacaatgctacataggttttgtcgaaactcagaaaattgtacaacaaaatttagttttagtctatgtacattttaggttaatcataaaggggaattataaaaagaaagaaatagaatgagatcacaatgaattctttttactgagaaaagggaattgaagtctcctagaaatttgtagataaaacagcaaaatagcatttgaagtatttcaaagtatgctgctttaaaattcccattaggcaatactaaatataataacttgttccaagtttrtaaaatattaattgtgcataacaatagtatgcaacacaaatcacatcttatctaagaatttggaggtc

SEQ ID NO: 665828 - DNA, 600 bp, Homo sapiens
ttgttaaaacataatatttctctccccagtttcccatttttactaaaaacaaatcatggtaagactaatttgctttattatacttggcctgattatttgtataaagtgcagcaagaataattatttttcacataggctctttttaaattggctttgttggaactctgttccatagaagaaatcttaaatatgactttttaaagccaagttcagccatgggtttgtaccctcaaatacctatgagttgtgtaaattcctctcctcttgtggggtcycaagataacttgggactcttggacctgtcagaaagtgaaattctttacttaccacaggtcagaaaccctgtacagggactgttgcagacaaggtctgaagccaattttccaaggggcttttattggctttataagtcaagtttgattccttataggaaagcacagcattccatttaaagtcttggtaaaataaccaatttctccaattgtgtcctgttaaaaagaaaacagattcttattgcacttatgcaaataactatattgccataaattaagaatgctcacaaatagttttcaaatttttgagaaatcaggtagagagaaa

SEQ ID NO: 665829 - DNA, 490 bp, Homo sapiens
ttgaacgttaccaaatgtatcctcccaggggcttagagaaaggaaattttaacagtccatggaagagaatagacaaggtcacacagatattaaaccagaaaagacttactttctaggtggggaattgaacctggaccaccgtatgaaagtgtgaaaccttacctactgagctacagcacagggtagtttccaattcctttcctagaagaagcctagagtagttaattttgaccttgcaaagccttttaactatttaatgtgatttttagagctatgacacgaaccctaaaatttatgttcccttgaaggcggagaccaaaagaaagtaccaccacatcrttaaaaggtcaggcttccaaggacataaaataaagtggagatttcattcagttttttggttcatttcagggacctgcagccacgtttgttactgaccagctttctgggttgttttgaaaagtgggcttacaggtgttctaagcctgtgttt

SEQ ID NO: 665830 - DNA, 576 bp, Homo sapiens
gtttggaaccttacactgaacacaaatcacagttgttgatctgatcatttgggtcaaccatgtagatgcctggtacagacctattctcttatcagactatttggaatcaagttactggttgagcttgtacacccaagattacaaatatttctccctggagtcacctttatgcaatatttgacaatgaatccatcatagactggacacagaattaacaaactctacattttttgatrcagagactatcactgtgtacagtatttatgactcatgtgaaatttgacttttttgttttatgcttaaggaggacatatcataccaggcaaggaccctacattcttctgacattgactacatttgatctttaaaccagcattggggttatcaatggtgtcttaatggctgttgatatttgttcaggttattatgttgctattacaatagaatccattgattctggctacatacttacgcctcttgaaactaacttgccgttttcagtttcccataccatcttcactttgataatagcgtgagtttaataacaaataccacctagcattaggctgaatgtca

SEQ ID NO: 665831 - DNA, 576 bp, Homo sapiens
gtttggaaccttacactgaacacaaatcacagttgttgatctgatcatttgggtcaaccatgtagatgcctggtacagacctattctcttatcagactatttggaatcaagttactggttgagcttgtacacccaagattacaaatatttctccctggagtcacctttatgcaatatttgacaatgaatccatcatagactggacacagaattaacaaactctacattttttgatgcagagactatcactgtgtacagtatttatgactcatgtgaaatttgacttttttgttttatgcttaaggaggacatatcataccaggcaaggaccctacaktcttctgacattgactacatttgatctttaaaccagcattggggttatcaatggtgtcttaatggctgttgatatttgttcaggttattatgttgctattacaatagaatccattgattctggctacatacttacgcctcttgaaactaacttgccgttttcagtttcccataccatcttcactttgataatagcgtgagtttaataacaaataccacctagcattaggctgaatgtca

SEQ ID NO: 665832 - DNA, 617 bp, Homo sapiens
aggtcttattactctccaccttttgtgttgtagatatgtattacgtatatatgcataataatccacgtgagacaatgttataaatttttattttaaattaagtattttgggaattcaaagtgtctcaaaataataatttttatctaaaaatatattttgaatttttccattctgcattcttccctgatgatctgaatttccttgtagtgtccttttttttagatttttttgtagcgtaggctagcacaacacaatattgttagactttgattatttttttatttgcttaattttattttttcttctgttttaatcactatccacttacaagatttccctcagcatctgctcacatgcgatcagtctccaggcccttcatgtagtaggatttttttttttgtctgyattttatagttttatgtttgttttatctgcgtagttcagttgaagaggagactacccagacactcataactactatgtctcaactttatttctaaggatatatattttttttttactgaggataaagttgatatttgaagtgtttcatttgttttattttgccttacacattaaatatattgttccattttcttctggatttatatatttct

SEQ ID NO: 665833 - DNA, 642 bp, Homo sapiens
ttttaaaatgcatttccaccaggaggaatgaagcatgtaaccacggccgagagaggggtatagtcacatgttcacaaggagcagaactgatgtcctgaataaattattcctgctacttattttacagggcatccacctcttctcaattgtgaaagctctctagttttttgtggtttttttttttttaatttttttaaaaataggatttcttagttttgcatgaaatagccagaatttgtttatgttggttacaataaaaaaytctggggaagatgttggtcaaagggcacaaaatttcagttatgcaggatgaataaattctggagatctaagctacagcatggtaactctagttaataataccgtaatgtgtactagaaatttactaagactgtagatcttaaatgttttctctctttctctctctcacacacacatacacacacacactatgtgagatggtatatgtgttaactatcttgattgtgataatcatttcacaatgtgtatgtcactgagaagcttaatttcaaaatagattttaagactttttttttctttttcttgagttttaagacataacattgaaacaaacagcagaagccttttcccttagccttaaaatagactccacatccatgt

SEQ ID NO: 665834 - DNA, 642 bp, Homo sapiens
ttttaaaatgcatttccaccaggaggaatgaagcatgtaaccacggccgagagaggggtatagtcacatgttcacaaggagcagaactgatgtcctgaataaattattcctgctacttattttacagggcatccacctcttctcaattgtgaaagctctctagttttttgtggtttttttttttttaatttttttaaaaataggatttcttagttttgcatgaaatagccagaatttgtttatgttggttacaataaaaaactctggggaagatgttggtcaaagggcacaaaatttcagttatgcaggatgaataaattctggagatctaagctacagcatggtaactctagttaataataccgtaatgygtactagaaatttactaagactgtagatcttaaatgttttctctctttctctctctcacacacacatacacacacacactatgtgagatggtatatgtgttaactatcttgattgtgataatcatttcacaatgtgtatgtcactgagaagcttaatttcaaaatagattttaagactttttttttctttttcttgagttttaagacataacattgaaacaaacagcagaagccttttcccttagccttaaaatagactccacatccatgt

SEQ ID NO: 665835 - DNA, 625 bp, Homo sapiens
tggtactgggtatacataaatggaaaattataattttgtttaaaaatgttataaaaactaaaagattttattttttttaaaacacttgttttaactatacttcctcttggtaagattaagaggatgatgatgtctagttaccatagactctaaagctgttaccattacattcagagagagggaggctacaacaaatcaccaaagagtccactttgagaataggacaattttaccaaagattttctttcttctactggtgtggtgaggccactgcaatgaatactgagcaggaagaataacttttctaattattattgaccaaaattcaaaactgcaggtgaaatataagtacaattattctgtttctgttctgcatgcatctatatttcttttttaaaaaatcagaaaagaaaaaaacaaaaagtcagctgactttgtggactagaacacagattaaagaaaatattaacctgttgtattttctaaattttctcttacatagttatattactgaaaaattaaaaatggaaatgagaaatttgattctgtaatwattcccttgataactcattacttacaggtaggaatatacattgcccatgcagtaatgtttacctatctttgg

SEQ ID NO: 665836 - DNA, 576 bp, Homo sapiens
taaactaaaaaatttacactgtatgtaaaaaatgtgcattaagcaaaaatacttaacggtattaacattttgagaacaataaatttctcaaagcattattaacattgtcttaagtagtatttgtgttagactaatcattttataaatgttctaatgrcattgtcattctaataccattaaatttaacatatctatttaattgcactaacccactacttctaatatgtcttcagtattagttccagcttacgtgaggaaagtaacgttgatatatgatcatcattacacagccacaaaggctcacagcctacatataaacccagatacgtctattgtcaaatttcatgctgttttcattctgatgcattttctttgtctactaatctcacacatcctttgcagccattcactgtattagatgtctcttatctcctggtttgcatggtatttatatagcaagatgcagggagcaagttagaaattaggtaagaaggaactttttttttaatcacaaagagttagaacaaccaaaatttcttttgtattgggtatgccagtatgagcatggattaaggt

SEQ ID NO: 665837 - DNA, 563 bp, Homo sapiens
tactatatgtgttgctgttgcatgaactctttatcctcaggaaatgtagtaaaatagaaatagtcaacttcataaacatattcaacacaataaataatagaataaatgaataacactcatgtaaagatttaggaaatttaaacaacatgattaaaaacttgatctaatttataccacaccccaaatggagaatacagaatttacatccttttcaaatgcacaaaattgaagataagctggtttgtaaaccacacatcaacaaaaatgaagggactaaattatatcagaattgtttctttgaccacaagaaaatatttcctagcccttcctattttatttccatcatgtaaagaacttggtagtcatcattcctatgtttaaaacgagaaaagttcaaacaaactaattttttcaaacctatcamagaactacagttgtgaggccaactggtacagcaaaacctggaggaacaggtaaaaacagaaagacaccgcagccaagatccacttacccaggagagaagcccttgtagccataaactaaaatgtcagttatgatgtatt

SEQ ID NO: 665838 - DNA, 599 bp, Homo sapiens
cgcaaattttacatttatcaggaatcatatctaatcatcaaaattgcaagctttcagataaatccccaagaaacatgtaaaatatgattacgtaaaatatgatgcggcttgtataaattataaatgtttaacaaacaaaacttttacaaggagtattaattgaagagtgtttagaattaaatatcaaataygtaaaaattatcggctgatttaaatgaagccaataacatttattttgagaaataaagcttggtatttggtcttgatatttatatttaaaatggaaatatgctaaaataatctgcattcatctcatgaaattttggaaatattttataaatacactgcttaatatatgtattttgagtagaaacatagtaattttatatgtcaatctgcaaattctgaggagaaaagtaagtgaagaatatgtgatattttcaaaattaaaattgaatatattataagacataaacttgatgtataaatgaatttatatgctaaacctctctggctacaagtttttcacatatgctcatagctgaactcattactatctactgaaaagcctagagaaaaaaaagttgaaacaaataaaa

SEQ ID NO: 665839 - DNA, 645 bp, Homo sapiens
aatagtctgatgactatttgccttgggaatggtcatattgtttagtatctctcagtagtttttatttcttatatataatttcttatatctggatggcaatgtctctaacaagattggggaaattttatttaattatttcctgaaatatgttttccaatttgcttactctttcttcttctttctcaggaatgccagtaagtcataggtttttgttgtttaacataatatcatataatacttcttgaagactttgttcattttttaaattctttccctstatttttgtctgactgagttaatttgaaacatggtctttgagctctggctttctctattctgcttgtctagtctgcaattaagtcttctgattgtattttgaaattcctgtagtaaattttccaatttcagaagttctgtttgggtttttgttaatatacctatgtcatctttcatatactgaatcattttactgttttctttttctattggatttcaacatcctcttgaatcttgagtttccttacaacccatacttagaatttttaatctgtcatttcagacatttcaatctggttaggtttcagtgctaaggagctagtacaatcctttggagatgttgaaacactgtgattttttgtgctgctg

SEQ ID NO: 665840 - DNA, 557 bp, Homo sapiens
ttttcatgttttctattttttcatgattcaatgttgataggttgtgtgcatcttggaatttatctatttttctgggtcttccaatttgatggcaaataattgtccataatggactcataatattttgtacttctgtggtatcagatgtgatgttcattttcttatttttatttatttgactctgtcctttattgttctcatttagctacrttaaaagatttgccagatttgtttatattttcaaaaaaaacctgcttttcattctgttgaacttttctattgttttctagtctctattttatttatagctattttgttatttattatttcttccttccagtaaattttagcttattttgttgttcttactctagttcctcaaggtgtaacagtacattttttatttgcaatctttcttcttttttgatgtgtttattgctacattcttccctcttagaactgcttttcctatacattttgttgtttttcaatttttatttgtttcaagattttttaaaaaatttctatttcattgcttctttgaccttttgtctatt

SEQ ID NO: 665841 - DNA, 614 bp, Homo sapiens
tgtaatttccctaatcagcttgaaaaagaaaccattttgtttttagaatgtatacatttatcactataaattttctcyttagtgctgcttttgctgtatcccattagttttggtatgttgtgttgtcattttcattagtctctaaatattttctaatttccactgtggtttcttctttaattaattgatggtttaagagtgtatttaatttccacaattttgtcagttttccagttttacttctgttattgatttctaactttagttgtgttcagaaaagatattttctgtgatagctatcttttaaatctcctgagacctaatttgggcctaacatattttctatcttggaaaatatcccatatacacttgagaagaatgtgtatgctgttgttgagtaaatattctgtatatgttagaactatttggtttattctaagtcctctattttccttacctatcttctatctggttgttttatccatattgaaagtagggtattgaagtcttaaactgttattgtagaattgcttatttctcccttccattatgtcagtttttgcttcaaatattttgatggtttgtaagtgtttatgattgttgtatcttcttac

SEQ ID NO: 665842 - DNA, 614 bp, Homo sapiens
tgtaatttccctaatcagcttgaaaaagaaaccattttgtttttagaatgtatacatttatcactataaattttctccttagtgctgcttttgctgtatcccattagttttggtatgttgtgttgtcattttcattagtctctaaatattttctaatttccactgtggtttcttctttaattaattgatggtttaagagtgtatttaatttccacaattttgtcagttttccagttttacttctgttattgatttctaactttagttgtgttcagaaaagatattttctgtgatagctatcttttaaatctcctgagacctaatttgggcctaacatattttctrtcttggaaaatatcccatatacacttgagaagaatgtgtatgctgttgttgagtaaatattctgtatatgttagaactatttggtttattctaagtcctctattttccttacctatcttctatctggttgttttatccatattgaaagtagggtattgaagtcttaaactgttattgtagaattgcttatttctcccttccattatgtcagtttttgcttcaaatattttgatggtttgtaagtgtttatgattgttgtatcttcttac

SEQ ID NO: 665843 - DNA, 614 bp, Homo sapiens
tgtaatttccctaatcagcttgaaaaagaaaccattttgtttttagaatgtatacatttatcactataaattttctccttagtgctgcttttgctgtatcccattagttttggtatgttgtgttgtcattttcattagtctctaaatattttctaatttccactgtggtttcttctttaattaattgatggtttaagagtgtatttaatttccacaattttgtcagttttccagttttacttctgttattgatttctaactttagttgtgttcagaaaagatattttctgtgatagctatcttttaaatctcctgagacctaatttgggcctaacatattttctatcttggaaaatatcccatatacacttgagaagaatgtgtatgctgttgttgrgtaaatattctgtatatgttagaactatttggtttattctaagtcctctattttccttacctatcttctatctggttgttttatccatattgaaagtagggtattgaagtcttaaactgttattgtagaattgcttatttctcccttccattatgtcagtttttgcttcaaatattttgatggtttgtaagtgtttatgattgttgtatcttcttac

SEQ ID NO: 665844 - DNA, 599 bp, Homo sapiens
atttggtttattctaagtcctctattttccttacctatcttctatctggttgttttatccatattgaaagtagggtattgaagtcttaaactgttattgtagaattgcttatttctcccttccattatgtcagtttttgcttcaaatattttgatggtttgtaagtgtttatgattgttgtatcttcttactatatttracctttcatcagtatatcatgtccttctatgtctcttgcaaacatttttatttaaagccgaatttttctgatattagtatagccacccgtgttctcttttgacacaacaccctactctcttgacttatctagccaggcttcagtgaaaaatcctgttaagtcagtttggtaagaatccctgcaaccttgaaatcaaattcatttttttattgccaacctttgatagctaagttcttggccagcctttaacaagaatcctcctaagccaaccagtgatctctgactgctgttcagaagaagcaagagggatggataatgtaaaaatctgaatcaatatttctaattctgggcacatattggaattggctagtaatctcatattagcttggttccaacaatt

SEQ ID NO: 665845 - DNA, 641 bp, Homo sapiens
ccaaaacccgtcaaaatcaagatggtgacaagagtgacctctggttgtcctcactactacacttytgccagcaccatgacactttacaaatgccatggcaacatcaggaggttaccttatatggtctaaaaaggggaggcatgaataatccaccccttgtttagcatatactcaagaaataaccataaaaatgggcaaccagcagccctcggggtggctatgtctatggagtagccattcttttattcctctactttcttaataagcttgctttccctttactctatgtactctgaattctctcttgcatgaggtccaagaaccctctcttggagcctggatccagacacctttcctgtaacgaccatgtatgaattgaaaaaatgattagacagggtgaaaaacagattaaaaattagtatttagtgtatgatttcaattttctaaaactctacaaaattcaaactaatctaaagtgacaaaaagtaggccagtggttctctgggaggaggagggtagataggatcaccatagtattacaggggatcccttgggagtgatttatatgttataggtagtgatgttttcatgttagtttaacacttacttattgtttgcttgcttgtttacttgctttctgt

SEQ ID NO: 665846 - DNA, 641 bp, Homo sapiens
ccaaaacccgtcaaaatcaagatggtgacaagagtgacctctggttgtcctcactactacacttctgccagmaccatgacactttacaaatgccatggcaacatcaggaggttaccttatatggtctaaaaaggggaggcatgaataatccaccccttgtttagcatatactcaagaaataaccataaaaatgggcaaccagcagccctcggggtggctatgtctatggagtagccattcttttattcctctactttcttaataagcttgctttccctttactctatgtactctgaattctctcttgcatgaggtccaagaaccctctcttggagcctggatccagacacctttcctgtaacgaccatgtatgaattgaaaaaatgattagacagggtgaaaaacagattaaaaattagtatttagtgtatgatttcaattttctaaaactctacaaaattcaaactaatctaaagtgacaaaaagtaggccagtggttctctgggaggaggagggtagataggatcaccatagtattacaggggatcccttgggagtgatttatatgttataggtagtgatgttttcatgttagtttaacacttacttattgtttgcttgcttgtttacttgctttctgt

SEQ ID NO: 665847 - DNA, 641 bp, Homo sapiens
ccaaaacccgtcaaaatcaagatggtgacaagagtgacctctggttgtcctcactactacacttctgccagcaccatgacactttacaaatgccatggcaacatcaggaggttaccttatatggtctaaaaaggggaggcatgaataatccaccccttgtttagcatatactcaagaaataaccataaaaatgggcaaccagcagccctcggggtggctmtgtctatggagtagccattcttttattcctctactttcttaataagcttgctttccctttactctatgtactctgaattctctcttgcatgaggtccaagaaccctctcttggagcctggatccagacacctttcctgtaacgaccatgtatgaattgaaaaaatgattagacagggtgaaaaacagattaaaaattagtatttagtgtatgatttcaattttctaaaactctacaaaattcaaactaatctaaagtgacaaaaagtaggccagtggttctctgggaggaggagggtagataggatcaccatagtattacaggggatcccttgggagtgatttatatgttataggtagtgatgttttcatgttagtttaacacttacttattgtttgcttgcttgtttacttgctttctgt

SEQ ID NO: 665848 - DNA, 599 bp, Homo sapiens
acaggtgactcaggatgactaagaccgaacagagcaggtgaccaaggatgatgaagatcagagcaggtgaacaagggtgactaaggtcagagcaggtgatagagggtaggaggaggttgtttactgaaactaggggcaaggagacataaagaacaaggaaattcaactttaaaatgaagaggaaagaatggggagctgaacatattgatacattggttctttggagagggtctcagaactcattgtacttaacaatttacaggctaaaacctttgaggagkaatttatgatatcctacaattttccccctttcagttttcatagtatttcctcttcaaactttttttttttttttttttaacatatcttggctttgctgctcgacttaatcctctaaaagaaaaagctgatctgaataaggtgaaggagagctaagggaggttttagtaaatgctgcttctataagtctttgcactagcccacggatgcatggtatgacacaacacttgacaagaatgagtacacctactacagctgcaagagaagtaagaattgaggctatgattcctttccatttactgaaccttttttctagccac

SEQ ID NO: 665849 - DNA, 559 bp, Homo sapiens
caagttcctgtccaggacttttacttcaacctaacgggctctttttagtatttactgttaacaaccaaactacttttctttaataaatgttccctgggttgctgtaagcctttctttaatctccaggacatggaaacagtggctctgtacatttttgtcaatttttcatttctttatggaagagagattttagtttagctccttactttatcatttttggtggygtaacactctattttgtagggtgttttttcttttaccacttttactggatatatattcagtagaaaataaatcattctacaaaaacacacatggacttgtacgttcatcactgccctattcacaatagcaaagacatggaatcaacccaggtgtccatcagtggtataatagattggatttttaaaaatggtaaatatacaccatggaatacctcgcagctataaaaaagaataaaatcatgttgtttgcagcaacatggatagagctgaaggccataatcctaagcaaattaactcaggaacagaaaaccaagtactgcatgttcttacttata

SEQ ID NO: 665850 - DNA, 559 bp, Homo sapiens
caagttcctgtccaggacttttacttcaacctaacgggctctttttagtatttactgttaacaaccaaactacttttctttaataaatgttccctgggttgctgtaagcctttctttaatctccaggacatggaaacagtggctctgtacatttttgtcaatttttcatttctttatggaagagagattttagtttagctccttactttatcatttttggtggcgtaacactctattttgtagggtgttttttcttttaccacttttactggatatatattcagtagaaaataaatcattctacaaaaacacacatggacttgtacgttcatcactgcmctattcacaatagcaaagacatggaatcaacccaggtgtccatcagtggtataatagattggatttttaaaaatggtaaatatacaccatggaatacctcgcagctataaaaaagaataaaatcatgttgtttgcagcaacatggatagagctgaaggccataatcctaagcaaattaactcaggaacagaaaaccaagtactgcatgttcttacttata

SEQ ID NO: 665851 - DNA, 600 bp, Homo sapiens
ccttgcagtcattgtcaattgatgacaggttattattagtgatataatgaggtttgtaattgctctttcttccagagagtgtaagagtagtcttgtaattttaactatgaacttggttatatttatagtcctgtaattgatactgtagcattttatatatttaaattctagcacaaataataagtatgacaaaagacatgtttgataagcattaatgccttatttgtgaatataaaattttacctttataacaataaggtattagccagaataattatgaactgtaactgatgaggtaaagcagcactttttagaatcttcatatcgccttttatttcaaagcaaattctgttttaactcaaataatgctaaattattctctatgttacccagagtgaatcacatgaactagctaatcttctttaatatagagctgatttttaaatgttgcaagagatttttttttgacagggtctcactgtgttgcccaggctggagtacagtggcacaatctyggctcactgcagcctcgacctcctgggcttgagtgatcctcttacctctacctctcagagataattttttatggtgcctgtttaa

SEQ ID NO: 665852 - DNA, 532 bp, Homo sapiens
agacttggagttcccaagagctagacagccccaacaaattgaattcagtaaccactgatttattactccatccattaactgaatctgagctgctgaagttatctagagggaagaaaagataattaagatggattaagaataagctttttaccattttgcaaatcaaatagatgctttgattctaatataaaaataaaatggtgaggctataagacaaagagtattcacatgattgttaggaattaatattttccctgggctcacttagataattatatgaattattatttacttttgcctttatgctttgcaagatagatagatggakagagagagagagagagagagacagagagagagagagtttttatctaacagataaacctatatagaaagagagaaattgagagacagcaatatttgccattgaattctaaaatgtttttgtagaaatgtgcaataccttaatagaactttgaaaatcatacatactgtacttacacattcagattattaatagttgaaaatgagg

SEQ ID NO: 665853 - DNA, 570 bp, Homo sapiens
agacagccccaacaaattgaattcagtaaccactgatttattactccatccattaactgaatctgagctgctgaagttatctagagggaagaaaagataattaagatggattaagaataagctttttaccattttgcaaatcaaatagatgctttgattctaatataaaaataaaatggtgaggctataagacaaagagtattcacatgattgttaggaattaatattttccctgggctcacttagataattatatgaattattatttacttttgcctttatgctttgcaagatagatagatggatagagagagagagagagrgagacagagagagagagagtttttatctaacagataaacctatatagaaagagagaaattgagagacagcaatatttgccattgaattctaaaatgtttttgtagaaatgtgcaataccttaatagaactttgaaaatcatacatactgtacttacacattcagattattaatagttgaaaatgaggagtctagcaccatttacagaatcttgaagggacaggcaatttaggccaggtgtaaagata

SEQ ID NO: 665854 - DNA, 590 bp, Homo sapiens
agcatctctgatgtaattaattcattcaacaaataattatagattgtcttttctgcaccacacarttttatagaccctggagacaaagcaatgggagaaaaaaataataaaaactgtcccatcctcatgtaacttgcatcctaaagctgtgggggtgggtggtgttggcacaagcaattaaaaataaataagtaaaatatgtattatatcagttagtgacatctaactgacatgatatatatatttatgaattaagaggggagaagttgagagacagcaaaaagagaaaaaaagatagtttggtaatgaagataactacctttgtcaaaggaaaatatttatggaatagtgccatggagcaaataaagcagaacaaaggaatatggactataaccaggtgatcagtaacagcctcactaggcaggttacatttcagaaagactaaagaaaaatgaggagcaagccttgaggaattccacttcagaccaataacatagcaagtatatgcaataccttatttgtgaaaaataaacattcccttgggaaacatcattgtaattttgcaagtttattagaaattaattaaatga

SEQ ID NO: 665855 - DNA, 627 bp, Homo sapiens
ggcacaagcaattaaaaataaataagtaaaatatgtattatatcagttagtgacatctaactgacatgatatatatatttatgaattaagaggggagaagttgagagacagcaaaaagagaaaaaaagatagtttggtaatgaagataactacctttgtcaaaggaaaatatttatggaatagtgccatggagcaaataaagcagaacaaaggaatatggactataaccaggtgatcagtaacagcctcactaggcaggttacatttcagaaagactaaagaaaaatgaggagcaagccttgaggaattccacttcagaccaataacatagcaagtatatgcaataccttatttgtgaaaaataaacattcccttgggaaacatcattgtaattttgcaagtttattagaaattaattaaatgaaaatttagtttttmaccttattatggacttgacatgcaaaattggcttttttgaataatattctcttcataggcttaggcatgtttgtaattttagggaaccataaatttagtctcaacatatagatacatactaacattttcgttttttttctagaacgaaatatggatataaaattgtttttcaaattatgtattgacatt

SEQ ID NO: 665856 - DNA, 627 bp, Homo sapiens
ggcacaagcaattaaaaataaataagtaaaatatgtattatatcagttagtgacatctaactgacatgatatatatatttatgaattaagaggggagaagttgagagacagcaaaaagagaaaaaaagatagtttggtaatgaagataactacctttgtcaaaggaaaatatttatggaatagtgccatggagcaaataaagcagaacaaaggaatatggactataaccaggtgatcagtaacagcctcactaggcaggttacatttcagaaagactaaagaaaaatgaggagcaagccttgaggaattccacttcagaccaataacatagcaagtatatgcaataccttatttgtgaaaaataaacattcccttgggaaacatcattgtaattttgcaagtttattagaaattaattaaatgaaaatttagtttttaaccttattatggacttgacaygcaaaattggcttttttgaataatattctcttcataggcttaggcatgtttgtaattttagggaaccataaatttagtctcaacatatagatacatactaacattttcgttttttttctagaacgaaatatggatataaaattgtttttcaaattatgtattgacatt

SEQ ID NO: 665857 - DNA, 627 bp, Homo sapiens
ggcacaagcaattaaaaataaataagtaaaatatgtattatatcagttagtgacatctaactgacatgatatatatatttatgaattaagaggggagaagttgagagacagcaaaaagagaaaaaaagatagtttggtaatgaagataactacctttgtcaaaggaaaatatttatggaatagtgccatggagcaaataaagcagaacaaaggaatatggactataaccaggtgatcagtaacagcctcactaggcaggttacatttcagaaagactaaagaaaaatgaggagcaagccttgaggaattccacttcagaccaataacatagcaagtatatgcaataccttatttgtgaaaaataaacattcccttgggaaacatcattgtaattttgcaagtttattagaaattaattaaatgaaaatttagtttttaaccttattatggacttgacatgcaaaattggcttttttgaataatattctcttcataggcttaggcatgtttgtaattttagggaaccataaatttagtctcaacatayagatacatactaacattttcgttttttttctagaacgaaatatggatataaaattgtttttcaaattatgtattgacatt

SEQ ID NO: 665858 - DNA, 564 bp, Homo sapiens
ggcttaggcatgtttgtaattttagggaaccataaatttagtctcaacatatagatacatactaacattttcgttttttttctagaacgaaatatggatataaaattgtttttcaaattatgtattgacatttgtatccatatgtatatatgtccatgtacagaatttgaaaacaattttataattttaagtgcatgatgctaattttatctaattgtattcaaaataaaattgaaacaatctgttttctcaaaaaagagcccttgaaaatgaaattcatagccagatccccgaagctacatggagctccctgtgtgtctacagtcatagtcaatagttagttgagacagatactcatggaatgactttcaaatattgagatcattaaaamtataaaaattagtaattgattttttggtattacctcacagaatcagatgccttttaaagtatctgatatatgtatacaaagcctgacaaaaatgtgcaaactgatgtgtgttgagtcaaaattgtctaaaaccatttcagtttgtctgcaacttggttctacaagtacaggca

SEQ ID NO: 665859 - DNA, 634 bp, Homo sapiens
gattaatgtccttgtgcaatttactggaattctctaaacttttgagtccttatttgtgatagtgcacatttcaaagagctgtgtaaactataaagtatattctaattgaaaattacataatatagttttactttcttacaagtaaagccaatctgaatagaaaaatatttgcttctgagaagattaacaaactaagagactttaaaagaccaartaagattaaaatgaaatattagaataaagtcattattttctagaataaacctatcatttattaaaacattggaatacaaatctgacaaaaaggaaagtagacactgaagaaaaaccacatagcgttctttacaattctccattcaccagttagctacttccaacctttagcattcttcacctctaacttatttaaaaaaagtaaatgcagtaaactagagctagaattaggttacaaatggatatcattgtgaaataggggaagacattctttgatgtttcattattaactctacttcagatttcaaatacagagttaaataatgccttgtcttggacatcaggttatactggaaataaacttctctaatgggattaacaccccatccttagtacctgatttggaaattaattgcaggtc

SEQ ID NO: 665860 - DNA, 634 bp, Homo sapiens
gattaatgtccttgtgcaatttactggaattctctaaacttttgagtccttatttgtgatagtgcacatttcaaagagctgtgtaaactataaagtatattctaattgaaaattacataatatagttttactttcttacaagtaaagccaatctgaatagaaaaatatttgcttctgagaagattaacaaactaagagactttaaaagaccaaataagattaaaatgaaatattagaataaagtcattattttctagaataaacctatcatttattaaaacattggaatacaaatctgacaaaaaggaaagtagacactgaagaaaaaccacatagcgttctttacaattctccattcaccagttagctacttccaacctttagcattcttcacctctaacttatttaaaaaaagtaaatgcagtaaactagagctagaattaggtyacaaatggatatcattgtgaaataggggaagacattctttgatgtttcattattaactctacttcagatttcaaatacagagttaaataatgccttgtcttggacatcaggttatactggaaataaacttctctaatgggattaacaccccatccttagtacctgatttggaaattaattgcaggtc

SEQ ID NO: 665861 - DNA, 449 bp, Homo sapiens
aaagctttctattacaatttcccttgtctaaaccatccctttctttctccttaaatgtttcaaaggccttctaataatctccaactctctgcactgatttttttttccagtcaatttctcctgaatgctcagagcaktctttaaaaataagataaatctttaaaaataagataaataagtcaaacaactttaaaatgataaacatgcagtcattcctctgtatatgtgggttctgtgtctatggattcaatcaatcacggatcaaaagtatttagaaaaaaacaattccacagatcttcaaaatcaaaactgaaatttgcaacacatcaagtactacattgaattcacttaaaagaagtgatatgtagacatcgtattagatattataagtaatttagagatgatttaaaagtatacgggagaatgtgcataggttatatgcaaatgct

SEQ ID NO: 665862 - DNA, 579 bp, Homo sapiens
ttaatgtttagcaaactctttactgaggtgtaacagaaacataaaaaaatcacaaatcataagtgaatgtatagtttgatgaattgatgaattaccatatgtatttctttcctatagtaacaaattactacacaattggtggctcataagaaaagaagtttattttctcttagttatggaggacagaaattcaaaatcagtatcactggatcaaaatcaagatgttaacagagccacactccttttagaaactctggagaaaaatctgtttcttgccatttccagcttctggtgtctgtgaggacctgcattttcactctcrtctttaatggtgattgatagtgtattttaatgaagtctagtttgtcattttttcttttttttcttgtattactttattgtttctttgcatgagtcttgtttcccagtttggtagagggttcttaaaatgtaggttcatactttgtatatcctccaagtgcccagaccatccaagccacagagctgttgtatgtgcgtgcactctccctctgctctctttctctctctctctccacacacactcacacacacacacgc

SEQ ID NO: 665863 - DNA, 603 bp, Homo sapiens
atgctccttcgtaatgatccctagtttttccaggagttcacatgayggtttctcagcttccacatggctgctttaacatcttcattcctcagagagtagatgatggggttcaacaagggagtacaaacagtgtagaacacagaaagaaatttgtccacaggaagtctgctaaaaggccatatatagaaataaatgcaaggcccgaagaaaagaatgaccactgtgatgtgggcagttaatgtagaaagagccttagatgacccactggaggacctgcatcggacaccgatcaaaatgatggtgtaggaaataattaaagccaggaaacagctcaatgatatcaggccactgttcgttagggtcataatttccatttcatatgtatccatgcaagccagctctatcaccaagggaaggtcacaaaagaagctatccacctcattgggaccacagaatggcaggtccactgtaaaagccaagtggctcacagaatgaagaacgcccaccgcccaggaaatagacacaaaaattacacagagcctccggttcataattgtactgtagtgcagaggcttacatatggctataaatctgtcatatgcc

SEQ ID NO: 665864 - DNA, 603 bp, Homo sapiens
atgctccttcgtaatgatccctagtttttccaggagttcacatgacggtttctcagcttccacatggctgctttaacatcttcattcctcagagagtagatgatggggttcaacaagggagtacaaacagtgtagaacacagaaagaaatttgtccacaggaagtctgctaaaaggccatatatagaaataaatgcaaggcccgaagaaaagaatgaccactgtgatgtgggcagttaatgtagaaagagccttagatgacccactggaggacctgcatcggacaccgatcaaaatgatggtgtaggaaataattaaagccaggaaacagctcaatgatatcaggccactgttcgttagggtcataatttccatttcatatgtatccatgcaagccagctctatcaccaagggaaggtcacaaaagaagctatccacctcattgggaccacagaatggcaggtccactgtaaaagccaagtggctcacagaatgaagaacgcccaccgcccaggaaatagacacaaaaattacacagagcctcyggttcataattgtactgtagtgcagaggcttacatatggctataaatctgtcatatgcc

SEQ ID NO: 665865 - DNA, 535 bp, Homo sapiens
gtttttcgtgctgtctggcttctaatggttctgctcattttatgaggctgcttctctaaatgtactatcaaatatgcagataatgccaaatcctcctaataattccattttgctcaggatgattagaaatcatttcttttgattgcataaaataaccattattaaaatagcctacaaagattactaggagataaattgtgtgacagtagacaagaaatatttgcaagagaaaaataaccagaagtaactttaccaaaaaaaataagaaaagctccaaggtgaaatattttkgtccatgctctctgtctctgtctctctctctctccccccatacgcacacacacacacacacacacacacacacacacacacacacacacagagtgtgatatgtataaaatgcacatattatattattttaattatatatatctatatataaaaaataaatgaaacagaatagtatccagaaatataaccaaatatatatgtataaactatataataatatttataataatttaaagaaatgtag

SEQ ID NO: 665866 - DNA, 567 bp, Homo sapiens
ccactgctaatgggcatctaggttgattccatgtctttgctattgtgaacagtgcttcagtgaatatacaagattgggtgcctttttggtagaattctctgtattcatttgtatgtataccctagtaatgagattgctgggtcaagtggtagttctgttttaagttttttgagaaatctttaaaatgcattccacagtggctgaaataattacgttctcaccagcagtgtgtaagagttcccttttctctgcaacctcaccaatatctgctttttaaaatttattttttattttttgtaatagccattctgacttttgtgagatgtggcatttcattgtggttttgatttgcatttctctaatgactagtgatgtggaatattttttcatatgtttgtggccacatatgtgtcttcttttgagaagtatctgctcttgtcttttggccactttttaatayggttgtttgtttttttcttgtttacttaagttcattatagattctggatattagaattttatcagatgcatagtttgcatatattttctcccattctgtaggttgtc

SEQ ID NO: 665867 - DNA, 516 bp, Homo sapiens
gcacaggggctcagcttagtgtatctcttggcaggagcttgactgagtagaacttcttccagaccacagctgggagggactaaaactaaccttcagggtaattcagaatctgctgtgagactgttggcaaacccagtccagtaacaccaatgggcaagattctcagaagtgccctatgtgggcagtattgcttgcatagtacagttgaggggggctggaactggcattcatggttctttctgaaacttctgtggcatggtggctggcaatcctgcccaggtatatctcccaggagttatctgcacaagcagaataactctggtgctgcagcagagaagggctgaggccaagaaaaggccccttcaggatcttctgtgggtgggaagccagtaaacctgtccaaatggcttagataggtgtgtcrcccagtaattccctgcacaggtaggatagttctctgactatggcaaaaaaaaaaaaaaaaaaaaaggtgaagctgggacaggaccccttcag

SEQ ID NO: 665868 - DNA, 593 bp, Homo sapiens
acagttgtttctttattaatgaatatattgaatgtatatgataaaaatcctcaataatctttttatgtttatttatgtctatttttatgtctattttgctgcagatctctatccttatgtttataaaagtcttaaatgtaaaatttaaagtaatttagtattgtctttatgcgttattattataacataagaaaagtgaaatgatgcattatacataatctattcaaactatcttatcrtagcatttaaaagttaattatatagtgctaacatctagaaattctgtgcagaactaacatattggaaccgtaattttcttatggcctcttgcattttcttatttctcagggtataaatactcggattcagtaagggtgtgataactgtataaaatacggcaagagttttattgcttgccaaactactgaatggccaaacatagataaaaatacaaggtccaaagaacagagtgaccacaatgatgtgggcagacaatgtggacagcgccttggagagcccatgtgatgatttttttggtacactgaccaggatgacaatgtaagaaacaagcaagaggatgaaacaggtgaaag

SEQ ID NO: 665869 - DNA, 593 bp, Homo sapiens
acagttgtttctttattaatgaatatattgaatgtatatgataaaaatcctcaataatctttttatgtttatttatgtctatttttatgtctattttgctgcagatctctatccttatgtttataaaagtcttaaatgtaaaatttaaagtaatttagtattgtctttatgcgttattattataacataagaaaagtgaaatgatgcattatacataatctattcaaactatcttatcgtagcatttaaaagttaattatatagtgctaacatctagaaattctgtgcagaactaacatattggaaccgtaattttcttatggcctcttgcattttcttatttctcagggtataaatactcggattcagtaasggtgtgataactgtataaaatacggcaagagttttattgcttgccaaactactgaatggccaaacatagataaaaatacaaggtccaaagaacagagtgaccacaatgatgtgggcagacaatgtggacagcgccttggagagcccatgtgatgatttttttggtacactgaccaggatgacaatgtaagaaacaagcaagaggatgaaacaggtgaaag

SEQ ID NO: 665870 - DNA, 593 bp, Homo sapiens
acagttgtttctttattaatgaatatattgaatgtatatgataaaaatcctcaataatctttttatgtttatttatgtctatttttatgtctattttgctgcagatctctatccttatgtttataaaagtcttaaatgtaaaatttaaagtaatttagtattgtctttatgcgttattattataacataagaaaagtgaaatgatgcattatacataatctattcaaactatcttatcgtagcatttaaaagttaattatatagtgctaacatctagaaattctgtgcagaactaacatattggaaccgtaattttcttatggcctcttgcattttcttatttctcagggtataaatactcggattcagtaagggtgtgataactgtataaaatacrgcaagagttttattgcttgccaaactactgaatggccaaacatagataaaaatacaaggtccaaagaacagagtgaccacaatgatgtgggcagacaatgtggacagcgccttggagagcccatgtgatgatttttttggtacactgaccaggatgacaatgtaagaaacaagcaagaggatgaaacaggtgaaag

SEQ ID NO: 665871 - DNA, 590 bp, Homo sapiens
ggcagtggagagacacatgtccaaaaaagagagatttccaaggagaaagtacaagggagaatgaagggttgamctacatgtcactgtgaccataatgagaatgtttcccatcacagtagcaccgtagatcagggaaaatgtcacaaagaagaaaatttgaagttcccatcgtccaaaaaatcctagtaaaataaactcggtcactagagatccatttttaagatccatttactcaactcagaaaggttccagaagttctttatatacaaagagaattaaaaaataagtcacagttaacaccaatattttcttatttctattagttggtgataatagttgatgatatgagatcatataattttaaatatatcaacacagagattagcttaaatattatatcactttgaaacaattactctgcagtaattacaaatcatttgaagaagtagaagttccattttctattgtttattccataaaatcatactcttatcaatggatcttgactttcttactcatttgttcacatataaagattagatactaattaattactttttattttgccttttattattatagtattctgt

SEQ ID NO: 665872 - DNA, 590 bp, Homo sapiens
ggcagtggagagacacatgtccaaaaaagagagatttccaaggagaaagtacaagggagaatgaagggttgacctacatgtcactgtgaccataatgagaatgtttcccatcacagtagcaccgtagatcagggaaaatgtcacaaagaagaaaatttgaagttcccatcgtccaaaaaatcctagtaaaataaactcggtcactagagatccatttttaagatccatttactcaactcagaaaggttccagaagttctttatatacaaagagaattaaaaaataagtcacagttaacaccaatattttcttatttctattagttggtgataatagttgatgatatgagatcatataattttaaatatatcaacacagagattagcttaaatattatatcactttgaaacaattactmtgcagtaattacaaatcatttgaagaagtagaagttccattttctattgtttattccataaaatcatactcttatcaatggatcttgactttcttactcatttgttcacatataaagattagatactaattaattactttttattttgccttttattattatagtattctgt

SEQ ID NO: 665873 - DNA, 558 bp, Homo sapiens
tgccactaagaacatttatgattcatgggaggagatcaaaacctcaacattaacaggagtttggaagaagctgattccagtcctcatggattactttgaagagttcaagacttacatggagaagacttcccatgaagaaggctttccacggagaaggtaattgcaaatgtggtagaaatagcaagagatctwgaattagaagagagtcctgaagatgtgactgaattgctgcaatatcatgacaaaactttaaaacatgagaagttgtttcttatgaatgagcaaataaactgttttctttggggggtggtgggaatggaacctcctcctggtgaggatgctgtgaacactgttgaaatgacaacaaaggatttagaatattccataagtgtaggtgataaagtagcagcaaggtttaagatgattggctccaattatgaaataagttctaatttgggttgtatgctgtcgaatagcatcatatactacaaataaatagtttgtgaaataaggagtcaattgatgtggcaaattttattattgtcttattttaagaaa

SEQ ID NO: 665874 - DNA, 558 bp, Homo sapiens
tgccactaagaacatttatgattcatgggaggagatcaaaacctcaacattaacaggagtttggaagaagctgattccagtcctcatggattactttgaagagttcaagacttacatggagaagacttcccatgaagaaggctttccacggagaaggtaattgcaaatgtggtagaaatagcaagagatcttgaattagaagagagtyctgaagatgtgactgaattgctgcaatatcatgacaaaactttaaaacatgagaagttgtttcttatgaatgagcaaataaactgttttctttggggggtggtgggaatggaacctcctcctggtgaggatgctgtgaacactgttgaaatgacaacaaaggatttagaatattccataagtgtaggtgataaagtagcagcaaggtttaagatgattggctccaattatgaaataagttctaatttgggttgtatgctgtcgaatagcatcatatactacaaataaatagtttgtgaaataaggagtcaattgatgtggcaaattttattattgtcttattttaagaaa

SEQ ID NO: 665875 - DNA, 558 bp, Homo sapiens
tgccactaagaacatttatgattcatgggaggagatcaaaacctcaacattaacaggagtttggaagaagctgattccagtcctcatggattactttgaagagttcaagacttacatggagaagacttcccatgaagaaggctttccacggagaaggtaattgcaaatgtggtagaaatagcaagagatcttgaattagaagagagtcctgaagatgtgactgaattgctgcaatatcatgacaaaactttaaaacatgagaagttgtttcttatgaatgagcaaataaactgttttctttggggggtggtgggaatggaacctcctcctggwgaggatgctgtgaacactgttgaaatgacaacaaaggatttagaatattccataagtgtaggtgataaagtagcagcaaggtttaagatgattggctccaattatgaaataagttctaatttgggttgtatgctgtcgaatagcatcatatactacaaataaatagtttgtgaaataaggagtcaattgatgtggcaaattttattattgtcttattttaagaaa

SEQ ID NO: 665876 - DNA, 558 bp, Homo sapiens
tgccactaagaacatttatgattcatgggaggagatcaaaacctcaacattaacaggagtttggaagaagctgattccagtcctcatggattactttgaagagttcaagacttacatggagaagacttcccatgaagaaggctttccacggagaaggtaattgcaaatgtggtagaaatagcaagagatcttgaattagaagagagtcctgaagatgtgactgaattgctgcaatatcatgacaaaactttaaaacatgagaagttgtttcttatgaatgagcaaataaactgttttctttggggggtggtgggaatggaacctcctcctggtgaggatgctgtgaacactgttgaaatgacaacaaaggatttagaatattccataagtgtaggtgataaagtagcagcaaggtttaagatgattggctccaattatgaaataagttctaatttgggttgtatgctgtcraatagcatcatatactacaaataaatagtttgtgaaataaggagtcaattgatgtggcaaattttattattgtcttattttaagaaa

SEQ ID NO: 665877 - DNA, 556 bp, Homo sapiens
gaaattgccacattcattgcaactgtcagcaaccaattccctgatcagtcagcactcatcaacattgaggcaagactgtccagtggcaaaaagattacatcttgttaaaggctcagataagcgtaacacatttaaaaattagggtatgtgtgtttttatccataacgctattacatacttaatagaccacagtaaagtataaacataacatttatatgtactaggaaaccaaaaaaattgtgactcactttattgtgaaattcactttattgtagtggtctggaaccaaaccagcaatatctctcaggtatccctgtactgagaattacaagaaacatggactcagcttcagatkgtttgcgcttgttttttcaaatcctctgtgttaccattgttcacagtgaggagcttgtgcattgtgtatatgtgtacagatgtggtggtttagaagtaaatagtaaagtgatttagtccaatgtattacttctgtttggatgtaaagtttaacactaaatcattgttactcagttttttagacaatgttcatagaatctag

SEQ ID NO: 665878 - DNA, 556 bp, Homo sapiens
gaaattgccacattcattgcaactgtcagcaaccaattccctgatcagtcagcactcatcaacattgaggcaagactgtccagtggcaaaaagattacatcttgttaaaggctcagataagcgtaacacatttaaaaattagggtatgtgtgtttttatccataacgctattacatacttaatagaccacagtaaagtataaacataacatttatatgtactaggaaaccaaaaaaattgtgactcactttattgtgaaattcactttattgtagtggtctggaaccaaaccagcaatatctctcaggtatccctgtactgagaattacaagaaacatggactcagcttcagatggtttgcgcttgttttttcaaatcctctgtgttaccattgttcacagtgaggagcttgtgcattgtgtatatgtgtacagatgtggtggtttagaagtaaatagtaaagtgatttagtccaatgtattacttctrtttggatgtaaagtttaacactaaatcattgttactcagttttttagacaatgttcatagaatctag

SEQ ID NO: 665879 - DNA, 412 bp, Homo sapiens
acaagaaacatggactcagcttcagatggtttgcgcttgttttttcaaatcctctgtgttaccattgttcacagtgaggagcttgtgcattgtgtatatgtgtacagatgtggtggtttagaagtaaatagtaaagtgatttagtccaatgtattacttctgtttggatgtaaagtttaacactaaatcrttgttactcagttttttagacaatgttcatagaatctagagtgatcgaaagtggtcaacaacaattaagtgattagtatgtgccaggctccattctaagtgtttcatatacattaatttttttaatgctcataccatgatgtaagtgctatttttttcttcatgttgcatgtaaggaaactgtgacattcaaatagttaatgacgtattcatggttacacag

SEQ ID NO: 665880 - DNA, 592 bp, Homo sapiens
aataggaagtgactggtttcttttctccaatgacctgtaattctctccttgtttgcattcttcctcagttttctgtcaaaatattgtattatcatcatccaaacgtaactgcctctattgttttcatatcttagatatttttgagaaatggataatggtaacaaattagagaaaataaagatgatgtaaggttcctgtaggtcaacctgtaggaacacactgaatgggtactcaatgacaggctgtggccctggaggaggctgcatgrgtggccacacctgctttacagggttgtgttgcatgcttgtcatgtaaaggagcaagaattttgcttttgagacttttataacagcagtaacaataactagatatacttgggaaaacaacaagagttgacaattgctagacagaatgaagataacagctgtaatttgagggtgaatagctttgctacatgggattttatgccctgtgatacagtgacaacagaaaaacttgggtaagaaatcaatacaattaaacataagttgatttaaaaagctttattttggccttttatttcagaggaaaagctggcattaatttatgttga

SEQ ID NO: 665881 - DNA, 592 bp, Homo sapiens
aataggaagtgactggtttcttttctccaatgacctgtaattctctccttgtttgcattcttcctcagttttctgtcaaaatattgtattatcatcatccaaacgtaactgcctctattgttttcatatcttagatatttttgagaaatggataatggtaacaaattagagaaaataaagatgatgtaaggttcctgtaggtcaacctgtaggaacacactgaatgggtactcaatgacaggctgtggccctggaggaggctgcatgggtggccacacctgctttacagggttgtgttgcatgcttgtcaygtaaaggagcaagaattttgcttttgagacttttataacagcagtaacaataactagatatacttgggaaaacaacaagagttgacaattgctagacagaatgaagataacagctgtaatttgagggtgaatagctttgctacatgggattttatgccctgtgatacagtgacaacagaaaaacttgggtaagaaatcaatacaattaaacataagttgatttaaaaagctttattttggccttttatttcagaggaaaagctggcattaatttatgttga

SEQ ID NO: 665882 - DNA, 533 bp, Homo sapiens
tgtattattgtttaatggtaagttttacatggagattttcctaatatctaattatgatcactaattctgtctctctgcagttccttcttcarttgtcaacatggtatgtttatttgcatgttctgtcaacacctgaaagtttacgaaaagaaaaaatattccctacttgcaaaaaagagttgctagcttttctattattttcaatgatagtacgagtttttcttaatgatcagaatttaccttttttttgtttattcatcatacttaatcacttaccatctacggcccaattttactctccagtatcattttgagggcatattttctttcaattttcatataaattgttaatttcagctctttctgagatactattatgtgacctcccaattaaagaggatctaataccttacatgccaaagccttttccttccagccaaaacaaaactaattaaaatatcgtcctcagtatattgaagttctaataaatcagctcgctacaatatttttacttacctgttttaaaggcacag

SEQ ID NO: 665883 - DNA, 608 bp, Homo sapiens
gatgttgtgaataaattcaaattaattgacatttgtcactatttcgaagtctttgcttagtccctgttaaattcaccacttaacctatggcttaatctagatttttctcatagactcttttattgaaggagtcataacagttaatttaaattttttttattataaatgttagaatcacccatacattttttttgttttgttttgttttgtttttttgttgtttttttttgagacagagttttgctcttgtcgcctagactggagtgcagtttcatgatctcagctcactgcaacctctgccttcctggttcaagcaattctcctgcctcagcctcccaagtagctgggattacaggcacatgccaccatgcccggctaagttttgtatttttagtagagatgggatttcaccatgttggccaggctggtctcaaactcatkacctcgggtgatccacccccctcggcctcccaaagtgccggattacaggcgtgagctacctcacccggccacccatacttctaccatgtttgatagcatttgctaacaaggagtgcatttatttatatcatgttgctcattataaccatttatacagtggcagagaa

SEQ ID NO: 665884 - DNA, 608 bp, Homo sapiens
gatgttgtgaataaattcaaattaattgacatttgtcactatttcgaagtctttgcttagtccctgttaaattcaccacttaacctatggcttaatctagatttttctcatagactcttttattgaaggagtcataacagttaatttaaattttttttattataaatgttagaatcacccatacattttttttgttttgttttgttttgtttttttgttgtttttttttgagacagagttttgctcttgtcgcctagactggagtgcagtttcatgatctcagctcactgcaacctctgccttcctggttcaagcaattctcctgcctcagcctcccaagtagctgggattacaggcacatgccaccatgcccggctaagttttgtatttttagtagagatgggatttcaccatgttggccaggctggtctcaaactcatgacctcgggtgatccacccccytcggcctcccaaagtgccggattacaggcgtgagctacctcacccggccacccatacttctaccatgtttgatagcatttgctaacaaggagtgcatttatttatatcatgttgctcattataaccatttatacagtggcagagaa

SEQ ID NO: 665885 - DNA, 625 bp, Homo sapiens
caggactccatcttccctcacttttaggtggagggctrtggtttcaggtttcaccctgggagcgttaggacttaagtattgcagaagctttgttcctagtagactctgaggagaggatgaggctatctttccctacctagcatctacttgtagagtgagcaggaacaggctgagaatactagcgccctcttatcacctctgtcttttagcttgcttgtacagcagtcgtttgtgccagaaaaggcaagccaagatgaccagagactcgactcttctcagtgcccactcagagagcaggcatatcatcttgggagaagtgggctgctgtccctgctcttgtgcactggcacagaagttctgcccaggaagaaaggcatgccataaggatgaaaactctgcagctccacctgaggggcctacctttatttggaacagagcttcaagagttccatgtctataggcattgtcagaaaccacagagatgctgatggagaacaattaagaagttgctgatagcaccatgtttctggtatcaacatgtcacatggcagagtcaacatgtttatcaaagaggatcaggcaagagacagataagagccctactggaatcatagatagtcctggg

SEQ ID NO: 665886 - DNA, 574 bp, Homo sapiens
tatcatatgaatgtcttctactggcagaaactcacaggaataagtttacaagagagtctgggaaatgcagttttcaggcttgtaactccctactgtagagagaagactatagagctgacatggggttgaaggtcaacagacaaacattcagaatgctcscctttggttactcagtatcaatacacatcattctacatttatttaaacttccaaagaatgacaatagcttcagtctaaagatgcatctatcctgcaaacaaattaagacactctggcctcctttctctaactgaaaaccaaaaatcctcattggttactatatccatttctgtacggtgttgccatcttttcgaattcattcataatcccacattaatattctgtaacctagagactaaattgtaaattagtctccttgataagaaaaaataaaaaggaaaaaaggaaccaggaatttgtgaacaaatgcaatttatataaaaaatttgtagcttctaaaatcatcattttactaacaaattgtgagacaattaatgttcacggctaccttcttttactgcctattttattcctc

SEQ ID NO: 665887 - DNA, 624 bp, Homo sapiens
tatcatatgaatgtcttctactggcagaaactcacaggaataagtttacaagagagtctgggaaatgcagttttcaggcttgtaactccctactgtagagagaagactatagagctgacatggggttgaaggtcaacagacaaacattcagaatgctcccctttggttactcagtatcaatacacatcattctacatttatttaaacttccaaagaatgacaatagcttcagtctaaagatgcatctatcctgcaaacaaattaagacactctggcctcctttctctaactgaaaaccaaaaatcctcattggttactatatccatttctgtacggtgttgccatcttttcgaattcattcataatcccacattaatattctgtaacctagagactaaattgtaaattagtctscttgataagaaaaaataaaaaggaaaaaaggaaccaggaatttgtgaacaaatgcaatttatataaaaaatttgtagcttctaaaatcatcattttactaacaaattgtgagacaattaatgttcacggctaccttcttttactgcctattttattcctctttgtatgcattcagatctccagtgatggtgattctttacgtggtggaat

SEQ ID NO: 665888 - DNA, 624 bp, Homo sapiens
tatcatatgaatgtcttctactggcagaaactcacaggaataagtttacaagagagtctgggaaatgcagttttcaggcttgtaactccctactgtagagagaagactatagagctgacatggggttgaaggtcaacagacaaacattcagaatgctcccctttggttactcagtatcaatacacatcattctacatttatttaaacttccaaagaatgacaatagcttcagtctaaagatgcatctatcctgcaaacaaattaagacactctggcctcctttctctaactgaaaaccaaaaatcctcattggttactatatccatttctgtacggtgttgccatcttttcgaattcattcataatcccacattaatattctgtaacctagagactaaattgtaaattagtctccttgataagaaaaaataaaaaggaaaaaaggaaccaggaatttgtgaacaaatgcaatttatrtaaaaaatttgtagcttctaaaatcatcattttactaacaaattgtgagacaattaatgttcacggctaccttcttttactgcctattttattcctctttgtatgcattcagatctccagtgatggtgattctttacgtggtggaat

SEQ ID NO: 665889 - DNA, 617 bp, Homo sapiens
gaggtatggaagtttcctgccacctcttcagaattggaggaacagatttattggtcctccataggcaaagaagagggcctgtccctcttcaaatctctttctacactcaaaartcatgaggaacatgcaagtgaaagaggaggcaaatggttttttaattgagaaggatcaagaaaaatgaaattgataagatggaatatggaacatgaacatactaggagtcacttctgtagttgctgctgaaagtaagataagcagagatgataaacagaatgaatccttgatacatgtgaatctatggttgtgcaacttgaggtggcctcaattttcctgagattgaaagaagggtccagtatttgagtttcctcccatggagcacgtgaattagtagattggggagtatagtgctcagagatagcataatgaacatttattgctggcttccctctgcctcacttactttctctgacaagcagcttaatgtccaaacagatctcttaaactatccataccatttataacgatattataaagtgcagaactctggtttaaaaaaaaagtgattgacagggaacacctccatgttgttctagataggtgaagcagacccatgtgaa

SEQ ID NO: 665890 - DNA, 617 bp, Homo sapiens
gaggtatggaagtttcctgccacctcttcagaattggaggaacagatttattggtcctccataggcaaagaagagggcctgtccctcttcaaatctctttctacactcaaaaatcatgaggaacatgcaagtgaaagaggaggcaaatggttttttaattgagaaggatcaagaaaaatgaaattgataagatggaatatggaacatgaacatactaggagtcacttctgtagttgctgctgaaagtaagataagcagagatgataaacagaatgaatccttgatacatgtgaatctatggttgtgcaacttgaggtggcctcaattttcctgagattgaaagaagggtccagtatttgagtttcctcccatggagcacgtgaattagtagattggggagtatagtgctcagagatagcataatgaacatttattgctggcttccctctgcctcacttactttctctgacaagcagcttaatgtccaaacagatctcttaaactatccatacsatttataacgatattataaagtgcagaactctggtttaaaaaaaaagtgattgacagggaacacctccatgttgttctagataggtgaagcagacccatgtgaa

SEQ ID NO: 665891 - DNA, 617 bp, Homo sapiens
gaggtatggaagtttcctgccacctcttcagaattggaggaacagatttattggtcctccataggcaaagaagagggcctgtccctcttcaaatctctttctacactcaaaaatcatgaggaacatgcaagtgaaagaggaggcaaatggttttttaattgagaaggatcaagaaaaatgaaattgataagatggaatatggaacatgaacatactaggagtcacttctgtagttgctgctgaaagtaagataagcagagatgataaacagaatgaatccttgatacatgtgaatctatggttgtgcaacttgaggtggcctcaattttcctgagattgaaagaagggtccagtatttgagtttcctcccatggagcacgtgaattagtagattggggagtatagtgctcagagatagcataatgaacatttattgctggcttccctctgcctcacttactttctctgacaagcagcttaatgtccaaacagatctcttaaactatccataccatttataaygatattataaagtgcagaactctggtttaaaaaaaaagtgattgacagggaacacctccatgttgttctagataggtgaagcagacccatgtgaa

SEQ ID NO: 665892 - DNA, 624 bp, Homo sapiens
tacacaacagaatactacatagcctttaaaagaggaggaaattctttccattgagacaacatgaatgaaactggagaacaacatgccaagtgaaataagtcagccacagaaaaatactgtatgacctcacttatctgtggaatctgaaaaagttgacctcatagaaacagagtgttagaaaggtggttaccagaggttgggggtagttggagggatggagaaaggaaagatattgatcaaagggtacaaaatctcagactggaggagcaacttttagtgatctattgcaatgtatggtgaccacatttaataataatgtattgaaggtatatacacatycctagatatatgtatctagagagagaggagggagagagagggagagatgggatcttgctctgttgcccaggcatcctggatctcctggccctaagcaattctcctacttcagcctcctgggtagctgggactattggtgtgcaacactacaactgcttgattagaaaaaagaaaatttagagactccttgtccaggctggcctcaagctcctgacattaagctatcctcctgcctcagcctcccaggtagctgattacagttacaagccaccacacctggctttg

SEQ ID NO: 665893 - DNA, 624 bp, Homo sapiens
tacacaacagaatactacatagcctttaaaagaggaggaaattctttccattgagacaacatgaatgaaactggagaacaacatgccaagtgaaataagtcagccacagaaaaatactgtatgacctcacttatctgtggaatctgaaaaagttgacctcatagaaacagagtgttagaaaggtggttaccagaggttgggggtagttggagggatggagaaaggaaagatattgatcaaagggtacaaaatctcagactggaggagcaacttttagtgatctattgcaatgtatggtgaccacatttaataataatgtattgaaggtatatacacattcctagatatatgtatctagagagagaggagggagagagagggagagatgggatcttgctctgttgcccaggcatcctggatctcctggccctaagcaattctcctacttcagcctcctgggtagctgggactattggtgtgcaacactacaactgcttgattagaaaaaagaaaatttagagactccttgtccaggctggcctcaagctcctgacattaagctatcctcctgcctcagcctcccaggtagctgattacagktacaagccaccacacctggctttg

SEQ ID NO: 665894 - DNA, 612 bp, Homo sapiens
ttaactgtcctaccttgtattcatccagaagtctctgagatcaggaatggagtgcaaatacttttactgggcaaaagcgatcctaagaaaatctggtarttttctggtagagtgaggaagtgggacaagggaagaagagaaccaataaacagcacattaccaaacaatttgccactgtaggcaattgaagcaatccttcttctggcattctcaatatgccttactctgcttactttttttccttagtgcttatcatagatgagtcatttatttgtatttatgtgtttgtgttttctgctagattgtaagtgtcaagaggaaagtaattcttacctattttattcattgatgcaacctaaggatttatactgtatgtatagttagctgtcctctttttttggccgtaacaaaacaccatgaacccttcttcgtttgttgaaaacacactttttcatgtgttattatcttctatcacacagatatactttaattgattttaattattctggcaaatttaaattgcttaataattcttgatctataaatcagtaaattgcttaataattcttgatctataaatcagtaaattgcttaataattcttgatctatta

SEQ ID NO: 665895 - DNA, 610 bp, Homo sapiens
cgcattatggagagcagtccactttactcaaggctcaccattttaaatgttaatgttatccaaaaatgccctctatgttgtatcataaataaagccaccacatttagtaaatctttccttacctccaaatccagtattcacttaatctggttgtcaaaaacttctctataattctttattttacacaatatatctgtaccacctaatgactgcatttcagaaacaaatcacactgaagctaatagactgcttctgcagactttctttrgtaatcattatctgtgtgtttaaaagacagaaacagaacttagattttgcaactcattttaagtgaaacgcaattatctaatgccaatgtgccacttgagactttttactatactcagaggctgccttggtagtcaaatttctcataaatttggtagaacttatatacctaatatggaagtaaatgtcatgtgaatagttgtaaatgtgatgaccatttatcagaatgttttggaatatttgtcttcagcgtggacccattagtagaagaatcctgcattaaccttgaatgatttggggaagtaagtaggctatcaataataaatgatgaacaaagtaaccc

SEQ ID NO: 665896 - DNA, 592 bp, Homo sapiens
ggtcttggaaatatctttttcagtgaaagtcatcctaactgcattttcktactcattaatcatcctccctttattttcccactctccccactacccttcccattgtctagtaaccatttttatactatctccatcagtttattttgctcagcttccacataataatttaaaatatttttaaaagaaagtcattctaaatcatctcggagaaagtttataaataataaatctataaatgatctaattcatttatagatagatttatgtatctaatcaaataggctttttatcccaaatacaattaatttaaaaatgataagagcaaaaataaaaatctgtggggtgaagaaactaaataaaacctaggttaagtgatttatttcttcttgtattgattggtttttataccaaataaagtgagatgaagaactgtgttagtgtcttatagatacagtctgaatgagtgagtgtgtaagtgagtaaatgaataaggaagaagatagcctgactactgccaagagaggtcctggaagggactgagattttcaaaattccaaaggaagtattatggagataaccaagttggtaaaat

SEQ ID NO: 665897 - DNA, 592 bp, Homo sapiens
ggtcttggaaatatctttttcagtgaaagtcatcctaactgcattttcttactcattaatcatcctccctttattttcccactctccccactacccttcccattgtctagtaaccatttttatactatctccatcagtttattttgctcagcttccacataataatttaaaatatttttaaaagaaagtcattctaaatcatctcrgagaaagtttataaataataaatctataaatgatctaattcatttatagatagatttatgtatctaatcaaataggctttttatcccaaatacaattaatttaaaaatgataagagcaaaaataaaaatctgtggggtgaagaaactaaataaaacctaggttaagtgatttatttcttcttgtattgattggtttttataccaaataaagtgagatgaagaactgtgttagtgtcttatagatacagtctgaatgagtgagtgtgtaagtgagtaaatgaataaggaagaagatagcctgactactgccaagagaggtcctggaagggactgagattttcaaaattccaaaggaagtattatggagataaccaagttggtaaaat

SEQ ID NO: 665898 - DNA, 612 bp, Homo sapiens
ttagttttctgttcctgaattgctttgcttaggataatggccttcagctacattcatattgtkgcaaattacataatttcattctttttatggctgtctagtattccatgatgtatatgtaccacattttctttattcagtccaccattaatgggtgcctaggttggttccatgtctttgctattgtgaatagtgctgcaatgaacatgcacatgtatgtgtcttcttagcagaatgatttattttcttttagtatatacccagtaatgagattgctgagtctaatggtagttctgctttaagttctttgagaaatctccaaactggttttcacagtggttacactaatttacattctcaccaacagcttataagcattctcttttctctgcggcctcaccagcatcttttattttgtgactttttgatgtcagagtcactctggatggtgtgagatggcatctcattgcagttttgatttgcgtttctctgatgattactgatgttgaacattgtttcatttgtttcttcttttgagaagtgtctattcatgtcttttgtttactttttaatggaattatttgttttttgcatgctgcattgtttaagttt

SEQ ID NO: 665899 - DNA, 612 bp, Homo sapiens
ttagttttctgttcctgaattgctttgcttaggataatggccttcagctacattcatattgtggcaaattacataatttcattctttttatggctgtctagtattccatgatgtatatgtaccacattttctttattcagtccaccattaatgggtgcctaggttggttccatgtctttgctattgtgaatagtgctgcaatgaacatgcacatgtatgtgtcttcttagcagaatgatttattttcttttagtatatacccagtaatgagattgctgagtctaatggtagttctgctttaagttctttgagaaatctccaaactggttttcacagtggttacactaatttacattctcaccaacagcttataagcattctcttttctctgcggcctcaccagcatcttttattttgtgactttttratgtcagagtcactctggatggtgtgagatggcatctcattgcagttttgatttgcgtttctctgatgattactgatgttgaacattgtttcatttgtttcttcttttgagaagtgtctattcatgtcttttgtttactttttaatggaattatttgttttttgcatgctgcattgtttaagttt

SEQ ID NO: 665900 - DNA, 547 bp, Homo sapiens
aagagggatatttgaacccacaatattaggcaactgctttctctactacatgtgataaggtgatgaaactaatatattccattagcttgttgttatatagtcataaattgaattcactctaatacatctaactgatatctcttaaatatgtacagaaagaaatacctgtaaattgactgcagatatctacagatgctcctcaacttatgatgggcttatgtctgaataaacccaccgtaagttgaaaatactgtaagtcaagaatgtatttaataaacctaacctactgaacatgatagcttagcctagcctccctcaaacatgcccagaacattgacactggtctacagttagacaaaatcatctaacacaaagcaaattttataataataaagagttgaatgtaatttatggaatgctgtgcggaaagtgaaaaacaaaatggttacatgartaatcaaagtatggtttgtacaccatcttaaagacaaaaaattataaggtgaatcatcataactcagggaccatctgtagttgtaataagtta

SEQ ID NO: 665901 - DNA, 493 bp, Homo sapiens
ctgttggcttcatcatgagcttcagctataaaaatggaacaaattgaacttttttttttttttgagatggggtctcactctgtcacccaagctggagtgcagtggtgcaatctcggttcgctgcagcctgtgcctcctgggctcaagccatcctcccacctaagcctcctgagtagctgggaccacaggcatgcgtcaccacagctggctaatttttgtatttttagtagaratggggtcgcaccatattggccaggcctgagctcaagtgatctgtctgccttggcctcccgaagtgctgggattaaaggcgtgagccactgtgcctggtcaaattgaacttttaagacttttatttttttaaagttaagttgcctgggagtgcttcactacacacttggatactttgatggttgctctcagttcccttttcagcaaactggattttggtttggtataggcctatgacttttaagcttaggggttctctgaa

SEQ ID NO: 665902 - DNA, 481 bp, Homo sapiens
atatctggtccctgcccctggttctgcacacagaactctttyaattaatttatttattttgagacagggtctcactctgttgcctaggctggagtacagtggtgcaatcatagttcactgcaagctcaaattcctgggttcaagtgagcctccctccttagccctcccagtagctgggactacaggtgtgccaccatgccccactatttacgtggttttttttttttttttttttgtagcaatgaggtctcgccatgttgctcaggatagtcttgaactcctggactaaagcgagccttctgccttggcttcccaaaatgctggaattatgggcatgagccattacgctgggtccacagaacttgtaaatctcttgcaatttgctgagcaataagggctctaggtgcatcttttgttctgtatttggtctctgagctcagttcctcacacagaactcctaatcccttggaatttcctgggt

SEQ ID NO: 665903 - DNA, 501 bp, Homo sapiens
aggtttaatactttttgttttcctagcctmagtacttgtgtggtgaaatccacaatgacacctgaagaaggaggtgacttgactcggattacagagcaagttccaagctgagtctaactcctggactcatgcttccagctttctgctcttttctccaggcgttgatactttgttaaacatccaaggcaaagaatatgcagagagaatatgagtttatcaagataggtagacattctatcatggaaaaagaatgttttctattgagttattgggacttgggcaaagccatccttggctaattcttttgctagcttttccatgaaacaattgatggactgtgcttcttcggtggtattttcatagaaaattcaagttcatgaactgcccaatgatatacagcaccaaagttatatgatgaaaagcagagttaccaacattgccaacaagccttgcgatgaatggatgtgctgagctagtacataaggaaggaattctgggtcc

SEQ ID NO: 665904 - DNA, 601 bp, Homo sapiens
gccattctgaaaggctgggaagcatagcctctggccaaagcccagacacaggtactgcaagggagggaaagaggagacaggaatttgtgctgatttcaattatttgtgatagtgcttagtattttcatagataatcttcccctttgcttttgggagcatgctctgggtgaaatgcccagacacttggaattcacttcytcaaaattcttttactttttcctagggactttaagcatagcaacaaccttatttatttgttatttctcttcaacttccttcatcatttttttccacagtttgtccatgtaagtgtttgaagattgacttgctctcctgggagtttaggttaaggggagatgggtgggaaaggcattccaagtagaagaaacaggatgcacatacacataaggaattttttaaaaagcaaggcattcaataatactggggaacagtatgcaaggggctgagcaaaaggggggaaatagggccagaaagggaggcagggaccagttatgaaaaaccgtgtaaactattttgaccatgacatcaacataggtttctaaggtggggagaatcaggatcagatttatgtttttaaaag

SEQ ID NO: 665905 - DNA, 601 bp, Homo sapiens
gccattctgaaaggctgggaagcatagcctctggccaaagcccagacacaggtactgcaagggagggaaagaggagacaggaatttgtgctgatttcaattatttgtgatagtgcttagtattttcatagataatcttcccctttgcttttgggagcatgctctgggtgaaatgcccagacacttggaattcacttcttcaaaattcttttactttttcctagggactttaagcatagcaacaaccttatttatttgttatttctcttcaacttccttcatcatttttttccacagtttgtccatgtaagtgtttgaagattgacttgctctcctrggagtttaggttaaggggagatgggtgggaaaggcattccaagtagaagaaacaggatgcacatacacataaggaattttttaaaaagcaaggcattcaataatactggggaacagtatgcaaggggctgagcaaaaggggggaaatagggccagaaagggaggcagggaccagttatgaaaaaccgtgtaaactattttgaccatgacatcaacataggtttctaaggtggggagaatcaggatcagatttatgtttttaaaag

SEQ ID NO: 665906 - DNA, 501 bp, Homo sapiens
tgtgagaatgtgacacaagaagtattagaaggagcatgtggctaggtttttctcatctggatttgggtctaggcatttgttactttggaaaaaaagaggaataattaagaagaacactgttcacttagttacttttacttgacagaaagcagagaaacttctattactagtgcatataaaatgttctattagtaataactaaaacatgttaaccacaacatcaaatggtcttgaagtcctgggacagagtctttccctccctcttctgttctctgctattttgttayaattttcttcatcttagtacttttatatttttacttcgctgagatttggaagggacagaaggcgaaagcaagcttgtgtctaatttgccatcttaaaccagaagtttatctttttttgtcttaaataatgtatttatgcctttatttttagtcccattagtttagtcagtatttcatttcttctctaagtaagatggaacatcagctacctgac

SEQ ID NO: 665907 - DNA, 501 bp, Homo sapiens
tgtgagaatgtgacacaagaagtattagaaggagcatgtggctaggtttttctcatctggatttgggtctaggcatttgttactttggaaaaaaagaggaataattaagaagaacactgttcacttagttacttttacttgacagaaagcagagaaacttctattactagtgcatataaaatgttctattagtaataactaaaacatgttaaccacaacatcaaatggtcttgaagtcctgggacagagtctttccctccctcttctgttctctgctattttgttataattttcttcatcttagtacttttatatttttacttcgctgagatttggaagggacagaaggcgaaagcaagcttgtgtctaatttgccatcttaaaccagaagtttatctttttttgtcttaaataatgtatttatgcctttatttttagtcccattagtttagtcagtatttcatttcttcyctaagtaagatggaacatcagctacctgac

SEQ ID NO: 665908 - DNA, 500 bp, Homo sapiens
ttaggggaaagaataacaacagcagcaacaaaagttaaacaaatagtgaggtgatatatttctaaatatttaagaaattgttactttactgaaagagtctagataaatactcttagagtgacaatggagcaggaagagtcccaaatttgctctggggagctggattttaatccacacctcccatgcctcaccagccttagagacagtgaatggtcataccttaactcaaaactctcccccagtgacatcagtttggaacacccaaagcctagtacattttaagaaaactcttctaaatggccacaggatctgactttcagcaggcratgcttatttatacactgcatatgtttgtttgtttgttttttgagacagagtctcactgtcgcccaggctggagtgcagtggcacgatctcagctcaccacaacctctgcctcccaggttcaatcaattctcctgtcccagcctcccaagtagctgggattacaggcgtctgcc

SEQ ID NO: 665909 - DNA, 500 bp, Homo sapiens
ttaggggaaagaataacaacagcagcaacaaaagttaaacaaatagtgaggtgatatatttctaaatatttaagaaattgttactttactgaaagagtctagataaatactcttagagtgacaatggagcaggaagagtcccaaatttgctctggggagctggattttaatccacacctcccatgcctcaccagccttagagacagtgaatggtcataccttaactcaaaactctcccccagtgacatcagtttggaacacccaaagcctagtacattttaagaaaactcttctaaatggccacaggatctgactttcagcaggcaatgcttatttatacactgcatatgtttgtttgtttgttttttgagacagagtctcactgtcgcccaggctggagtgcagtggcacgatctcrgctcaccacaacctctgcctcccaggttcaatcaattctcctgtcccagcctcccaagtagctgggattacaggcgtctgcc

SEQ ID NO: 665910 - DNA, 483 bp, Homo sapiens
agatattctaggtggagagaataacatgtgcaaagagcctgaggcatacrgtatatttaagaaaccaagagcaggccagagtagctacagcttggggaacggagggtgttcaggtatggcaagaccaagcaagcatggccttatagatcttattaatggtttttgcattttattttaagaagaattgaaaatcaaggttttaaacagaatatagtaacagagagctatgtccatttcatattttatttttaatttcaaatcatttgttatctgtaaggagttcttggatttggattttcaaggccaattcaatggactcatcctatatatgcatgaaagtgttttataaaaagccttttttcttaaaacattagcttcctctggccaggcacagtggctcatgcctataatcccagcactttgggaggccaaggtgggaggtttgcctgagcccaggagcttgagaccagcctagacaagatg

SEQ ID NO: 665911 - DNA, 563 bp, Homo sapiens
tgattttaaggtttccctggctgtatgaatatttcttccaaaggacatggtcagaaatctccagggaatttcaaatctcttttctagggagaatccaatttttctggtgtagaccrgcatcgccaaaccatcatcagtgcagcatggcttcctccttcattcctccttcaccagctctgtactgccgcctgccaggttccaggaagggcggtgatgcagatccgtgaataaccaagacaacatcccctgcctgggaaagctgccctgttccatcctcactgcagtcccacactctctcaaagggacccttcaagattatggcagcccttcttgctgcgctatcaggattagggctggagttgtgaacccagaatagcaaattcaattcctctcaaatcagtttctcaacgttgtcctctaacctcttagcaggattgagggagtttctttctcttcattaggcaggttgtgggactcacttaaaccaagcagcaaagaggttaattgaccaggtttgtgttgttatttatatgtcatgtaaacacccagctggtcctggcctt

SEQ ID NO: 665912 - DNA, 591 bp, Homo sapiens
atgagtcacatatttctgcttctttacaggtacaatattttttaacctcctgttgaatattgttataaaggagttacagagagtctggattatgttatcttcttytaaatggtgttgaggtttattctatcaggctattaaactactaaaaaatcctcttgatcttgctaggctttgttttgttatgtattattattatttattctatgtcagttttatccttagtcctgagacatggccctttgtctgggacatggtatttactcctaaggtctatcctctttagaatttcaattgaatggatgaggtgcttagtaaggtctctccatttaggctgggacagtattccagtgtttgcagtactgcacagtctatgatatcttggcccagttctcttgttcatagcaaccattctctgctaggcctcattaagtcctatcctgcacatgggctacacaggaatgcttgtgaaatcttctttgtcctcttcttctgcatactcctttctttgtggtattctgtcttacaaatttcagggatgacaactactctaaacttttatctagatttcttcagctcagcaagacttcc

SEQ ID NO: 665913 - DNA, 591 bp, Homo sapiens
atgagtcacatatttctgcttctttacaggtacaatattttttaacctcctgttgaatattgttataaaggagttacagagagtctggattatgttatcttcttttraatggtgttgaggtttattctatcaggctattaaactactaaaaaatcctcttgatcttgctaggctttgttttgttatgtattattattatttattctatgtcagttttatccttagtcctgagacatggccctttgtctgggacatggtatttactcctaaggtctatcctctttagaatttcaattgaatggatgaggtgcttagtaaggtctctccatttaggctgggacagtattccagtgtttgcagtactgcacagtctatgatatcttggcccagttctcttgttcatagcaaccattctctgctaggcctcattaagtcctatcctgcacatgggctacacaggaatgcttgtgaaatcttctttgtcctcttcttctgcatactcctttctttgtggtattctgtcttacaaatttcagggatgacaactactctaaacttttatctagatttcttcagctcagcaagacttcc

SEQ ID NO: 665914 - DNA, 484 bp, Homo sapiens
caataaatatggcactttatctttaaaaatacctgccatttgctgatggaagagggagctgagagggttgctgcttgtgttaggatgaagtrgtagaagaaagatcaccaacatttttgattttttgcagccttaaaattctgaaatgtgggccatttgaagcatgcatttataatggatatccgtttcatcaaaattgaaaatttgaaaatgtagcattttcttctttagttaatttctgtatccctgctggaaattcctttgcagttttctcatccacacttgaggacttcactcaatagctgaagtctttggaaattgtggtgatatttgaaatcaccaaatcagcccctcatagaacaaaaggtgtcatttctgcagaatgtggtaatttccattaaggtttttgcacgtagatagtgctttctctttgtgagcgaggttgcccttatttttcaccacctagttttcggtttcaacaatg

SEQ ID NO: 665915 - DNA, 571 bp, Homo sapiens
caataggcccaccatggctgtctatttgggtttagatctaccactgttcttttcatttactatgtgtcccatctgtcttttatccctctttctctcctttcttgtcttctgtcctttcttaaattaatttagttttttaaaaggtrttccatttcctactctctatttgcttgttgttatatattctttagttattcttttgtggttaccacagagattataaatatgcatccttgatgtattagagtctactataaattagtaccattaatacttctaggacaatgaaagaaacttccagcatttaagcccattgctatggtttgaatatatgaatatttacatcaccttcaaattcatatgttgaaatcctcatcttcaagggcatgacatttggagatgggacttttggggggcaattaggtcagggtgatagcactctcatgagtgggattaacgctcttataaaagagacccctggagagatcctgcacccgttctaccatgtgaagacacagcaagaaggtatcatctataagccagaaagcaggccctcaccagacaccaaatt

SEQ ID NO: 665916 - DNA, 594 bp, Homo sapiens
ggcacaaaaagcctcaaggtttcgccttaagggtggatggggtacatgaaggaaaagtagcttacagaaatgggtacacaattttgggaggtatttgaaaggtattgtctcctgtacatatatagatgcatggaaaatggtctgcaaggatacaggccacttcaaaagcagttggcacctctagggagagcagtgggggaggggaggatgcattcatgtaggacacaggtaattgtgggtttttttgrtgctatggacatttatttagtgcttttgtatgttttacccattttaatcatcacaatagccaagtgaggttagtttttatctccacttacaaaaaaattaatagactattctttgaaaagttttaggtttacagaaaaatcgtatgggaagtatagagagttcctatatacttatcctcacgccctcctccccaatttcgcctattattaatatcttgcattagtgtcatacatttgttatattgatgagccaatatgaatacattatcatgaaccaaagttcatggcttacaccaggtttcactcttggtgtacatcctatgggttttgacaaatgcacaatgtc

SEQ ID NO: 665917 - DNA, 604 bp, Homo sapiens
agcctaattactggaagctccccaaacatgaccggttcttccatcctccatgccttatgtacactgtttcctctgttggaaagcctgactcgtcaagcaaactcctacttgtccttcaaaactagacttgtgctttacctcccctcctwccctatgtcccctaagtggaattattgacctcttcgttcgtgacatttgttcatttctataatagtgtatattatattgcattgtaattatttgtttacataatgatctccccacagttagcgtgtgggcagaaactatgtctctatattcccagtgtgaaacatagtagatgttcaacaaacctttttctttgaatgaaggagtacattagtcagacttcctagttaggagttactgaaacagactcaaatggtctcaggaaaaagtaaaggatttgctaagtagctactgcagacagatcaaaaggctggaaggctatgtttggaaaatgggcaggatgtaaggaaactaaggaggccaatcagcagaaataaacagattttcactatcatcttatatttgtgcatcattcccatgagatcctcaggctggggagggtgttttattgactgag

SEQ ID NO: 665918 - DNA, 604 bp, Homo sapiens
agcctaattactggaagctccccaaacatgaccggttcttccatcctccatgccttatgtacactgtttcctctgttggaaagcctgactcgtcaagcaaactcctacttgtccttcaaaactagacttgtgctttacctcccctccttccctatgtcccctaagtggaattattgacctcttcgttcgtgacmtttgttcatttctataatagtgtatattatattgcattgtaattatttgtttacataatgatctccccacagttagcgtgtgggcagaaactatgtctctatattcccagtgtgaaacatagtagatgttcaacaaacctttttctttgaatgaaggagtacattagtcagacttcctagttaggagttactgaaacagactcaaatggtctcaggaaaaagtaaaggatttgctaagtagctactgcagacagatcaaaaggctggaaggctatgtttggaaaatgggcaggatgtaaggaaactaaggaggccaatcagcagaaataaacagattttcactatcatcttatatttgtgcatcattcccatgagatcctcaggctggggagggtgttttattgactgag

SEQ ID NO: 665919 - DNA, 540 bp, Homo sapiens
gggtgtatttttctttaagcagataatacagtcatatgtttcataactcaaaatgacattttaacagtgtgcactgagaagtctcgatcccacccctgaccctgggcacccagtcccactcccctgtatgtaagcacttttataagtttcttatctatccttgcagtgcatctttttatttttacttttccacctgttttttaataaaattttttattttagaatgtttttagatttacagaaacactgtaaagacagtagagaaagttcttgtatgccctcatcccatctcctctattgttattatcttatatggtcattgtgcatttgtcacaactaagaaggaagcactgactagtatgttactattaactctgygctttattcatatttcactagtttttccatggatgtcctttttctggtctaggaccccatctgagatcatgcattggttgtcttgtcttctttggctcctttttgctgtgacagttgctcacattttgcctggttttgatgaccttgacagtcctgaggagt

SEQ ID NO: 665920 - DNA, 608 bp, Homo sapiens
tgagagttctgggctctgtctagcagaccctccaggagtgatttgattctttaaagctgggcatcattgattgtcttcctattggccaggctatttcactactctctaggggtagaagttaatttgtagaaaactaatggaaatgcagatgactgttgtccatagcactgtgaataaattttgttcccacagasataaaatttatttttaccttggggtgaaaaagatgaccctgaccccaagcattacattttatttttctacaatatattatcaattttgcatctatgagcaaattcatttctgcattcctaagtatacttatgtgtgccttcaaattttcctttgacctgattttaacatactggtttcttcactaaataataagttacataaagcctttgatgtattccttttgtatttgtgtgagagtcttgattttaccttcttgaaaattatactttagcaggaccaaggccttaaggatggtcaacagaatagtcagaggagcatggccttgcaaaggagatgagctaagagcagaagcagaacaagaagcaggagtgtttgggcacaaaagtcaaggtaagtcaaggaaaaaaggaagc

SEQ ID NO: 665921 - DNA, 506 bp, Homo sapiens
accagatgcttatataactatcagatcttctgagaactcactatcaagagaacagcatgagggaaactgcccccatgatccaattacctccacctggtcccgcccttgacataagggggttatggggattacagtttgaggtgagatatgggtggggamacagagccaaaccatatcaacggccatgcccatttgtttgcatattatctatgccttccttcatcctacaacagcagagttgagtgagttgcaaaaaagacaatatggcctacaaggctaaaatatttactgtctggcccctttcagaaaaagtttgttagttcctgctctagagtggttttcttcatctgaattgttgcaaagtgttcttctctaaaataacaacctttatttttaccttgcttaatgtttgccttttcttctctttagattgttatttctaaattatagcctcttctttaacttatgaaatttaactcactgcaacatttcatccacacgctccc

SEQ ID NO: 665922 - DNA, 460 bp, Homo sapiens
acacctctttttcccttttttatctccaatgtttacctcagtgtccagtctacaataagaagtcaataaatagttttgaattttaaaaatgatgtctgttttaccaaagcaaatcagtgccaaggaaaaggcaaggctgtgcccagcctcactcagcatttgtcttcctccttctgctgtctagcttagtgttgtgggggacacaggtattcatcagagagcatttccaccttgtcatgaaacgctaccttgtaatccagtagctatcactgcagttaaagctgagaagccaaaagatttcaaataggaaaactctccaaaatgatatcattatcaaatgcatttgctaaacatgtctagtgagtggcatgttgtttatggtttgggaagagcctgaaaagagtaactcttgcttgctattataaaacatcacarcattccctttcaggtgaagtctatg

SEQ ID NO: 665923 - DNA, 586 bp, Homo sapiens
ctggcacttattaggggatcaataaatacttattttatgagataaaggaataattattgaaatcatatggaaatttgattaataaaatcctgcctctatagagtattactgagatgtctttcagttattacatacttgttgtatctgagactattaggattttgaggggaatgcccttttcaaaaggccaactggagctgacacaaatttagaactggattgaacaaatacaacacatgtcttgaacattacttggttcattcagggaatgcaagatgcagaataatttaggcagatgcaaaaaaataaaaagtcaatacattttagaagaactagatatcctagggcctgattatgcatagtattaaccaagatggggacttgatgtggcaggaaaatcactaatatgktcaactcttataaaaggcacagctataagaagccagctgggtgattactacattgaagagtattctctagaacataattccaaaatataattagggtgctgattttttaaatgatttataattgtgacttatcttattggctattattattcccttttaaataaccacttacaaag

SEQ ID NO: 665924 - DNA, 552 bp, Homo sapiens
caaaattgaaacctcaaaaagaaatgtaggattcttgattcctcrgtactttgatgaacttgaagatgtggtttgaaatcactatcttcttaaaaatggatagatatcgaccatctgttgcctgtttagaaacaaatgtaccattaccaggagaattttctaagaaaataggtggagtttcatgctttcttttaagatcccggaagccctgctcttggtttgatttaatttaggacaaaatagggtcttccattttgcttcaatatgagttatatggaccacttgtttccgaaagctttggagggtggggaggagaggtaaggagagaggaaaggaaggagagaataaaataaagaaggaaagaagagtgctttttgtttgggatgggacagttatgtcaaatacaattgcacacccacaccagctttgataacttggtaatgactgtttttgctgagaagaattctgaggttgcatctgatgtagctggaaagtatggtattatcaatgaatgatgtctgtgtaagtgtgcaagggaaggtacttgtcata

SEQ ID NO: 665925 - DNA, 527 bp, Homo sapiens
aactgctgcctttggaacctgccccaatagtcacgtaggttcttttctattttccctaagtgtcagccrgtttgaggaataaagggacagagtacaaaagagagaaattttaaagctgggtgtccaggggagacttcacatgtcggtaggttccatgatgccccacaagccacaaaaccagcaagtttttattagggactttaaaaaggggagggagtgtatgaatagggtgtgggtcacagagatcacgtgcttcacaaggtaatagaatatcacaaggcaaatggaggcaaggcaagatcacaggaccacaggaccggggcaaaattaaaattgctaatgaagtttcgggcaccactgtcactgataacatcttatcaggagacagagtttgagagcaaccagtctgaccaaaatttattaggaggaatttcctcttcctaataagcctgggagtgctatgggagactagggtttatttcatccctacagtttcgactgtagaagatggccacacccaagggggc

SEQ ID NO: 665926 - DNA, 527 bp, Homo sapiens
aactgctgcctttggaacctgccccaatagtcacgtaggttcttttctattttccctaagtgtcagccggtttgaggaataaagggacagagtacaaaagagagaaattttaaagctgggtgtccaggggagacttcacatgtcggtaggttccrtgatgccccacaagccacaaaaccagcaagtttttattagggactttaaaaaggggagggagtgtatgaatagggtgtgggtcacagagatcacgtgcttcacaaggtaatagaatatcacaaggcaaatggaggcaaggcaagatcacaggaccacaggaccggggcaaaattaaaattgctaatgaagtttcgggcaccactgtcactgataacatcttatcaggagacagagtttgagagcaaccagtctgaccaaaatttattaggaggaatttcctcttcctaataagcctgggagtgctatgggagactagggtttatttcatccctacagtttcgactgtagaagatggccacacccaagggggc

SEQ ID NO: 665927 - DNA, 527 bp, Homo sapiens
aactgctgcctttggaacctgccccaatagtcacgtaggttcttttctattttccctaagtgtcagccggtttgaggaataaagggacagagtacaaaagagagaaattttaaagctgggtgtccaggggagacttcacatgtcggtaggttccatgatgccccacaagccacaaaaccagcaagtttttattagggactttaaaaaggggagggagtgtatgaatagggtgtgggtcacagagatcacgtgcttcacaaggtaatagaatatcacaaggcaaatggaggcaaggcaagatcacaggaccacaggaccggggcaaaattaaaattgctaatgaagtttcgggcaccactgtcaytgataacatcttatcaggagacagagtttgagagcaaccagtctgaccaaaatttattaggaggaatttcctcttcctaataagcctgggagtgctatgggagactagggtttatttcatccctacagtttcgactgtagaagatggccacacccaagggggc

SEQ ID NO: 665928 - DNA, 531 bp, Homo sapiens
taattgtatttacacattaattacatctatttatttgtttttttatttggttagagtaagattcctccactagcataagctccaaaagggcactttatggatgaggtttgttcaccactgtaaatcctgcgtctgggcaaagatctagcagaggctctcaaagtatttgttaaaggaaggaaagaatgaatgaacaggagatttaagtggtagcttttgttgttgatattatcatgacattctccatattatgttatatttaattgggcttaagttctaccaacaacygtattggttccttgaggacggagatagtgcattaatcatctaagactcccaggatacagggtagatatttatttagtcagtgtgtgttgaggtgaattgcttagggagtaatggaagcaagagagtcacagtcaacagaaagaaagaattacccacatgtaaatcataaccatgttttcctatacataaaattagacaactagaaaaatgaagagatgaagacgaggcactcaaaagaataaa

SEQ ID NO: 665929 - DNA, 656 bp, Homo sapiens
accatgttttcctatacataaaattagacaactagaaaaatgaagagatgaagacgaggcactcaaaagaataaatatcaataaattctgctccattttaaatcagagaagtctcaacagctggcaagtatcaacacttatcaaatcatataaaatgcaaatggtataattagatcatgtaaaatgcaaatgatgtaattctttatcatcaaaagatgtggatgacattaacaatattactattaccagcaggtctaaaacaatgagaaatgagttattgctactaacctgttcctatttttgctctcarttaagtcatgctcagttaatttatgaaatgaaaacttttcagctttatattcctcagtcctcatgttaagtgcttattaaatcacattctgttcacttcctggatgcttctctcattcatctgctgctcatttcactgctactgacccaggtcttccttagcattcctcagccttcacaaaatttgcttccccttgcctctaatcatcctacccactttaatccctggagcaccctcgcaatctgttccctcatatctccacacatttgattgtagtgcttccctgtccatcatgcttgtaactgttcattacccatcaaatatgtgcaggcagcatggcctatta

SEQ ID NO: 665930 - DNA, 530 bp, Homo sapiens
attctgttcacttcctggatgcttctctcattcatctgctgctcatttcactgctactgacccaggtcttccttagcattcctcagccttcacaaaatttgcttccccttgcctctaatcatcctacccactttaatccctggagcaccctcgcaatctgttccctcatatctccacacatttgattgtagtgcttccctgtccatcatgcttgtaactgttcattacccatcaaatatgtgcaggcagcatggcctattatcagttccaacctgactttcttagattcctccttatcgcagcatacttgcaactacccaccytttggtctagccctgctccacctctagaatttctatcatggtactttatccttttcatgctttgtgttttcagttgttattttcttggaatttttgtcctcccaaagtctggctgtcaaaagcacctccttctttcctggctcaaatattactttttcctgtaactttgccagattcttttagttaaaataaatcctccccctttca

SEQ ID NO: 665931 - DNA, 581 bp, Homo sapiens
atattgatctattgatcaccctgtgctatttaagctctactaatttagtttgatgtaatcatctgatccactttttagaaacccagtttaattgccccaaatgctaacagattccatctatcaaatatcttctagatactatttttgtttttaaaaattcagaaagtcgaaatgaattgattcattagtaaaatagcaaacttttaaaacttaaattgaatactactgttacagcttacattccaaaagttacaaaatactaggttatatatactgttgtttagataggacatttttcttatgatttagaagatcatgtcattgggacaggatagtgtcttgggagtggagaaaatgaatgtttcattttttaatttattcaataaatccttattgagtatctrccatatgctagggattgagataaaaatgggaaacacaaataaactatctgccctcagaagtctacagtctaataaagggaaaaggtcttaatcaaataatcacataattaattcaaataatcttcaatgatgtatatggaaagttttacaagatgatgttcttggtgctgtcagtag

SEQ ID NO: 665932 - DNA, 465 bp, Homo sapiens
acttgtcctcagtttgcagtgaagatcccagtggccaaggctgcagtcatctccaggcttgactagagtgggaggagctgctttcatggtggctatttgcataattgacaaattactgctgccttttacaaagaagcctcagttccttgccacatgtgttttgccataaggctgcccaagtagcctctaacataacacctggctttccccagagcaggtgatccaaaagaaagtaagacagaagccacagtaccttttctaactttatcttggaaatcatacaccctcacttctggcaytagaatacatgttactaggtccagcttacacacaagagaagagaaattagactccatcttttgaaaagaagagtgtcaaagaatctgtgaacatattttaaaaccatcatatcccttgtaggtaattatttaatactattgctgttcaccaatatgttcagtgggg

SEQ ID NO: 665933 - DNA, 580 bp, Homo sapiens
ttgctgatgactatggcccagaatggtctcaggccatccaaagttctttctgtttatgacagaaaagagagtcccattatctctattctggaaaatatcactcaaatcatttgtcagtgttcccttcaaaaatccaaagtggtttgcactcctctgagtgtttttatgggtcaaactagatataataaaaagtatttgttttgtttcaaaggagataagttcaagctattcaattccctctttcccacaaaaccaatccaatcacatttaaatttattaggaatgagaaacacacacatatctccatcatcccctgatttcccaaagaaggctttggagagagtggaaaacatgggaatgatactttgattatcattgttatttcctggatacagctggattacaagaagctgtgaagtggttttagtttttaaaaaaatccaacagttctagttttgctgacaagataaaggtccaacttcctctcataggraagacttaatcttgttatatttctaaccacattttgggtgggacagcactaaatagaacagataagcatcaaatcttccagatgctt

SEQ ID NO: 665934 - DNA, 572 bp, Homo sapiens
agacactcatgtgtgttgaggagaaaaatagaattaaaaaatcctacaaaattaaaaaatcctataaaaatcctacaaaagaaataattggagaagccatttttatataagtgatagtaaacactgaattattttgaaaacatataatgtagactaaattacagatacagagtataataataccagtgtatgaagtamaataaaaagttatactttaacaaaatttaggaagtgaactctggaagataggagtaaaaagagtgagattttctcatctgtcataagggagagccaatagcttctatctaaagatgatcaaatataggaacttgtggatatttaaatgtttgactatatcccaggaaaagcataatcatgaaaatatggagaagcaaagaagggttgataatacaccaaaattactgtagaaaatcaagatacttataacagtagtaatcataagttttggaatagagctgaagcaatagttggtgggaatttattgcatgttatttaaaaaaattaaaagtaagtgaagaaaatagaaaaaagtaaatgcagagcaaagaata

SEQ ID NO: 665935 - DNA, 587 bp, Homo sapiens
caatgatccttcatacacctacttccttcttgctctcacgccctccttaacctctctaaaccactaaactgttctccatgtctataattttttcatttcaagactgttatataaatagaatcatacagtatatttataactggctattctttatttatttatttatttttagagacagggtctcactctgttgcccaggctggagtacggtggaatgaccacagttcatggcagccttgaactcttgggctgaagcaatcctaccacctcagccttccaagctgctgggattataggcatgagtcattatgcccagcaggactggctattttgattaagtaaaattctctgaatagttatctgagttgttrcatgtataaatagttcattcctttttactgatgaacggcattctcgtgattcagatgtaccacagtttgatcattcactcatcgaagggcacctgggttgtttccagtttgggaataattcaaataaagctgctataaaacttcatgtacaggtttttgtatgaacataagttgtttatatgagataaatggccagaagaacaatttcaaggtttt

SEQ ID NO: 665936 - DNA, 590 bp, Homo sapiens
attcttgtccagtgtggacaatgcaaggcagtgtgagattttatcacactattcagaacagcatgcaactaaaacattatttccagaaatttctatttaatattatcaaaccatgattgaccttgggtaactgaaaatgcagaaagcgaaactacagataagggagtatggccatataagcaaatgatggagaaaggaaagatatttcaatacattttgatgagacaaccagttagcaatttaaactaaaagtatagctgaattattccctcactctttataccaaaataaattccagctgattaattttgaaagaaaaaaatgaagccataacygtaataaagaatatatcccaatttttcaaaattctgaagttaaagaacttttttaaaatcaaaactataaaatccacaacccataaatatatgtcgataaattagttcctatgaagatttaaaacttttctgttgttagaaccaaatagtataaacaaggacaaaagttttttaaaaagtgggggagagaatatttgcaatatattgaaagataaaatactattttccttaaaatataaaactctcaggctagga

SEQ ID NO: 665937 - DNA, 559 bp, Homo sapiens
gaagggcacctgggttgtttccagtttgggaataattcaaataaagctgctataaaacttcatgtacaggtttttgtatgaacataagttgtttatatgagataaatggccagaagaacaatttcaaggttttaagatagttgcatgtttcaaagaaattgctaaactattttccagactggctgtaccattttgcatttccaccacatatrtgagtaacccagtttttcttcatccttatcagcatttggtgttattgctgttttttccattttagtacttctaaaaggtatgtaatttctatgatgtgaatgtttgcatcccttcaaaattcatgtgttgaaattctaactctcaaagtgatgatattaggtgggacctctgggaggttattagatcatgagagtgcagcctttgtgaatgggattggtgccctcattttttggcatgtgaatattcagttttcccaacacagtttattgaaaagattatcctttcatcattatgttttcttggttcatttgtcaaagattagtttaccatatatgtgtaagtttat

SEQ ID NO: 665938 - DNA, 569 bp, Homo sapiens
tgattcctataatccatcccatgatccaatgggcaaatgacttgtctctcattagtccctcatttttacatacaattaaaggtctatttagcaggaaattttatgtaagctatttaaaagttgaaaccatttaaaatatattaatattctacattttgttatcaggcagttcttttcaacagaaaaatgagtaggataggcagtctatagcatctgcrtttcctattgttgtgtaacaaattgccacacacttataacaatacacagttataatctcactgttgtcttgggccaggattctggtgtagcttaactgggtccttgtctcaggacatcacaagtctgcaatcaaggtatcagctgggctgtgttcttacctggagttagagttccttttccaagctcattcagtttggaaaatgtatttctgtaactgcctagtgggttcacctggcccactgtctagacagagccaattcatcaagacaggggaattgcaatagagaaagattaatttacacaaacccagctgtgtaggagactagagttttattattactcaaatcagt

SEQ ID NO: 665939 - DNA, 587 bp, Homo sapiens
tcaacatcaaaataaaagggccaaaccacagggtatttgctggcctctgggagcaaacaaattctatatgcatgactcctaaaagacccctcttagagacctccctgctctattggtctgaattaaatagtggcaaagatcctcagtaccaccactacttttaagggacattgggcttttctgaaatagcctcagcttctagaagacccttagatattaggcttgtctcagagaattccattcaatatcagctaaggtatcttaaaaaacctttagaaatctttttccttttcactggtctagtgagaaaaggattgaactggaattcacgagaactaaattctaatattgccagatccatgtctagctttggacttcttctcttctgaaacacaaggtcatcagtggagatacaatgggtataacagtgcccaactaatctagttcatcaagtactcatgaggatcaaataaggtaatgtataagaaagcttctgataaaatgtaaatactatgagtctaaatgaaataggggaagcctctcatggctrtatcatatttcccaatcctcactccaaaactataaag

SEQ ID NO: 665940 - DNA, 580 bp, Homo sapiens
attaatcccacttaatcataatgaatgaccatttaatgtgctgttgaatmtgtttgctaaagtttgttgaggactatggcatttatgttcattgttggctttttaaaattgtagtgtacttgtctggttttggtgtcagggtaatactgacattgtaaaatgagtttggaagtgttcctttaaaggggaatactttaaaaggaacacacacatatgcatacacacacacacacttaacctttatcagcaagttttttacttttgtatgttttaatgttactaattagcatcatttcatatgatcttaaagaacactctagcatttcttgtaaggcagttttagtgatgaatcctatcagtttttgtttatctgagaaagtatctctccctaattcttttttgtacatgtgcagaacgtggaggtttgttacataggtgtacacatgccatagtggtttgttgcactcatcaacccgtcatatacatgaggtatttctcttaatgctatctctctcctagccccccaatccgtgacaggccccggtgtgtgatgttccccttcctgtgtccatgtgtctca

SEQ ID NO: 665941 - DNA, 534 bp, Homo sapiens
gagagcttggcaaagtcttttgtatctaaatgtaaaataagaaatatgtaacctgaaatyaaagagccctcccctttttggtcttaaatttgtcataattaggaggtcagcagccttgtcaaagaataaggcaaaacaagaaaataaataagattgttttctcactgctgggaaaatcaatgtgtctcgtgctgtcttctccaggccaagactggcagaatcccgccatctgtgtggtctttcaatctccatatgatgaggaaaagacagtcaggggcaaccccacctgggctgaaatgtaaaggagagaaagggaggaagagtgtgtttatacctacttttcccccttaactcagcttcctctttcttttacttatgcttctgcctcctctctgcctctgcctcttcctgggatgcctggttgttcaatctagcttactagaaaggagaaaaggaaagaggtagtcagctgtgcgaagcttgtcttccctcatctggtaaagtaattaattaccttgttagtagcatgctatc

SEQ ID NO: 665942 - DNA, 580 bp, Homo sapiens
attaatcccacttaatcataatgaatgaccatttaatgtgctgttgaatatgtttgctaaagtttgttgaggactatggcatttatgttcattgttggctttttaaaattgtagtgtacttgtctggttttggtgtcagggtaatactgacattgtaaaatgagtttggaagtgttcctttaaaggggaatactttaaaaggaacacacacatatgcatacacacacacacacttaacctttatcagcaagttttttacttttgtatgttttaatgttactaattagcatcatttcatatgatcttaaagaacactctagcatttcttgtaaggcagttttagtgatgaatcctatcagtttttgtttatctgagaaagtatctctccctaattmttttttgtacatgtgcagaacgtggaggtttgttacataggtgtacacatgccatagtggtttgttgcactcatcaacccgtcatatacatgaggtatttctcttaatgctatctctctcctagccccccaatccgtgacaggccccggtgtgtgatgttccccttcctgtgtccatgtgtctca

SEQ ID NO: 665943 - DNA, 580 bp, Homo sapiens
attaatcccacttaatcataatgaatgaccatttaatgtgctgttgaatatgtttgctaaagtttgttgaggactatggcatttatgttcattgttggctttttaaaattgtagtgtacttgtctggttttggtgtcagggtaatactgacattgtaaaatgagtttggaagtgttcctttaaaggggaatactttaaaaggaacacacacatatgcatacacacacacacacttaacctttatcagcaagttttttacttttgtatgttttaatgttactaattagcatcatttcatatgatcttaaagaacactctagcatttcttgtaaggcagttttagtgatgaatcctatcagtttttgtttatctgagaaagtatctctccctaattcttttttgtacatgtgcagaacgtggaggtttgttacataggtgtacacatgccatagtggtttgttgcactcatcaacccgtcatatacatgaggtatttctcttaatgctatctctctcctagccccccaatccstgacaggccccggtgtgtgatgttccccttcctgtgtccatgtgtctca

SEQ ID NO: 665944 - DNA, 562 bp, Homo sapiens
ttcatgcctgctaacacaagatctgtctgcagtccatggatcaagcataatttcaacttcaagccttattatttaagaaatacattttgtaagaccatagctgacatagattgtaattcttctggtggatctgggaaaagtcagttaaaatcttctgaaaaggattcacaattctagatgccaaagggaacatttatgattcacaggaagaggtcaaaatataaacattaacaggagtttggaagaagttcattccaaccctcatgaatgactttgaggggttcaagacttcagtagagaaagtaactgcaggtgtggtggaaatagcaagagaaccagaattggaagtggatcctgaagatgtatctgaattgctgaaatctcatgataaaacttgaacaaattgggagttgcttcttatggatgagcaaagaaagtggtttcttgagatggcatgtcaagaatatcaagaatagcatctggggaagatgttgtgaataytgttgaaataacaatcaaggatttaaactattccataaagttagttgataaagcagaagcc

SEQ ID NO: 665945 - DNA, 627 bp, Homo sapiens
ctacttgtacttaattcaagcagctttagtgtctcactgggctggcaggtctgggaagtcagatctgacatgcagtaggatgtgctcatcatagaaatcacacttctccagagtaatttttaaggtaatgtgaactaaagttaatttctcagaaatgttgcaggccctctctctctagaagtatacttttcagtcctctaactatggttgtttttcttctttcaatgaaatcaatgcaacctatactaacttgggacaatggaccctgcaacatccagtatttcagctgcagtggagttactttcccaaatgcttcaggcatctgtttcttcatttctktcttcttttgctgtaaaagagctccatatgtctttttttaacacaatatgtttgcaaccacagcaaattaaacaatgccagttgagaaccatatactaaaatatgaaaatctaaatcaaatttatatcttcacaatgcaatgttttctgaacttcgcttgtgcacataccatcatcacgatttttgtcatatccacattttacctatagtattagtaattttcttttcttttaagttgactcacatttttacctccatacattaatttcaaaggaagctacaataaaa

SEQ ID NO: 665946 - DNA, 614 bp, Homo sapiens
ttgtccacatagcctgcccacgtccacagaggagaggcccataaccagggtgttgtcaacagcacagcaccttcagaactacaggggatacaggacattgtcatgaattgagggaagagaaaatgtgtaactacattaacccagggtaaaaagatatgattcttatcttctcctgtgacacacacatayacacatacacacacacacacacacacacaagcacacacccactcaaactcttaacagaccaccttataatgaaagaaatgctgagttcaccataggctgtgctttgagctagctctctaggaccttttgacaggcttgtgttaacagttttggaataaagaacgtgacttttcttccagtaagtttcacctcaggggccagggagggctaccccagtacatatgattaagtttaataactttcaaacttaaaattatcaagggttacagcaccattctcctcccccacagcccaaaagcaatttgactccttgacaaagttgcccgtctcttcttgggcaacttttaaaatgaaggtgtgttagtctgttcttgcattgctgtaaaaaaatacacgggagccaccaaagcttacagcttgcaccc

SEQ ID NO: 665947 - DNA, 614 bp, Homo sapiens
ttgtccacatagcctgcccacgtccacagaggagaggcccataaccagggtgttgtcaacagcacagcaccttcagaactacaggggatacaggacattgtcatgaattgagggaagagaaaatgtgtaactacattaacccagggtaaaaagatatgattcttatcttctcctgtgacacacacatatacacatacacacacacacacacacacacaagcacacacccactcaaactcttaacagaccaccttataatgaaagaaatgctgagttcaccataggctgtgctttgagctagctctctaggaccttttgacaggcttgtgttaacagttttggaataaagaacgtgacttttcttccagtaagtttcacctcaggggccagggagggctaccccagtacatatgattaagtttaataactttcaaacttaaaattatcaagggttacagcaccattctcctcccccacascccaaaagcaatttgactccttgacaaagttgcccgtctcttcttgggcaacttttaaaatgaaggtgtgttagtctgttcttgcattgctgtaaaaaaatacacgggagccaccaaagcttacagcttgcaccc

SEQ ID NO: 665948 - DNA, 589 bp, Homo sapiens
catttcgtggatgttgtagaagacatgatactctggggtcagagaaaaggacttgattactcacagcacagtgggcagtatgagcttcatgttcacaccaatctcccttctccatcaccaccctcctcttagttgtatgcaagtgatattaaggcatcccaggtggatactgcacccacagtggatttgtgtcacagctgaggaacctggagcttaggaaattccatcctttaaaggagattgctagaatacctcctaatcatttgcctcaagggaaatatttttattatcctagccagaagaaagtctaccttctgttgtagggtaagacactacattttccaaggttgtttgctatacaaacatttttgaaaatacagtccataataaaaattgatgcaatatgtgcagaaatgccaagaaaattgtctcccaaaagatacaaagagaaaaatgacataatctctgccttacatcaatctagagaaggtaataataaaatcaaaatgtaactataaaacactatatagatttttataggtgggtaaaagaccaygaagctacaggaacagatagaggaagaaaccaa

SEQ ID NO: 665949 - DNA, 524 bp, Homo sapiens
gccaagcctcttttactcttgcattttgtgtgcctgcaggcttaacacaacatggaagctgccaagacttatggcttgcactctccaaaatggaagcttgagctataccttggctcatttgagacacagytggagctggagcagcctggatgcaaaaagcagtgtcctgaggttgtgcagagcagcatgatctgacccatgaaaccatttagtcctcctaggccactaggcctgtgataggaggggctgccatgaagatcccaaagatatctttgaggccttttcccatcattgtcttggatattagcattttactcccttttagttatgtaaatatctctagcaagtggttgcttcacagcctgcttgaattcctctcccagaaaaagcttttttttcctttgctatgtggcaacggtgtaaattttccaatcttttacattctgcttcctttttaaatataaattcaaaattcaagtcatttctttattcccacatctgaattaggctgttagaagcagcca

SEQ ID NO: 665950 - DNA, 626 bp, Homo sapiens
tgacttcaagaaagaaacatcctcaccaatcagcttgactagggattttgagaccctctcagacattttctatggatgcacttgatttatacctttgtttcctcttacgatggggattaaatttttaagatttgatgtattttctcaatctcacaaagccaagccagatgctcagagcctcacatttgttttcccttggaaagagcctcaaagttctcaggtttgtgtttttttctttcagtcccacagagtggaactggctatttatgaggcatgctttcactcgctgtccatggggaagcattggggagttcacttggtggaggggggcatgaggcacacatagcatttggagtgcccttgggtcaattaggaatatccataggtgagacaccccaagtgacttataggtgggctccttgatgatggagtatgtggagaagatattagggcctctcttccctgatcctagtctctcccaacaactcagctatgccaatcatctccattttctgggtgaggtaaaaaagaattagtccttttgggcagtattcacatgtttggrggagcaggttcctcatttattgcactctcaccttctcccatgggagaaactgcaggcaaag

SEQ ID NO: 665951 - DNA, 626 bp, Homo sapiens
tgacttcaagaaagaaacatcctcaccaatcagcttgactagggattttgagaccctctcagacattttctatggatgcacttgatttatacctttgtttcctcttacgatggggattaaatttttaagatttgatgtattttctcaatctcacaaagccaagccagatgctcagagcctcacatttgttttcccttggaaagagcctcaaagttctcaggtttgtgtttttttctttcagtcccacagagtggaactggctatttatgaggcatgctttcactcgctgtccatggggaagcattggggagttcacttggtggaggggggcatgaggcacacatagcatttggagtgcccttgggtcaattaggaatatccataggtgagacaccccaagtgacttataggtgggctccttgatgatggagtatgtggagaagatattagggcctctcttccctgatcctagtctctcccaacaactcagctatgccaatcatctccattttctgggtgaggtaaaaaagaattagtccttttgggcagtattcacatgtttgggggagcaggttcctcatktattgcactctcaccttctcccatgggagaaactgcaggcaaag

SEQ ID NO: 665952 - DNA, 572 bp, Homo sapiens
ggcacacagaatgttatactgtaatatagaygtaaatattaatataatatagaagcatatagtatatatatcatactgtaatatagaaataaatattatacttctggaattctggaaatagttctgtctgtgatgtcatcggaaaaaaaaacttgagggctgagctatttgtcctcagtgcctaggttctgtggaacccagcacagtgactttcatccctgtgaaacctcaacaaaacactagcgaagggtggtcattcccagttatataaagatctttgatgatgataggtacaccggggtttccaactcaaatagtgcacaagtgaggaaataataataaatataagtaaagtgggccaggtagaactacaacaagctggagtactcacagcccttataagggcagagtcgctatctgtaccagctgattgttgctatgtggaaatgcaagcctaaagcgccaaatactctgttttttccaaaagaagtgggaaatagcctgtaagtgtcaaaactaattcaacttttaaaagatctccaggcagctcaaacaaaacctatctacagatc

SEQ ID NO: 665953 - DNA, 567 bp, Homo sapiens
actctgttagccctcccagctggtgtctcactaggttgtgtgcaccccaagtccagtggctctgagcccagcatagcaccaggacttgccgaggaattgcagtcctcgtggcctagagtgcctttcaagtttatttaggatcctagagtactttaacctatggtggtggagcttgccagagttcagtttctgtctgctgggatggacaattcccctctggctagggctcatctaaatgttccctctgtgggtgctggctgaatttttccttgttttgttttccactgtgatagggcagaagtgagatccaatgcaaagtcccacaatcgctgcgtagtccctccccaagtgcacagattttctctccatgccacatggccactgctggaggatgggtgggggggtgacataagtgattcaagactgtctttcttacccccttctgtatctcttttcttaatatgatgttaaatccaggtactacgattactcccctaatttttggttcttatgaagrtgcttttttgtgtggatagttgttgaatttggtgttcctgttgcggagac

SEQ ID NO: 665954 - DNA, 576 bp, Homo sapiens
atttaccagccaacaagatgaggtcatgttttctgtcccctcctacaggtaacaatgttcttctcatttatcaccaatttcaaaaacatggttaatcttaaactatttcaaaataaaaagttattatgaaaaaacagatgatggttgctgtcttcatccattagggctgttataacaaaataccttatgctgaataatttataarcaatagaaatttattgctcacaatctgtggtctggaaagtacaagatcaaggggctaacagatttagtgtctggtaaggacccaaactctgtttccaagatggcaccttgttgccatcttgttcacatggtagaagggctgaaaggggtaaactcactctcttaagtccttttataagggttctaatcctatctatgatggtggagtccccaggacctaatcacctcccaaaggccacacctattactattatcaccttgggggttaagttctaacatatggattttggagggacaccaacattcaatccatagcagttatcatggtcagattacttcttaattattatcataaacagagtaattaatata

SEQ ID NO: 665955 - DNA, 541 bp, Homo sapiens
gtaaagtcactcatttaaattatacaattcaaacacgtttagtatattcacagaggtgtagagccaataatacaatcactttcagaacatcttcatcacctaaaaaagaaactctacacccaatagcagtccctctccacctctctccaaatctaccttagccctaggcaaccactaatttactttctgtctccakggatttgcctatcctggtcatttcacataaataaaattatacaatatgtatctttctaattggtttcattcacttagtgcatgtcttcatggttcatttatgctatagtataaatcagtacttcattcttttttatgactaaataatattccattgtgtggatataacatattttaacatttatccattcagcagttgatggacacttaagttgtttcaaatttttggttattataggtaatggtgctctgaacatttatctacaaatttttgtgtgaatatatgtttttatttttcctgggtatatacatatacctaggagtagagttgtggggttatatggta

SEQ ID NO: 665956 - DNA, 590 bp, Homo sapiens
ctttgcaccagagggaatcagtgtgttgtctacagacccaatgcagatagtgggtggctatgagtggctcaggaccatgaaagtatggctcagagaacacatgtatgtataccatagggctattagcatgttgagttgcttagagtttggctgtggctttcagctccaagtagcaaaggaagggtagacaggagggttgaaattctgggaccatttgcaggaccatcactgggattgtctactccaaatgccacatggaccccttttgttgtctatgttaaaaaggaaaaaaaaagaccttggtttgttttgaaacctgagacccctagaaaacttaagatgctgggtaattgagacttacaaagatstatttcacctaaattttacctgagaatctgaaaacgatgacttgttatgcagttaaggtttgtaaaactccatatgtgttaggtaggtcgttgtagacgatgtcatgattctctgtctagatcctcccagcagcctcaagcactcattccatctccccaaggctgacaactcttaactaagtccttgtttgggacttgttctgggttaaagagagccagtca

SEQ ID NO: 665957 - DNA, 527 bp, Homo sapiens
ttcttcaagccatgcaatttctactattttgttacgacagcccaagctgactaaacagttacccagcaatgttttcccaggaacactgtgaaaactgctggtgccctgccatccgcctgggagtgcttagtaycccagcatacatgtacaactggacggatctcagccaagggacctcatcacccaccacagcttcgctatattataacacagtccaagactccagagtatgaatgggcccagatagcaaagcaagcttctttcccaccaacctcagagcaaaatgtgtatgtgagagtgtgtgtctgttggggaggggagacttttgcaatggaccaatcctccaagtgtcctcaacttcatgggtgcgttgtgatttgttctccaccctgaagcctgcaacttggacttgtgagacctggccttaggaaaatacaggctcagtgaatgctaagtttgtggggaagctgttttgtagagtcaaaagaacaccggctttggagtcagacaaagctaggttcaaattc

SEQ ID NO: 665958 - DNA, 585 bp, Homo sapiens
tctggtccgggactttttttgttggtaattttttaattaccatttcaatctcactgcttcttattggtcygttcagggtatctaattcttcctgatttaagctaggagggttgtatttttccaggaatttatccatctcttctagattttccagtttgtgtgtaaaagtgttcatagtagccttgaatgatcttttgtatttcagtggtgtcagttctaatatcccctgtttcatttcttaatgagggtatttcgatttgctctctttttttcctggttaatcttgccaatggtccatcagttttatttatcttttcaaggaactagctttttgtttcatttatctcttgtatttttttgtttcaatttcatttcattatgctctgatcttggttatttcctttcttctgctgggtttgggtttggtttattcttgtttctctagttccttgacacatgaccttatattgtctgtgctctttcagactttttgatttaggcgtttagggctatgaactttcctcttaggaccgcctttgatgtagcccagaggttttgataggttgtgtcattattgtcattcag

SEQ ID NO: 665959 - DNA, 590 bp, Homo sapiens
tagaggaaagccagcagtcacaggcctcacccagctcccatgcaaactgaagggccggtcttactcccaccatgcctcccccagtagccccaagtctgtttccaggcagtgggcaataggctcgaaaacttgcctgaggctctctgcctcccagctgtgagagaaaagkgctttagttcttcctctgcctctgaagtgtgcatgcctgattcgacccccaagttctacccaggaggcttcttgcctcattcaaattgctacaaagttcagctagagaattccttctccctgtggagttttaccccctgctcctctggccaccctcctgatggatccctgtggtgcctggaaggaatgggctgctcagggacccagtgagctcccagggcctttctgctgcttcctctacccctgtatttcactcagctctctaacttgactcagctccaggtaaagtcagaaacttctcctgcaaacagaccttcaccttctccagtgggggtgtgtattcgggagaggagtgtctccctttcccacttccgcagctggggcactcagtatttggggtgtctcctgggtcatgcatgagc

SEQ ID NO: 665960 - DNA, 567 bp, Homo sapiens
actctgttagccctcccagctggtgtctcactaggttgtgtgcaccccaagtccagtggctctgagcccagcatagcaccaggacttgccsaggaattgcagtcctcgtggcctagagtgcctttcaagtttatttaggatcctagagtactttaacctatggtggtggagcttgccagagttcagtttctgtctgctgggatggacaattcccctctggctagggctcatctaaatgttccctctgtgggtgctggctgaatttttccttgttttgttttccactgtgatagggcagaagtgagatccaatgcaaagtcccacaatcgctgcgtagtccctccccaagtgcacagattttctctccatgccacatggccactgctggaggatgggtgggggggtgacataagtgattcaagactgtctttcttacccccttctgtatctcttttcttaatatgatgttaaatccaggtactacgattactcccctaatttttggttcttatgaagatgcttttttgtgtggatagttgttgaatttggtgttcctgttgcggagac

SEQ ID NO: 665961 - DNA, 584 bp, Homo sapiens
tgtgcctatttgaaaccctttattkgttgtcgctttgtttcatggtggcagatgggtcaagtggtcaacttaagatgcactttaagattacattcttcaaaataagcagaagccaaaaaaatttttttaacctggtggtttagtaaaaacagagttcactttatccttttatttattcattcatccaagtagctgctgtgtgataaacaagtatgcatatccctcagaggtagctaagagaaaacctccaagccaagaagcttagtcaggaaagccagtgttctatcacatctggcctcaaaacatttaaaatgtcttcattataaaattgagtatacatttttaaaaatctttaattttatttatttatttatttgaggcaagttcttgttctgttacccaggctggagtgtagtggtgtgatcatagttcacttcagctttgacctcctgggctcaagcaatcctcctgccttggcctcccaagtagctgggagtacaggcatgcaccaccatgcctggctaatttgttattttttgtagcaatggaggggggtcttgccatgttgcctaggctagacttga

SEQ ID NO: 665962 - DNA, 540 bp, Homo sapiens
ccacaaacttagtggcttaacacagcagaagaccaacatgagtctcatggggctggaatcaaggtgtctgcacagctgaggccttctggaagctccaggagagccaatattccttggcttggggcctcatcactccagtctctgctttcatcatcacagtgttttcacctctcactctgactcctcctgcctgccttttacaatgactgttgtgattacatagagctcacccaaataacctaggataatctccccatttcaagaatcttaactaaatcacatctacacagtactttctgccatgtaaggtaacattcacaggttctagggccatggacatatttgggagcccatttttaaggctagcatattaagaaaaagcaggaactasaaaattaaaaggctgagaaaatacaaaaaaattttgtagggctcttcatctaaggctttttttaagttgtaaataaaggaattatcaaacaaattataatatatatctataactgaaatattaagacagttataacaaacggtttgtat

SEQ ID NO: 665963 - DNA, 421 bp, Homo sapiens
taaccacgcaggcttcactttaaattgggaaggcaggttcattccctcaaattaaattgaatttgatattaggaaggcctgctcctttccaaaggctggttttccctgcaaagcaccaagtgtcattatggagagggaaacgctctttagtcccctatgagctggtgtccaatgrgccaccagccttccagagctgggaattgtgcataatagtaatggagagaagagaatatgggtttcataatctgattctgaaatgccatatggtagttaagaaaaatgcctatttagtagaatgtgaaatacctgaggattaatatcagctatatttgtaagaatagctaaaaagctgttaagaccataatcatattcacctatgatgccttttaaaggggagactttaaatgccatggtgaatatt

SEQ ID NO: 665964 - DNA, 635 bp, Homo sapiens
tttgaatagttcaatcttttcagcctcatggggctttgccaaagcttgtctaattttactgttagacttgggtgtgtggagattggtttgcctttttgttaataagagaagaaaactttaaggctcagaggagaaaattgtctggtaggtggacttcttaccctatcgtctaaatgcaaggttgaccctgttcagaccatttctatccataactgaagttcagagtcagacaaacctgatttaaatcccagctctaccacttagcaacagtgtaaaaccttggacatgctactaaatcttcttgagattccatttttacctgtgaacatttagataagaggtgtcctaagttgcagggttggtgggcagaatatcttctagaaaaaaatgctgaatcttgtgtaggtactagataaatgctggtccctgccctgtctgaattttaaaatcagaattctgttttacagtctcatatttgcccaccaaatgggtctttgacctatttcctttcctcacaattcctagaagattaaatacatcaatatgtaaagtgattaatggtrcagggcacctgtagggtttcataactgttagggctcatcaccatcatcattattatgagaggtggctggttc

SEQ ID NO: 665965 - DNA, 573 bp, Homo sapiens
aggaaccagacattaaagcacaaatccactctggccctaatactagggcaaaggaaaatgctgccacctcccctggagaagacagcggtagaggggcagctgcaacctcttccacagagcaccgctttgtggaaacagaagtctcctgaagctgtgcccaagcagcgctgagcctgcatcatctccctgtgttgatytacagagaagccacaccttggatcaaaggcagagtaggacagcagcagtgctgccatccaagctgatttgttagccaaagatcaatcatcatggcagacagaaatacagcggagattataacacacatggtaaacctgagcaccttcccagggagggagatgcaagaaggggtgaagagagaagtgatggataggtctacacacataaagtttcttttctggtgatgttacatcacccttaaacagaaaatgtgatttattttccccaagactgaggacaggtaaggtaatgctttggggaccccatttgctgctaagattgcatttggtgaaaaagtttttcaagatcttgggtagtgggaacaaaagcagccag

SEQ ID NO: 665966 - DNA, 525 bp, Homo sapiens
gagggagatgcaagaaggggtgaagagagaagtgatggataggtctacacacataaagtttcttttctggtgatgttacatcacccttaaacagaaaatgtgatttattttccccaagactgaggacaggtaaggtaatgctttggggaccccatttgctgctaagattgcatttggtgaaaaagtttttcaagatcttgggtagtgggaacaaaagcagccagtgaccagcagagcagctactgtttatcgagtacagagctttgagctagatgcctggattcccacaattcctaacaaygatgttagaagttagtaatatcatctcaatgttataactgtaaataaattgagggccaggaagtcaggcagtttatagatgtttactgagcaacagttatggaccaggcatggttctatatgccaagtaaacagtggtgaatatgaatgacatagtccatcaccacaagaaattgacattctagtaggagaaatcaaaaataagcatttaaacaaataaagaag

SEQ ID NO: 665967 - DNA, 591 bp, Homo sapiens
ctcttactttccaaggtccagacagccattctgtggtgtgaattgaaaaggaaagggcttgtgtttttaacaacttcattacttcattccaaggcaccagaatacagatggacaatcctcttattacattaaatgcatatgcatggcttttgttccaaaactctcccaaacacaaacacaaacagagctctgacacctcactgatgtgatagcttatgcatatgaggggagaacaactattaaattttccatcaaataatttaatttctattaaatctatatcttgacaaagcctccaccaatacaaactttttgccaaatggctaagaatatactttggacatttaatacaaaatggacagtttcaaatagctttacacatgttgaaagtttaaaaagttgtttgttaagyactttagttataattcatttaaaaatcccattatatttggttacacaagagtggctttaatacacttaaagatgcagtactccttagctgtgacatatttatagtctgaacattaaaaggtttacaaaataaggctatattttctcagtgtcaaacatccctcaatgaagacaattatt

SEQ ID NO: 665968 - DNA, 596 bp, Homo sapiens
caaagtggcagatttgagttttggacctaattgtgcttgactccaatgcctatgggtttgtcacaaagtggtggagagaaggccattatcttccagtggagcctccctgatgcccaggctggtgaccagagggtaaatgcaataccttctggacagtggcgatatgctggcatcccagggagtaggattatatgagagacatggctggctcaaatgcccatgtaaacctcaaaatcagattagggatgaaaagattaagtgaatatttcctgagcatagatgagaagtgtgaagcaggttcactgtgcactggttaccagcttgtgtcagtctgctgagacaggccccacttaagcacaagttacatgaaatggatatatgatttacatatgggaacaatagacaaaggacaacagaagcctagaactcattgcaagttggccccccaaggctcaggaaattggcctggggtgaagggaatctcctcatctgcatgtacttcacttacactgcagctgaaggacctcagaatgtagcctgcactgggttatacatcccagggacaacrtgacaggctgggctaaagcaccaaagag

SEQ ID NO: 665969 - DNA, 445 bp, Homo sapiens
cttcctctgcagtataaccagcagttctgacatgtcgactgcatttaatttaggcaagacctttcagtccatgtttcagctaacaacatactgtaagagccctttctaaattctcaagctgaaaaattgaatctagaatctctgcttagtgggcccatgtcaataaatattatcccacacttttgatatccattccctcacagattactgtctgtataaattttaaaattatgtagttgtttgctgtgtagtrcccttccttctgggtcatactttgtactttacccattagacttgagtctagttatacttttaaaagcaaagtgggtggagggtgtgtcctaaggagaatcagtggttgtcttgccaggcaactacactaggagaggtctttacagattcttcagacaaagcagagttaacgtccttcaacagggatggaagg

SEQ ID NO: 665970 - DNA, 591 bp, Homo sapiens
gaatgggtatcttacaatcaagctactctcaatataacctactcatctctaggaatactaacacccataaccaactatcccaaacaaacagccaaacccctctcaaattattcttagggttggagtcaaacaacttatatttttgcctcccctggaacaagtgctttagccattatcttcatygtcctgaacctaaagatacaaaaataggaggctcagagagcttttctgatttgacatcactcacaaagggaaaggagtgcaggaggagaagatcccccaaagcagtgggtgggggtaggaaggagactatgtattaataagaaccaacactgaattattgaagactacacacatcgattacaactatgacaagcccttcagtattttgagcttcagttttcacctctgtaacgaggtgataagacaaccagcttcataacattcttgtaaaggtaacaagaatgtagccagagcgttcccattgtctggctcctgggaaggaatccacttatcatctcatttttttggtatctttttattttatccatttttttcttgctctccctcccctagtcccccaccccgaca

SEQ ID NO: 665971 - DNA, 492 bp, Homo sapiens
ctttccagggtttgaggagtcataaattgcccaggtcggatttccactggatttctcttggaattaataagcatatggatctgatctaagactgtgtgtcaaaaatattgaagagaatggcttcacacaaagctgaaaatgaaatgagattgacatagctgactttggtttggagaacaagagcaaagtgctgcctgtmgtcaacccacaaagacagagtctggcaggtctaagggacaaagaacaccctactggggtcagaaatgcaacctaagtcccaataacccagggctggagagcttttcctcttccacactcccttctttttgacaaatattaagaacactttcagcatgttatctctatgccataactacacattcctgggatatgtagttggttaaaagcaaattcagtctttttcctcactacttctgccagcagaatcaccaaacacaggatacatcagcctgtttcttctatttttttcct

SEQ ID NO: 665972 - DNA, 581 bp, Homo sapiens
ttttttttacactaagtaagactatagggacccgagaaacaaaatagagaaatggtggtagtgcactattctttcaaagaatgtggtaaagtgaaggatagatattaggtgaaacaatgaaaaagtagggacaattttggataacttttagacacacacattggtaaattgaagaggatgagataaagatgacgaagaggcaagatggctgaatggaagtctccatcaattgtcccccttgcaggaacaccaaattttaacaactaactacacattaaaagcaccatcataagaactaaaaatcaggtgagcaaccacagtacctggctttaacttcatattgctgaaagaaacactgaagarggtaggaaagatagtcttgaattgccatcaccacctctccttcatctcctggcagtagccatatgatgtggagagggaaagtgtgtgcttgagggagggagagcacggtcactggagggacttggcattaaactcaatgctaccttgtcaccacaaagagcaaaacactgttgggttcagccaatggctgcccatggagggagcatttagaccagcct

SEQ ID NO: 665973 - DNA, 589 bp, Homo sapiens
catactaatcatgtttattcacatattcactcattatctacctcctgtgtgctggatgctctgctagatactgatgttacacaagcaagtgctccctaagtgtccagggaaggcagatatgcaaacaaatcaaactgcagtagcaacaccatatgctggtgggagcttaggtttccagagcctcgtgactcagcttcaaacctctgctcttccacttacccgttctggatctttgatcaagtcttttaaactktttggacctcagcatctgcactgtgaaataaggataacaatactacaatacttactttatagaattgtcatgaggatttaataaaataacaaaaataactaacatttattgagtgtttactaggcacttttctatgcatgatacatacctttaatgcatataaatctcatgatatcctaagatatatttattactattagcctcattctacagatgaggaaactgagggacaaagagtttggcaggtaatttgtcaaaggtcaaacagtttggtaaattatagaaccatatatattaaagatttaatgtagtgcaaaaaaattgaatgaatagtaa

SEQ ID NO: 665974 - DNA, 567 bp, Homo sapiens
tgtcagctttccttcacaggctttcaaatatatgaaggcagctgtgatgtcttccccaaattttcctttacctgagcgaaatcatcccatatcctccaaccaatcactcaaccattcaagtgtggtttccacatccttcattatcctggtaaccatccagatagttaatgacagtctcaaaatgcagcacccaaatctgacatccatactctacacatattcctatggtaccgtggcaactgacagaaatttcttcatgcagggttaatgttatgaaacaccttttaaattagccaaagcaggggtccatgttttctgcttgctctatgtcttgtacttaatttacagtgtgggccactagccattagggaggtgtggggaatgtgattgttgccaataattgaccattccctggttcaggagatacataaaattctaatggaaccattattcttacacccacaggatatataacaagaacaataaagtgatgcatttgcagtatctgcttttttttwaaaaaaaagatgctttatgaaaatatccatctatattttatctcgcatg

SEQ ID NO: 665975 - DNA, 639 bp, Homo sapiens
ctctgtcttcctttatctccctgaatatgaacataatttactacagcacatgtattcccattgcaatgctctactcccaaataaataccttgttcttctagagagcctctctgttagttatttaggttgacatttaaaaataaaagcggaggggtaatggagaaactgaacaaattatgccctcagctggactcacagaatgactactgatattttcatttttaatgtattaaattagaggtatttaaagctgaaaagaataaaatagaaagatcctaaaaagaatactactcattttgccttgtattatataatcaattaaaattaaggatacttgctatttattgagtgcctattataagctgggactgtgctaggcatttacttataatctcaaatcctcacataaccctacaaagtaggtastatgtttcctatgagctagagaaactcagagaggttgcatgactttctcaaagcaacatagctgctcagtgacatagccaagctttaaatccaggtctatcataccctgaatccattccctctctctctgtttctgctacctttctgtaccttaaggaacaatcattcaaggcattttacagaactggagtagaattttaatagcatgcaggc

SEQ ID NO: 665976 - DNA, 603 bp, Homo sapiens
taatcaccagaaagggggaaggtcatgcagggcacatgaccttaatttgggtgtataacatgcagttggcatgcctcacttctatcacaccccattaagccagaagtaagccatatagccacccrcaggtttgaggaattctagaaaataaggagtcttcagctagataagcatagactctggaattctattacaaaaaaacaaatgggaaaaggaatactagggacaatctgtggtcttcagaggattaattgactccaaaactggactggagaaagttttaaaaagcttttcattcaactctccagctataagcatgagagctgagaaaagagggcagaacaagatggagttggtaaattcagtatttgtaatttacggtctttttcctctatggaagcagtttggaaataagtcaaactccacaaagagaaagctcaaaatccacagtcaaggtaggacaaaatttcttatcaacacattgattctctaacgctaacaaatcttgaaggtagaaatgtcaattctgggataatgacaggctgaaggtatagtcagtatgtttaaaaaaaaaatccctgagagacagggtaaattctgctt

SEQ ID NO: 665977 - DNA, 430 bp, Homo sapiens
gggtaaattctgcttcaatgaaagtgagcgtatctttattagagttgacagagatcattaaaaagtgaaagcaggaacccgatatattgatgacacctctagaagttggccttacaaccacaagctgtattcagcggagtatgttttttcctgtctcatgcaatgaaatccaatctcayagaagtttttatttgttcagagtgatagataagcctcctaaagtatggtttaaatcaatattctattccccaagttaactgaaactgcacattcatttaatgaatagatatacatgcaactttataaacacacagccataatacaaaaaaaatggggagggttacccaaaacagaactttgctttgtaggatgctctttcttgagtttctaataatgaaataaataacatatttcacattgcctaatgaaa

SEQ ID NO: 665978 - DNA, 406 bp, Homo sapiens
ttccttgatctccctgaggaacacaccactcccatttccagctaagcattccccaggtcagcctccaatctgtttgtcttctttccttctctcaaatcctcccctccctcttctttatcytccatctcctttctctcaggcttgcctctgaacctcagagttttttatttttaatttttactttaatgcaaagggattcaaacctctcccttgctccttttagaccctgccttgggatggaggtagactcaatttccacactcaggagagcccaccaaggtatttttctaaataaagacccatttctcctgagatgaccatcttgcaagcctcatcaaagttatcctcagtcactctgatgctgcggagcaaccaagctcaaaatctagtggcaaataacaaatgt

SEQ ID NO: 665979 - DNA, 622 bp, Homo sapiens
aatgttgaagtaaggacacagtgaggaggctgtagcaatatcccagtcaggagaggaaggtggttgagacactcccaaagaacaagtaatggtcaagtttcagatgtattttgagggtacagccaagaagatttgctggtcatattggatatggagtattaaaaaaaaaaaagaataaaggatgactggatgactccatggaatttcatctgaacaactaaaaaggtggagtagctgtttaaggygttaggaaatgtcccaggaggagcatggggctgtgtgtgtgtgcatgtgtgtgtctcgcaggcaagcaggaggcatggtgtgcagagctcagaaattcattttttaacatgtaaagcttctggtgcctattagatacccaggttgtgatttgaaagagacagatatgcatgtccggagtgttcagagacaagtctcagccgaagctctaaatctggagaatcaccagcttacagatggtattcaaagccatgagattttaatgcaatggacatgggagtgagaataaatagagaattggtctttgggcagaaggataaaacactgccctgtgaggagctcaagatgaagagaaaccagcaaagactgagaaggagca

SEQ ID NO: 665980 - DNA, 602 bp, Homo sapiens
aaacacactgacacagacacacatgcacagtccaaaacaaagaaatatatcccgtggtgcctataatagtcttaaggttatgaatcacataagggctacagaatgacaggaaggaaaattttactgagggctgaaagtggggaaaaatgaagacaagtctcaggcaataaaaatggagtgcccacatttcactgagaagatcgaacaagctaatatttattgagcatcaattggatacagaggctgtgatggaagatatacatgttatgtcaccaagaaagaccttcaagaatccacaaggtagacattaagtaaggtaactgaggctgagagaagttacctgatttactccagatgactcaactaagtggcagagcccaaactcaaaccatgggygtctgaccctgaagttcaagttcgtaagtctgatacaacaccctgataagtttgatattaaaaatgtccaaattcttgtactagatgaaattttaaaaattgaaggaagaatgttaatgtatgtgactgtgtgtgaagaaaatcaaccaaaaaaaaaaaaaacctcaattgtaacaattctggatggtcagaatttggaagaaatg

SEQ ID NO: 665981 - DNA, 443 bp, Homo sapiens
agcggtgacttttctcccctgggttccccagcactagaaacaggctgggaagggagactagggggttcctggccaggggctttactcctgtccacacagtccctgcacatgggattcattccctcatcrcaggagccaccagccccccatctttatcatattctctgtatcatctctttacccttctccctctccaagcccaaaactttaacccaggggatgagaaccaatcattcttcatgatgtacttttccaaatccttcagttttcctcatatttgaaaagctaaaaatctgacccttttgttctgtgggttcactgtaaccgtcccctcgtcccccacaccccagatgatggcacctgtcatcagacagcctgttggagactcatgggacaacaagagacaatagatagaaattatccaacagtttgggtaaataagt

SEQ ID NO: 665982 - DNA, 627 bp, Homo sapiens
aatcaacacttgattgtattcaggtatagtaattctgattacagtaggtttgatacatttatatgttttaattttctccctatattcaaattgacttatatgatgttcttacagtgaaaatagagcaagcaggacttttgacataagcaattcaatttcaaattagggttccatctcttgggttgtcctttcttataggagaactatcagaaagaatggaggaggctattttgaagagaactagctatctaaatcacctacattggcaaagaaccatagtaaaaatttatacattcatactgtttgtgtgtgtgtgagagagaaaatttatctttatgtaactacttttcaatcaattaatcaataagcatttatttastacataatctatattgggcactctgctaaatgctgttgaagatacagacaaatttacgacacagttgttctatataagcttacactaaatatttgatatttagattttttcctgacaaacgtgctccagctgaactcgtctaacatcctatagcttcatttcttgtcctgctattctttcctatctgctcccatgaatttatctttttagaccttctctggctctccagctttggggtcatcacttac

SEQ ID NO: 665983 - DNA, 605 bp, Homo sapiens
gtccagaattcctttttctagaagagaatgcctataaggccttttgttaatagcattaggagctccatatttgtctaagagggtctgaaaggctctgcctaaagtccttatgaaggctttataaacagttttaaagacacgcctttacttgattttaatcctaactttacatttgatttttaccctagatgaagatgttgtgaaagataaatttttattttccaacatagaaagtccagatcagagatgtttcctatagattttgatcgagaacaaaatagttgcttcttttgttcatcactatcttataacttctcagacactaaaatgaagtcagtgagcatttgaagcattctgccwggaaatccttgcacaattcaaaagttaattataaacatcttctgttgtctgtatcaccatagatgaccacttctgtagttattttgtcagtaaataaaatggtgagtgtcctttctgaacctccagtgacatatattgatttctctgcctgcagcaatagtctccttacagttttttaaatgaatttatttatatttttaattggcaaattaagtctaattcaatacaacaaatagaaaaatatt

SEQ ID NO: 665984 - DNA, 556 bp, Homo sapiens
aattatattattaacatcaaaggtccctgatcacagatctccataatagatataatattaattaaaagcttaaaatcttgtaagaactaccaaaatgtgacagagagacacaaaattagcacatgctgttggaataatggtgttgataacttgcttgatgcaggattgccacaaaatttctatttgtaaaaagcaaaatatcgccgaagcacaatacagcaaagtgtgataaaaggaggtatactcgcatttactgagactagtttttttctaattactttctctcttcttctatacagtaaccrtatatgttatacattttatataatatatatatatcctgaaacacagacctgatgtaacacacttctctatatgcctcatgttctttgtaaattagagcattcatatattatattgtctaataagtggtttcgctgtttaaatgttctgtggtggttccttcttgcctgttggatgtttctcagagaaaaagtacaatgccctttaactttcagtggtatgaaactactcaagattctctaaacatgcaatg

SEQ ID NO: 665985 - DNA, 556 bp, Homo sapiens
aattatattattaacatcaaaggtccctgatcacagatctccataatagatataatattaattaaaagcttaaaatcttgtaagaactaccaaaatgtgacagagagacacaaaattagcacatgctgttggaataatggtgttgataacttgcttgatgcaggattgccacaaaatttctatttgtaaaaagcaaaatatcgccgaagcacaatacagcaaagtgtgataaaaggaggtatactcgcatttactgagactagtttttttctaattactttctctcttcttctatacagtaaccatatatgttatacattttatataatatatatatatcctgaaacacagacctgatgtaacacacttctctatatgcctcatgttctttgtaaattagagcattcatatattatattgtctamtaagtggtttcgctgtttaaatgttctgtggtggttccttcttgcctgttggatgtttctcagagaaaaagtacaatgccctttaactttcagtggtatgaaactactcaagattctctaaacatgcaatg

SEQ ID NO: 665986 - DNA, 491 bp, Homo sapiens
cctctcagtacataaaatatataacactatgttggcttaaacatccgctgccaggctataagaaacacacttaattccacctctaaccatctttcacatgagaagtaatttattaaagtccttgccctttcctttgctatacrgcttgggttgcctgttcctcctctatcataatgatattattttgccttagaaactgtggttttgtcagagagatttccatgggcaaaggatgaggtagaatgctttatcattctttcattactgtggccttttgcatattagttaaaattacataaaaatgagaactatcgttattttactcagtcgacagtttttgagtccctactatgtgcctggccgtaaggatatagaaatggagagttgaataaggcaacaactggaccctgggcatgtttatattttagagggaaaagtgatatgaaaaataaaaaagaaaaaatagtgtaactataatgaaaggagaaatt

SEQ ID NO: 665987 - DNA, 535 bp, Homo sapiens
gttggagttgatcaaatgagagacatacgtaatggatagtgcttgtattgacaccatgagagagcctgcaccaacacaaagacaatcttgggcagagggtatagccaggagaycgagtttcaaagatgttgtttgaacctctgtatcatgccatacctcacaagaactaccttccttcagccttcaactaattactttttgtcactcacaaataaaagtgcctagctgtacaactgctaatgtgtacatttagaataaatcacttgaaatacaaagcacagaataatgaggcaaaacattttaaaacaggaaaactagcaatacttacatgtaaagtaccttctaaatagtccttttagagttcttaccctttatatcagagttcttggattatattacccgtcatcatatacatgccattagaaaatctgtatattttaataagcaaggactctcacatatctttgagaccctcctttatgcatcaaaatgattgtgctggatgttatagccagaagataacttttttgaatga

SEQ ID NO: 665988 - DNA, 672 bp, Homo sapiens
ataataatccatttttcttttgcaacagcacacaattggaaaaattggttagtttaccaaggctttgactgggagggtatgcttccctttaaggggtcagtctccacttgcagagccaataaaagccccatggggagactggccttataccctyacctacacagtacctgtcagggtttctgactggtggtcagtaaagaatgtcactttctaacatgtctaggagctccaagtttatcttgggaccttaagaggagagaatcacccaattcataggtgtttgagggtacaaactcatggttgagcttggcttaaaggtcttatctgagactcctcatggaataaacttccatcaaagccaatccaaaaggcctatgtcaaataattactctggctgcattttatgcaagtaatcaggccaagtataaaactaaagtctattttgcaaaccattcagtcctatgatgattttttaacaaacatggggactggagagagagagagaaatcatgtttcaaaacttatcatacatttgtcattaaattctaaacttattagttgtttttaagtttttgtctacattttagactatccctgcttgctcctgtgagccaaccagaaatccttggctgcagcttagaaagagcaagaggaatgggtaatgtagaaatc

SEQ ID NO: 665989 - DNA, 672 bp, Homo sapiens
ataataatccatttttcttttgcaacagcacacaattggaaaaattggttagtttaccaaggctttgactgggagggtatgcttccctttaaggggtcagtctccacttgcagagccaataaaagccccatggggagactggccttataccctcacctacacagtacctgtcagggtttctgactggtggtcagtaaagaatgtcactttctaacaygtctaggagctccaagtttatcttgggaccttaagaggagagaatcacccaattcataggtgtttgagggtacaaactcatggttgagcttggcttaaaggtcttatctgagactcctcatggaataaacttccatcaaagccaatccaaaaggcctatgtcaaataattactctggctgcattttatgcaagtaatcaggccaagtataaaactaaagtctattttgcaaaccattcagtcctatgatgattttttaacaaacatggggactggagagagagagagaaatcatgtttcaaaacttatcatacatttgtcattaaattctaaacttattagttgtttttaagtttttgtctacattttagactatccctgcttgctcctgtgagccaaccagaaatccttggctgcagcttagaaagagcaagaggaatgggtaatgtagaaatc

SEQ ID NO: 665990 - DNA, 532 bp, Homo sapiens
acgtttggttaagtgatgcagtcagtcggttcacaatcacctatggggagaaaattgagtaaaatgcaaataagaataatgaatatgaatgaaatataatgaatataatgaaaatgaattataaaaggaaaaaaatgaatgctctggcctcactctcttccctccctgcagtcccctaccagtgcttctcattggttaaattcaaatcaaaacaagagggcaggakaatttatttctgtagtctctacagaacaacctccaggggagcaggaagggagagagagggtggaaattgatatagaaaaaagtatatgtttttagcacaatcctcatgtccctattaccgaacacacttccaaaaacattttcagttgaatgagtaaaagaagtagcacattccttatggacactaattttcttttttaaaatctccattactgcatcttttactctttgttcaagatactatctgctttgtccttgattatttcaaatgcttcctaacagatctttctgctgttcctgcatgtac

SEQ ID NO: 665991 - DNA, 532 bp, Homo sapiens
acgtttggttaagtgatgcagtcagtcggttcacaatcacctatggggagaaaattgagtaaaatgcaaataagaataatgaatatgaatgaaatataatgaatataatgaaaatgaattataaaaggaaaaaaatgaatgctctggcctcactctcttccctccctgcagtcccctaccagtgcttctcattggttaaattcaaatcaaaacaagagggcaggataatttatttctgtagtctctacagaacaacctccaggggagcaggaagggagagagagggtggaaattgatatagaaaaaagtatatgtttttagcacaatcctcatgtccctattaccgaacacacttccaaaaacattttcagttgaatgagtaaaagaagtagcacattccttatggacactrattttcttttttaaaatctccattactgcatcttttactctttgttcaagatactatctgctttgtccttgattatttcaaatgcttcctaacagatctttctgctgttcctgcatgtac

SEQ ID NO: 665992 - DNA, 547 bp, Homo sapiens
actgtgtctctagcttttattgtgagcatacagctctcaggtcaggcctatcaaaacatcctcttcatgtacacatcttcttgtccagacataataagcatgcaattcaataaaaaccaaagcacttcagtgagacttctctggacctgctgcaacagaatgggtaagcttctctgctcatactgtacgtgagaaatgcaacacrgcctatgcccagacattttgcaacgttgaggatagagcaaattctggagaaatggaaagagagaaataaggttcatattttagtcatgttaagttcagaactacacatgattctttaattatcactttatgccagactttgccaccctccctcctctaatataattttatgttagcccttttcctcatcaaacaacttatacaagctttatgtattggccttttaatggagtgtgagtctaaaattgagaagggatatattatggcaccatataccatttaatttaaaactgtacagtaaacctcattgttttgtgtgtttgtgggctttttaatttttatg

SEQ ID NO: 665993 - DNA, 617 bp, Homo sapiens
ggcactggaaactggggtaaaggctatcctttcaacacagttgcaaagagattgtcagaactgtgtctatgtcctaggtcttcatggaagacagaacttaacagtgatgaactagggtgtcagacagaagaaatacctaggtagcaaagcattcaaagtacgtcatggcttcttttagtcatgttcagtaacgtaagaaaagataaatcaatttatagattgaatttataattaaaagggaagcagaacaaaaagatttggaaaactctcagcctggccacataaagaataaaaaagggtgttcaggagaaaatactaagrgtgtggccagcaaccatttgctaaagggattaaaatacatagaaggcagccaggtttaattcatcaggacaatgaaataataatcttcaaagtatttcagatctttttgaggccagctaggactctgagggcatggtttctagagagatgccagaggaaacttcgtatttgccacctagagctgccttgggactttaatccctgcatcctgagagagtgttcctcatccaccccacccatggctcaagtagcccaagtgtaactggacccattgctctgataagtcctggtggcgt

SEQ ID NO: 665994 - DNA, 617 bp, Homo sapiens
ggcactggaaactggggtaaaggctatcctttcaacacagttgcaaagagattgtcagaactgtgtctatgtcctaggtcttcatggaagacagaacttaacagtgatgaactagggtgtcagacagaagaaatacctaggtagcaaagcattcaaagtacgtcatggcttcttttagtcatgttcagtaacgtaagaaaagataaatcaatttatagattgaatttataattaaaagggaagcagaacaaaaagatttggaaaactctcagcctggccacataaagaataaaaaagggtgttcaggagaaaatactaagagtgtggccagcaaccatttgctaaagggattaaaatacatagaaggcagccaggtttaattcatcargacaatgaaataataatcttcaaagtatttcagatctttttgaggccagctaggactctgagggcatggtttctagagagatgccagaggaaacttcgtatttgccacctagagctgccttgggactttaatccctgcatcctgagagagtgttcctcatccaccccacccatggctcaagtagcccaagtgtaactggacccattgctctgataagtcctggtggcgt

SEQ ID NO: 665995 - DNA, 531 bp, Homo sapiens
aagtgtattcaaagacaagatccagcccacattagaggtaggagtagcatctgtatctcttggtgaattgcgctacctggcaagagtgggtagatgcacggataaatattcaaatgtgtatgcacacagagactatttttgaggaagccagacacagaaatcctaaagtcatatgtatctaggaatcgaagcatatctctcctaatctggactctttcttagtacattttataggtgcatctgaatataatagctttgtcaaaatctttctttcactcttcacacgtcttaagagaagccagaaactgtatttgatcctcaacccctcagtaacaaggacactcttaaaatgaatcaggatttaattytaaacaacacatatttaatacatacctactatgttctcaaaacattaagatgatttatggcatgcagtggacatagaggtgtctcctcttttgttgtgatgtacttgttctgcatatttccctgttttgggtcatggttttttttttttttttttctaggatt

SEQ ID NO: 665996 - DNA, 621 bp, Homo sapiens
aatgcagccaaagggaagcagatgaaagcaaccaaagggcttttctaagtggcaaaggcagatgaggaagggcaaggctgtggttgtgctcatggcactagagcagctccttcagcgcctgagagctgccagaagacaggtgtagaattaccagctctagtgaacttcagcttgctggactgcctcctgctttgggacctggctgctcagatgattattttctccatccacttttggctcaatgaagacagatacttacaaatgataagtgcacttggcaacatcccaaataatgactcttcaacccttggagactgccttgcctacacttgatttttggattttgaaatttaaattgggtagccaacatggttcattttccagatacataatgataaaaattacacactgcatatagacaaatttgtcattaacaaaccaattttatgagcattgtttcatttaatttgcaaaattcccttgggatgctgggaaggaatatatattttttatcgtattttggtcaacagcatactgcttccttttgatgaccatgtattctagagtcaaaagaatgtaaatytgaagttcatcttagccagttgctagtgtgttcctttg

SEQ ID NO: 665997 - DNA, 545 bp, Homo sapiens
ttacgttgtttctaaccgataaaaaaaatcttcaaccactacggaaattaaaatgtcagaaacagctattagaggtagtaataatatatagtcacrtttgatgctctcacttatgagcgattacttatgaagtgtataaattctaaatctctgttaacatatgtgagaatagcagtagcaaggattatctaatgctcttgtaattaaggggataagcattttcaagaagattattacaggcatacctcagacacatagcacatttccttccagaccactgaaataaagtgaatgtcacaataaatcgagtcacacaattttttttatttccaattgcctataatattcaggttcacaggatactgtagtctagtaagtatgcaatagcattatatctaaaatgtacataatttaaaaatactttatttctaaaaatgtcagccatcatctccaccttcagcaagttgttattttttgctagtggagggtcttgctttggtattggtggctgcttactgatagggtggtagttacttacagttcag

SEQ ID NO: 665998 - DNA, 545 bp, Homo sapiens
ttacgttgtttctaaccgataaaaaaaatcttcaaccactacggaaattaaaatgtcagaaacagctattagaggtagtaataatatatagtcacgtttgatgctctcacttatgagcgattacttatgaagtgtataaattctaaatctctgttaacatatgtgagaatagcagtagcaaggattatctaatgctcttgtaattaaggggataagcattttcaagaagwttattacaggcatacctcagacacatagcacatttccttccagaccactgaaataaagtgaatgtcacaataaatcgagtcacacaattttttttatttccaattgcctataatattcaggttcacaggatactgtagtctagtaagtatgcaatagcattatatctaaaatgtacataatttaaaaatactttatttctaaaaatgtcagccatcatctccaccttcagcaagttgttattttttgctagtggagggtcttgctttggtattggtggctgcttactgatagggtggtagttacttacagttcag

SEQ ID NO: 665999 - DNA, 521 bp, Homo sapiens
tctcaggtatgtctttattagcagcatgaaaatagacaaatacacttcatcttggcaaaaaaaaaaaaaaaaaaaaaaaagcagaaggtttttgttgttgttttttagatttaatttattttgtagttagcaacatgaccatgttattttaaggtacctgaatattgttctgtgactaagttcaggtgatttttcttaaatttggctttttagaaaccactggatattgaaaactctggtctattttaataggaaaagaatctgtatcaagagaggtattagcagagatgtgaaagagaaagaagaatcaggaagaggagaaaagtaagacagaaagraattttgtgcctttaagatgacaacaatgagataaattgacaaattatatatgtatatgtacatatatttttaaactatattttccaaacacaagctatttaatagaattaccttcaacaatagttgattaaaaacaaagtggtacaaactgaattaattctatattccatatatagtgtgta

SEQ ID NO: 666000 - DNA, 521 bp, Homo sapiens
tctcaggtatgtctttattagcagcatgaaaatagacaaatacacttcatcttggcaaaaaaaaaaaaaaaaaaaaaaaagcagaaggtttttgttgttgttttttagatttaatttattttgtagttagcaacatgaccatgttattttaaggtacctgaatattgttctgtgactaagttcaggtgatttttcttaaatttggctttttagaaaccactggatattgaaaactctggtctattttaataggaaaagaatctgtatcaagagaggtattagcagagatgtgaaagagaaagaagaatcaggaagaggagaaaagtaagacagaaagaaattttgtgcctttaagatgacaacaatgagataaattgacaaattatatatgtatatgtacatatatttttaaactatattttccaawcacaagctatttaatagaattaccttcaacaatagttgattaaaaacaaagtggtacaaactgaattaattctatattccatatatagtgtgta

SEQ ID NO: 666001 - DNA, 559 bp, Homo sapiens
tgggtgttaataaaacgtaaaaagtaaattctgacaggatgaactttatttaaaaatgaaagagatttttgagcctttaactggctggagaattgtatgtaggttatggctgacccgacatggacagaggcagtgaaaattaactaaatgttgatcaatccatattggacatttgttctagttagtttcacagctgcaaggaaggaaacattggagctcattttcctgaatgaatgcgtttaagaataagcttgtgtaatagcagttgagggagagcactgccttgagagtgtcttctgtcatttcctgcytccatgcataataagccaacccaaaggggctatgatagcttggaggagctataaaaatccatcaatgaagatgtctaactttcaccactgtagcatcatctcaggaattacagtttgaaactgagtgtctctatatatcttgggtctgccataggaatttataattatattagacccaagggcagctcctcctgctctaataacattcatgttattgaactaatgggactgtttaatacaggtttctc

SEQ ID NO: 666002 - DNA, 535 bp, Homo sapiens
tctcattcttttatatttagttcatgcctaatttatgaaagaaaggagcttcttttcaggcccctcaaaacacttgctttgtccaataagttattctgctgtaagacttgctatwccgtttctcataattagaggtttccttagtttctgcatagccttttattatttccaaacaaatttccttcagtgagatgcactatattttacaatcagggattatttaatttaatcttttctttctatgctaataatgattgaagaacattcaaactatccaataattgcacccacttggggaaggaaatttcttctgattttgaaatccggcatcggaatctaatgcattctgtgtctcactcaatgagtaattgacaactgtagttagagaaatacacgtttcactaatcctagtcaaatagcaaaattaaacttggctgccaaatatgatcaaggaaagttttcctgcccaagatgtaataaaaaactcttttgttaggttacatggatctctgcccatccttacttcccaagtgta

SEQ ID NO: 666003 - DNA, 535 bp, Homo sapiens
tctcattcttttatatttagttcatgcctaatttatgaaagaaaggagcttcttttcaggcccctcaaaacacttgctttgtccaataagttattctgctgtaagacttgctattccgtttctcataattagaggtttccttagtttctgcatagccttttattatttccaarcaaatttccttcagtgagatgcactatattttacaatcagggattatttaatttaatcttttctttctatgctaataatgattgaagaacattcaaactatccaataattgcacccacttggggaaggaaatttcttctgattttgaaatccggcatcggaatctaatgcattctgtgtctcactcaatgagtaattgacaactgtagttagagaaatacacgtttcactaatcctagtcaaatagcaaaattaaacttggctgccaaatatgatcaaggaaagttttcctgcccaagatgtaataaaaaactcttttgttaggttacatggatctctgcccatccttacttcccaagtgta

SEQ ID NO: 666004 - DNA, 535 bp, Homo sapiens
tctcattcttttatatttagttcatgcctaatttatgaaagaaaggagcttcttttcaggcccctcaaaacacttgctttgtccaataagttattctgctgtaagacttgctattccgtttctcataattagaggtttccttagtttctgcatagccttttattatttccaaacaaatttccttcagtgagatgcactatattttacaatcagggattatttaatttaatcttttctttctatgctaataatgattgaagaacattcraactatccaataattgcacccacttggggaaggaaatttcttctgattttgaaatccggcatcggaatctaatgcattctgtgtctcactcaatgagtaattgacaactgtagttagagaaatacacgtttcactaatcctagtcaaatagcaaaattaaacttggctgccaaatatgatcaaggaaagttttcctgcccaagatgtaataaaaaactcttttgttaggttacatggatctctgcccatccttacttcccaagtgta

SEQ ID NO: 666005 - DNA, 654 bp, Homo sapiens
ggaatgttaagaaacattttggcggtaggttccaggtctgtactaaacacagttgtacaccactcaaaatttccttttgggactgaaacactcattcccccagtcgcctaaaatcttagtgactgacagcttgtatctgcatctccctgtaagaattatttgagctaaagagagtcactgtgcccaaggtcatgcttccatgccaaagtcaggctcctccaataactggttgatgacagtgaaggcccagctccctcacaccagtagggacaactcttcaatgccatcttagcttcagtgctctttccaatctctatgtgagaggtgactttctggggaatcaaccttgccatggggacacaaaggaaaagcagacaataggctgctgcctttgattctacataacaagccatctttcaattaggcaaaatgcttccttctcaatggtcaatctacatgacaagggatctatattgagactggggtccaaggcctaactgtgatgggtagagttagtttactaactaactaatttgttcactgcacaaatattttcckagaatttgtcataagagaaatctctgaaaaatagcaagtattttttgatgtcatagaatgatgatgggatatctcactcttttccctttagcatct

SEQ ID NO: 666006 - DNA, 577 bp, Homo sapiens
taacaaatgctttgagattcttgttaaataaatgcttgtttggtgggtgtgtttgaagttggaactgaaaagtgctccagttggctggatgtttaacaaggctctctttgggagttcagcatctgtcaggtgaatcagaacaagggttctacttacatgaagcaggagaaaaattatrtctaatgagctgctaacaacaagtgtttattgagttctccgaggcatgttcaaatcagacacaagttaaaaggctaatgtgagcttttgatgatctgagaaaacttcacagaaaaaaaaactagatggaaatttttattaactaaaatatttgttgaaagtgtattacatgattggtagtctaccaagtgctttactatttaatcttcacaactgcgttagcctgaacgttttttgttccattttacagatacggatacaggtcatgtgtaatagagtaatttgtccttagtcatatcacaagtatattacacagatggaattagaaaagcaccaagttcaattatttttgggcttaatctacactaatgtcccctgacccgccccagaaaatgatgca

SEQ ID NO: 666007 - DNA, 564 bp, Homo sapiens
acttgctgaataaatattgactaaaatgttacgtatcagggattattgaattatttaattgatcattarctttaaaaggtatctaattttttgtcttataaaagtattcactgtaggatcttagaaaaagactcaatcaatgcctttaacattgtattttttacataaagatccaatttgttcacaaaatttaatgattatgactggtctattaggtatagcattaacacttacttgtgttttaattaaacctatccaagaagagaggggtcaggtgctggctcttgttccaaaagttgtatttctcaaaccgttctagtattttccgctcaagatatttctatgccttgcccattataaatattaaagtattttgaaacacattttacttgagtattaatgaactcaagtggtagattacgtgagttattagccatttgattatttaccagaggccaattactctaacttaatacataaaataattggataacttagtgaaatggtacttagaaaatcacaatagttgaaaagaatacctttctaatattcaccatttcagaa

SEQ ID NO: 666008 - DNA, 564 bp, Homo sapiens
acttgctgaataaatattgactaaaatgttacgtatcagggattattgaattatttaattgatcattaactttaaaaggtatctaattttttgtcttataaaagtattcactgtaggatcttagaaaaagactcaatcaatgcctttaacattgtattttttacataaagatccaatttgttcacaaaatttaatgattatgactggtctattaggtatagcattaacacttacttgtgttttaattaaacctatccaagaagagaggggtcaggtgctggctcttgttccaaaagttgtatttctcaaaccgttctagtattttccgctcaagatatttctatgccttgcccattataaatattaaagtattttgaaacacattttacttgagtattaatgaactcaagtggtagattacgtgagttattagccatttgattatttaccagaggccaattactctaacttaatayataaaataattggataacttagtgaaatggtacttagaaaatcacaatagttgaaaagaatacctttctaatattcaccatttcagaa

SEQ ID NO: 666009 - DNA, 564 bp, Homo sapiens
acttgctgaataaatattgactaaaatgttacgtatcagggattattgaattatttaattgatcattaactttaaaaggtatctaattttttgtcttataaaagtattcactgtaggatcttagaaaaagactcaatcaatgcctttaacattgtattttttacataaagatccaatttgttcacaaaatttaatgattatgactggtctattaggtatagcattaacacttacttgtgttttaattaaacctatccaagaagagaggggtcaggtgctggctcttgttccaaaagttgtatttctcaaaccgttctagtattttccgctcaagatatttctatgccttgcccattataaatattaaagtattttgaaacacattttacttgagtattaatgaactcaagtggtagattacgtgagttattagccatttgattatttaccagaggccaattactctaacttaatacrtaaaataattggataacttagtgaaatggtacttagaaaatcacaatagttgaaaagaatacctttctaatattcaccatttcagaa

SEQ ID NO: 666010 - DNA, 545 bp, Homo sapiens
tcagtggctcttcaacttaattgaaagtgaaatcctcttgatgtagagaatcaatctgcaaatcaacagctgacctaggtggctcagattcacagacattgacaaaatgtcaaagtgacagtaaaatcatcttggctttcacgtatgtcctgagctgtgatagatttgagtcatttaattgttacactgttaagccctgaggtaaaatcattgactccaaagcagtagatctattccaaagaacgcaatctggaaaagcaagtcacrctttctgttcaagaatactataaaagtttagtctcactgtgcacaaaatgagctaggctgtaactcatttattcattcattcattcatctggcttaaacatcaaaaacacagatgtagaagaacattcctgcctctaaatatatttgaaccacagattgttgacagcttagcatcatattctctcccttttgtattttcctctgcaattgaagaaaattaaataacatacgtggttggtaaaagaacgtgacatgcatgccagagctgagtgagaagc

SEQ ID NO: 666011 - DNA, 545 bp, Homo sapiens
tcagtggctcttcaacttaattgaaagtgaaatcctcttgatgtagagaatcaatctgcaaatcaacagctgacctaggtggctcagattcacagacattgacaaaatgtcaaagtgacagtaaaatcatcttggctttcacgtatgtcctgagctgtgatagatttgagtcatttaattgttacactgttaagccctgaggtaaaatcattgactccaaagcagtagatctattccaaagaacgcaatctggaaaagcaagtcacgctttctgttcaagaatactataaaagtttagtctcactgtgcacaaaatgagctaggctgtaactcatttattcattcattcattcatctggcttaaacatcaaaaacacagatgtagaagaacattcctgcctctaaatatatttgaaccacagattgttgacagcttagcatcatattctctsccttttgtattttcctctgcaattgaagaaaattaaataacatacgtggttggtaaaagaacgtgacatgcatgccagagctgagtgagaagc

SEQ ID NO: 666012 - DNA, 477 bp, Homo sapiens
acattatcaccgacctcacagaaatacaaaaaccctcacagactactacgaacacccctttgcacacaagctagaaaaccgtaagagatggctacattcctgaaaacatacctctgaagagtgaaccctgaagaaattgaatccctgaacagatcaataatatgttctaaaattgaatcaataataaaaagcttactaatcagaaaaagccatggaccagatggattaatagccaaattctaccaaatgtaaaaagaaragctggtactattcctactgaaaccattccaaaaaattgaggaggaggaactcctcaataactcattctatgagactagcataatcttgataccaaaacctagctgagacacaacaaaaaataaaaacttcaggccaagatccttgatgagtatctatagatattgcatggattaatatctatgcaaaaatcctcaacaaaatactagcaaactgaat

SEQ ID NO: 666013 - DNA, 608 bp, Homo sapiens
ttgaatctgaagtatttgtggagcatacatgaaggaggccaagcaacaaatggatgaaaacccagaattcaaggggatgatcagtgcttggcttgtagatattctctcccaagcagcwtatttggggtaaaacaaaaatggatccatgacagaatcatggaaaagacccatttttaagaattttgtaaagaaagtcagaaaagggtagtcagaaaagtaagagagctttcatgatggccaagttaaaaaaaaaaaaaaaaaagcaagaaaaccaactcatgtctccagtaagaagataatggctgaaatttgtgaattgaatttggcaataaggacattattggcaataactgccaagataatttcaatagagaagaggcaaaagcaataatgcaatgagctaaagagcatatgagaaaccaagaatcagggatgttactggagccttgacttctaaaagcccatctgagtagtaagggagggtgatgtcacagcagtacagtaacaggagtcacaacatctgttgtgactgctcttcaggtttgagaacatatgtaaggcagaggaaagaagtcattagcaagcctaaaacaggaaacttagaaaaa

SEQ ID NO: 666014 - DNA, 472 bp, Homo sapiens
gaaattatggtgaaaaagtcattcctggtaaagtaaaattcattgattcattcattcattcagacaacatattttgaacattttgataaagtcagactgcacaaagcacttgaaataaacaaatgaatagtagaagtaagaagacaggcaacacatgcacctagtactgtctgagattattgtcctgagccttaactctactccagcctactggtccatgttctccagcagaaggccctggggtgtgtatgaagatagaatattaggtccttacackgggtttattccataaccaggtcaaagcctgacttcttcttaaggaatctggctgtagtatatataggtagtcaattagtagtttaaaaatgcaatgtggtgtttgttacttagttctactaatttccaagagattaagttcttctgctagtatctaatttagaaacagtcaaagaaaatggttggatcaaattat

SEQ ID NO: 666015 - DNA, 472 bp, Homo sapiens
gaaattatggtgaaaaagtcattcctggtaaagtaaaattcattgattcattcattcattcagacaacatattttgaacattttgataaagtcagactgcacaaagcacttgaaataaacaaatgaatagtagaagtaagaagacaggcaacacatgcacctagtactgtctgagattattgtcctgagccttaactctactccagcctactggtccatgttctccagcagaaggccctggggtgtgtatgaagatagaatattaggtccttacactgggtttattccataaccaggtcaaagcctgacttcttcttaaggaatctggctgtagtatatataggtagtcaattagtagtttaaaaatgcaatgtggtgtttgttacttagttctacwaatttccaagagattaagttcttctgctagtatctaatttagaaacagtcaaagaaaatggttggatcaaattat

SEQ ID NO: 666016 - DNA, 573 bp, Homo sapiens
tacttccactaattaaatttaactaaataattaattttgtagcttatcctggagacaagtttggaaggatgagaaggcagaagtgggaggctagctgtgaaggtataaaaatatacatccaactaaagccttatagtagaaggggcattgtaagaattttatttctaacctcagaacagccacactaggagtaggaataaaatgatggaagactaagtaagaacatgtatacaggaagcaataaagtattgacaagccaataatcatgactgagggacaaatgagataacccaaagtccagctcacatcatcagggctaaaaacagtgcagcaagagtgaacgcccccagagagagcagagccgttgcctagagaacaaatggaatgactctaagaacatgcgagtcattgtttgaccttgccaaaattagatgagcattggcagaaagggcaggcaggagactggggygcaggggagctggtgaaggtgggagtcacagacagagagtctgtgttatatttttcagtgttatgggcatctgtttgattattaccttccaggctggtgaggcc

SEQ ID NO: 666017 - DNA, 627 bp, Homo sapiens
acttctcactactaccatgaaacgttagaagatgttaggcctatagtgtttatattaccctatatttctatttactctttagtctaaatataaggttctttttaaggtgatgtgggattatatgctaagtttgccaggcccatcttggttgatttctatcagccagggatatccttcgtgtaataatttttcctggaattattctrtattttaaatacatcatttttacgatgttattgtcatcattatcacactaaaataaataaggatgggttttgtattacttccaatttcttacaaagtctccattaataacgtttgaaaatcaaatgcacttgagttctcactaacagataattaaatggaaaagacgattagtattctctatcctttctccatacaaagtactaacaacttcttttaggttacagtttttacattaacacttgaataaaagaactagtactgtcagaaaccagcagctagaaggagtgaactcttctggtgtcataagggagacgtcttcaccttggctggtcacttgtaccagccaattatgtccttgtccaagttacagactgcggcatgcatacatttgccttgtctccatctggtggtttagtggta

SEQ ID NO: 666018 - DNA, 529 bp, Homo sapiens
acagttttttgaatgcttttgtaatttagttaaaaagttaacagttggtgaaattagttttgaggtgacgatacacattaaattcagtttaaagttcaataatcagaaagtattttggtttgataataataaaatgtataccaattaagaaatattttgagaataaacgtacttaatgattgaatttcatgcagatgtaatgtataattgtgtctggggaagctgtagtgttctaaaacctaaagctgtagttgtccatgttacaaaatttggataaccatgctactacrtttttgtaatgaagctgatatattgaacaccaaaacctaactcacattgtacatacgtgtttccttatttttctttgtctttagaatagaattgagacaacctttaataatgcaaaatctgtatttgattaaacactcaaaagaataagtagagacaattcatttgataagttttggctattgaaagtaattgttgaataccactgaaagaaagtgaaatgagtagctgtaaaaatttt

SEQ ID NO: 666019 - DNA, 555 bp, Homo sapiens
tcaatggtaaattaatgagcaaattatagtcatgattattgtcaaaaggaagaaatctcatgccttggggtggtaagataaggctttgcagaggtccttattttgatgcagttcctatcttcaatataaactattctacacttgctgcaggacatagggagatgtggcaaaagtagtaatagagtatcaacattttgaccattgactatatagcaaggattgtcccattgtattatgcaaatgctgacaataattctgtagcacaaggacaatgttacccttattttacagacaatgactgctcaccagggaagttactacccagcaaacagtctttaagcagagggtagtaacctactcaatagacagctagaaagtggagcctcagtactgaaattgagccytgactgactctatggctgggaattttagttacaacatatattatcaggtgtgaagaaaacaaaatagacagatcattaatttttcttttaagtgtaggtcagtaaggctgagaaacctatccaatgagtttatagtgctcaattgaaaatg

SEQ ID NO: 666020 - DNA, 510 bp, Homo sapiens
ctttaaatatgactatgtggcctggaaagcctttgtagcaattcctggtgagattcagagatcaaacagaaaatacagcaaaaatactaataataacctttctatwggcgattggcacttagtaggctggtcttattttcagtttctgttactgcatatgggccaacaatacaaatgggagtaacacatgattttactttaaagcaactgatcaataacatcataattattttctgagcacacattacatttaatccactgctatattcaattaaaggatcttcttagaactatatagtttcagtttcaagtttggttcagaatatagtttaaattgaaaattctctaaaagctttctgcaacaattctttaaataacttgaacttatactgtaacactgatgaccccccagaccttcttgccccagtagggccagcttcatcttgtaacattaaacctgaagttagcatcacatgcaaaaacagtcttacaggtccccatattttattc

SEQ ID NO: 666021 - DNA, 515 bp, Homo sapiens
ctcaataatttgtaatttcaatacatttacaaatttatttgaaacctatttagatagaatacatttctatatctaaagggaactataggcatacctccaagatggataggtttggtctagagtaccacaataaaayaaatattgcaatcaagcaaatcacatgaattttctggttttccagtgtataaaaaaagtatgttttcatgatactgtaatctattaagtgtttattaatagcattatgtctaaaatcaatgtgataccttaataaaaaataatttattgctacaaaatgttaacaaccatctgaggcttcagcaagttgtaatctttctgttggtggggtatcttgcctctgttggtgactgctgactgatcaggctggttgttgctaaagggtggggtggctatggcaattccgaaaataagacaacaaatgaagtttgcaatattaattggctcttcctttcaggaatgatttctctgttgcatgcaatgctgtttgatagcatttt

SEQ ID NO: 666022 - DNA, 638 bp, Homo sapiens
aacaaaccaggtcacctaagataagccactgtygctctccactcaatcttcccactttttaagaactgtcctaaaactgaacttctgctaagaatttctgattaggacaggcacacatgaccgtattttagcagtgttgtcctgcattaaggagagaagtcaggggtctcagttttagccatgcttaatacctctttgaccgtcagtacgtctaacttctctgtgcctcagctacttgattacaaagcaagaataacaatgcccgtcttgctcatctccccaaatcctagaaagacttaaattatatatatatatgtacatactcataaactataaaacacaaaagaacagaacagaatttactctttcaactttctgatcaatcagacatgaagaaataaactgcactccttaaagattcaatactattttgtagtttcaaagaaggtttttttttaatgtttttaaagaataaactcaaacatatcctgtttaaaagaaaaaaaaaaacgggaagcctggaagttaaattaaaccctgtttttgatcctagtaacaagaaaattattgaatttttagctgctgtctctaactttattttgtatcttttatgtttctgtttgtattactaccagtga

SEQ ID NO: 666023 - DNA, 638 bp, Homo sapiens
aacaaaccaggtcacctaagataagccactgtcgctctccactcaatcttcccactttttaagaactgtcctaaaactgaacttctgctaagaatttctgattaggacaggcacacatgaccgtattttagcagtgttgtcctgcattaaggagagaagtcaggggtctcagttttagccatgcttaatacctctttgaccgtcagtacgtctaacttctctgtgcctcagctacttgattacaaagcaagaataacaatgcccgtcttgctcatctccccaaatcctagaaagacttaaattatatatatatatgtacatactcataaactataaaacacaaaagaacagaacagaatttactctttcaactttctgatcaatcagacatgaagaaataaactgcactccttaaagattcaatactattttgtagtttcaaagaaggtttttttttaatgtttttaaagaataaactcaaacatatcctgtttaaaagaaaaaaaaaaaygggaagcctggaagttaaattaaaccctgtttttgatcctagtaacaagaaaattattgaatttttagctgctgtctctaactttattttgtatcttttatgtttctgtttgtattactaccagtga

SEQ ID NO: 666024 - DNA, 581 bp, Homo sapiens
cttcctctttcagagtgtgtgtgtgtgtgtgtgtgtttgtgtgtgtgtgtgtctgtgaaactttttaaaatttttctttgctgcattcctaatatatttttaagggaattttatcaatctctaaaatcattttagccttagcaaaagaaatattaaaatgcaaaattagtttttaccattcttggttatcagggactttgcttttcttttgtttctgtattacaaaagagccacttgtatttatttattagtttctattgtgaattactatatttgaaaacatttgctttcttcytaaatctatttcgtgacagctaattttatgaaaacataccctatcaaccaatcttaaagaaatagaaaaatatatgtgaatgtcaaattgaaaggtattgtttgaaactataggattgaaccacaaaatgttggctcatgccattgttttctatctgacgtaaatactgagcttattatcaggatggttctgcatgccatccataggcatttccttggagttagagttccccacccctctgcccccagctagacatgcccttctggattgactctgtgacactgga

SEQ ID NO: 666025 - DNA, 462 bp, Homo sapiens
aaaactattacacaattaagaggcagtcaattagggatgattactaattactctaracacctattagagttgcttcagggagaccattgactcattttatggatgcattatgaatgcttttttgtatctctccatgagtacaagtgaaactgtgattttcaacaactgcacaaataattcaaattataatttaacatagcttatttcaatatgctcatttacctgggtcacacaaatattacaaaactgaatttctagtttatgattatataataaaccaaatcagaatcagtgaatttattctgagtcatcttcctttttttcttccaccttgcctccctccctttttctctacccctttctcttcctttcttccttcctttcctttctacacatttcctgtgtgactcaaagtttagaaagttagctatataagaattcagcaaattgaaatcaaaagat

SEQ ID NO: 666026 - DNA, 598 bp, Homo sapiens
atggattttacccacacaattttcctaataatagccatgcagtaattatgtgcatggcaactatgtaccaaactactgtggggatctatttaagtaatagaaacggaaatatctacatacaatacttattactcataggaaaagacaaacttaaatactatttacatcaattcagataatgcactaccactaaagccaatagcaaaccatataatgaagtgttgaaagtacagtttttgaaccatatttatggcctttattctaatcctgatctatgggagtttaccaaaaatttccaaaggcaactataattctaagcaggctaaaaatatatggctactggtycactctcttcctaaccttttaaccccatgatggtcagccataatgttcaatactgtggtcagagtcccaaagttttaatgttcagcttgcttctggctactgggttttatcttctagctactaatttaacccaactgcatcctaaaattgactttggcaatgcattttaaaatgtgggaaaaacagataagatggctctgtctcctccctgtcctccagcagagaacactccttccctctcaaattgatacca

SEQ ID NO: 666027 - DNA, 594 bp, Homo sapiens
gtcaactttgtcaaagatcaaatggctgtaggcatacagctttatttctgggttgtttattatgatccactggcctrtgtgtctgtttttgtaccagtaccatgctcttttggttactgtagacttatagtacagtttgaagttaagtaatgtgaggcctccagctttgtcctttttgcttaggattgctttagctatccaggttctttttttttgattccacatgaaatttagagacgtttttttttcaattctgtcaagaaatgacattggtagtttgataggaatagccttcaaattatataaaaagaagacagactattctctgtaaagaccatgtaacactccaatccttctttgagaaatctcaaaactgctttcttcagtgacagaactaatacacattcccagcaacagtgtataagcattctcttttctctaaggataccagatggtagaggatggatgattgtacagaatctgagagcaattaaaaacattgttatttctcaacatctagaaatgccaaattcatatacattgtcagctgccattccaactgaaggtgagttctttactataatagacttatgt

SEQ ID NO: 666028 - DNA, 442 bp, Homo sapiens
aggcaggcgtggtggtgcatgcctgtaatttcagctactcaggaggctgaggcagaagaatcgcttgaacccaggyggcagaggttgcagtgagctgagatcgagccactgcactccagcctggttgagagggagactcacctcaaaaaacaaaaagaaaaaaaatgtggtccatattcaatattcatttaattcttacaatacctcttatgtaggagttccgataatgatcagaaggctagagatagctactatttactaagtacttattatgtgccaagcaccatgctaagtatatataaaaactcatttacatatatttacatatattaattcatttaaaccctacagtaagctggaagataggtatttctgtcttcattttcacgaggaaatcaaggctgggaaaggttaaatgacttgtctaagtgctcaaagctga

SEQ ID NO: 666029 - DNA, 442 bp, Homo sapiens
aggcaggcgtggtggtgcatgcctgtaatttcagctactcaggaggctgaggcagaagaatcgcttgaacccaggcggcagaggttgcagtgagctgagatcgagccactgcactccagcctggttgagagggagactcacctcaaaaaacaaaaagaaaaaaaatgtggtccatattcaatattcatttaattcttacaatacctcttatgtaggagttccgataatgatcagaaggctagagatagctactatttactaagtacttattatgtgccaagcaccatgctaagtatatataaaaactcatttacatatatttacatrtattaattcatttaaaccctacagtaagctggaagataggtatttctgtcttcattttcacgaggaaatcaaggctgggaaaggttaaatgacttgtctaagtgctcaaagctga

SEQ ID NO: 666030 - DNA, 613 bp, Homo sapiens
tgttcacaatagctaagatttggaagcaatctaagtgcccatcaacagataaatgggtaaagaaaatgtggtacatatatacaatggagtactattcagccataaaaaatgagatcctgtcatttgcaataacgtggatagaactggaatcattatgttaagtgaaataagccaggcacagaaagacaaacatcgcatgttctcccttatttgtgggatctaaaaatcaaaacaattgaactcatggacatagaaagtagaaggatggttrgcagagcctgggaagggtagtaggtggctgggagcaggagaggtgggggtggttattagtgagtgcaaaaaaaaaattagaaagaatggataaaacctgctatttaatagcacaacaaggtgactatagtcaataataatgtaattgtacattttaaaataatccacatttatagatcaggcatatggaaatgaacttgaaaatgtaggtaaaactggcttcatcccactgtaggagaggcaagtcaattcaactgccactggacagaatttacttgcatgtctatagataagaattattttgcactctgctgtcagttatttacaatttacagagttgtaa

SEQ ID NO: 666031 - DNA, 554 bp, Homo sapiens
atggtgctgccgtggtggatatgtggcattatacatttgtcaaaacccataggatgtacaaaacaaagagtgaaccctactgtaaactatggaatttaattagtaattatgtaacaatattttcccattagttgtaacaaatatgccacagatgttaataatagggcagactgtgtgggtggcaggtgagaagatgaagagttttatgggaatgctctgtactttttgttagatttttctgtaaattgaatactgatctaaagtctattaattaataaaattctgatggcttttaactgttatagaataaaattgaaactttgttcgcttttcttcaaccacctacatgctctgctttctttgtccatcttctaccatctttcacttctaagcatccatcttcatgttatccaattataactaattctttacaattcagcacttgtaaaactgctgcctccttggtgatattcttactataacccctctcttatttggatgccctcaartagtgctttaattaacactgcatctgaagtttttttagttttttt

SEQ ID NO: 666032 - DNA, 597 bp, Homo sapiens
gaaattctagggttgttctgaagataacttcacatgtttggagaataattagtagttattctaaaacaggtagagtgtggtagttataaatgtaatatggtgtggtmgctaagtaagaacgtgagcagaagtgctgccaattgtatttagacgttaaacatttcttcagagcaaagggttagaatttgaaaggttgaaaagttgaagtagggaaatggcatgattaaatttatattctacaaagatactcagaataaagatatttaagagattgtagcagtgagagatgctggcaaataattttagttatagtttgctataagagaacaaagagtgatttgagaattgtaaatcagttgaggagaaggcatgtgaggtagttaaagagcatagatatgagtaaaaaggagtataaagggcagccagtttgctgtagggtccaagattaatgtaatttaagtccctagacacacagtgatagtctggtatgaaatattttaatattggtagtctggaacaacacacaacattgaaataattaagtcaatataattatccctttcaagagattttaattactttgtagttgatgcagat

SEQ ID NO: 666033 - DNA, 597 bp, Homo sapiens
gaaattctagggttgttctgaagataacttcacatgtttggagaataattagtagttattctaaaacaggtagagtgtggtagttataaatgtaatatggtgtggtagctaagtaagaacrtgagcagaagtgctgccaattgtatttagacgttaaacatttcttcagagcaaagggttagaatttgaaaggttgaaaagttgaagtagggaaatggcatgattaaatttatattctacaaagatactcagaataaagatatttaagagattgtagcagtgagagatgctggcaaataattttagttatagtttgctataagagaacaaagagtgatttgagaattgtaaatcagttgaggagaaggcatgtgaggtagttaaagagcatagatatgagtaaaaaggagtataaagggcagccagtttgctgtagggtccaagattaatgtaatttaagtccctagacacacagtgatagtctggtatgaaatattttaatattggtagtctggaacaacacacaacattgaaataattaagtcaatataattatccctttcaagagattttaattactttgtagttgatgcagat

SEQ ID NO: 666034 - DNA, 576 bp, Homo sapiens
atcactaaattaacttattagaatcattataataactggatcctcattgggtggaggctgatactattctgtttagtggatcattaattcaacagattctagataaataatattttctccagtctaaaaagcaaatcaaatcatgtcctttgtgtatagataatcaagagttatttgtcataaacctcagacaaatctaatattgagaaaatctatatgcaatcatattccaattatgaacttctttcaaaagataaataatcctattattattattattattttgagatggagttttgctcttgttgcccaggctggagtgcaatggtgcgaccttggctcactgcaactttcacatcccgggttcaagtgattctcctgcctcagcctsccaagtagctgggattacaggtatgtgccaccacgcccggctaattttgtatttttagtagagatggggtttcttcatgttgatcaggctggtctcgaactcctgacctcaggtgacccacctgcctcagcctcccaaagtgctgggattacatgccactacgcctggcaaaataatcctattgt

SEQ ID NO: 666035 - DNA, 599 bp, Homo sapiens
aactggcctaaccgctctacttaaaacatacagaatggcaaaatggattagaaaacacaaaccaaatatctgctgtcttcaagagattcacctcacacataaggattcatataaactcaaggtaaagaagtggataatgatattacacacaaatggaaaccaaaaacatgaaggaatagctattcttttatcaaaagaaaatctagaggaaatgaataaattcctggaaacatacaatcctcctagattaaaccatraggaaatagaagccctgaacaggccaataacaagcagcaagattgaattagtaatttaaaaattaccaacaagaaaaggtgcaggaccagatggattcacagctgaattctaccagacattcaaagaaaaattggaacaaatcctactgaaaccgttaccaaagatagataaagagtaaacattctatgacgccattatcaccctaataccgaaaccagaaaagggcataaaaacaaagaaaactgctgatcaatttccctgataaaaaagatacaaaaattctcaacaaaatgctagctgatcaaatccaacagcacctcaaaaagatattacatcatcat

SEQ ID NO: 666036 - DNA, 361 bp, Homo sapiens
aatcctactgaaaccgttaccaaagatagataaagagtaaacattctatgacgccattatcaccctaataccgaaaccagaaaagggcataaaaacaaagaaaactgctgatcaatttccctgataaaaaagayacaaaaattctcaacaaaatgctagctgatcaaatccaacagcacctcaaaaagatattacatcatcatcaaattagtttcataccagggatgcagggatggtttaatatatgcaagtaagtaaatatcatacatacatgaacagaattagaaacatttggttatctcaatagatgcaggaaaagcatttgataaaatccatcatctctttatgataaaaaccctca

SEQ ID NO: 666037 - DNA, 571 bp, Homo sapiens
gcgatcatagctcactgcagcctcaaactcctgggctcaagtgatcttctctcctcagcctccctagtagctaagactacaggctctcaccaccacacccaggtaatatatatagtagagatggggtcttgctatgttgtccaggcagctcttgaactcctccattcaagagatctttctacctaggcctcccgaagtgctgagattacaggcaggtgccaacaagcctggccatgacctctatagcaaattttaggtatggatttacagaactacatattttcctsacattcacctcctttttagtgatgaaattgctctcactacatagcattttagatagttagctagaagaaattaatttgtgtctgtataacaaagggtaatttagaaaaatgcagtatttttaaattaattgacttgtaattcttgattggtactagtttgtttttttccaagctaaataaattcaggcttatattaaaacgtttgtctagaacagactaaagcatactagctaatgacgcaaataaatattgtttttgtctgttccttattttaaaaactgagt

SEQ ID NO: 666038 - DNA, 511 bp, Homo sapiens
ctgtataaattatcccagagcattgaaaaaaggaaaaatcctaacactttttctgcaatatattatgtttgagtttctaaatctgataaaaagtatacacacaaaggaaactatggaacagtatcactaatgaatatcatttaaaaagtatcatataaaatgttatcaaatgggccaggcgggatggctcatgcctgtagtcccagcaatttggggactgggtgaggcaggtggatcgcttgaggtgaggagtttgagaccagcctggccaacatggtgaaccttgtctytactaaaaatacaaaaattagctgagcatggtggtgtgcgcctgtaatcccagctactttggagggtgaggcaggagaatcacttgaacctaggaggcggagaagcatgctgctgcactccagcctgtgcaacagacagaccctgtctgaaaaaaaaaaaaaagttttcaaatgtaatataacaccattttaggaaaatgcgtcattagcatgtgaaattt

SEQ ID NO: 666039 - DNA, 584 bp, Homo sapiens
tggaaaatttgcagcctgaccatgtggtaggaaggaaaaaaaaaatcccatttctgggaagaaattcaagccagctgcagaaatttgcttaagtaacaaggagccaaaggttaattaccaggacaacagggaaaatgtctccaggatatttcagagatcttcaaggcaacccctcccataacagggccagaggcctagaggcctaggagggaaaaatggtttcatgggccagggccagggctctgtttctctgtgcagccttgggacatgacaccctgcattccagccaccccagctccagctatggctaaaaggggmcaaggtatagctaggctgtggctttagaaggtgtaagccccaagcctcggtggcttccacatggtgttgggcctgcggatgtgcagaagccaagagttgaggtttgggaacctctgcttagatttcagaagatgtatgaaaatgcctggatgtctaggcagaagtgtgttgcaggggcagagccctcatagagaaactctactaggtcagtgcagaggggaaatttggggttggagcccccacacagagtctccactggggcactc

SEQ ID NO: 666040 - DNA, 584 bp, Homo sapiens
tggaaaatttgcagcctgaccatgtggtaggaaggaaaaaaaaaatcccatttctgggaagaaattcaagccagctgcagaaatttgcttaagtaacaaggagccaaaggttaattaccaggacaacagggaaaatgtctccaggatatttcagagatcttcaaggcaacccctcccataacagggccagaggcctagaggcctaggagggaaaaatggtttcatgggccagggccagggctctgtttctctgtgcagccttgggacatgacaccctgcattccagccaccccagctccagctatggctaaaaggggacaaggtatagctaggctgtggctttagaaggtgtaagccccaagcctcggtggcttccacatggtgttgggcctgcggatgtgcagaagccaagagttgaggtttgggaacctctgcttagatttcagaagatgtatgaaaatgcctggatgtctaggcagaagtgtgttgcaggggcagagccctcatagagaaactctastaggtcagtgcagaggggaaatttggggttggagcccccacacagagtctccactggggcactc

SEQ ID NO: 666041 - DNA, 584 bp, Homo sapiens
tggaaaatttgcagcctgaccatgtggtaggaaggaaaaaaaaaatcccatttctgggaagaaattcaagccagctgcagaaatttgcttaagtaacaaggagccaaaggttaattaccaggacaacagggaaaatgtctccaggatatttcagagatcttcaaggcaacccctcccataacagggccagaggcctagaggcctaggagggaaaaatggtttcatgggccagggccagggctctgtttctctgtgcagccttgggacatgacaccctgcattccagccaccccagctccagctatggctaaaaggggacaaggtatagctaggctgtggctttagaaggtgtaagccccaagcctcggtggcttccacatggtgttgggcctgcggatgtgcagaagccaagagttgaggtttgggaacctctgcttagatttcagaagatgtatgaaaatgcctggatgtctaggcagaagtgtgttgcaggggcagagccctcatagagaaactctactaggtcagtgcagagggsaaatttggggttggagcccccacacagagtctccactggggcactc

SEQ ID NO: 666042 - DNA, 522 bp, Homo sapiens
cctggcttatagttagcaccccataaatgttcattgctattatttttattttgttgtgattttattttggttatattattttttgggtgaagagaactgtgtaacttcaagtcttaatatccagaaactctcagggtgggtctaagattttagtctacttacaagatgatttgatggcctgttratgtttcatgaatcgtggcaaaagacgagactcctgtgtcagagacaaactttttaacagcgaaagcagtgtccacagcttgatgtttgtgtgctttgattctccatgacccccatgtcccattggtaggcaacacaaagggcctctatagatgtctgtacactcagtcggtttcattacagtaatggagacatgaacttggggtttcacttgttttatggtgcgtagaggcaagcctattctctatccaaggtaatgtgttacttatctctcaagttcattcactacaaaaacaaccatgaaaaaaggtctgatttaaaagctgtcagggtcttaaa

SEQ ID NO: 666043 - DNA, 522 bp, Homo sapiens
cctggcttatagttagcaccccataaatgttcattgctattatttttattttgttgtgattttattttggttatattattttttgggtgaagagaactgtgtaacttcaagtcttaatatccagaaactctcagggtgggtctaagattttagtctacttacaagatgatttgatggcctgttgatgtttcatgaatcgtggcaaaagacgagactcctgtgtcagagacaaactttttaacagcgaaagcagtgtccacagcttgatgttygtgtgctttgattctccatgacccccatgtcccattggtaggcaacacaaagggcctctatagatgtctgtacactcagtcggtttcattacagtaatggagacatgaacttggggtttcacttgttttatggtgcgtagaggcaagcctattctctatccaaggtaatgtgttacttatctctcaagttcattcactacaaaaacaaccatgaaaaaaggtctgatttaaaagctgtcagggtcttaaa

SEQ ID NO: 666044 - DNA, 555 bp, Homo sapiens
atatgcataagccaaaactcaccagatgatgcacttaatatactaatttcattgtatgtcagttttaagggraaaaataataactgtaaacaaatatcaaattctagttaatggtatttatgctgaagttattcagggtaaactgtactgttgcctgcaacatatttaaagtacattcaacaaataagataattaatggatatgtaagtaataaatcaaggctaaaataaaaatcgtggcatttaaatgatagatatatgttatatattggaaatttaattggatatttaattggatattaaataacacaatttttcaactttcttgatattataaatttttgtaagaagatgtttgttgcaaaaattgtaaacctggtttacattataagtcatatgattattatatttataatgaagttaaggttatggtaaagtttaaaacatataaaaataagttacatctctagtaatgagagtttttttaaacaatccataaaactggtaattgtagaagaaaataatgcaaaatttaaatggaatatattgtaaacac

SEQ ID NO: 666045 - DNA, 555 bp, Homo sapiens
atatgcataagccaaaactcaccagatgatgcacttaatatactaatttcattgtatgtcagttttaagggaaaaaataataactgtaaacaaatatcaaattctagttaatggtatttatgctgaagttattcagggtaaactgtactgttgcctgcaacatatttaaagtacattcaacaaataagataattaatggatatgtaagtaataaatcaaggctaaaataaaaatcgtggcatttaaatgatakatatatgttatatattggaaatttaattggatatttaattggatattaaataacacaatttttcaactttcttgatattataaatttttgtaagaagatgtttgttgcaaaaattgtaaacctggtttacattataagtcatatgattattatatttataatgaagttaaggttatggtaaagtttaaaacatataaaaataagttacatctctagtaatgagagtttttttaaacaatccataaaactggtaattgtagaagaaaataatgcaaaatttaaatggaatatattgtaaacac

SEQ ID NO: 666046 - DNA, 579 bp, Homo sapiens
tcaatctaactattgctggctacagatgtcatattctacttctctttttagctacctttctgcttttcataggacagaaaaaatggcttataattgacagatacagggatattctcakgaatttagtggagttgttctgtagatatttttaagaattccaaactgacatgtatatattgtagaaaatattgtatatatatgtgtatattgtagataatgtaggtgagaaaaagttcataatgaaacacaaataaacatcactttaggtatcagccagaaaccttacaggaaagtgaagttgaaccataaagcataacccagaatcaatagatcagcatctttcccctgcaagtactgttgtggcaattgctttcaatactatactccccgaggacattaagaagtagctacacacactcatgagttaccgtaaagtgtatgagtctctctagaagaattcaagggagttccagattgactctgatttttccaggactttcactaggacttggaatgcctggcggctccctaacatttatttccccaaaggattgcaggttcagaaatgaatgtgacccc

SEQ ID NO: 666047 - DNA, 591 bp, Homo sapiens
aagcaaaggctggattgctttgacattataggagaaagtctgtgtatcacattaagtcatagagcagggtttggcctggggtctgtggagcatttatatatatatatatatawaaatatttggagaaacaactgtaatcatgtgtcagtgtaatgttacaagttacaatagaaactatttctctggttaaattaagagaagagagtattactatattctggttgtatagcttctttctggaaagttttgtggttagtgggctagttctgcaatcagcttgcttagcaagtttggaatatttgtatttttcatataaagacagggaaatataatatttgaaatgtttttacaaatagaaatgtcagctaaaatgacttttcccaacagtggtggtgctaggattgtgtttttcttttctaattcttgttttaaaaaagaatgtcttgtattcccccatgaattaaatgggaaccacaaaaataaaagaaatatatattgttgtagagtattttttatttctagataaatgtgttattagaaaaaacttataaattttataaaatgcacattcaacacttattgaaatcaaat

SEQ ID NO: 666048 - DNA, 627 bp, Homo sapiens
tcataattttataaaataaacataatctgatataacaatcattagcagattaaataaacagaaaaatttattctgcaaaagtttgaaataacagaaaaatctttaaaagtttaaaaatgtgttaaaataatatgtttaaaattatatgcaaatactataaatgaaaataaacaaactataactttttacacgttaaaaatagagtctttactattgaaattgaatgggtggtaaaaacatcatttcaagcacaaagcagaagacaaaatttgttacacaggagatatgtatctgtgtaataatttccagaatgcaagacagttataaacagaagatatgaaaaaagaaatgagtagacctggagaataaattataagatccaatatatatctgttaggaatttaagaataagagaatagagaaaatagttaagaaataatgctcaaggaaatataaaacgataaaacaaaaaagtggcaggtcacatamcctgagattaaacatatcactttaagaactacagaggaagcaaattcacaaaaccacatccagacatgttggaatgaaactaaaaataccaaaaataaaataaaaatcctaagtgacaccaaagaaaaaaaggatgag

SEQ ID NO: 666049 - DNA, 642 bp, Homo sapiens
agattatgtatatagaatgatagagcacccagctcttttgggtacaaaatgtcacccatcccaacctggtattattcagtctgactcctgtgttattgtcctttatattatttttttaataaagtggacatctgatgtaatctgagcaccatttcctcattcttccaaagagggtattctgcagtttggagaactggctatggtccagagaaatggctgaggatgaagctgcagcagaacagcagtgccacacaatttggggtgggtccctgatccatgagactttcaagataaccacagtgttctgttctcaagtattagattattacctgacctgcacatctgcaaagtcatgatggccggtgtaccttgctgcacttctgacacagtttattgactcttctgtatagtacaaaatagttaacatgtgtttggtcaaggtgacagctactcaatcaaaactggcttaaggccgggcatagtggctcatgcctttaatcccagcactttgggaggccaraacaggtggatctcttcagctcaagagttccagaccagccatgggcaacatgatgaaaccccatctccactaaaaatacaaaaattagctgagcatagtggtacacgcctgtagtgtcagta

SEQ ID NO: 666050 - DNA, 581 bp, Homo sapiens
aaatgggaggggagaaatccagattgattcgggcctagaacaaggcctacttgttcatggaagaggctggatattgcccctatgtggctgacggggagtccttttgaagataggcaccctggtaccataggtgggtttgaggtttgttggaggtgatggttaattttatgtgtctacatgactaggtttggggatacccaagtagctggtaaaactttaggtgtgtgtctgtgagggtgtttccagaagagataattaattgaattagtagaatraataaggaagattcatggtcgctgttatgggtattaaccaatctgttgagaccctggacagaacaagaacaaaaaaagaagagctaattttctttctccttgagctgggaaattcgtcttctcttccacttagacattggagttcctgattctcaggtctttggatgctggggcttacaccagagctgcctacctcacccccactcctatgttgcccccgccccgaccccagggtctcaggattttaaactctgactgaattacactacaggctttcctgattctcaagcttacagatggcagatt

SEQ ID NO: 666051 - DNA, 581 bp, Homo sapiens
aaatgggaggggagaaatccagattgattcgggcctagaacaaggcctacttgttcatggaagaggctggatattgcccctatgtggctgacggggagtccttttgaagataggcaccctggtaccataggtgggtttgaggtttgttggaggtgatggttaattttatgtgtctacatgactaggtttggggatacccaagtagctggtaaaactttaggtgtgtgtctgtgagggtgtttccagaagagataattaattgaattagtagaataaataaggaagattcatggtcgctgttatgggtattaaccaatctgttgagaccctggacagaacaagaacaaaaaaagaagagctaattttctttctccttgagctgggaaattygtcttctcttccacttagacattggagttcctgattctcaggtctttggatgctggggcttacaccagagctgcctacctcacccccactcctatgttgcccccgccccgaccccagggtctcaggattttaaactctgactgaattacactacaggctttcctgattctcaagcttacagatggcagatt

SEQ ID NO: 666052 - DNA, 536 bp, Homo sapiens
gccattcatccttaatatacaaatttaattaaatcatgatcagtttattagctggtggttagagatgtggttgtcaatacggctgagcctcagggcatcattaagaacattcaatatttctgtactattgacacttggttgcactagataataagaactgtacaagatagcatgatagatgaaccaagttttataatttattttacaaaggaagcacaccttaatttgtttgctttgagggaaaaatgaacactttatgaacacattatgaaaaaccagagttcaaagatgtagtgttactcttgtgaaaaaatattctcgggggtgataaggggcatttggcactgccagcccagtacaagtgcttctcactcctgctcygtgaaaaaatattctcaagcactgcttttaaaacttaatgtatatcagaattatttattgaacatagaagtatcaaagataatgtattgatcaaaaaaatttcctcctctcccaaacttctcatctgtgtccatgatactatcattcttagcagc

SEQ ID NO: 666053 - DNA, 618 bp, Homo sapiens
tttaagctgaatcctagggacatttgttggttaaaagattacttaaatagaaataagagaaagatatcaaatcaggttggtagcaaggaatctctatgtattttttaaaaatggttcactaatttaaaaatgagataatgcactttcggttcactgaaatattttaggtcagtcatcttagatatagaaaatatgatacaatttgttcaatatcctttggttataacctgttgtataaaatatttggatcttcttaatctttttgtattgcaacaatactcttcccactcacaattaccatgtacaattatcatgacatgcatatgtcacttatactcaatgatttaaaataatcataactatgtactcatttttataataaagagatctaatataaattaaaatactattrtgatattatcattcaagcctctcaagttggaacaaacacttttttttcatgctttactattcctattcttagaaatgtgcagtaaatctcttatgaaaaacaaaatatgttttgttagtttggtgtccttcttctctggtactctgaatgtaacagctttactctacacttaggcttctattgtgtaaggtaactgcttccatatt

SEQ ID NO: 666054 - DNA, 548 bp, Homo sapiens
ggtttatcccgccagcataatcatcatcaagatcatggagccagtagctgtatatcaatgcaacaaatacagatctttcttaccccatccccaaaagtcacctaaccagagaaaattgtactatcattataagaaatgtatattgattgcttaatttattttgcttagcactttccctatattatctcatgtaatccttacaacagatataaaataagagcaccatccccattcaacaagtgctgaagtgtggttagggaggtgaaataacttgcctaagacttcatccttgttaactggagaagcaagaattaaaagctagatttgtctgactccaagtmgtttttttttttttttgtccatagttattaagtgatatcatcttttcagcagtcttagggacctttaatgactacaaaaatgaaacaaacaaaaactagcttagttcttaattgcattttgccatattatttctgaagatcctgttgttagaaattctgaaaatgtcagtcataattatttcatatacagcccaaattattctcaat

SEQ ID NO: 666055 - DNA, 654 bp, Homo sapiens
agcaatgagacatctcgcgagtgagtagaaaacaaacttctattccagtaattgttgaactataccatactgtttttcagttcattccttttttaaaaaaacgtataaccttgccaccagtagattttgatatccaaaataatacctcagagtaatcatttacgggagaaactctgggatggaattttctattgctgtctactcagtcagctttgatgataagcctactgcaataaatactaaacattcacttcattattattctttttccaaattggcagaaagccagccctagatgatattccacttaaatttctaacgtttgtgtagaataatatttgtaataaatcagattatcartcttggtcagacaattcactgcctaaaacataaagctccccaagggtctgaaagccagtaaatcctaggtggaaaattatctcattaaatctaaacccaagtctacatgagacaaatgtttccaagctctactttgcagtccaaacattcctggatcctcccatggatgttgagattccctcccctttcacccttttcatctttcatctatcggtaatgtgcatacccatgcacacacacatgcaaacaactgatattcaagcatagggaagggctcaatctagactgcaaagt

SEQ ID NO: 666056 - DNA, 592 bp, Homo sapiens
ctttaataatgagaaacatagttatccagtcaagactgtgagacaggcagaaatgtttcaagtgcttccactgggtttaaatgtcttgatttccagggagttcattcactctagcttagggtgaacgaaccctcagcactgttgacatttagtgtcagataatttctttttgcctgagctatcctgtgcattgtaggagatccagctgtacccctagcctctacccactagatatcaatagtgctcctctgggtataacaaccaaaatgtctgcagacatcgccaaagatcccctgggggacaaaagtgccccaggctgagcattgcagtytatcgtaaaaagaaaataaaaacagtatccacacagtttgaaaagtctttgcaggctagctactctctgcatcctactttccaacccaaagttaggacaaatatttctttgttaagaatgggaaagagtgagggaggttgttgtagaaattggtttgtcatttctcaaataactctcctgtttgtcagcaagcactttctctttgcctaggttgagggtgagaaaaatgaaatacagaatgatatcaatgccgggccatag

SEQ ID NO: 666057 - DNA, 608 bp, Homo sapiens
ctttgcctaggttgagggtgagaaaaatgaaatacagaatgatatcaatgccgggccatagcagaatcatatgctcctcatgtaatctcacctttcgcaggaaaacacatgttcatggtgaacgactcagcccagctttgctggcctatttccatctagaattttcacccccgtatgtctctatagctttccatacttattcccccttctgtttttctacccctttatggattgatgggaagctctttgtggtaaaaacttcccaaacgagtggggaccatgctatgagaacatgtatttgctrtaaaggagactagacaaaaagctggacttttctcatttttaaatagaaataaacagctttccttttttatccatttattcagtcagcaaatatccattaagtgctactctatgacaggaattgtgctagaaaatttcagagacaaattttttaccaataaaaatgaccacaatgcacatcgtgtctttttttctagaaaaaaatctgctatttcatatttatcctttatatgataaataatttactattatcagcaagtaataataagcataaaaaatcctgactattttctaaggctaaaact

SEQ ID NO: 666058 - DNA, 562 bp, Homo sapiens
agggtgaggggaagcttaagagactgaaacatacctgcaatatttttctataaaatgtgtaattccataacaattagaaaaatttaacagaaattattattcttatatcttcatggtttgtgccttcttttttatatcttgggaaaaatggttgttcccttgagaactagagacagaccatcagtcaatcaaagccactgactctcagatcctgcagcatcsttaggtgctgacctagtccggttgtgttcccatccaccgccttcatttgctgtcattctttctctgggttccagcccagtgagatatggcagaatagcacaacaagcccaggaagccagaaggattggaaagaaaatacaaatctacctcttattaactgtgtgattttgaataagcttattaacttttctcaggctccatatcctaatttataaaattgaaatgttcactcctacctacaaggttgttttgaagagcaaatgagcacagttctggcaatatggtaagaactcaattcatgctatgttatcttctcccctccttccacttcatttatatc

SEQ ID NO: 666059 - DNA, 562 bp, Homo sapiens
agggtgaggggaagcttaagagactgaaacatacctgcaatatttttctataaaatgtgtaattccataacaattagaaaaatttaacagaaattattattcttatatcttcatggtttgtgccttcttttttatatcttgggaaaaatggttgttcccttgagaactagagacagaccatcagtcaatcaaagccactgactctcagatcctgcagcatcgttaggtgctgacctagtccgrttgtgttcccatccaccgccttcatttgctgtcattctttctctgggttccagcccagtgagatatggcagaatagcacaacaagcccaggaagccagaaggattggaaagaaaatacaaatctacctcttattaactgtgtgattttgaataagcttattaacttttctcaggctccatatcctaatttataaaattgaaatgttcactcctacctacaaggttgttttgaagagcaaatgagcacagttctggcaatatggtaagaactcaattcatgctatgttatcttctcccctccttccacttcatttatatc

SEQ ID NO: 666060 - DNA, 562 bp, Homo sapiens
agggtgaggggaagcttaagagactgaaacatacctgcaatatttttctataaaatgtgtaattccataacaattagaaaaatttaacagaaattattattcttatatcttcatggtttgtgccttcttttttatatcttgggaaaaatggttgttcccttgagaactagagacagaccatcagtcaatcaaagccactgactctcagatcctgcagcatcgttaggtgctgacctagtccggttgtgttcccatccaccgccttcatttgctgtcattctttctctgggttccagcccagtgagatatggcagaatagcacaacaagcccaggaagccagaaggattggaaagaaaatacaaatctacctcttattaactgtgtgattttgaataagcttattaacttttctcaggctccatatcctratttataaaattgaaatgttcactcctacctacaaggttgttttgaagagcaaatgagcacagttctggcaatatggtaagaactcaattcatgctatgttatcttctcccctccttccacttcatttatatc

SEQ ID NO: 666061 - DNA, 562 bp, Homo sapiens
tgtggacatcagcactgcctttcattcatttctgaattaaaaatagcatgaagagtgtctggcatatgtagataccaaaaagtagttgttgaaaaaraagtgggtcaggtgcagtggctcatgcctgtaatcctagcactttgggaggccgaggtgggcagattgcctgagctcaggagtttgagaccagactgggcaacacagtaaaaccccgtctctactaaaatacaaaatattagccaggcgaggcagtgtgcgcctctagtcccagctactcgggaggctgaggcaagataattgcttgaacctgccagggaggcagaggttgtaatgagctgagatcgcaccactgcactccagcctgggtgacagagcaagactctgtctcaaaaaaaaaaaaaaaaaaaaaaaaaaaaaagagtgaatgaataagtgaatggaagagtttcactgaataaaaaatagaggcaaaaagaattgtttctgcaaccttcatttaaaactcattcatagctgggtaaatatcaaagtcaagctgtttcttctcttggtaatgaggttt

SEQ ID NO: 666062 - DNA, 632 bp, Homo sapiens
ggcatatgtagataccaaaaagtagttgttgaaaaagaagtgggtcaggtgcagtggctcatgcctgtaatcctagcactttgggaggccgaggtgggcagattgcctgagctcaggagtttgagaccagactgggcaacacagtaaaaccccgtctctactaaaatacaaaatattagccaggcgaggcagtgtgcgcctctagtcccagctactcgggaggctgaggcaagataattgcttgaaccygccagggaggcagaggttgtaatgagctgagatcgcaccactgcactccagcctgggtgacagagcaagactctgtctcaaaaaaaaaaaaaaaaaaaaaaaaaaaaaagagtgaatgaataagtgaatggaagagtttcactgaataaaaaatagaggcaaaaagaattgtttctgcaaccttcatttaaaactcattcatagctgggtaaatatcaaagtcaagctgtttcttctcttggtaatgaggtttgtgcaaagcagcatgttactcttcatcttgcgagtcctcctctgtgaaaaactttaacatcatcgacaaatgtccttaggcagatccacctgaccagtgtcttttaaaaaaaggcttatttgcacaattt

SEQ ID NO: 666063 - DNA, 632 bp, Homo sapiens
ggcatatgtagataccaaaaagtagttgttgaaaaagaagtgggtcaggtgcagtggctcatgcctgtaatcctagcactttgggaggccgaggtgggcagattgcctgagctcaggagtttgagaccagactgggcaacacagtaaaaccccgtctctactaaaatacaaaatattagccaggcgaggcagtgtgcgcctctagtcccagctactcgggaggctgaggcaagataattgcttgaacctgccagggaggcagaggttgtaatgagctgagatcgcaccactgcactccagcctgggtgacagagcaagactctgtctcaaaaaaaaaaaaaaaaaaaaaaaaaaaaaagagtgaatgaataagtgaatggaagagtttcactgaataaaaaatagaggcaaaaagaattgtttctgcaaccttcattkaaaactcattcatagctgggtaaatatcaaagtcaagctgtttcttctcttggtaatgaggtttgtgcaaagcagcatgttactcttcatcttgcgagtcctcctctgtgaaaaactttaacatcatcgacaaatgtccttaggcagatccacctgaccagtgtcttttaaaaaaaggcttatttgcacaattt

SEQ ID NO: 666064 - DNA, 558 bp, Homo sapiens
tgtaaacaaagtttcaaaataaggatactaaaaattacaaagttaatgttgtctcacaggacttcaggcaaatacattcagacagaaaaatagcagctttacctaacacttcccaggggaacaaagatgagtgtttttgaagtctaatataaaagacaaatattttaaaaacattactgactagacagtttctgagaaaggtggacaattgcaagcaatcattaaaattatatttaatgagacaggaatgacaaaaaaaaaggataatttcaatatatcagacaatggtaaatatttcccagtatctctggtatgcagttcatcacgcaaggaagaatatcaataagaagttgttgactgaataactgcatgacttttctcttgctgggttgagtgtctcagagtcaaggtccatttactcatactcttttgtggcccakcatctgctgagggagagaagagtacgttaacacactgaaagagtgacataggcctgcttgagacatctgcagaagcaaatagaaaagaagggaaaagctgatacaacagttctgttaa

SEQ ID NO: 666065 - DNA, 463 bp, Homo sapiens
gtataaagtggcagcaggtgacctaaattcagtgacagccttagctgactctagcccagtctgtggttttcaccagacttcctctacttccggttctcattctcttagagtgtagctctcctgagttcccagcttaaagcttgggtcttgtattctgattttgttatttgcttttttgtttctctttgacaccatgacacaaccatgtcttttcttgatcataatgggaaggcctgtagtgttttccttttaagtaaagtgcctgtttattgattaagatacatactttatcgtgttaataatgtgtccattaggtactatttttttgagtgtagttttatcatgatgtgtastgaattttggcaaatgccttctctatatctttggagtaatcataaaatttttcttttatgatctctttatatggcctaatttatggccatatttatggcctttctaccat

SEQ ID NO: 666066 - DNA, 611 bp, Homo sapiens
ggaccttgtgattgtgtgagttaatacttaataaactcctatgcacacacacacacacacacacacacatatatatatatatatacacatacacacacatatatatattccattagttctgtctctctagggtaccctgagtaatacaccatcactctccctttcaaagaaagatgatttrccatgtacctagttaatactaaaatgcttggtaactaatagtttggctgtgttcccacccaaatctcatcttgaattgtagctcccacaatttccacatgttgtggaagggacccggtgggaggtaattgaatcatgggggtgggtctttcccatactattctcatgacagcgaatacgtctcatgagatctgatgtttttataaaggggagtttccctgcacaagttctcttctcttgtctgccaccatgtaagatgtgcctttcaccttctgccgtgattttgcggcctccccagccacgtggaatttaagtccattaaacctcttttataaattgcccagtctcagggatgtctttatcagcagcatgaaaacagactaatacagtaaccaaataaatacacataaaatttcctttgaaattttttt

SEQ ID NO: 666067 - DNA, 533 bp, Homo sapiens
aaatggagcttatcatcgttctcctaatatccacacagttcagtgtgcaaagaaaagaaagtmtaccttccattgaaactcagagggctcatggtataaatgggatatgggtgcaggagagcggggaggatgggagatagaccctgggtgtggaaggtctctgagaaagcttacagcaggatgccaggaggtggtggatactgggtttaatgtttctgtattatgtctatgctctgactatctgaaacattaatatggtttattatgcctgctaactgggcacctttgtctatcctaaacactgagtctcatctgtagggtcttcaatgtatcctttatcagcgtcatcggcctgccacatacatgatgcctgagctcaggccacagaatgagcatcctaaagaagaagttcactcttcttgtgctggaaaactaaatggatctcttggcctgtatgcaattcttactttcttctttttatggctgtttacagaaacaaatacataataaatacagccatattttaatgaata

SEQ ID NO: 666068 - DNA, 581 bp, Homo sapiens
taaacttcataaatgttaaagtaattttaaatttattaaacttgcacagaagtcttgtattgtttcctatgaaagaccttgggaataaataactactacatttcaacttttcccctggatgattctatattctatgtaaatatgcatatcttggtaaaacatgtaaaaattctggaaaactgtttgagcaagtatatttagaaggatrctataatcagataaaataactaaatttaccaatttaattattttacaaaaattcatgaaactaagcctctgaaaccaaatgtgtgctcaggaaagaaatctaaatactttaagggcattttaaagttatttgccattgtggtggtcaaattagagtgacaagccatatgtcccaaataattatgtaatttatgtcttgtcttggtaatcttcctcttccagaggaaaagttaattaagtaatattttaatttaaaaatatattttaatatttatgagtaatccttgctcaatgcacattcacgtaaacttgtataagcttgaatgttacactgagctgaaattaaatttcccttataaacataataaaaaaaa

SEQ ID NO: 666069 - DNA, 559 bp, Homo sapiens
gcttttttttctcaccctacattataattttcatcagccacctccaaccaatcagtaaaatctaatatatctgtgcagtcttctgtgtaattaatacgataaacaaaggggcagagcagtaaakagaaatgagaattgtcccacattttcccatttttggtactcatgagaacagagatgctacctctcaggggtttcggactagcaaggaggaaaaattttgcccgttagtggagctagagatgatgaaaagaacttgatttagagaaaaattgctagatagacaacttgagattggatatataatacccttctattttaccctaaaatgccagcctaaagacttttaaggagaagcaaaacttgacacctttgttttaacagatgtattgaataaattataatgtaatatccattccagctcttatcaaggtactggtcatcacaattaagtagtttggatgagggcactgactttgggctaagagaatcttctctttttgcctcagctgttctgtttctgttaagacactgtctgggctgagatatttaaatctgg

SEQ ID NO: 666070 - DNA, 637 bp, Homo sapiens
tcttctctctcccctgattataatcagtctctgactgccatcacacaagaattataatacctaggtaataaacaccctgaagacatactgtgactgtaatatttgggttcttcaggctaaggggccctgcagtggcaggcttttgtgttcagcagtgctcagcagttccatcccgaattttctttcatcagtagatagcgtttacttctcttctccattgggatgtaagcattgcagagaagaatttgggactaaattccaccatagtgttctttgcagtgaacctagggaatttttttttttaaacacggatggtacccttagccaactgcatagcagatttgtttttctaagtctggatgtgcattgcaatctttgggaggtattttttagtcacagatccctaagccatttcctagtccatttaatcagaatctgtacagaggttaagagcaaggrctctggagtcagcagtctgagtttgtatcctgactctaaaatgcaaacctgggacaggtatttaaacccagtgcctcagttttctcatgtatgaaaatgcagttacttatatctacctcatgagggtgtgcttagaatagaacctgtcccatataaacacaatttaagcattggttat

SEQ ID NO: 666071 - DNA, 588 bp, Homo sapiens
ataatgcattgtgttaaactcacatgcgtaacagtgaattctgtaacaatgcctgctatagtaagaaactgttgttaatgccttcagtgttccagacaaaaaataatactaatgaatctgctgaatactgatggaaaggatgtaatacgcatttccacagaaatgtcttgtaatttgggattaattaatgtccaattattgtaagctgttacyaataaattttaaaagtcagctctgcacttccattttgtaatgtttttataaaatggaacattagatgtttttaatcttgtctgttcttgcaaaataccccagataacatgctgttttgcatttcaaataatttatactcatttaaatgcaaaaccagggtccaatcagaataagatggcaatcaaattacaatattcaatgaagagtttgccaagctgacttcattagtaaactatcatgaatttcaagatcttacaaggtttctatttgtttgtacaactgcaaaggcctcaattacagagatttgagagagtctaaaaataacatcagactaattaaaagtttcagccggatttgggctagcactgttttgaa

SEQ ID NO: 666072 - DNA, 641 bp, Homo sapiens
atttatgtcttactgatgagtttgagggaggccagccaaataaccacaccacttttctatgctagaagttttaagctaaagtggtgatataaaattaataggatgttcattcctttcagtggggctgaggcagctccaaatttttctcacaattaggaatcacctcattcttgctagcaagactaaagttattaggttggacaaaactcattgtgattttgccatcaccttcattgaaagatctggaggcactcagcgcaggtaaagaaggtgggtaaaattggattataacctctaaacacaaaccctgtcttaaagtgacaatggtactgtgatattctagaagggcttaaaatcgctgagttttttggtcttaaatatgctcttaactggctgatcttacaaaacacccaacttaattttgctgcatttttctcgtctgcaaagtgagagggttggggctcatgccttctsaagttgttccagttctataagttataaataataaatacagacacacatacacacaaacacagacacacacacatatacttcccttaagctctgttgtaagggctcccactatgaccctgtctcaccaaagccatgctgggtagagagcatacacttttagaaaaccc

SEQ ID NO: 666073 - DNA, 600 bp, Homo sapiens
catgaaagttaacacctattactataatcctcaacaaaaagggagttgatggataaatgttactccttgttagtctatcccgtggtgcaaggagtcatattggggaatgtggacatttaaggttcaaagtatgtagcttaaatttgaaagcccaaaatccacaaatgggtcattggaaatggtggcaagaggggccaatccttttttccagtgctagtttatcaacctaggtgttctagcttttgaggaaayagcacactgatgtagtactctaacactgcaaggttttgtttccaagctagcagctagcaaatatttgaatagactagtcttattctattaagctgactgcttctgtggattgcatgcatatatttatatgagggccacagaattccatggtcacatatccatagctataaaatgaatccttcgtttggagacaatattgtgaaaaaaatgcatgccaatgaataaggcactgtttgtgctcttagatgatgttgggggtaaaggaactttgagcaaggaaatgaaagcagatctggagtccctatcaattcctggataaactcttgctgcctcctccagggtggaaag

SEQ ID NO: 666074 - DNA, 601 bp, Homo sapiens
tcatatatataatgatattataaaataatattttattgttaaatagagatttgttattaaagtaatatagacgttgtaagaaaaatcaccagcctcccaaatcatgtggaatcaatatattaacccagttaggaaataaacacaaattggacaagtgactccatatcccaatacacatgtggaatcacytttagaacattaatgagcaggtaatttattcaagacaagaattcttagatattattctgtatccgtatgtagtttgcaaatacgtgattgacccagagcatgcacatgacatattttctgaggaccttagtctttataaatttctaacattttattcaaatctaaacacctcaaaaaatctatcttttttttaaagtttcagaacaaatgtatgagaagttttcaaggcaagcatataatgaattttatatcaaaagcaaatacaaagtcacataaatttagcaaaatttgatcttatatttgagaaagtattttgagtatgtttgaatgaattaaagttatattaattattgttaaaagaaaaaatttcaaattctatttaatttcacaatatttttgaacattctctata

SEQ ID NO: 666075 - DNA, 601 bp, Homo sapiens
tcatatatataatgatattataaaataatattttattgttaaatagagatttgttattaaagtaatatagacgttgtaagaaaaatcaccagcctcccaaatcatgtggaatcaatatattaacccagttaggaaataaacacaaattggacaagtgactccatatcccaatacacatgtggaatcacttttagaacattaatgagcaggtaatttattcaagacaagaattcttagatattattctgtatccgtatgtagtttgcaaatacgtgattgacccagagcatgcacatgacatattttctgaggaccttagtctttataaatttctaacattttattcaaatctaaacacctcaaaaaatctatcttttttttaaagtttcagaacaaatgtatgagaagttttcaaggcaagcatataatgaattttatatcaaaagcaaatacaaagtcacataaatttagcaaaatttgatcttatatttgagaaagtattttgagtaygtttgaatgaattaaagttatattaattattgttaaaagaaaaaatttcaaattctatttaatttcacaatatttttgaacattctctata

SEQ ID NO: 666076 - DNA, 582 bp, Homo sapiens
aggggttaaaaaagccagggaatgtaaggctttcagaaagcaataagaactttggtttgaacttttaataaattttcctaaaaggctttgaaacagaggggtacatgatattaacttagatttccaaagggttactctggctgctgtgttgagaatacactcatggatagagttaagaggtcacaaattgaaacaggtgatgaggttagtgctataatccacataaaataggaggcttggagtagagtgataccagtggaaatagaggtagtgaaaattgtttacaaaggtgtgggctcaggaaatcactggcaatagtaaagtgtcccaatgctagttgtctctagacttcatgagtcaaggagggagtttattataaattgagggagacagtcgggtagagttgattataaattgagggagtctggtagatttcactastgtgagagaaggcatataatcagctcaaggcaaccttcaagggagggagtcaagaaaatacatacctgacttcattcttctccctctcatgtcttactagggcttcctattgactggatgtcactgaaagccagaaggcac

SEQ ID NO: 666077 - DNA, 601 bp, Homo sapiens
ctgttgagtgatcagagcagaaagtagattgaaggaagtcaaaagtgctgattcaaacttgaatgagatgcatgttatacatgaaagatgcagattcataataaatagattttcagagtgaagcttcaagcaatagtagagaaatcagccagccctcttccagaaaaactttcataaaactggaccaaattgccataaccattttagttatctggaaattaaccattggcaagcaataaatttagaagcatttattcaagaaaaactgcttaactttgtataagaacagaaagattctrtaactctggcacagttaatgtaaccaggatggggctagccatgaaaactagcagcattgctgctagagggggatgacttgatatgaagtgtagttaggaaaaccaagtcgtgttatcataacattgaatttgctctctgactgactcacacatccattggcggaggttggaagccttacgcagtctcaagatgtttaagcaaaacctgtgattaatcattggctgacctctaaactatgataaaacaggagcaaccctagaaaaccaagcttaaaaataagaatagcattttaaaaattgag

SEQ ID NO: 666078 - DNA, 601 bp, Homo sapiens
ctgttgagtgatcagagcagaaagtagattgaaggaagtcaaaagtgctgattcaaacttgaatgagatgcatgttatacatgaaagatgcagattcataataaatagattttcagagtgaagcttcaagcaatagtagagaaatcagccagccctcttccagaaaaactttcataaaactggaccaaattgccataaccattttagttatctggaaattaaccattggcaagcaataaatttagaagcatttattcaagaaaaactgcttaactttgtataagaacagaaagattctataactctggcacagttaatgtaaccaggatggggctagccatgaaaactagcagcattgctgctagagggggatgacttgatatgaagtgtagttaggaaaaccaagtcgtgttatcataacattgaatttgctctctgactgactcacacatccattggcggaggttggaagccttacgcagtctcaagatgtttaagcamaacctgtgattaatcattggctgacctctaaactatgataaaacaggagcaaccctagaaaaccaagcttaaaaataagaatagcattttaaaaattgag

SEQ ID NO: 666079 - DNA, 557 bp, Homo sapiens
ttgcattgctttaagaaaatacctgagactgaataattcatagagaaaagagacttaattggctcatggttctgtaggctttataggaaacatgatgctgaccatctgtttggcttctagggaggcctcaggaagcttacaataatggtagaagtcaatggcagagcaggcaatgttgtatgatcagaacaggaacaagagagaacaaggagggaggtgccagatacttttaaacaaccagatctcaagagaactcctcactatcgtaagaacagcaccagaaggatggtgctagaccgttattgagaaatctacccccaacatttaatcacctcacactaggccccatctccaacattaacgattacaattgaacacgaaatatggggagacacagatccaaaccatatcacccatcaattccatgcatcagtatctacccaaagaaagtgacaacttttgtccaagacttgaatgtgaacmataacttcattctgcataataataaactagaaacacttaaatgctggtcaaagtgtataagtgcagtgtggtat

SEQ ID NO: 666080 - DNA, 572 bp, Homo sapiens
gaaggggaacatcacactctggggactgttgtggggtgggggkaaggggggagggatagctttaggagatatacctaatgctaaatgacgagttaatgggtgcagcacaccagcatggcacatgtatacatatgtaactaacctgcacaatgtgcacatgtaccctaaaacttaaagtataataataataaaataaaataacacccccccaaaaaaaataaaaaaataaaaaataaaaaatgaaataggttttcaaaagatgccaacacttcagtattcccattcatgatcagagcatttgaaatacaactttttaaattcaccccaaaggtataacacctaagtaggccctactttgagatatcttgtttaaaatatattttctcactttctgctgtatgatgagagttcagtacccacaacaataatgacaacatgtatcttatattgtgataagtaattgaatgattcttaaaaaattagtttaagctgatcagatatttattctgctcgatgttgcacatctgtgaagttaaaagttaattacttttttaaaaagtaattgagtctaa

SEQ ID NO: 666081 - DNA, 530 bp, Homo sapiens
tgcttcccttaaatactgtgtgtgaaaatttgtagatattttgagagtctgaggattttgttcactgtctcaacttaggcagcaggccatgtagtttcaaaatatttgtgcttttagaattaaatgatatttaaaaggagccataataactggagraaaaaaaagcagaaaaaaaataaaggtgagaaactcaggggagaattaagtagcccaggcagtttataggcgacagttataacttcagaattttctattgccatcctttaaatatcttcaaattaacagaaagaggaaaagaaaaaaatttacttgaggtaaaatgtggttagaccataaggaaacactgaaagctaaaaaataaaaggctaaagttaaatatctacaaaaaacttttcttaatctatgcaacacagatttttttctttgagaaattttttcactgaagtgcagagattattcttagttagacttaccaatttagtctgctgtttgatttccttgctttgatcatcaaaccagtgttagtgttg

SEQ ID NO: 666082 - DNA, 530 bp, Homo sapiens
tgcttcccttaaatactgtgtgtgaaaatttgtagatattttgagagtctgaggattttgttcactgtctcaacttaggcagcaggccatgtagtttcaaaatatttgtgcttttagaattaaatgatatttaaaaggagccataataactggaggaaaaraaagcagaaaaaaaataaaggtgagaaactcaggggagaattaagtagcccaggcagtttataggcgacagttataacttcagaattttctattgccatcctttaaatatcttcaaattaacagaaagaggaaaagaaaaaaatttacttgaggtaaaatgtggttagaccataaggaaacactgaaagctaaaaaataaaaggctaaagttaaatatctacaaaaaacttttcttaatctatgcaacacagatttttttctttgagaaattttttcactgaagtgcagagattattcttagttagacttaccaatttagtctgctgtttgatttccttgctttgatcatcaaaccagtgttagtgttg

SEQ ID NO: 666083 - DNA, 621 bp, Homo sapiens
caaaatgcatatatttcagagatgaggattcagattggacaattattttcttagtctcattgattaaaagttattgtcctttttttttttttttactgtgaggaatttggagttttattwaaggatacactatctttcaaatttgatgttctataaatatatctgttgaagtctatatatttttctttaagatggatagttcagccatttttagaacattatttttgtcatatttacacaatgtcaagttagagtatcatttagcaatattattgtgtgtacatacttggactgactgaagaactctgaccaataggatcaagattctggctttcagagggcatcttttgtggaatttcatctcacctgggaagactgagtattgccatggcagggacataaccactctgggttttcttttctagtaaggccttccagagagggaagaagagaaagaggatccacaggagcacaagcaaagacagatgtggattcataagttgctgggggtttcaggacaattaaatcatattttaccatttctcagcagaactagcaatattgattcaccaaaacacttatgtgtctctatcaagatatctttgtgtccatcttcattct

SEQ ID NO: 666084 - DNA, 575 bp, Homo sapiens
attttggttgcattactgctgactctagagactaaaggcagaaaaggctgttttgagtctttgtggaacgaattacaaagttagaactacttaattgcaaatttcatagaccaagaattcagagaggaagacaattttgaaagtcaaatactctatgatgattatggagtagttgaaaaccatagaataaggctatatggtatctccactttgccctccaggtaccagcagatttagatgaggagccccttgttgacaaagactcactccctgtatgccaacacccagaattatcaacaggaaattaatagcttctgtaccccatcatttcatggggagtctgagaataagcagataatataygcatagagataattagactttcagaggtaaggtgctgctgaatgtttgatttcttgtttttccttttgttttttttttcaaaaaaaattaatggaagtggctagaattaacacacagtgttcaaaacagaagcttggaaaaaccactgataagcaaagtctgactttctacaagcaaatgcacagggttccaaacagagttgagaaacaaaa

SEQ ID NO: 666085 - DNA, 520 bp, Homo sapiens
aaaaaagaagaatgttggttgaaattaaaagtgtgatacttacgagcaaacctggcttgtttattcaaaggttatgcttcttgccagcaaagtcagtatctttgaaagcttggagttaataaagtctgtggctaagtttctaaatgggttcratagataatgactgtccatagcaatagctaattgagaataatgactgggcaagaaagggcgggcatagagcagagatggaagaaaacttccctgaagtaaaggcctgaaaatacctgcaagggcaatggggaaaaaccccaaagcctttgtatttactgaatggtcattagctgcccaaattttttatttttttctctttggatgaatgtaatgttgtttctcttaaaaatataaggaaggcaaggaaacattagaggctcttgtaatgtattttctagtacttggaaaaatgcctatacagagtaaacaatcaatggatttagaacttctccatcttaaaaagcatgaaaatggaggctattccaat

SEQ ID NO: 666086 - DNA, 574 bp, Homo sapiens
tatgacagaaaatttcctaagtctagaaaacaaaacatttaagtcataacaattaagttatgacttaacgattaagacttaaaaataaagtcttaacaattacttaacttcaagtagttttgttttkctcagtcttaattaataattttggactatagccaattgcaagtgcttccagagaaaaatttgagataataactgtggataacaaaaattcagaacagccacagtcaaagatctgatgagagtttgtaactaacaaagaaatctaggtatttcggtagcatataactaatttcacatcatgacatataccccaacatatccgaattttaggaatcttatacaattttggaataacttttaatagcacatttacacaaatatggcttaaaggaaattcaacagcattccttatttgacagtgcttcccatattatttaccaaataagcttaatcatttaaaatctctgtaagatgagagatgcaccctttgaggctctccagggggcccacctgtaaaatgtcaaagttaattttaggccaagaagcttgatttaggatttggatcctg

SEQ ID NO: 666087 - DNA, 624 bp, Homo sapiens
tctctacctaccagcctaccgagagcatcctcttgaaaagtctgcaccttatcccacagctacatccaactctgtcccggatagctgccccttctagctccttcctcattagagggtcctagatgatggtcctcctattacatcacttttctggattaaacatcattctatttatcatatttctttgctcattaaattttttttgctagatctcatactagaacaacagcaacattatctgaagtaccagcccatcccaactcatttactagtagacgcatattttaactatagctataaagacccatgaaagaaccactccatcacacaaactgtgtaaaaaaaggcacagtttgggctttctgaaatggacaaagattatttcttttstcttttttcttttctttttaccttttagtaggtgaaaaaaaaatgagttcctgcaaattcgtgaaatatgctggatcacataggaggtggtaatttctgaagggctgactcaaacctagttcctctgtccccagaaaaaaaattatctttccactgtgatcacgtttaagcccattcttgaaataaagtacagtttataacttcagatgttttcaaaactgaatttgcaaagag

SEQ ID NO: 666088 - DNA, 582 bp, Homo sapiens
gcataatatttagaatctataaggaacttaaacaattgaacaaacaaacaaaaacaaataaacccattaaaatgtgggcaaaagacctgaacagatacctttgaaagaagacatacaagcagccaacaaacatatgaacaaatgctcagcatcactaatcatcagagaaatatgaatyaaaaccccagtgaaatacaatctcatgccagtcagaatggctattttgtaaaagtcaaaaaacaacttatgctggtgaggctgcagagaaaagtgaatgcttatacactgttggtgggaatatgaattggtccaactgctataaaaattagtttggagatttctcaaagaacttataataccaatcatcccagcaatcccattactgggtatgtattcaaaagaaaacaaatcattctacaaaaaagaaacatgcactcacatgttcattgcaagactattcacaacaggaaagacatggaatcaatctaggtgcccatcaatggtggatgagatttaaaaaaaaaacgtggtgcatatacaccaaggaatgctacacaaccataatgaagaacgaaatcatgt

SEQ ID NO: 666089 - DNA, 474 bp, Homo sapiens
ttaaatacatttggtgactttgttgataacaggtatcaaaaatgatatatttttrcttactcttcacaccaacaattccaaagatgtcaaagtggacttctaagaaaagatttcactatgtgaatgtttactcccacttaaaatagtgaaaaatcagtaacctctttactaagcaaaaaacaggaatttagctaaataaatcacaatacatccatgggatggaaaactatgaagtcatcaaaaagatgtggtggaatatgcaatgatacagaaagatcttaacatagttattcaggaagtatgttatgttctagacactgtgtttagtatgttctagacactgtgctgtgctgggtcctagattctcaatgatgatgaagacagaactcctgacctggagattaaaaaaaatacaagaaatacaagaaaaaggcatctgtttagtaaattttaattttttatatccttttatat

SEQ ID NO: 666090 - DNA, 600 bp, Homo sapiens
tttctaaatatagttgtaaaccatcttttctttatatttctcttttattatctttggttctctctgaatgtctcacaagcaatatgtcttggagagaatatgatttgctgggtttcttactaacatcagacactcatattgtataggattcccagactatctctcttcataagccatttctctcctatatgttcagtgtatggatggctgcctttgttagaatgcttatctatgggtctcaacaaaaaasgaatggatactcatgaaccaattcctggtttagacagcttccctcacaagagggctatggacctgtcaggcactgatgtcttcacagcctttatagctcgcatcaagtactgaagtcctatgagcaagtctgtctttctgaggtgctttgtaaccctttcctctgatcaattatgtattgattttaaaattaaaatctcagagagcaatcttattttctttataagttcttgggggaatgtccctttaatactgcaacagagattaaattcatccaagttattttaaacagtattgatagatctagcaagataaatcagatataaaatctggtcaaagtaatcagagaat

SEQ ID NO: 666091 - DNA, 566 bp, Homo sapiens
cagtttcccactgaatcctggaatgaatgttggcaaaaggaaggcacttgcacctatttaatctcacccacctcccccaaccattccagggaaattctcaggggaagctggtagggaccttgagctacatgcctgacaggatgcttattgctgctcatttcccagcgaaaaagatttcaggtgttaaaaatgaccccctttgctmctccagatggcattggtcaattgcagccaatctatatttaatcaaaagttaggggcacctgtaggctaaccaaagtgttttataacattcatagaaagccaacaaccctatgaatacctagaaaaaaaatagcagctaatgactgagagaatacttaaacatgagaaatgatcatctcttctcatgtaatccctaaaatattttcttcagttatagttccatatttgattataatatatcctatatgattcacaatattccacccagatgcactctactctcctccttccctacagagaacaatatatggcaatgaaaacatgtgttgacaagtcatttgaatttatatcatcaaaagtgg

SEQ ID NO: 666092 - DNA, 619 bp, Homo sapiens
aataagctattgaacctggaaggggaagaagacagcatggcacttttgggaacaagtcaactaaatgtaatccactgaaccaaaagacagacatttccagcagggacttatccagacctgctatttgtctctctaggtgatgactatcattgaagtcataggatgagtatttctgttgccttagcctgaaggctatcttcataataccactggaaagatacagccagggaatgtatatacatatatggaaccagttgccacagcctgtaaccatcaaaatggcacaaatgatgaacaagtctgttgcttcaacctcctttaaccatgagccctattttattacctgtgacatatcattttgggggggccctgacaaagttatacataaaggcaaattcactagtttcacatttcctgaagaaaatccttaaagcataacttttaaaaaatggcagaagttgatarttttggtaagtgactacattaagcacagcatcagtaatggtgatgtaatgaaattggtatggtgctgtgctgtaccatttgtctaacttgaaaggcacctttcagatataaatactctggccaaaacaggcctacagggtcaggatgatgatgc

SEQ ID NO: 666093 - DNA, 577 bp, Homo sapiens
gatagtgattttcgtaaagtgtgatttcactgattggttcaaaaggattcagagtggaatgtgtgaatttctaatgtggctaattagtagtttggacaattggtgaacataaaaatgtagatccttgggcaggttctatatatgatagamgttgcatgcattttgtgcattaggccaccaccaggatcaacataaaggtaaatgataatgtgaatgtggctatttaatatatgtggttatttctataagctccttgaattaaagctgttccgtgaaggtaacttagctggtgaattttgtaaaagtgtatattccttgtgtaacattagcatgactacaaaattcatattaattgtaattacatttttcctattctatatttgttagcaaaattgaatttcagtggctaacttattcagcaattttgtgttttgaggatattggttgaagaaagatgagtaaatgttggaatatacttaatttgggtcctgtagaaacattctctgagactgagaattgtatgtcagaattttattgggaggtgctttcaggagagagctagaaggtggagaaacag

SEQ ID NO: 666094 - DNA, 575 bp, Homo sapiens
ctccttgtctgaaatgctgtctttggcaaggaatctrcagaagaatcaaaggtcacacataagacaaattttactccttgagtttgttggaatatgcttgttcttagccaagtctccttctccctggagtcctgttaccttccaaggaagagccttcaaatggaaacaaaagtcttttttctgaggtcatcttttattcttcacttatggttctgcccttgtacgaatgtaaaggcattttgattatatgtctcccctgtttgcacccttctcttacttatttcactacttaaataaaggtccgtgttcacaccacggcagtactttctttctcatttcacatctgggcagcatttgagtttagagcagcattcattgtcaagagggccccaaacatatctacttaagacaattatcaaagcaccatttgggactcacctctcccacccctctgaacactgccctgaatttttactagactatgacgggtccccaatcttatcaatgacccctgtctacacccagctggcctctttttaaatagaacttccagccataattagacacagctgtgt

SEQ ID NO: 666095 - DNA, 608 bp, Homo sapiens
tttttacattttgtgatatactcttattataagactttccaattaatttgcaatttaaaatgacacacagacatattttagtagcagaaaattcctcctatctgggataaataagaaagacataaatagatttgtttatttcatactttatgcatcacagtcatcaaatatgtgcattaaaaaacttttaatgtcttctcacccttgaatttttaccttattcagccaatattaagtgctaatttgaactactatatatatagatctatctatctatttatctatctagtgcatatgtaaacatatrtataaatatatgtttacatatatgtatgttttctcctttgtctaagggcagatgaggaaacatgtaataaaagggttataatggcattgatactgcagtatttagcaaatgaacgttgcatcatagttccaggagatgttttagaagattatctatcttcaatgttttgagtcaaaatttaatttcatatctaaaaaaattgagttcttttattggaatctaaaatcacaggcactagcatcgagctagagtcttcataatccatgaatattcaaggctgcaaaaaagcatagattagtca

SEQ ID NO: 666096 - DNA, 544 bp, Homo sapiens
gatttttttctcttttttttttttgaaagtgtattttacagttggtattattcttctcaaaggtctgcaggaatttattcaccactgatgtcatctgggtctttattttgttactgtttttgtttgtggtgatgttttgctttttgagtcaatattgctaattgtttcttaaattaaacatttcatgttatacatgttgtctgattttaatataatgtttataatattatattatctttttaatgattatatgatcaggagtgatggtaatttttaatttcagatcttgatattttttgcacattcctttttcctgatgagactaactttactgatctgttcaaagaaccagattttgttttcactgattttgttgttttgctgtttttcaagtcattgacatttaactcatatttttattacttccttctgtgtacataatttgttttaatttttctccttttttgtgctagcttcmtaatgcgggaacatagatcattaattgtacacatttttcacattaaatatgagcacttaaaagtac

SEQ ID NO: 666097 - DNA, 628 bp, Homo sapiens
attttaaattgcagacttatcttaaaaatagcaaatattacattattttttatttattctttttagatattgctttctaactgaattccacgctgatcattgaatacattttaaattattttagtcctttacaacttgtttggacttgctttgtgtcctagcatactgtctatattgataaacagttctgtaaatttcaaaagaatgtgtattctgtcatttcttggtctagtatattatgttgatcagttaattgttattcaaatgatcaatattcataaggatttactttgcttagtctatcaagtatttaaagggcttactagtcttccattccactgtgactgtgaattctgtagctttgtcttttagctttatcaattgttcctttacatatgtgatgctrtgtaattagagacacacacatttagaatttttatatctttctggaaaaatgacctttattttattatgagatagatatctttcttactttgtagtattggctcttgccttaagtctattttgtttgacagtgatatatgtgtaccagttcttaaaggttactgtttgtgtgttaatgctttttcattatcctctcatttcttatgagaggcactgaaagggg

SEQ ID NO: 666098 - DNA, 616 bp, Homo sapiens
tcaatgtaattttaatatataatgaaactatattataaatgtttgaaaagacatggaaagcaaaaaatacaaaattcagtataatagaggtcaaaacaaacaattaatagaattgaaatttaataaaatttaatacatgtttcctataaaatatatatgtatgcttgatcatacctctaataaaactgatcaagaaaaaaagaagataatgtatagattttaaatggataactgtaaacacaataaacattaagcattataaaatacaataatatgcttcagaatctagtgaratagctaaatttatagaaaatattaaatatttgtcagaagaaataaaaaatttaataacaaaatattatcaaaacttttaaatgtgtcagaaatacccagttccaaacgatattgaagttgagttctattatactttcgaagaacactttattcctgcaacaaacaagttgttacaataaaaaacttagaaagagcaaaagcgactcagtttattttatgaacgcaatggaatgataccttctaagtcagaaaactctcattttacttttgaacaaattagcagcagcaagaaaggccctgtaggcactcctggtctccaggg

SEQ ID NO: 666099 - DNA, 471 bp, Homo sapiens
ccgtctctcttctagagggactttgcagaggctcctgctccgttcctcacacatgcgcactcacccagcgaacacgcccaccgccgaggagcgtggagacacaaaaacgcctggaaaagccccatccsggtttcagggggaattcgagccttccccacccctgaagcctctggggcgtcccctcccaaatgggaggattacagattccatgttcagagctggagagaggtggtctggaatacactgtgcaggagacgagtatttttctccctactggtgcctttcaattgatacatttttttaagctgagaactcctactgatagtgcagaaatgagtcatagatcaaggaaggagacagccagggaggcagcgcgtgtgagtgagggacactggcaagggaacctgacagtccccgcgccccctccccccatgccaagacattaattctcacaagtcggagaaaattact

SEQ ID NO: 666100 - DNA, 450 bp, Homo sapiens
tgtcgcactggttagaaaaatgtgtgcatgcacttctattatctataagagaggttctatatacatatacatatgcatrtgcacatacacacacaaacactcatctatcagcaacgtggacatgttaagatgtcttgcgcgcatccaaccagagtccacagagggcaaggacaaattgcaactgagagattctccaaatctcaccagcaaaatcagccagtcaatacctaatggaggaattgccccttttcctctcaatttaggttttctgatcagaggtgtggtagctgcttcaaccttcagcagtctctgttttctaagacaatttaattcaagatccttcagtaattttctctccagttgcgtccagagccacaaacagtatactacatgtcatctgcatgaagaataactcaacgaagagtgaaggcaggctgcaaaccgaagtaa

SEQ ID NO: 666101 - DNA, 682 bp, Homo sapiens
tgccccttttcctctcaatttaggttttctgatcagaggtgtggtagctgcttcaaccttcagcagtctctgttttctaagacaatttaattcaagatccttcagtaattttctctccagttgcgtccagagccacaaacagtatactacatgtcatctgcatgaagaataactcaacgaagagtgaaggcaggctgcaaaccgaagtaaagtgttagataaatcatctggataccaagcataaagaatgtgggacttcgggttgggaccctgtagccctttcccagatggaacttaggggccagactccaatgacaagcttggccaggcatccctcagatatgttcctatttcttcattaatttagagctgggggtgggagtggaaatacacagttaagatagaactcacatgtcacacaaggcaaaaaccaggaaactcatcttcagattgggtrcctacagtgagttttaaactaaggacacctttttctatcccctcagcatccactgtgcctgacctttgaggaatgacccggaaaacactgaatcctgacacgtgttaagaatctggccctccctaaaacatgtttacaaactggggagttcaggaagttgtggttccaaggtcccatgaactccaatgctggcttttgctcaacggccatgtacagacagtgcaa

SEQ ID NO: 666102 - DNA, 587 bp, Homo sapiens
tggtgttcaagtctccacatgtgacagtggagtcttctacatcttcttgctattctatcagattttgctccaagtatatgacactctgttcttacacattagagattgctatttcttatcagagaacggactcctttatcattatccagtgccrttctttacctctgataattttccttgctctgaaggctgctttgtctaaaactaatatagcaactccagctttccattgaatagtattagcatggtataactttctccatcctgttacttttaatctatctgagtctttatatttaaagcaagtttattgatttttttttaattcactcagacagtctgccttttaactgaagtatttggaccactggcatttgaagtgactagtgatgtttggattaatatctatcacatgtgtcacggttttctattccttgtccttgttttctgtttctttttgtctttcactcttcttctgccttctctagttttaaccaagcattttgtgtgattctattttctctcctctcttagaatactaattaaaatattcccccacttatccacaggtttgctttctgtgattt

SEQ ID NO: 666103 - DNA, 587 bp, Homo sapiens
tggtgttcaagtctccacatgtgacagtggagtcttctacatcttcttgctattctatcagattttgctccaagtatatgacactctgttcttacacattagagattgctatttcttatcagagaacggactcctttatcattatccagtgccattctttacctctgataattttccttgctctgaaggctgctttgtctaaaactaatatagcaactccagctttccattgaatagtattagcatggtataactttctccatcctgttacttttaatctatctgagtctttatatttaaagcaagtttattgatttttttttaattcactcwgacagtctgccttttaactgaagtatttggaccactggcatttgaagtgactagtgatgtttggattaatatctatcacatgtgtcacggttttctattccttgtccttgttttctgtttctttttgtctttcactcttcttctgccttctctagttttaaccaagcattttgtgtgattctattttctctcctctcttagaatactaattaaaatattcccccacttatccacaggtttgctttctgtgattt

SEQ ID NO: 666104 - DNA, 467 bp, Homo sapiens
ccagtccacattcagctgctggaaatttgtcccaattaccattaatatgttcccaccagtttatgactccagtggcttttgctccaggtaagcagatctcagctgtgagcctctgyattctcctgtctctcccatttctgagtggagtcttccctgggacctcaattctctgatgggtccaacaaaggcactgattttcactttgttcagcctttttctttgtagtaaagatgggagtgattgttttcaaatactttacatgtcagagctaaaattggaagtctccagtattacttttttattaagtctaataatctttgctttttaatttagaccatttatattttaaatttaattctataatcttgctatttgttttctctttcccaacctcattatacctcattctacgtcctttgttcctgttcttcctttttcctgtattcttttggattcattttagcatt

SEQ ID NO: 666105 - DNA, 572 bp, Homo sapiens
tgatccaccctgtgggttgaacccaccttccctgagcatgttgttataggttatctaaaccaagtcaggatcttgtcatgagacagggactgtgatgctgttggagtggcatcggmccctgtggagcgggaaacaggatccagctctcctgaatcctcagctgccacatccagcacccatgaggaggaggctcctatcagctcataacagttgtttgtgaacctatttgcccatgctatggattgaaagtttgtgtatcctcctgttccctaaattcatatgttgaagctctaatccccagtgtgatgatgtttggaaatgtctttgggaagtgatctagtttagctccatgtccccacccaaatctcatcttgaattgtaatccccacgtgtcaagggagggacctggtgggaggtgattggatcatgggagcggatttctcccttgctgttctcatgatagtgagttctcacaagacctggttgtttgataaatgtctggagcttccttctgatttttctctctctcctgccactctgtaagatgtgccttgcttcccgtttgccttctt

SEQ ID NO: 666106 - DNA, 652 bp, Homo sapiens
ccttggcttgtcttgctcagggaatcttcaatgggtaaatggttgattagaaggaaggtaggagtggaggaaaagagagaraattgtactttctggtaggaaatctattatagaaaaacccagcccatcattttagttagcatgaagacctgttaggctgtaaatgccaggagggcaagggccatgtccttatcatgtctgtatccttggtacttggctcaaggcttggcacaagaaagatgatccatgaatatttgttgaaggaaagaacaaaggagcaatgaatggtaactggaaaccccttttagacatccatcaggcatggtagcccaggggcagacacctcccagcagcaatctggttgactatccagttcttttcaccttctggaagaagaggactattgagatgactttcaggattcagctgatagaaataaataccttgcttcaaatatttgttgctctgaggtttgaacagcgaccatattcttggttctgaagaatcagctgatacaaataaataccttgcttcaaatattatgtgttgctctgaggtttcaacaccaactgtattcttggttctggagaagtgaagaggacagccatgatggtaataagctaataaagctcccctctcttcctaaataaat

SEQ ID NO: 666107 - DNA, 652 bp, Homo sapiens
ccttggcttgtcttgctcagggaatcttcaatgggtaaatggttgattagaaggaaggtaggagtggaggaaaagagagaaaattgtactttctggtaggaaatctattatagaaaaacccagcccatcattttagttagcatgaagacctgttaggctgtaaatgccaggagggcaagggccatgtccttatcatgtctgtatccttggtacttggctcraggcttggcacaagaaagatgatccatgaatatttgttgaaggaaagaacaaaggagcaatgaatggtaactggaaaccccttttagacatccatcaggcatggtagcccaggggcagacacctcccagcagcaatctggttgactatccagttcttttcaccttctggaagaagaggactattgagatgactttcaggattcagctgatagaaataaataccttgcttcaaatatttgttgctctgaggtttgaacagcgaccatattcttggttctgaagaatcagctgatacaaataaataccttgcttcaaatattatgtgttgctctgaggtttcaacaccaactgtattcttggttctggagaagtgaagaggacagccatgatggtaataagctaataaagctcccctctcttcctaaataaat

SEQ ID NO: 666108 - DNA, 496 bp, Homo sapiens
ttttctcatgccgctccaggtctgccyctgccccttatcttaagatcccctccactggccctgccatggcagcactgaggacatacacgagtgtttcagacagtagcagggtcctctctactctcaggtccctaagctcatgaggggaggggtgtcttatccccactccttaggagctaatctggatggagggtgcagggagcagagccccttcctaaagaccctcagcaggctcttgcattctttctgtggagcagtttcacggtgcacaggtatcaatcccaggggaggactctaaacacttcaccggtaactatgcaccagtagcaatccacttgcacaagtgcagtgagacagagaactcacacagcaagttaagtgaagcaatcttccaaggctcagtagttctgcccaggccccatggagcccatttgcatgtgccctatgttgcaccacagctgagggactgtgaaagcacactctgccttaggtttta

SEQ ID NO: 666109 - DNA, 571 bp, Homo sapiens
aatttacatgcaatttttgtgtccccttctttcactatttaatattataaatgtttcccatgttgctacataatcttgcagataaaaaattaggaatgaaaatagatatagattttacaaagtaaatgggaaaggccttcactgacctcccataaagcaatagattgtgaatatcatttgcaggacccaattcttctctgagttgctgggatttggaattaagataaagaagacataagtgagtagaaagaggcaaaacagcccaatgtttttggagaccaaagattaatatgaagtcacagatggctaaatttaagattcaagasaattaacctgccctactgagtatgtcagagtcaaggatacccaaacagtccccagaaaagaacaacttatcacagataaggccagaaggagggctgtttgggaaacattcctcctggggaaagaacaccttcccatgggctgtggaaaatgataagtaagttacattgtccactcccatttccagaggggtttcagagaagaaatgagaggcaaggcattcttcctgtaggaggggattgttggg

SEQ ID NO: 666110 - DNA, 489 bp, Homo sapiens
gattttataagaaatacacaagtggtttatctacctgaaatttgtaaacagggtaattgatccagttataactatgttgttgggactctgtatttgtacattaccactgatatctgtgtgctagcagagatttgaattttctgttctgtctcctgaagagcccctgactgacagaacatttgaatactgtgattatatggatccagtgatcatatgaatcactggatttgtttcatttttatcayaaataaatgaaagagaaaggatcgtagaacgttaggatcctagaattctagaagccgtcttaaagactatgttctataaaacttcattttacagatgagaacattgaaatttgaaaggtggataatttcatgagatcacatgactgggaagacagggttgcaatgagtctttggctggactaaaaggaattcacataaacagatgaattacctagacaaagtgagacttaatttgtcagtgtgg

SEQ ID NO: 666111 - DNA, 582 bp, Homo sapiens
acagccaactgatcttcgacaaagcaaacaaaaacaaaaagtgggaaaaggacaccctattcaacaaatggtgctgggataattggcaagccacatgtagaaaaacgaaactggatcctcatctctcaccttatacaaaaatcaactcaagatggatcaaagacaaatataagacgtgaaaccataaaaattctagaagataacattggaaaaacccttctagatattggcttaggtaaagacrtcatgatcaagaacccaaaagcaaatgcagcaaaaacaaagataaatagatgggacttaattaaactaaaaagcttctgcacagcaaaagaaataatcagcagagtaaacagataacccacagagtgggagaaaattttcacaatctatacatccaacaaaggactaatttgcagaatctataaagaattcaaacaactcagcaagaagaaaacaaacaatcccatcaaaaagtgggctaaggacatgaattctcaaaagaagatatacaaatggccaacaagcatatggaaaaatgctcaacatcactaattaccagggaagtgcaaagcaaaacca

SEQ ID NO: 666112 - DNA, 594 bp, Homo sapiens
catcctgccgccgccgcctacgggctggtctgtccggcccggagcctcgcccgcgcgtcgcaggccgagggcggcacagcgctgggcacacgccccgcgaggggacggccggggtccgcagcgctgctcccttcggccagcggggcggccccgcggggaatgcggatcggcgccgcaggcacacgccccccaacgacagcaaagaaagttcggctgcgggggttcccccagtcccatcccggttctcgtggccgccgccggcggggaggagaacccagcgactcagccttcaaggagccgctagcttccaacaacacgctgcttccggctcccagaacttctcgggcggagggggaagcccccggggaggggacccccagtgacccgcgggtcccccgccgagggccgtagggagggagcgctcmcctcggcgcggctcatcccggcggctcgggggcccttgcgcgggtccggggccgcggcggctctcagcggggttgggggcgcccggagcgccggccgcgggccatgccgtcggggcgggcggcgcggggagagtgcggtgcttcgagtcggggccgctgcagccgccgc

SEQ ID NO: 666113 - DNA, 605 bp, Homo sapiens
caaaaaaattttttttaataaaaagcaggatatttacatgatcttacagtgcctcctcacagatcaagggggagaaaaaaacagaagagtggagaaattagataacaccttgactaagagatcaaaattaacatgaccaattagagaaaagaacattgcatgcttctagaggtggcactctgaaaaggacacatcacccgggcagctcactggctgcagatrtaaaactttgatctgatcataagaaaaatcagacaaacaaaatgagaatgttttaatttacaaaaagtgtgtgtgtgtgtgtgtgtgtgtgtgtgtgtgtgactatacccttcaaaaatgctcatgtcataaaagacagagtatggaaatgttccaggctaaaggaagctaaagatccatgacaaatacaaaatctggctctagactagaacctgaactggagaagaaaattggttgtgaattggataaaatactgtatcaatgttaaatttataaagcagatgactatactgtggttatataagaaagcatccttatttttaggaaatacacactgaagcatttaggggtaaagaatcatcacgtatgcaacttattctcaa

SEQ ID NO: 666114 - DNA, 584 bp, Homo sapiens
tcctaagaaaccaggttgttagaagaaaaaaataagttcatgtttgtgaacgtactttgcatattacgaatatcacaaaacaatgttaccatatgtttattaatgaataatctatattaaatacttcagaaaagtagtcaattgtgtgtaaggacatttttaccatgatacaatttcatcaaaagtttatttcatgtctaagtttctattatactcagatgattgtcaaagtttcagtcctcttagatctctaagatacttttaacttcctaataggaatcaactaycagactgaaaaaataattagcacataatgaggaaaggagattattataattactgaaaatacagggaccagacatataagatataggtgcagcagggactttgatggaaacaaggtgactgcaagcaggcaaaaaaagagtggatactatcttaaaattgagcactttcgatcattattgtgcttatttattcactgctaaacatgttcagaataaacatgcttcccaacagactgtttctatacagcaaatatgacagaatacagaatgatgaaattaacttaattcaaccattat

SEQ ID NO: 666115 - DNA, 462 bp, Homo sapiens
ttctaagtgctttacatatataaacacatttaatcctaactaagttcaagagcttaactactatactatgttgtgctttcctgttcctgcaacaaagaaatgataaatgactaagatcagatgacctcttagagtgaaaaaatgtggagaaaaaaggcagaagcccatgcatagtcaaggctatatggagggactagggccaggatagagaaatattacaaggtgatagagtggagggatagaaactagaatggtttatcagtcagagtccaactaggcaagcctctcctgccattttgtacttagtggtrgctgcaatgtttgggttggggtggcttgagaggtaatttatttgtgtgtgtcttatgattttcagccttattatagcatcagttaactatgtcacatcatttctctcacccagagaaaaggtgagaaattcacactctaaatgttgagccc

SEQ ID NO: 666116 - DNA, 464 bp, Homo sapiens
tcaggaaatgacctttctaaggcagaggatgtcttcacttttattattctgtatcttgatgctcctgtcaaactatgtgacatttccacagaactttaaatagaaatatgaaaggacagaaaaggaagtacattcataataataaaaaatgtctggccatatgaccccaataagacaagttaaatatattaccactacttatttcatattgaaggaccagatggtagccagacaaaatcattgaggataaagcctaattcagagtgtgtgttctgatacttgcactgtaatcccataatcctttaaagaaacaatcaatgatctcttgcttctgtattttctagctgtgtcttacgcggggtgtgtgtgtgtgtgtgtgtgtgtgtgtgtgtgtgkgtgtgtgtgtgttctaatccatatatgattattcaataactagaagcttgatgtttatacctttttgt

SEQ ID NO: 666117 - DNA, 583 bp, Homo sapiens
gttgattttgttgcttttttacttttctgatttcatttatttgttataacagctatttaacatggaatcttcagggttttctgcatggttttctatcatctgcaaacagaggtaattttagtttgttctttacaatttggatgccattagattggggtttgtttcattgtacctgaaacgtctttagctgaaacattcttttgccttttagaaaaagctgcctacgtttcactgatacctacatttttaaatgcatatattctaaatctccattcattttttttatttcaaagcaggctgggtcctgtcatgacagttttgccttccatacagaccttcctgcattgtctgttaaacattgaccaattatttgattaaggcatggagtccaggtcagtgtttctcaaaggggctgatctgcaagctttwtgtataagctgcacaataggattatgttgtttgtattaaaatgtaagttgatgcactacttcctttattgaaaaagtcttcctcaaaaaaattaccagctgaacttaactgcactgtcatgttggttgttttttgtaaacataagttttcaact

SEQ ID NO: 666118 - DNA, 180 bp, Homo sapiens
gaaagagaatatgtggtatttgtctttctgtsactgtcttatctcacttaagataatgtcctccagtttcatccatgctactgcatgacatgatttcattcattttaattgctgaatattactccattgtgtacatatgctactttacccattcatccattggtggacacataggttgat

SEQ ID NO: 666119 - DNA, 618 bp, Homo sapiens
taattttcctgaccttggagaaaaaaactaaaggcacagatgttatatgtttagaagttgcattataagtgggtagtatattgttttacaaaaatagttttgtgaaattatatttaaaatattacttaattggaaaatatttgatttttataatcttgatacttttgatacttagagacatcttatcattaagttgttcgtgtttccgtttcatcatctgtagactaaagataacatggtataaatgatctggaaatgaacttttgaaaaatgtatacatttaagagctacaactttttttttaattgagaaagagttgtttatgagtaaaatgagaaccagaaagtaatactattttaaatattttttaaaggaaattttaaaaatgaaggtgttgtcaacaatgtaaaataccagaatgagttaaggtagatgaagactgaaacatgaaaataatgctgctggtatrctgtaacatagagacacgagtaagaaggcacattttggcagatcgtggaagtaactagtatttaagaaataaagactctggagttggatgatttgaagaagttgaccatgaataaaagtaaaagtaggatatgtgaaataatggttttt

SEQ ID NO: 666120 - DNA, 611 bp, Homo sapiens
cattttgtaagcagagacagtcactgctgtgtaaaataatggaaagacagagatatcagtctcgaacaagctagggtgtagggttgcaaaactgtgtcttacagcttgctcacattacttttgagtctgcattagatctaatttgtaaataataagaaacagtctaaaaattcaaacagtttcctctgagagaaaagaaactttctaatatgtactgacaccagagaagaatagaacaaagaaaactgaatacagaaaagcacatctatgtatattaatatcctatgtttagtactgctattcttaagggcctatttacctcttagcacatttagattttccggtagaaattgaatggtaataaaaccaatctgtgaaggaatcacagaactttttagttcagtggaatcaaagccatctctcaaacctccsggtgtctgtttaagcacctggcctctgtccttcaccctgaaggaatgattaatggatgagaacagtgcagagtgtgttccaagggcatgcctgaaactaagagtggtcaggagagagaatccacagatgatagcccacagcctgatctggcatcttttatcaagagagattttgtgaca

SEQ ID NO: 666121 - DNA, 561 bp, Homo sapiens
gtgaacactatatgactttgattctcaaatcgtttggctatatgtattagcttctagagctgtgatttctgatttttagaaggcttttttttttttcaaatcagtgcatcattggcgtttaagttcaccttggatttcagtatacatttaaattaggttttaaatgagaagttttaaattaggttttattatttttgatactttgcaagtgtgtcttttgtggaattctttccttaccgccatttaaattatttggttcctatccaattatttgccatcactcagttttcacactaaaaaaatgaaaattagtggattcactataaaatcttttctcccattttcatgaggactggttaaartcatttcagaataactggactttagagtaaatattcaacatcttatatcactaagatgcttcacaagttagcactgacatatttttcctgtattctgcaagcacatggattacgtcagccatagtggtgagagctgatgataccatccctgttcttgagaagtgcacagtttggtaggaaaggtgggcactgaatgtta

SEQ ID NO: 666122 - DNA, 609 bp, Homo sapiens
catcactcagttttcacactaaaaaaatgaaaattagtggattcactataaaatcttttctcccattttcatgaggactggttaaagtcatttcagaataactggactttagagtaaatattcaacatcttatatcactaagatgcttcacaagttagcactgacatatttttcctgtattctgcaagcacatggattacgtcagccatagtggtgagagctgatgataccatccctgttcttgagaagtgcacagtttggtaggaaaggtgggcactgaatgttataacagtaccatatcctacagtagtttctaaagtatctataacatattcatttttctccacctaaggacatgctttatttcttctctttttttatcccttcatgaaccaaccttttctgtctgagagatttgattttttcttctttaagatcagttaaaatgccagacattcctcttgtgaagcctttctttggtcccagtagacagtatcaattattctttcatagaatgttccatggtgttcgtttatatttttctattgtatgacttcrgtcttattaagtatacttataaattctatttcctttttttttttttttttt

SEQ ID NO: 666123 - DNA, 571 bp, Homo sapiens
tttccaggtcacataaatttcaattatgactctattttgtttccatgaataataatgatgaaataaaacataygaagctaatgtattgcaccattgcctaagtcaagggggtggattcaagaaaattaattctgatataatcttctgaataatagctttataagattctcattggtttgttcccaagtttcatgtggacttccaaataaaggtgcatggttcatatagtacgatttcaaatatgtagataaaataggaagtgaaaaaggagagtcagagtaattaaagatgtttttaaaaaataatgcttattggttgggtaatacacacacacacacacacacacacacataacacacactcatacataacacacactcatacacatatattgaaatacatcgtaacctgataaaatgtgatggaacatggcattgtactttcagcagccccatttatacatcttcatttggcctaactgagctttcagagagtcatatgttaagaaaaatgtgtcattttgatttttaaccgcaagaaattatgaatattaatgaaaaatattacatat

SEQ ID NO: 666124 - DNA, 512 bp, Homo sapiens
atatacactctgtgttatatggtgatagtacaaataggccttgcccttaaggagcttacaatctaaatcatcaagacagattacgtagaaactaggcaatatatagtggttgcatactgtgcttaaagcttgatcggacttctgtagaaattgtgaattttttgttcatgtgggtataagaaacttttacagagaaatgacatttgagttaaaasttgacaaaagtagcattgcgctagtgacagtggaaggaggatatatttggcagagtatagaggatgaagaaagtctcaagaatattaaagtgataattattgtttttactgtagggctgatattcattgatatgaatataagcaaattatattggtttattacaactttatagttttttattactgaagctatattttatctggctagactgcaggtaagttaaaattgttataaatgtttcaattaaaaaattaaatatactatatgctataattaaatatactatacgctataat

SEQ ID NO: 666125 - DNA, 529 bp, Homo sapiens
ttctgtagaaattgtgaattttttgttcatgtgggtataagaaacttttacagagaaatgacatttgagttaaaacttgacaaaagtagcattgcgctagtgacagtggaaggaggatatatttggcagagtatagaggatgaagaaagtctcaagaatattaaagtgataattattgtttttactgtagggctgatattcattgatatgaatataagcaaattatattggtttattacaactttatagttttttattactgaagctatattttatctggctagactgcaggtaagttaaaattgttataaatgtttcaattaaaaaattaaatayactatatgctataattaaatatactatacgctataattcaattttacaaaataaaaaaacttcacatacttgctgaaaaatgcatgtgaattttagcctaaaattttgatgaaagttaaattcttaattattgtcacttgattgtcactcatttgcaaaaatataatcgttatacagcagtagacttaatttt

SEQ ID NO: 666126 - DNA, 541 bp, Homo sapiens
taatagtacaggaattcagataatgtttttaaattgaaaaacagtctaacttttatagtgatttttttaagagacagggtttcactctgttgcccgggctgaactacagtggcacgatcatagcttactgcagctttgttcagtaaaatcgggctcaaccaatgcttccacctcagcttcctgagtagctgggactacaagtgtgcacctccatacctggctaattttttaattttgtgtagagaccgggtcatgctatgttgctcaggcttgtcccaaacacctgacttcaagcaatcttcctgcctcggcctcccaaactgttgagactacaggtacgagccaccatgttcatcctgatttttttttaatttgaaaataatttatttttkgcttaacttggatacctgtgctacatgtaagaaatattaatatggactattaaaaactaagttatatcattcatatgtggatatacatatgtatacctctctatatatattttgtatcatccttagcaattaagtccatcattgcagat

SEQ ID NO: 666127 - DNA, 539 bp, Homo sapiens
tgtgggcggggggtggctcacacctgtaatcccagcgctctgggaggctgaggtgggtggatcacgaggtcaagagattgagaccattctggccaacatggtgaaaccccaactctattaaaaatacaaaaattagctggctgtggtggtgtgcacctgtagtcccagctactcggaaggctgagtcaggagaattgcttgaacccaggaggtagaggttgcagtgacccgagattttgccactgcactcaagcatgagtgacagagcaakactcatctcaaaaaaaaagaaaaacaaaaacaaaacaggatacaggatatgcttattgtcttcctaaaagaaagtattgtttttatatctgtattatataagtatacttacacttataaaattatatgctacaattttaatttgataaactataacattttatttgtaatataagctgtcctttagtttcatctcaaagcgctattaaagtcttttagtaatgtgagtatatttcaaagtatacttccttgaaaattaactggagaat

SEQ ID NO: 666128 - DNA, 580 bp, Homo sapiens
tgttacttttgcttctcaacatatgagcagaaaagagattcattagattatcttataaaagttcacttataaggcatttatttaaattttaaatttaagaacatgcattcacatagaaaataatgtgatgaatggtatgtacattcttacggccaaccacagatttatgtaatgttcatgaattgtagyaagaacaatgttattccaaggtcatagttctaatttcatgctatgtgggaagtcattttttttctccgagctctaattccacagtagagtgagtttttgtgtgtttgtttgtatgtttgtttgcaattgttctacttttcttctgattatctttgcccagctccaaattcacttttccctatgatgctaaaaagttatctactttctttattctccaaagtaaacttctaatcattaaccttaaatactctctgtacataaacataatgtgaagtatgagttaacaaaataaaacgccattctcttactgcaaatggatattaatggaaaataaatctgatctaattaattcatgtccatctgtccatgacttatatttatttaattataa

SEQ ID NO: 666129 - DNA, 496 bp, Homo sapiens
tctaaaatagctttgctgggcagaaatgtaaaatatatcatgcttcttaactgtagaaaccaagggatatcagtcttagaaattgcagcttatttagcaaggtggtccagggaatatttggtttcaaagacttactgccktatgccagatatattgtttagctgcttgtatgagccaattaggagaacaataacattaggcattggcttgttctgccaacactacctgttaggaatcgttttatccacctttagctttgaaattgtatttaccctttatgcttttgtttttctcatagtatctttgcccttcttcatatttactcggaggacctctgaaacgttttttgtttctctaacatacacatttctaaaacataggtcccctggtccacataatttatatatagaatgagactcagtatatatttatccattatggaatattcaaactcatggttatccagtagttcactactggttaccatttgatgctt

SEQ ID NO: 666130 - DNA, 577 bp, Homo sapiens
ttgctgaagaactatgtcttataaccttgcatttcagtaacctaaccaggatatgtaccagtgttgagtattatacatcattttgtttttctcttggggtaatgtggattctttattttaagaaaaaaaattacattttgtgtagtttgcagtttcatttgttcaggtcactacctcaggaatactttatttttgtattgaatagtgtttgatttctccatttattagttcctttmttatttgaaaagtctctttcttttcctatatgcatgtatcctggttacatcaaatctttctaccatgttagtaacaactttcagccacataagttttgttcccttttgtttctaatttatcttcttggttgttttggtcctcgaattgttttcatagtgcttagtgtttcttttcatcctgttttgttgctttaactcctcgtttatgaacacctattttacagaactcaatttcttattaagatatcctatttcacagagcacttatgtaaaattttcttccattccttcaattgtgatttttttttattcagctggatttcttgtctatatttgtacgt

SEQ ID NO: 666131 - DNA, 434 bp, Homo sapiens
tgttctatggaatctggggaagtttggcctttaaaaatgaractgccatgaaaactgctttacacaaagttttggttcacagtgttcattggattacctaatccagtgaatcatttggcaaacaaagtgtaaccatgttaaaccgtgagtttgtattgctatctcatggataaagttccaaggtaaaagctattgaatttttgtttgtgtgtttatatatgtctagatgtgtttatttgtattcacatttattgttatatgttgtgtctaccaaactggcttgtaaataaaattgtactcataaattaagtaaatgagtccaagcaatttttaagtttatgtgacttgagtaaatcttttttaaacaaactgactttaaaattattggtaaaataaaaaatagaaatgttttcagaattgtcagcatacacttt

SEQ ID NO: 666132 - DNA, 563 bp, Homo sapiens
tcaatgacatagaagagaataaaaataaataattatacaaaatcagcaaaaacaattcatgatctgaatgagaaattcaacaaacagatagrtatcattgaaaaggaccaaatagaaatctggagctgaaaaacttaatgaatgaaataaaaaataaagtcaagagcttcaacaaccaactagatcaaacagaagaaagaatttctgaaatggagatagggcttttgaaataatagataaaaagaaaagaataaaaaaattaagaaagccaacagaacaccattaagtaaacaaatctttgtattgtgggttttccagaaggaggaaagatgggaaaatcatagaaagcctatttaatgaaataatagctgaaaattttccaagtcttcagagagatatggacatctagagccaggaagctcaaaggtctccagatagattcaaccaaaaatcttctctccaaggcacattataatcaaacttcaagacaaagagaattctagaagcagaaaaagagactcaagtgacatataaggtaatttacattagactaatagcagatt

SEQ ID NO: 666133 - DNA, 452 bp, Homo sapiens
aaggacttagaatggacactacaaaaactgaaggccactgaaagtcactacagaatgtacacagtgaggagaaaactgagctcacacatacgttctctgattacagtgaagttgactagaaattaataacagaaggatatctaggaaatctctgtgcgtttaaaaatggagaaatgcacttccaaataacctatragtcaaagaggattttagaaaatagttcgaacctgaatttttttacccaaactaaattttttaaaaggacatcaaacaaattaaaatagggaacatcaaaacctgatctacaagaactaccctacgagaaatgccaaggggcccttcaggctgaaatgaaagaacacgggacaataattcacagccacatggagagataaagcgcactggttcaggtgcctacaatggtaatatgaaggccagtagaattgtaaggt

SEQ ID NO: 666134 - DNA, 606 bp, Homo sapiens
tagttaattttaggtgtcaacttgattggattaagaaacatctagatagctggtaaagcattactttccggtatgtctgtgagagtatttctggaggagaatagcatgtgagtcggcagtagagaagattcaccatcaatgtagatggacagcactcaattgaccgggggcctggatgaaacaacaagacaaagtcatggcaaattctctttctttctcttatagttaggatgtccttctcctgcccttggacatcagaactccagattctctggcttttgaacttcgggacttggaggagcatcctcatttccttccctgagttctttggcttttggccgcagactgagaactacaccattagctgcctggttctgacacttttagacttggactgagttctccagtttgcagacactctgtcatgggccttctcagactccataattgtgtaagccaattactctaataaatctactatctttctctctgtctgtctgtctgtctgtctrtctatctatctatctatctatctatctatctatctatctattgattctgtctctctagagagccctgacaaatatatgtttttcaccataataa

SEQ ID NO: 666135 - DNA, 618 bp, Homo sapiens
agtcatctagtcttaccagtttttttcttactgctactaagagtgagcaatagatgcttttccatatcagtttccatcttagctctgaccagactacacactgtcattagattcatcttccttaaacttgtcactattttttgaaaataccctagaactcaatttccctttctttccaaatacctcctccatctgatttcactgttactttaatccagtgtcatcctacccttacattttcatttccctggcccattgaagaagtgttgctcattgcagcctttgagtcttcagatggggtcctgtccttccctccctttgccagatgaagccttttcatcctgtaggatccagcccagctgttgcccctccatgtcactctcccttgtctgwgtaatcctatgagggttataggttatattctataactgtgtgcttgtgcaaatacttgtcaaatggtttactattgatacacaggcttcagtctcatcttatccaaaatctattgggaaatattccaggccagataccatttcttatcccttttcaagccctcatcggggtctacatgtttgggagcactgtgagctcagtaagatacttgtcgattggttttct

SEQ ID NO: 666136 - DNA, 569 bp, Homo sapiens
cttgttttcatggattgaaagaattagtattgttaaaatgaccatacccaaagtgatctacagactcaatacaatttctattgaaataccaatcacactcttcacagaactagaaaaacagttctaaaattcatacggagccacaaaagaccacaaatagccaaaaaaattctgagcaaaaagaacaaagctggagacatcacactacttgacttcaaaatatactacaatgccatagtaactgaaacagcatggtactggtataaaaacagagacatagtccaactgaacaaaatagagaacccagaaacaaacccacatatttgtagccaactgattttcaacaaagtcaccaagaacatgcactggagacaggacatcttcttcaataaatggttctggtaaaaccatatatacatatgtagaagtatgaaactagacccctatctctcatcatatacaaacattgactcaaaatggaataaagacttaaatgtaagtataaaattaataaaagaaaacctgaaaaacacattgrtctatgcaaagattttataggtaagacttca

SEQ ID NO: 666137 - DNA, 516 bp, Homo sapiens
ttttctcacatatcaaatgaataaaataataacactatcttaccattcttgggtgttcctaatatggtttggctctgtgtccctatccaaatctcatctcaaattataatccccatgtgtcaggggagggatctggtgagaagtgattggatcatggtggcggtttcctccatgctgttctcgtgttagtgagtaagttctcataggatctgatggtttaaaagtgtgtggctttctttgctctcactctgtctcctgcttccatgtaagacgtgccttgctttcccctttgccttcctgaggcctccccagctatgtgaaactgtaagtcaattaaacttcttttctttatgaattacccagtctcaggtrgttctatatagcagtgtgaaaatgggctaatacagtgcctgtgaagattaaatgggttattatatagaaagtgtttattatatagaacagtgtctggaacacagaaaactctcaatacacataagctgttgttactgttactat

SEQ ID NO: 666138 - DNA, 606 bp, Homo sapiens
ttttaattgagtaatgattatcctttcatcttactgagtcctgtttgtttgaatccttctctgtctgtatcagtttgaaggtgatcatctactaatatgctgttggagaatcctgagggatgccgggtttatttgccaagtttattattattattattattattattattattrttattattattatttaatctttatatgttactgagtcttaggggtgtgaaaaaataaaagattcagggacaaaatattttgagaagaaagagtagtttacttgtaaagttttgcaaggaagactagatttcagaagaactggctcctcaaaggatcatggctatttaaggcataaaaccttcaaaattattatcaaggtcagagtttgtctactcacagtggaaagaaaaagagctatttcctcacttggttgtcctttctgcaatatatccattgcaaaagcatcaggggaaagctgtttttttagggagacagtaacttattggaaagggctcaaggtttcctctattatggggactagaggtagacatagtggccttgtttttgtcttggtttttgtttctgcttttttctctctctgactatgagaca

SEQ ID NO: 666139 - DNA, 655 bp, Homo sapiens
aatttaaacagttcattttggagcttgtgtttttggataatttctcagtttctgatttctaaatccctccctgcttttttttttttttccgacatctgagtgtatgggggtgcctcccaggacttcagagtggtggaatgtagcagtcccatagctcctatctgcatatataattgctgtgtattatgcttgtgtgagtatttttataggctgtgtattactcaaggtgtaaatgctggaccaaagcatatatgcctcagacattttaatttgtgttgccagattgctttcctagaaatcatccatacatgttttagaacacataaatgcatgtggggagtagagatgcccaggtaataataacagagcattaaggcaattctcattcactctcggtgtctaaccaatccacaggtattttgaaatgtctctaatatacacatcactatgaaataaaaataaaaggagatatatccctactgcttcaggaagttgcacgctaacaacctcctaagtggctttctgcatctgtggacaagrccctcattcttcaatctggtgttaaagactgtttcccaattgtgattttacgtttttatctttaacttcctctacattttaccaggttcccatgccaaccatcctataccactaa

SEQ ID NO: 666140 - DNA, 631 bp, Homo sapiens
cattcatttatgccactcccttttggccatctactcacccatgagccctcctgatgctcctgaaacatgccagcctcatcccatcgtggggaacactcttcctcagacctctgcatgactggctgtttttcttcatttatgggctaactcattttctyagagaggcctttctaggctggctacctaatctaaagtagccacccaatcactctgctgtacacctatttttatggcacctattactacctaattttctttgtccattgtctacctagcttcactataatgtaagctccatgggagccagaatagtttttgttttattcagagatgtgtcctcatgatccagaacagtgtctggaacagagtaggtgcttattaaatggttgttggattaatacaatgaatggagtaggtattccttaatagaaggacctatgctgatctttgaatctctacagttctgaacacagtagcttgaacataatcagagctcaaataatgttacagactaaattaatacatcttatatgagagtaaagaagtgaaaaataaacagtggtaatctcagaatccttcataaaatgagtggctattttatataatgtaaatgaatatatagtactatttt

SEQ ID NO: 666141 - DNA, 541 bp, Homo sapiens
cttgaactccatattttccttccacactgcctgagtagaggttctctttgaggcctctacccccacagcaggcttctgtctgggcagccaggctttctaatatctagttggaggctatgaagcctccttcactctggcactctgcatgtctgtgggcttaataccacatgaagccaccaaagcttatggcttgtgccctccagagcagtggcctgaactatacctggggccctttgagccacagctggagctgagtggccaggacaagagaaacagccttctgaagtggcacagggcagtgatgcctcagggctggcccatgaagccattcagtcctcctgggtctctgggcctgtgatgggaggggctaacttgaagataccattgtcttggctrtcagcacctggctctttttttagtcatgcaaatctctctaacaagtggctactctccagcctgcttggattattcccctgaaaaagctttttctttctttgccacatagccaggctgcaaattttcgaaacttttatgctctgct

SEQ ID NO: 666142 - DNA, 581 bp, Homo sapiens
cttccatgtgggtccttctaacaggcccttaagtgtttgtctctgtcttcttgttcttaaatccatcctctgttcctttgtgtaaaagcccgtgttgcctgtagcagcatttcttctctgacttatttgccccttcaaaaatgacatatcatctctttatcctctttagagttttattttttatgatttttattatgtgtttggtacataagaaagacattcttgtagtatcaaaagtagagggataataaaggctaatattttgartgcttttgcggaatagctcaattgttgctcacaataattgtgaaaggaggtactatgattattggcattttgcaaaaagaaattggaggctcaaagaagtcaggtaacttgtctgaagtcacacacctacaaagtgatggagctgtgcttccagttggattctagagcgcacattttcaaccactgtcctttattgccactgctgtgtcctaagcaggttcacttgacatatacttggaggctcttgatgagcacaattaataaaattctttgattaaaaacaaaaacaaagtcggaagagaaaatcactacca

SEQ ID NO: 666143 - DNA, 586 bp, Homo sapiens
tccattgatccattaggaatagatcatctttagtaaaggtatttcactaaaattgctttcatgtgaaagacaattgctttaatataataagtttgttactatttatatgacgtgctctggagagtttaagaaatagcatgcaaaaagtttttctatataattctcatatttttattttattttattttattatttattcattyatttttatttctttgagagaggctctcactctgtcacccaggctggagtgcagtggcactatctctgttcacagcagtctcgacctccagggctcaggtgattctcccactttaatctcccatgtggctaggactgcaggtgccacaccaccacacctggctaattaaaaacatttttttttctagagacagggtttcaccatgttacttaggctggtcttgaactcatgggctcaagcgatccattcaccttggccccccaaagtgctgagattacgggcgtgagccactgtacctgacccactctcatattttttaaaaagaaactgtagagttaattctttaaaatgattctcagatagcaaacaataggaaaagtaaag

SEQ ID NO: 666144 - DNA, 586 bp, Homo sapiens
tccattgatccattaggaatagatcatctttagtaaaggtatttcactaaaattgctttcatgtgaaagacaattgctttaatataataagtttgttactatttatatgacgtgctctggagagtttaagaaatagcatgcaaaaagtttttctatataattctcatatttttattttattttattttattatttattcattcatttttatttctttgagagaggctctcactctgtcacccaggctggagtgcagtggcactatctctgttcacwgcagtctcgacctccagggctcaggtgattctcccactttaatctcccatgtggctaggactgcaggtgccacaccaccacacctggctaattaaaaacatttttttttctagagacagggtttcaccatgttacttaggctggtcttgaactcatgggctcaagcgatccattcaccttggccccccaaagtgctgagattacgggcgtgagccactgtacctgacccactctcatattttttaaaaagaaactgtagagttaattctttaaaatgattctcagatagcaaacaataggaaaagtaaag

SEQ ID NO: 666145 - DNA, 586 bp, Homo sapiens
tccattgatccattaggaatagatcatctttagtaaaggtatttcactaaaattgctttcatgtgaaagacaattgctttaatataataagtttgttactatttatatgacgtgctctggagagtttaagaaatagcatgcaaaaagtttttctatataattctcatatttttattttattttattttattatttattcattcatttttatttctttgagagaggctctcactctgtcacccaggctggagtgcagtggcactatctctgttcacagcagtctcgacctccagggctcaggtgattctcccactttaatctcccatgtggctaggactgcaggtgccacaccaccacacctggctaattaaaaacatttttttttctagagacagggtttcaccatgttacttaggctggtcttgaactcatgggctcaagygatccattcaccttggccccccaaagtgctgagattacgggcgtgagccactgtacctgacccactctcatattttttaaaaagaaactgtagagttaattctttaaaatgattctcagatagcaaacaataggaaaagtaaag

SEQ ID NO: 666146 - DNA, 568 bp, Homo sapiens
aaaaatacatcatctggcaatggctgtttcaacatgtggagcaaagtggcacatgtctggctgtacgaagcaaggcaaggccagagatrtacaatcttacttttgtatttttatatgactttaccaacaagaccaaagtcaacacatggctacagatttgctgacaatctctgggcctatggagagaagcccctgttagccataaaagtatatttcttttacctattgtgttttgtgacagagatataatttaataaatattaaattatttatcaaaatatttatcaccatattatatctatatattatatgtctattttatgtctatattgtaatatatgtgtattatatgtccatattatactacatgtctatataatataatatcaactattaaaatgtattaatattaaattttaatgatattattcaatatttagtaaagttaaaatgcaatcagaaattgaatgtttgccaaaatccctgggtggggcttcatgactagttctggtcaatgcattttgagtgaaatgatgtatgtcagttcctggctgagacagttaaaagc

SEQ ID NO: 666147 - DNA, 568 bp, Homo sapiens
aaaaatacatcatctggcaatggctgtttcaacatgtggagcaaagtggcacatgtctggctgtacgaagcaaggcaaggccagagatatacaatcttacttttgtatttttatatgactttaccaacaagaccaaagtcaacacatggctacagatttgctgacaatctctgggcctatggagagaagcccctgttagccataaaartatatttcttttacctattgtgttttgtgacagagatataatttaataaatattaaattatttatcaaaatatttatcaccatattatatctatatattatatgtctattttatgtctatattgtaatatatgtgtattatatgtccatattatactacatgtctatataatataatatcaactattaaaatgtattaatattaaattttaatgatattattcaatatttagtaaagttaaaatgcaatcagaaattgaatgtttgccaaaatccctgggtggggcttcatgactagttctggtcaatgcattttgagtgaaatgatgtatgtcagttcctggctgagacagttaaaagc

SEQ ID NO: 666148 - DNA, 568 bp, Homo sapiens
aaaaatacatcatctggcaatggctgtttcaacatgtggagcaaagtggcacatgtctggctgtacgaagcaaggcaaggccagagatatacaatcttacttttgtatttttatatgactttaccaacaagaccaaagtcaacacatggctacagatttgctgacaatctctgggcctatggagagaagcccctgttagccataaaagtatatttcttttacctattgtgttttgtgacagagatataatttaataaatattaaattatttatcaaaatatttatcaccatattatatctatatattatatgtctattttatgtctatattgtartatatgtgtattatatgtccatattatactacatgtctatataatataatatcaactattaaaatgtattaatattaaattttaatgatattattcaatatttagtaaagttaaaatgcaatcagaaattgaatgtttgccaaaatccctgggtggggcttcatgactagttctggtcaatgcattttgagtgaaatgatgtatgtcagttcctggctgagacagttaaaagc

SEQ ID NO: 666149 - DNA, 580 bp, Homo sapiens
gacctgctctgtggctttacttgctgccattaaaccaccaatagatctttgttgtttaaagcagatttaggagaccactagggtcctttcagccatctgggtgcattcttaggtataactgaaccaacagagtgaggagtctctgtagctatgccacagtgagtttgttcccattttattgaggacagagcagaatctaggcacaaatagactagggccactgacatggtgtgatttgaggggctcagagaggmctctatatcttgcctctgattcttctctgattgggagagataagaaggaaggatgaagtcattgagggcctggagaacaggctggtgatgtttaactcattctaataagatctcactgtggaagggctgaggttaccaagaagtatgacctaagacaccagaagctgtgtaaacatgtgtgtgtgtgtgtgtgtgtgtgtgtgtgtgtgcatgtttccagatgtctgtgtatgtgtgatgtgtgaacaaaggcagtacggcatgagaaagcaatggaaggaggaggagagactgctcaacttgccttggaagttgctccatcttat

SEQ ID NO: 666150 - DNA, 627 bp, Homo sapiens
ggattgtttagaaggaaaatgggctggtttttcttgcttcacatatccttactggaaggtcatgaccgatctttcttactgcccacatttttatttatacaccataaggaataatttccatctcactctccccactcctttgccagaacatatagaaatgtctgtgttcaaaaggctcttgttttcttggctgaatatcaagattttttccagattgtcaactccttaagaggggagaagcataaaatccagctgtagaaaccaagaagtgacctaacatgatccaggtgtttccagttttcttaggaaagaaggcgagtatgtatgtcatgtctgatgggccatgtctagaggatactgcccratcacattaggttgctgatcacagttgtgatggtgggttgtgggtgagtccactgtgtgtaacagctatatctgatttatcaaaattggttttgtagtggtattctgaaagttcgtgaccttattcaatgcacataaaaaaggatttaaaagcagtaaaattgtaaagacaacatggtggtatgtaaatgcagggaaaaggcagaggagaaacgggctttaactttagttctgccacttgccagccatgtttctgtggataag

SEQ ID NO: 666151 - DNA, 549 bp, Homo sapiens
gtaaaaacacctataatacatacattttacatttgtaatggttcaggcagctttctctgcaaaattctccattcctgaacttccctggcaatgctcacttaatttttttctcactgtctaagtttctaaaagaattttgtagtatttagtgtttgcctcaatggactcttgcttactgtgggccaagcaagacctcgcaggattcaggctcaccattgcaaattggccagcaggtgtcactgtgggtttgggtggtaacccaactgactacagaaaagaatgactgatgwaggggagtaataagaaaaggagagaaagggaaatacaaaagcaggttcttagaggaagagaaaagtgaattaaagatcgctgatgtttccatagaccttttctctaggatttcagtgttcttttgtaccacctccctggctcctgttagcccagataggaattcacttgcataagatctgttgattctgagttagtcactaaggataacttcactaaataaaatagcaacagagatgagcaaagttgggaagagctgga

SEQ ID NO: 666152 - DNA, 549 bp, Homo sapiens
gtaaaaacacctataatacatacattttacatttgtaatggttcaggcagctttctctgcaaaattctccattcctgaacttccctggcaatgctcacttaatttttttctcactgtctaagtttctaaaagaattttgtagtatttagtgtttgcctcaatggactcttgcttactgtgggccaagcaagacctcgcaggattcaggctcaccattgcaaattggccagcaggtgtcactgtgggtttgggtggtaacccaactgactacagaaaagaatgactgatgtaggggagtaataagaaaaggagagaaagggaaatacaaaagcaggttcttagaggaagagaaaagtgaattaaagatcgctgatgtttccatagaccttttctctaggatttcagtgttcttttgtaccacctccctggytcctgttagcccagataggaattcacttgcataagatctgttgattctgagttagtcactaaggataacttcactaaataaaatagcaacagagatgagcaaagttgggaagagctgga

SEQ ID NO: 666153 - DNA, 549 bp, Homo sapiens
gtaaaaacacctataatacatacattttacatttgtaatggttcaggcagctttctctgcaaaattctccattcctgaacttccctggcaatgctcacttaatttttttctcactgtctaagtttctaaaagaattttgtagtatttagtgtttgcctcaatggactcttgcttactgtgggccaagcaagacctcgcaggattcaggctcaccattgcaaattggccagcaggtgtcactgtgggtttgggtggtaacccaactgactacagaaaagaatgactgatgtaggggagtaataagaaaaggagagaaagggaaatacaaaagcaggttcttagaggaagagaaaagtgaattaaagatcgctgatgtttccatagaccttttctctaggatttcagtgttcttttgtaccacctccctggctcytgttagcccagataggaattcacttgcataagatctgttgattctgagttagtcactaaggataacttcactaaataaaatagcaacagagatgagcaaagttgggaagagctgga

SEQ ID NO: 666154 - DNA, 584 bp, Homo sapiens
gtagttgtcaaataagtgaataaacaatgtgagaagaggaagagcaagaaaaaccaactgaagtctgcaagcttaggaaccaagaaagtaatagaaaaaaatgagaaggggyatctatttgtgggggaaattatgaaaacccacatgcaaatttcaggcaacaggttgggattctaaggcagtgcccaggcctccatgcctcctgtctggcactgactataatgtggaaaatggcctggctcttcttacattacctgtgcacttccaaggactccaaaatgtgttttccccaaaggcggtatataattttgagaattgcaatcattttttccatgttcttttgaaggctgtaaaataattttagatgcaatagtaattctaggtccttgcttacccttgacctttgaagttttattcaaaacatcacaaacctctcagcccggatgttggcaagttaatgatatattgctgcaggaaagaacttggtcttgtttgcatgaggaactcggaatctttggtatattacctcaacttttttttttaggatacaactgaaatataattttgttagtgtaaaggtaaaa

SEQ ID NO: 666155 - DNA, 584 bp, Homo sapiens
gtagttgtcaaataagtgaataaacaatgtgagaagaggaagagcaagaaaaaccaactgaagtctgcaagcttaggaaccaagaaagtaatagaaaaaaatgagaaggggtatctatttgtgggggaaattatgaaaacccacatgcaaatttcaggcaacaggttgggattctaaggcagtgcccaggcctccatgcctcctgtctggcactgactataatgtggaaaatggcctggctcttcttacattacctgtgcacttccaaggactccaaaatgtgttttccccaaaggcrgtatataattttgagaattgcaatcattttttccatgttcttttgaaggctgtaaaataattttagatgcaatagtaattctaggtccttgcttacccttgacctttgaagttttattcaaaacatcacaaacctctcagcccggatgttggcaagttaatgatatattgctgcaggaaagaacttggtcttgtttgcatgaggaactcggaatctttggtatattacctcaacttttttttttaggatacaactgaaatataattttgttagtgtaaaggtaaaa

SEQ ID NO: 666156 - DNA, 533 bp, Homo sapiens
tcagagtttatgcttccgtatctgtgccttgctatgggaacagttggaacccaagtaactagtctgggattgcacttgattgagggctcagaccttctctccaaatttctccttcttcagtcttctttcacttaacaaactgaggagcttcctggattttttattgaactctgtgaagacaagtttaggtatctgtccattcttcatcacagtctagtgctgagccagccactacttcctttccttccaccctccttgtcagtgataattttaaaggcaacagactccttcatcagagtttctcaaattttggtgtgcacacaaatcccctgggatctttattaayaagctgattctgatttaggaggtcgggggttggcctgagattctgtatttctaataggtttccgggtaattcccatgctgccagtaaacagatcaagagatcaagtataacttcatcctaagttatgtatatgaggttctatagggatttgattctccaaacatttattgaacctttcagcaaatgc

SEQ ID NO: 666157 - DNA, 541 bp, Homo sapiens
tctgaatagtttttgacttgatctccctttgtgtcatcaaatctttgctaccaactaggggtatgattttggaattttatgtaacttctctgtgcctcaatttattatgcatctgtaaaagaagaaatgtgtaatgggtcatttaaaaacttagcctcaaaactccttttgtttttttttwaaaaaatctgacctgagcctccacatgtaaagtgggaccttctaagcttgcctccctgacctccagatgaccttccttggtctcctacattgacctgagtcaccactgcctaaacctggagcacaaagtgactgggtgcagagtgctcacattctgctctgaaagcttttgattttcaacttcttgaaggaatccagcaataatgactgttttgccagaattgtatttctcagttttttaactaagatgtaaacaagcccaacatttttaaacctgtttttagttctcttaactggctgtagtgtgaaggagggaaacctctgtttccttggaatacataaggtgtcattagaaaaagtg

SEQ ID NO: 666158 - DNA, 541 bp, Homo sapiens
tctgaatagtttttgacttgatctccctttgtgtcatcaaatctttgctaccaactaggggtatgattttggaattttatgtaacttctctgtgcctcaatttattatgcatctgtaaaagaagaaatgtgtaatgggtcatttaaaaacttagcctcaaaactccttttgtttttttttaaaaaaatctgacctgagcctccacatgtaaagtgggaccttctaagcttgcctccctgacctccagatgaccttccttggtctcctacattgacctgagtcaccactgcctaaacctggagcacaaagtgactgggtgcagagtgctcacattctgctctgaaagcttttgattttcaacttcttgaaggaatccagcaataatgactgttttgccagaattgtatttctcagttttttaactaagatgtaaacaagcccaacatttttaaacctgtttttagttctcttaactggctgtagtgtgaaggaggraaacctctgtttccttggaatacataaggtgtcattagaaaaagtg

SEQ ID NO: 666159 - DNA, 503 bp, Homo sapiens
aaatttcttaccataaaatttagatgggttaatattaacattcatggttttaaagttactaagcacataaatattttggttaaggttacaaataaggataataaaagcccaaaggagaacttttgtctaaaaatatactgagargttagatatacttccatgaaatttattagtgtatatagtacatttttattattaataatgtgtacattttaacacataagcaatttttaattctctctggaagtaaaaaaaattaaaggttgatctgccttattcttaaacattcttggtaatgtaatcaatgaatattataatattatactattatactagtaataaattgattaacacaataaccaatttctgatatgtagtgtactaatgttagtttgcagtatttaggccatcatttccttattttgacaggtcatatgtttaataatcttatgtggcttattttatttgtaattattattgcttttgcttaggactcctggaat

SEQ ID NO: 666160 - DNA, 503 bp, Homo sapiens
aaatttcttaccataaaatttagatgggttaatattaacattcatggttttaaagttactaagcacataaatattttggttaaggttacaaataaggataataaaagcccaaaggagaacttttgtctaaaaatatactgagaagttagatatacttccatgaaatttattagtgtatatagtacatttttattattaataatgtgtacattttaacacataagcaatttttaattctctctggaagtaaaaaaaattaaaggttgatctgccttattcttaaacattcttggtaatgtaatcaatgaatattataatattatactattatastagtaataaattgattaacacaataaccaatttctgatatgtagtgtactaatgttagtttgcagtatttaggccatcatttccttattttgacaggtcatatgtttaataatcttatgtggcttattttatttgtaattattattgcttttgcttaggactcctggaat

SEQ ID NO: 666161 - DNA, 601 bp, Homo sapiens
attgcacaggaagacagtttcacagtcttggaaacttagacaccactcttagcccccagcagagggcaggctctctttctgtctttgagtgtcaggggtgtctagcaccatcctctgctccagggaccattgcctggggactgtttttttttggaccctctctgatgcacactctatagatttaagtcctcagagcagatggtctagcccatcccatgagcccttagcctctcctgcaaatctatcattgctcagggacacagagaaaatgcactcctctgggtacacttccattctgtttggttcttaatgtatcatggtgataaccttattatcttaacacccaaagccaaaattatycttggttgctttgtgtaggagaacatttgctaaactctcaggggtaaatactgagaagtgtgggttagctgtataaagggcaagcagggagatagatggctggctgtgttcttgaactgaatagggctgtgggttgaggagatgggatgagaggtgggggaagggtaagcagctctgtggagtgatgcaggactttgaagaacagtgatgtacattttatgtttatggactgaaacacacc

SEQ ID NO: 666162 - DNA, 563 bp, Homo sapiens
ctccagcctgggcgacagagcaagactctgtctcaaaaaaaacaaaaaaaacaaaaaacgaaaaaacaaaaaaacaaaaaagaatatcccaaatagtaacttacatcttaataacttcagtttaatatgtctcataacatgttgtactaacccatagtaaaaatctctttatggaaatctcaagttgtgttagttgcttgacttgtctctgagtctatctgggttaacttatagtttaactttagctttctggctttttgcatgtggcttcatgggaagaatattcatggtttttgcccttataaaggaagaactaagaacctcaggtagagttgagtaaycttaagtagtctgcctactttgtgaactgttttgtgacctgtgagggtctcactgaggatcagcaacactgtcaatcattaagacaattttaaacattttactaaatattttaaaatatatttatctcatttttctggaagttccgaaagataagctgttatatataaaaatggttcagcaattcatgaatgctcacagaacttttattttcttaagcaagc

SEQ ID NO: 666163 - DNA, 563 bp, Homo sapiens
ctccagcctgggcgacagagcaagactctgtctcaaaaaaaacaaaaaaaacaaaaaacgaaaaaacaaaaaaacaaaaaagaatatcccaaatagtaacttacatcttaataacttcagtttaatatgtctcataacatgttgtactaacccatagtaaaaatctctttatggaaatctcaagttgtgttagttgcttgacttgtctctgagtctatctgggttaacttatagtttaactttagctttctggctttttgcatgtggcttcatgggaagaatattcatggtttttgcccttataaaggaagaactaagaacctcaggtagagttgagtaaccttaagtagtctgcctactttgtgaactgttttgtgacctgtgagggtctcactgaggatcagmaacactgtcaatcattaagacaattttaaacattttactaaatattttaaaatatatttatctcatttttctggaagttccgaaagataagctgttatatataaaaatggttcagcaattcatgaatgctcacagaacttttattttcttaagcaagc

SEQ ID NO: 666164 - DNA, 563 bp, Homo sapiens
ctccagcctgggcgacagagcaagactctgtctcaaaaaaaacaaaaaaaacaaaaaacgaaaaaacaaaaaaacaaaaaagaatatcccaaatagtaacttacatcttaataacttcagtttaatatgtctcataacatgttgtactaacccatagtaaaaatctctttatggaaatctcaagttgtgttagttgcttgacttgtctctgagtctatctgggttaacttatagtttaactttagctttctggctttttgcatgtggcttcatgggaagaatattcatggtttttgcccttataaaggaagaactaagaacctcaggtagagttgagtaaccttaagtagtctgcctactttgtgaactgttttgtgacctgtgagggtctcactgaggatcagcaacactgtcaatcattaagacaattttaaacattttactaaatattttaaaatatatttatctyatttttctggaagttccgaaagataagctgttatatataaaaatggttcagcaattcatgaatgctcacagaacttttattttcttaagcaagc

SEQ ID NO: 666165 - DNA, 588 bp, Homo sapiens
ttggttgaaacaagtactttagaatcaggaatgagttatatgcctcgtgttaatgagacatgaataattaaaggattcttacattttattatatcaaggacacaatggttaaaaattctaagccaaacgggtgaagttctctgtaagtttggctttctgtttacacatgctctgacccttgaaaatataattatacttactcttaaatatttgcttactaagggcagagaatctccagacaagtaacatctaaatataacaattgtaatttataatcttgagactttgtatactgcagaaaattctatttggtagagacagctgtgtgttcacttgtgttataaactttattcatcatgggaaattgaattttctgtcttgttttgttataattaagccactaattatcaccatacttgttaaaaagttttcaatgtttaccatgtaaatttcccagatatttcctccttgtagttgtataggtgaaatatgagatggagtttataaaatattcatgtctaaaatrcaacacaaaatctcatcttgcataggttcaagagaaaagacctataaacactgacacatgtt

SEQ ID NO: 666166 - DNA, 611 bp, Homo sapiens
gacatacaaatggcaaacaggcacatgaaaaggtgcttaacatcattgatcagagaaatgcaaatcaaaaatacaatgaaatatcatctcacctcagttaaaatggcttatatccaaagacaggcaataacaagtgctggtgaggatgcagagaaaagggaacccttgtatgctgttagtgggaatgtatattagtacaaccaatatggaggatagtttagaggttccttaaaaactaaaaattgagctaccatataatctaccaatcccctgatgggtrtatacacaaaagaaaggaaatcagtatatcagagatatctgcactcctatgtttgttgcagcactgtcacagctaagatttgaaagcaacctaagggtccatcagcaaatgaatggataaaaaaatgtggtacacatacacggtgagtgtacatacacactattcagccataaaaaagaatggaatccagtcatttgcaacaatatggatggaactggagatcattatgttaagtgaaataagccaggcacagaaagacaaaccacatattcttacttacttctgggatctaataatcaaaacaattgaattcatgaacacgagagtagaa

SEQ ID NO: 666167 - DNA, 611 bp, Homo sapiens
gacatacaaatggcaaacaggcacatgaaaaggtgcttaacatcattgatcagagaaatgcaaatcaaaaatacaatgaaatatcatctcacctcagttaaaatggcttatatccaaagacaggcaataacaagtgctggtgaggatgcagagaaaagggaacccttgtatgctgttagtgggaatgtatattagtacaaccaatatggaggatagtttagaggttccttaaaaactaaaaattgagctaccatataatctaccaatcccctgatgggtgtatacacaaaagaaaggaaatcagtatatcagagatatctgcactcctatgtttgttgcagcactgtcacagctaagatttgaaagcaacctaagggtccatcagcaaatgaatggataaaaaaatgtggtacacatacacggtgagtgtacatacacactattcagccataaaaaagaatggaatccagtcatttgcaacaatatggatggaactggagatcattatgttaagtgaaataagycaggcacagaaagacaaaccacatattcttacttacttctgggatctaataatcaaaacaattgaattcatgaacacgagagtagaa

SEQ ID NO: 666168 - DNA, 596 bp, Homo sapiens
tcatggtttgatttataacttttcacattacaatggtgagaaagtgatatgcattcagtagaaactgtactttaaattttgaattttgatctttcccaaggctaacaatatgtggtatgatattctgtcatggtactgggcggcaatagcagcaaaggatcccagttaaacatgcaatcaggaggacaaataaccaatactctacagtgtcctgtgtgccaatatgtttytgatactgtgttttgagttcatatattgcaccatgtctacaagtgttcatttgtgtcttctgcttctggtgaaaagaaaacgaaggcaattaatcttgatataaatctcaacataattgcccaacatgaaggcaacaagctaagggccattgcataagttaggacttttacaatccacaatcttgactatattgtcctttaaatacatagaatttacaatattttcaatttaaactgtgtttatcaggatgtaatcctgtcataagttgggaaacatctgtatttgtcagaggtggcactattgatatcaaaattgtcattttttgaataattcctaaagcagtacaaagacaataggaataacac

SEQ ID NO: 666169 - DNA, 597 bp, Homo sapiens
tcattgtacatagtatgttttttctcattatgctaacagccagaatatcagctgaagaaataaacagcaatagggaatatttaccttggttagagctcatacttgatcagcaatgataagatcttctgagaaaataattacttcaygccagataactcacaagtgtcaggctgcttagctcctagacataagagccataacctcaattgactaacgtcagctcacattatcaccatcagttaaacagcagctatttccaaattcatgcatattaacaaagttagacggaaaaaaagtctctcattggaatttccataacagtaataaaaacgcataagactctccatagaaagcttgtaagtaggaaaaacacatgagtaggaggtgatatcatcatagaaatgtcaactgggataaaaatgatgaacaatttcagtccaatataccctcctcaggatgtaaaagtcatctcaaaaacacttctctgatacacctcatttatttttgatccatattattcccttctcattcttccagaacagaaccaccaaagctcttacctgtagttcagtacctattttagctcttcataaaact

SEQ ID NO: 666170 - DNA, 597 bp, Homo sapiens
tcattgtacatagtatgttttttctcattatgctaacagccagaatatcagctgaagaaataaacagcaatagggaatatttaccttggttagagctcatacttgatcagcaatgataagatcttctgagaaaataattacttcatgccagataactcacaagtgtcaggctgcttagctcctagacataagagccataacctcaattgaytaacgtcagctcacattatcaccatcagttaaacagcagctatttccaaattcatgcatattaacaaagttagacggaaaaaaagtctctcattggaatttccataacagtaataaaaacgcataagactctccatagaaagcttgtaagtaggaaaaacacatgagtaggaggtgatatcatcatagaaatgtcaactgggataaaaatgatgaacaatttcagtccaatataccctcctcaggatgtaaaagtcatctcaaaaacacttctctgatacacctcatttatttttgatccatattattcccttctcattcttccagaacagaaccaccaaagctcttacctgtagttcagtacctattttagctcttcataaaact

SEQ ID NO: 666171 - DNA, 500 bp, Homo sapiens
attttcagttcaatttaatgtgaattctcaaattaattttattatttaattttaatttattttgagcctatactttctttaatttgaaattctatagcatactattcttgtttgttaaactgctagctatattatattgaacagctgcagtatatacactgttgaacagattctcttacttacataggtctgcaattttaagtaacaaatatctttgaaaaagtgagtattaatattaactatttcaaacattctccacgaattattactttaaaaatagctacaatttactcgcaaaaattaaaaattaaaaaaattgctatgtcaagatcaataaaaataaatgtatctcatacaatcaataaccctgaaaaatagactctacctttgtagtgtttatgcacaagtggaaacataaagcacaatataaattattctttgaagttgcctccttgaakgtataacaatgggaaaattgtattttctataataaaagtgaa

SEQ ID NO: 666172 - DNA, 627 bp, Homo sapiens
cttcatgtcaacaacgcaaatgacaaggcctgttttacaagggtattctcaaggaaattgtaattcactgtcgtagttttgtgcaatattattgcacaacacatatttcaagcaaaaatcattatggatgctaaacaatactacaatcagcactctatctaaaattccacttaactgatcattttctcagatgtatctttttttttttttttaaccaaaaacacttttgttttggcatttgtggacaaaaaatgttactgcaacatttaacaaacactcaagacacagacttagaaatagcaatatttgtaccaaagtatttttaacattatataggcagactatcctcggcagaaaacacacccttttagaggtgttcagcaytacatgaccgttagactatgacattttacttactattaatgccacataaacagtcaattagctttggagagttctgtaataatgtatgaaaattataggaaatgaaaacataagcaaagggcttttcattaattatacagcaaagaatctgatgtgtaagataatgtagaatggaagcatagccgaggaaaatttacccaaagagaaatttaacacagtattttatcttatctgtctttcatg

SEQ ID NO: 666173 - DNA, 469 bp, Homo sapiens
ttttgcttgtgagcccagttatcaaggaacttgaatttccttccattaatccagaaaatttatttcatataactttttactggatacctagatttgtatataacttccaatgtcttattatcagcacataacttattgttctacattttcttttttcttcaggatgtgagtatgaaatctccaaaaatcagtttcatctatgggtaagatctgatggtttatagatgtgcaaagaaaaaaattatggactctaccaagacagwtgtatcttaagatatgttttctttctatagttacaaagaaataaaatgacactaggtgcctgtagtccattatttttaaaaatccaaaattttgaaataatagataattgtcatgttttattaaagcattgcccaacaagcttgccaaggaaatattcaactctccaagagaatataacattgcctgctaaactacttgccaatga

SEQ ID NO: 666174 - DNA, 599 bp, Homo sapiens
ttgataaagattgactgcaagttttctattgctgcattaacaaattactacaaacttagcacttaaatgaacaaaatattggctgggtggagtgactttaccctgttatcccagtactttggcaggccgatgcaggcagatcacctgaggtcaggagttcaagactagcctggccaacatggtgaaaccccatctctactaaaaatacaaaaaattagtcaggcgtgatggcaggcacctgyaatcccagctacttgggtagctgaggcaggagaattgcttgatcccagaagggggaggttgcagtgagtggagattgcgccatggcactccagcctgggcaacaagagtgagactctgtctcaaaaaacaaaaacacaaaaaacaaaaacaaaaaacaacaaaatattatttcacagattccttgcatcctgtgtctgggatattttatctcaggggatcaaaaggctgaaatctaggaatcactaaattgtattctcatctagaggctcaactaaggaaagatcttcttctgatctgccttatactgttggcataaattaattgcttgctgttgtaagactcaggtttctattttc

SEQ ID NO: 666175 - DNA, 599 bp, Homo sapiens
ttgataaagattgactgcaagttttctattgctgcattaacaaattactacaaacttagcacttaaatgaacaaaatattggctgggtggagtgactttaccctgttatcccagtactttggcaggccgatgcaggcagatcacctgaggtcaggagttcaagactagcctggccaacatggtgaaaccccatctctactaaaaatacaaaaaattagtcaggcgtgatggcaggcacctgtaatcccagctacttgggtagctgaggcaggagaattgcttgatcccagaagggggaggttgcagtgagtggagattgcgccatggcactccagcctgggcaacaagagtgagactcygtctcaaaaaacaaaaacacaaaaaacaaaaacaaaaaacaacaaaatattatttcacagattccttgcatcctgtgtctgggatattttatctcaggggatcaaaaggctgaaatctaggaatcactaaattgtattctcatctagaggctcaactaaggaaagatcttcttctgatctgccttatactgttggcataaattaattgcttgctgttgtaagactcaggtttctattttc

SEQ ID NO: 666176 - DNA, 615 bp, Homo sapiens
gaagagagacagagagagagaattaccattggtgactacaagaatattaccacaatagtaaattccctgcattaatgtacacttcaacagagagagaaaaccaagctcagagaagttaggactatgatgtggcycagagagcagaaaactagaaaagaataccagttgtctgggtctacaactaggtcacactgccttgctacatttcctggagtgtgatggcttttgcgcttcgtttccaggtctttttcagtgcatggaatagaaatgctgccctactttttctccaaacctgagaatattgagcagagtccatagttaaaattaataaaattcagaaattaattcttattgaaaatgcgatgatgagagtaatgagattttgattttgaattgtataaaggagtagcccttatgaattataatacttgcatttactattcctcaaaggaaggaaaatcaccgttttacagccttccaagacaattttaacttaaacctctgttttcttgctgtttgtaataatgacctttctccttaaggtttgtaatcagtgagtaatagaatagaggaacaaagagtcatgttctaataattaatgcagtgtgtagaatc

SEQ ID NO: 666177 - DNA, 616 bp, Homo sapiens
cctggcacacagtagatgctctaatctatattatttgttcaacaaatagtaattgcaattatctgacaaagtattcagttattatggagaaatatgcatctatgtatttgaccatctgcattacactggaaacggaaatggacttttttattgatacataatttccctttgaatttttgaagaccaaaataccagtggcagagagaagagatggtgtgagggagaggattttagctgccctacttccctcatataaatgtctatcagctcttcctcaatcacacacacacacacacacacacacacacacacacaarttgtattaaaatacaatatgaaattagcttcaaaagagtttcataggactttcttccaatcagatttccattctaacacagtcgttccagagctgataccatccaattactatccatttgaaataatttcaaatcttaggaacaccttaatatatcttttaattatttaataattttataaaaacacaatatgcaaaacaaaagtccaacctgaacctcttactttgtgggccttactggactaagggaaatccataactttgatgattgcaggtaaaggtatacttgaattagtgtct

SEQ ID NO: 666178 - DNA, 574 bp, Homo sapiens
agacagtcgaatattcttttttctgaaggaagtcacaacattaaaataatcatataagggagtcatcatggctttatccaaggtgatgcatttcagtcataaagtaattctttgttcttctatatcatgtyaaagaaaaataaaaaaggaagaaaataaagaaagggaaacctaagatttattaattaatatctatttgtggaataaattagggttccagacaaatacttgaagtgtaattgtcctgaaaatgtcttaaacctttactgttttatgaattgagtttaatacatactactagcaaattttttcagaagtaaaaatactctaaaatccaatattaagtcagtgatagccaaaaacttatacaaaccaaagattaaggggtgggtgtggtggttcatgtctgttaccagagcactttaggaggccaagatgggcagaccacttgagctcaggatttcaagaccaacctgggcaacgtggtgaaactccacctctatgaaaaaatacacaagttggccaggtggggtggtgcatgccagtagtgccagcaactctggaggctcagatg

SEQ ID NO: 666179 - DNA, 565 bp, Homo sapiens
aatctggaagagtacatatggtagatactcagtaagtgtttattgatgtccacaaacaaatcttcacgtgggcattctcaagtatactcttatatggatgtgatgcacttccatagatttcctgaaagacccacatgtatactatgttccttaatatgcacatcaagaatctaccaaaatactgtattcatgaatctttaactcatacttgactgcattcttgctgtccttgctttatccttgtttcagaaagttgtttgattattttctttaactgccagttgtccagatagaatgggatagtattcactcactcactggagtatatgaaaagaattctgaagaaatcttggcctcaaatgaaaggaattgccaagctaattaaagtttggcagttatggcacagcagcagagaaggcaataaactacttttgtgggtaattaagtrgtaacaaaaaaaagttgagacatttgattaggacaaaagtcatttaccttgagaaatttcaataccacacacaattttctgattgtagtagaagaaactaaaaagtaaagaaggcac

SEQ ID NO: 666180 - DNA, 610 bp, Homo sapiens
acatttgattaggacaaaagtcatttaccttgagaaatttcaataccacacacaattttctgattgtagtagaagaaactaaaaagtaaagaaggcaccatttttaaaatgaaaaaaaaaaggaaggaactacttcctactttttaaaaactgaaaattactacggcaatttgtagataccattaggaggtagtaatgtgattcaacaatattatccattttaaggaagacgtggtatttgcataaagtgcattcatgttgtcaaaatgtatttgctagcacaattatttttttttcmgtctacctttaacactactgtgaatacagaagaaatataactggggctctttataactctgatgtgaacattaaagatgtctgccttgtaagatgagtacggtaataaatggtatgttttgcatataatgtttctttgtgtgtgttggggttagaatatgggcataatggctagaatgaaaagaattctagtatacttaaatattaagtataatttgatggatcaatgaatttgtgcatgctacacatgtatattgaatgactactacatcaaacactattctacagctaggaattcggaggaataaaacag

SEQ ID NO: 666181 - DNA, 610 bp, Homo sapiens
acatttgattaggacaaaagtcatttaccttgagaaatttcaataccacacacaattttctgattgtagtagaagaaactaaaaagtaaagaaggcaccatttttaaaatgaaaaaaaaaaggaaggaactacttcctactttttaaaaactgaaaattactacggcaatttgtagataccattaggaggtagtaatgtgattcaacaatattatccattttaaggaagacgtggtatttgcataaagtgcattcatgttgtcaaaatgtatttgctagcacaattatttttttttccgtctacctttaacactactgtgaatacagaagaaatataactggggctctttataactctgatgtgaacattaaagatgtctgccttgtaagatgagtacggtaataaatggtatgttttgcatataatrtttctttgtgtgtgttggggttagaatatgggcataatggctagaatgaaaagaattctagtatacttaaatattaagtataatttgatggatcaatgaatttgtgcatgctacacatgtatattgaatgactactacatcaaacactattctacagctaggaattcggaggaataaaacag

SEQ ID NO: 666182 - DNA, 589 bp, Homo sapiens
tgaagcatccccaggcaaaatctgttcaaaatctgttcaagggacttgaaaagcaaataagtttagattaaagtgaacattatggtacattctattatttctttagaatttataagtcacatatcacagtaaaaatatatttacctatttattctctgatggaatattaataamtatgtcagattgttgtttgtgctggtcatgcttgttgattttgttggattgttagagagaaaaatatggattgctgtcacaggcttccaaaaaagatgtattatgggatagacagataattatttattctgcaatgtgcccttcttctataataatagaatttaagacacctagaataatgaacaaatttgtcagccttctttgcagcaagactaagagcttgtcaatagcacataaatgggaattttttatgtcatcctctcaaatcatctttaaggtcctcttgttgcttgttctttgctgctgcttctttttattcttcttttcctctatctttgtttagcagagtaaggcccagattacacaatctaggataagatcaatacctaaggtattgtgaagtggtcagctggaa

SEQ ID NO: 666183 - DNA, 623 bp, Homo sapiens
ttttgtaaataactatttctcaagaattgcatatgcaagatgttttctaagttattttattactgttgatgtctttaaacttttatgagtaaaatatttttaatatggttagataatagcaaatgagttcatacttttttccgttgttgtggtttaatgtcatgcaacaaatgttatcatgaaccygaaacatttaacgtatcttaaaagaatgatctctttatttacttattaaactcagttatataggtagatagtaacacttttttccttggcatacggagagactaacatccaaatagctaactttattgaatagattacactactttaaaaatctagtagatttttggagacatgctgtaggcaaaatattacctgaagctcatatcaatcaatacctatctttctctttagtaatatatttgaagaaggctttaatgtcagtgaatatacaagtactcttcctatttgcttttcatgctataactgtttttttaattatcaaaaatttccaaattgtaggaaagtaaattcctcaattttgagatgttttcattttgagataatttcatattttggtgtttcattttagtctagatgtacagaactgtaaaggaatt

SEQ ID NO: 666184 - DNA, 650 bp, Homo sapiens
tttacgttatggtcagttgatgaatgcttaaaaacaaaatctatggtaaaaccatacatgagatattgtgtaattattaagtagtatgctgcatatgtgtttttatgggccaaaatccaaattgcacaacactattcagggtatggcaatgtttacttaaaaaataagaataagaaagaacacatgcatataaacctataagacagaaaaacacatgtatataaarttgtataagacaaaatatttctacagtagctttggaaaataaaaattttttaaatggacaaaagtagtttttctctaaggaacacttgtgaagaaatcccaggaattttaccacaaaatatggcatcctggtatgctcattatttcaaattttaggtacttgaatgtcagcagattctggaagaggctctctttcccttatctatcttaagactagacccaccgtagaagacaattccttttcatccctctctgcaatctcattatttaccacagaaaagaagaccaagaaatgcaaccacacctggatagagtttttcatgagatactgtctgcctctctggctcattcaaattctaaaatgaaacacttacaacttaatttctgtctcctgggttcattcattctccctaataatcatttac

SEQ ID NO: 666185 - DNA, 581 bp, Homo sapiens
tttgtgcagttaatgcaaacatcacagggtcctgaggcgacatacatcctcagtttacgaagatgacaggattaagagattaaagtaaagacaagcataggaaattataagagtattgattggggaagtgataaatgtccatgaaatcttcacaatttattttcttctgtcacggcttcagcaggtacctccattggggtcactgacttccygcaacacacactctatcagtaagtgctttcattgcttctctactaatggtctggaataaacaatagagaaatgaagataattagttgttggggagatcttggtttgtctagctttgaagcacagcttataggaactgtcacatttttagctgtattttaagagaatcatgtgaataagatttaataaaagtcatgggagtgaataataacaactcatgatttttcaaagtggagtgttcagatccactgagagggaaaaaatgatgtataagaactgtgctcacaaatattccacttttttttcctccaagactcggtgttcccaggggagtgggtgagagggcaatgaggaccaatgatactgagcaa

SEQ ID NO: 666186 - DNA, 597 bp, Homo sapiens
tgagttgaatcatatttttttaaaaagatgaagaagaaaaacacagcctttaaaatttctctttcgatcccctttttctcttttcctgaaattctaaacctcaaggaagttgacttataagatgttccytttttaaaatcaacccactctcaaaattcctctatcagagcaatctaactttaatactatcttcataaactatgtgtttatttttttatttgcatacatttaggggtacaaatgtagttgtgttacacaggtacattgtgcagtggtgaagtctgggcttttagtgtaactatcaccctaatagtgcacattgtacctgtaaaatatgatttatccctcacatcccctcaacctcccacccttccaagcctccaatgtctgttagttcacattttatttccatgtgtacacacgatttagctcccacttataatgaagtatttgactttctgtttctgagttatttcacttaagataatgatctctacttccatccatgtttttgcaaaagacatgatttccttattttttatggctgattagtattccagggtatgtgtgtatatcacattttttaatccaatcatc

SEQ ID NO: 666187 - DNA, 570 bp, Homo sapiens
cttgtttcttgttggtgttgtcaaagattaaatggctgtaggtgtgcagttttatttctgagttttctattctgttccatcagtctatgtgtttgttttggtttyggtaccagtaccaagctattttggttgttgtagccttgcaatatcagttgaagttaaatattcaagcaatatttcaagtagtgtgatgtctccagcctgttttttttttcttttttcctttttttttttttgtttgttttttgcttattattacttgggctatttgggctcttttttggtccatataaattttggaatagttttttctaattctgtgaagaatgatgaatactgttgaaagttgggtagaaacaacattgaatatataaattgctttggacaatatagccatttttagcaaaatttattcttccaatccatgaacatggaatgttttttcatttatttttgtcatcactgagctctttcagtatcattttgtagttctccttgttgaaatatttcactcctttagttagctgcattgctaggtatttcattttctttgtggcaattttaagtgag

SEQ ID NO: 666188 - DNA, 570 bp, Homo sapiens
cttgtttcttgttggtgttgtcaaagattaaatggctgtaggtgtgcagttttatttctgagttttctattctgttccatcagtctatgtgtttgttttggtttcggtaccagtaccaagctattttggttrttgtagccttgcaatatcagttgaagttaaatattcaagcaatatttcaagtagtgtgatgtctccagcctgttttttttttcttttttcctttttttttttttgtttgttttttgcttattattacttgggctatttgggctcttttttggtccatataaattttggaatagttttttctaattctgtgaagaatgatgaatactgttgaaagttgggtagaaacaacattgaatatataaattgctttggacaatatagccatttttagcaaaatttattcttccaatccatgaacatggaatgttttttcatttatttttgtcatcactgagctctttcagtatcattttgtagttctccttgttgaaatatttcactcctttagttagctgcattgctaggtatttcattttctttgtggcaattttaagtgag

SEQ ID NO: 666189 - DNA, 570 bp, Homo sapiens
cttgtttcttgttggtgttgtcaaagattaaatggctgtaggtgtgcagttttatttctgagttttctattctgttccatcagtctatgtgtttgttttggtttcggtaccagtaccaagctattttggttgttgtagccttgcaatatcagttgaagttaaatattcaagcaatatttcaagtagtgtgatgtctccagcctgttttttttttcttttttcctttttttttttttgtttgttttttgcttattattacttgggctatttgggctcttttttggtccatataaattttggaatagttttttctaattctgtgaagaatgatgaatactgttgaaagttgggtagaaacaacattgaatatataaattgctttggacaatatagccatttttagcaaaatttattcttccaatccatgaacatggaatgttttttcatttatttttgtcatcactgagctctttcagtatcattttgtagttctccttgttgaaatatttcactcctttagttagctgcattgctaggtakttcattttctttgtggcaattttaagtgag

SEQ ID NO: 666190 - DNA, 479 bp, Homo sapiens
tttcatcatattctcatctcttgatattctttgaaaaccaccaagcaaattctaaatatccatggagcacagcttgcaaaacaatgctctaactcaatcctaatattgtacagaatattaaactgaaacagaggggtcaatcttcatttccaaagaaktattgcttactagtgacaatcatgataaaaaccagcattgctaattagcctcccagtattcttcgcatacataggtatcaacagctgtccagttgacaagtatatatattttttagaaatagtatcaatcatttattaatcaaaattaataggtggttatatttaaaagatgttgacttaagccgattaaatatgctcccatatatttatgtgatctgttaattcgcttagctaatcttctctttgttaggtcaaatataaacacatatttagagcttgtggaaaagtatcttaagttaaataattaccatctaaaaatta

SEQ ID NO: 666191 - DNA, 618 bp, Homo sapiens
aaaataaggcatcatttaaaggatctgcatggctgtatacatgataatgagaagcttgtcttatttgggaaggcatggctataatatatctgtcatgaactaagctatatactgtataaagggctgaggtagaaatgtgattcagttttaggggatttagaatgtggtgaagaatattgatagatatataagcatattttaatcatgtaagttgaaaacaaaattagtaaacttaaaactttattagaaacccaaagccccaaacaactagcttggtgactttggtcaagttacttaaccttactgggacttagttttttcacatgtaaaatgtttataaaggccatttttactttatatgtcgttttgagcaatacatttttaaaagaatggttttattggtatctgaaggcctggttccttccagggacttcaggagagactttgttcctaacctattctagcttctggtggccgccagccttccttggcttttggctgcatcactccaatttctacctcgctggtaatactcacttttcttctgtattcaacaactctctgkctccctctaataagaatagtagctattacatttaaaggctcacctgaataatc

SEQ ID NO: 666192 - DNA, 504 bp, Homo sapiens
cattttgattttgtgaataagcagatgcagtgtgggtgagsattacatcactttagcaggtgttaatttgttcataaatataccacctgtaaaaaaaaaataaactttaaaagtaggatatgtagcctctaattgctttttttcctggatcatttcattcacatcatatgataccttaaatttctcaagaaattaaatcaaacttcatgagttcacaaaacagaagacactaaaagttcagaatggatagtccctttaaagatacaactcattcaactttcattgaacttaccagtgaaagccacattggtaaatggtgggtacacaaagaacgaatgtcaaataggaacaaaaaaatacgaataggaaaaggttatgacagtccccatttgatgtttgtgttgacctatactaaacctaattgcacctcagataaatttatttttgcctagcagctaaggggactattgtatgcaattggcagcaacttactacaagaaaagc

SEQ ID NO: 666193 - DNA, 403 bp, Homo sapiens
tctcctacctcagcctcccaagtagctgggattacaggcacgcaccactatgcttggctaatttttgtatttttattggagacagggtctcaccatgtagtccaagctagtctccaactcctgacctcaaatgatccacatgtctcagcctcccaaagcgctrggattgcaagcgtgatccaccgcgcctggccagctggaggtattcttaacctgtcttctccaagatcaccatatcatctttgttgacaaatcaaatgagcacttcacctcctggaagaatttcacattttttattatctctcaatcttaaaatgatccatctcttgacttctgtaagaagttctctctcaatttttggtcaatgctataactcctttatttctttttggaaatctgtgtc

SEQ ID NO: 666194 - DNA, 549 bp, Homo sapiens
gcaaaaactaaagaaaagtatatttttgatgagtgagacagagcaagactccgtctcaaaaaaaaaaaaacaactccatacatggacacacacacaaacatataaacatttaattaatatttttgaatgaatgtatagtttcctatttatagccttacaaaacttttaacttgaagaaattaaacactgggtgaatyttctaaatgtaacatctatttgagaattaacaaaaacacgtttgaggttatagaaattatttaattctgaaaaagaatcactttagcacataaaataagtgatttttttactgctttaaaagaatttatcgctactccttttattttgtttttgttcttttcagcttactaagacataattgacaaatacaaattgcatatattaaagatatacataattatctgatatacatatacattatgaaattatttgtacaatcaaattaatatagtaattaccacatttagttgccattcccttgtatatctgcatgtgtgtgcagtgaggacacttaagacctactgtcttaat

SEQ ID NO: 666195 - DNA, 583 bp, Homo sapiens
tgtctgacttatttcagctaacaaaatatctttcataatattgttgctaataacaggatttccttcttataatattccagtgtatgaatataccacctattccttatccactcatctatcaatgaacacttagattgtttatgcattttggatattactaataatgttgcagtagaaatgaggatgtagatacttatttaagatacatatttcattttctttacgtttatatccagaagtaaaattgctggaatgcatggttgttctatttacattttttagcaatcttcatattgttttctttaaaatgcttttacaatgaacattcccaccaaaaatgtacaagccttctattttctactcatccttaacaatgctttttatctcttgtcttgttgataatagctatcctaatatgtgtcatatctcactttgaatttgttttctatttactyattgattagttatgttgaccaccttttcatatacctggcggccacttgtatatctttggaaaattttacatggagatccttaattcattttaatagagttatttgttttgttgctattgagttgtgtg

SEQ ID NO: 666196 - DNA, 613 bp, Homo sapiens
actgtcaatatatgcaccataccctgattgctaaaatataaaacaaatttattttgtaaccatttgaaatatttaatatatttaacaagatcaaggtaataaaatgtcaacctgtaaaacagaataaaatattcccaaatcatatatctgataaagaattaatatccataatatataaaaaactatgactcaataacaggaaaacaaacaatacaattttaaaaatgggtaaagtaaytgaatacacatttctccataagaagatatatcaaggccacaagcatattaaaacatgctcaacattattaatcactaggaaaatggaaatcaaaatcataatgacatacttcctacccattatgatgactaatatccaagcaaaacaaaacacaataaaacagaaaataagtattgaaaaggacatagaaaaattagaactctaaatagttcagctgttaaggaaaacagtacggaggaaccttaaaaaattaaatatagaagtaccatatgatttctcaattatacttctggatatatacacaaaagaattttaagcagggtcttgaggaaatatttgtacatccacattcatagcaaaattatttatgctatg

SEQ ID NO: 666197 - DNA, 570 bp, Homo sapiens
gttttaatataatatgctttttaattttttttgactctagcaacatattcactttatatacttstaactgtattccactaaaagatatagagatatagttagatttgagttcaaatgctggctttatcactgaaatatttttaaacattaaaattatcatgtctttgaacttgtgttcattatatctgcatcatagttagccacaaagttcaagcatcccaatatatgagggcatgcatagcatacaatgaccattcagtaaatttcactattattagtgataaaataatcaaagcttgttgaaattaaacaatataagaaaaaatgaataaattctagctgggggaaagccccttttaattcttcaacttgaaagagaatttcatgtgaaaaacagtaggcatattttcaatgtaagatctagaaatattttaccaataaagttatattttcttgtaatttttccccaaataaatattataaaaagtagctaaaaatagttgtttttctcaaaaaaaccttattctttaattttataattttacataaataagaacatgcagcttcaag

SEQ ID NO: 666198 - DNA, 570 bp, Homo sapiens
gttttaatataatatgctttttaattttttttgactctagcaacatattcactttatatacttgtaactgtattccrctaaaagatatagagatatagttagatttgagttcaaatgctggctttatcactgaaatatttttaaacattaaaattatcatgtctttgaacttgtgttcattatatctgcatcatagttagccacaaagttcaagcatcccaatatatgagggcatgcatagcatacaatgaccattcagtaaatttcactattattagtgataaaataatcaaagcttgttgaaattaaacaatataagaaaaaatgaataaattctagctgggggaaagccccttttaattcttcaacttgaaagagaatttcatgtgaaaaacagtaggcatattttcaatgtaagatctagaaatattttaccaataaagttatattttcttgtaatttttccccaaataaatattataaaaagtagctaaaaatagttgtttttctcaaaaaaaccttattctttaattttataattttacataaataagaacatgcagcttcaag

SEQ ID NO: 666199 - DNA, 570 bp, Homo sapiens
gttttaatataatatgctttttaattttttttgactctagcaacatattcactttatatacttgtaactgtattccactaaaagatatagagatatagttagatttgagttcaaatgctggctttatcactgaaatatttttaaacattaaaattatcatgtctttgaacttgtgttcattatatctgcatcatagttagccacaaagttcaagcatcccaatatatgagggcatgcatagcatacaatgaccmttcagtaaatttcactattattagtgataaaataatcaaagcttgttgaaattaaacaatataagaaaaaatgaataaattctagctgggggaaagccccttttaattcttcaacttgaaagagaatttcatgtgaaaaacagtaggcatattttcaatgtaagatctagaaatattttaccaataaagttatattttcttgtaatttttccccaaataaatattataaaaagtagctaaaaatagttgtttttctcaaaaaaaccttattctttaattttataattttacataaataagaacatgcagcttcaag

SEQ ID NO: 666200 - DNA, 558 bp, Homo sapiens
actgggaaaggcagacccacccttaatctgggtgggcaccatctaatcagctgccagcaaagccagaagataaagcaggcagaaaaacctgtaaagattagactggcctagcttcccagcctacatctttctcctgtgctggatgcttcctgccctccaacagtggactcctagttcttkagttttagagcttggactggctctccttgttcctcagcttgcagatggcctattgtgggactctgcaatcatgtgagttaatacttaataaactcccctttatatctatctatctatcctattagttctgtccctctagagaaccctgactaatacgaaacctaacttgacacttgttagtggagcagtctcagggaaatcacttaacgcatgtgaaccttgttttctcttttataaaactgaaacaatagaatctaccaggatgagttctttttaggagttaagatcataatatatgtgagatagatccatctgtctatatgtgtatctttcccttaagaacagtggttcagaattcactcattctatgttcacaga

SEQ ID NO: 666201 - DNA, 562 bp, Homo sapiens
ctctttctctgtcttttggagtagtgtcaataggattggtatcaattcttctttcaatgtctgataggattcagctgtgaatccatctggtccttgacttttttttcttggcaatttaaaaattaccctttcagtctcgctgcttgttattggtctgttcagggtttcaattttttcctggtttagtctaggaggttgtatatttccaggaatttattyatctcctctaggttttctagtttatgtgaataaaagtgttgacagtagccttgaatgacattttgcatttctatgttatcagttgtaatatctcctgtttcatttccagttgagcttattgggatcttctctcttcttttcttggttaatctcgctaatggtctgttaattgtttttatcttttcaaggaactagctttttgtttcattttttttttgtattcttttgtttcaatttcattcatttctgctctaatctttgttatttatttcttttcttctattgagtttgggtttaatttgttcttgtttctctagtgccttgaggtgtgaccttagattgt

SEQ ID NO: 666202 - DNA, 565 bp, Homo sapiens
tttctgctttattgcctcaactgttcagctggggtgtgttgagccccttctgtgtgccagggcctctgctgggcactggggagcagaagggaggagacacagacccaactctcaagaagtttgcagcgatggggaaggctgacacatsggtcagccacagctgtgctgctgggaggtgtgacagaggtcatgtcgtcgggcaagctttctggctcccctctgcaaaatgggaatatcagcaagatttactaagagtggggatgtaaagcgctaagggtgatgactggcaggtggggatatcatactacgcggtggagacgatgtaatgattatgctatcttcccagagaaatggctgggtttttccctaaaaagcccaataatgtttatatgtcaaattgtttatatattaaatgttgatatttatactccacagatagaatcataatagatcagaactaggggagccctagaagatctaatagatcctctggtcaacctccccgctatatagcatgtaattgagtttgaaaaatgctatagcaagcttgacacagatgtgggag

SEQ ID NO: 666203 - DNA, 617 bp, Homo sapiens
cattcaaccagccttcctcattgaacggtccccagcacatacaattcttcccggagagggattccgtgaataaaacatccctgtatcatcgtataagaatgccacagaagccataaccctgccagggtgggcagagaatgcaagaaaagagacattcaaataaaatggaartgacagcctgcaggagttaagtctcttcccatttttctaacccaatgactggctaagtgttctagataaggcaacttcttttctgctccacatttgtatgcaggaaaggaggctgaaggtgggccctcctccctgggaacccccaaggcctgccccctaacacagcccctgagttgtggagctccgagctaaatcggaacctgggtagagtccggtggagctgggtgaggcctgccgggcagaaatcccaagtgttatcattgctgtgcctggatccttgaggagaatgcaggccaaactcggctgaagcatctctctttggggaagttgagaaactttggcctttttccttgatgaggcctcaagaccttagttcaacactgaataaaccacactaggacactggatttgatggagtttggcagcacgatcccactgggcttcct

SEQ ID NO: 666204 - DNA, 608 bp, Homo sapiens
cctcatctagctgtggagagactccataggtcgctgtctcctgatgccctgggccacaaccaaccataaagggctgtcttggtttgagttccctgaagtcagagcctggagacaagatgttgggccttggagcaggtgaatgactaaggaagtgatcccgggagcaagaaggcatgaggagcgtgagacaagagggaaagaagccaacaaggtgaccatcactctggtctctgctgtgagcgacttgcaccaggtgcactggggaccctcgaagaaccacgcggaacataccacagattgtccctcagaggaggggagcccaggacatgtcccyagtgctcccattcccttcaggtgatgtcctcagggcaataatgccacacttccctgctgtccctgcttgcaggctgtgaaaacaacctcagctttctagaaagttctgtggcagaaacactgagatatagtgagtgcttgtgtgggaagcccaggcattggcaggatggatttgcaccagccacaggctggtcagaggaggtgggggtgacacagggcagggcccaccagcaactgccgcagctgggcggtatttaccaacccactgagggtac

SEQ ID NO: 666205 - DNA, 641 bp, Homo sapiens
gcagcacgtgcccgatgtccagtgcagggggtctcacaggacagggaagtgaccctggacgtggttcttgggatggtataaggacgctggttggtgcctggccgtatgtcctgtgagtacccaagcagtgggactcttgccaagcagccatsggggaggggagccagggccggagcagcccattcccatctgttttccatgctgtggttcttaggggagtgacttttgagacacgttggctgcttgactattccaagcctgatcccccaggaccagggttttgggggccttgcctcatgattgttggcgtgcttcaacttgttcctcctgcccttgtttcccctggtttcgtcctgtcattttcatattgcattttatgtgtcttttcatgctgccccaagtccttttgggttttgagccaggcaggatgatcagaccaactgacagcacaatgtctgcacattctctccgtcactcccacctggagggtgcaggcccggggctatgagaagcagttcaacgtggatgccgggtggggtggtctctggacaccattcccccgccaccagcatccctctaccctctcgatgccctgccacatatcctgacccccacgtccctcatgggcaatgtccccctgg

SEQ ID NO: 666206 - DNA, 399 bp, Homo sapiens
ttggcttaaaacccttctgggatccctttgtgctcaggataaagcccttttcccctttctttgccaggcttcgaggccccctgcctgcctggccaccctgacccctcacactgcctgctcacactctgctctcttcctccctattctgtcctccctgatgggcccttctgctttcttagtsctgtttactcccaggtctccacttagaagtgtctttccccaggaagccccactggtgggcttccctaccatccaggctcatcctggttatagcacccacctgctctttgaaatggaaggtttatgtgtctgtctctcttgcccctgaaagggaagaatcatgccttgttcactgttgtagcttctcacctaggacagagcttggccctagaatgtgtt

SEQ ID NO: 666207 - DNA, 567 bp, Homo sapiens
ggcaattaccaaggcaggccacctcctggaacagcttaagacaaagccctagcagccataattgcagactccgatggaacagagttgttccaagaatgtttgcaaccactgggattgcatcaccctttctctgggtcccgggctgaggcttcctaccacaggactgcggttttccagtggagagcaggcagggatttccagagctttgcctgtgggccctaagttggaggtgtccctgccccactcaatggctgtcaaccccatccagcttatctcagargaagggatagtgaggctcctaagactgcccataccaccaaaaccagaaggaggagagataataccaggaacaggaactcagtttcccctgacaactggaaggctcctttgctcctccttgggaagaagtgattccccaaaacttctatggtcctgaaccctccttctcaggaaggagaggacttcttaagacatgctgagagacacctatctcctttctcacctcagaaaagttgaatatggaataaactgtaaagggcgttgaaaacaactttctttgaacactga

SEQ ID NO: 666208 - DNA, 581 bp, Homo sapiens
cccttggtttacttacatttatgcacaatcacactgatacggtttggatctgtgtccctacccaaatcacatgttcagctgtaatccacagtgctggaggtggggcctggtgggaggtgattggatcatccgggtggtttctaatggtttagcgccatccccgtagtgctgttctggtgatagagttctcaggagatctggttgtttaaaagtgtgtagtccctcaccgtgacttcctccttctctgggcacgtaagacatgcctgcttcgcctttgccttccaccatgattrtaagtttcctgaggcctccccagaaacagaagccactgtgcttcccagacagcctgcagaaccgtgaaccaattaaacctcttttctttataaattacctagtattaggtatttctttatagcaatgtgagaatggactaacacatacacatttacacacacagtcccactgcctttgagtgtgtgtcagattttattcagtaacatttgcttatatattaatgagcttaaaattaaatattagttttttcaacatacacattttgggcacatacaatttagtcaata

SEQ ID NO: 666209 - DNA, 601 bp, Homo sapiens
aatgtcttgtcccctcatttcagagtgtatttgtttccaagttatgacaaataatttgttttcatgatttgttatctaggccatatctacctagtcggccataaatactctgtggctttaagtaaagtccatgtgtgagtgattcccaaatctgtatctttggctctaatttctccctggaacttgattcttatatctaattacctaatagaacacatcacattattacctaatatttatctcaaatttggcatgttataaagaggactctttatctcttcttgtgttctcccaaatgtatacctttctcaggctgtaaataactttaatgctttattcaaccaaaaatatgggcattctctttaattagtctgctttcctaaccctatcctgtatgtatctctctccagtaccattgtagtcataactatttttatctcttgcttaaagcaaaacagtaactcctgttttcctgattccactattgattacttccttatgatctattctcaacacaacagactcacatttagaaaaaaatayatgtcaagtaatgtcatacctgtgtaaagtaataataataataaacataagaatacaa

SEQ ID NO: 666210 - DNA, 594 bp, Homo sapiens
ttgctctctgccatgtgaggacacagtgagatggggtcatctgcaagccaggatgagaacttttgccagaatctaaattggctagcaccttgatcttggacttcccagctctataggcatgagtaaataaatttctgttgcttgaaaccaatagtctgaagtattttgttatggcttcttaagatgacaaatgcagatgacaaaatatttatattcaaaacatgtgaacaacaccagctaatcaaaagcagccccaaactggcaaaaatttgaccagctgctttctaaaaaataaattcaaatggccaactagcacatgaaaagatacttaacattataaagaaatgtccatcaatatcacaataaataccartagataaccaccagagatgctttttgaaagattaagaaaaccaagtgatgaagagaatgcacatcattattcttgttcattgcttgtgtgatttaagtgatgacagccactctggaaaatgtttggcagtttcttaaagaatttattttacacttacggtataactaagtaattcctagaaatttatccaatggagatgaaagcatatgtgcatagaaaaa

SEQ ID NO: 666211 - DNA, 609 bp, Homo sapiens
ttatctgtcaaatagagagaataacagtggatattgagcatatataacatactaggcaaaggtctaggagcttttcatatattaagttgttaattccctcaataatcctatragattattattgcaagtatttaatataagatgagggatttgaaaacggaggaatgtaataatatgtccaatgttatatactttgaagcgggtaaactttagtttatgtaatcataaaaatggaacagtacttatccccacactctcatcatgagatctactgcttagtagagtgtgtagtatatgatatttattccaaaaataatctatcatctcatttgttgtcacggggttgacccagcttaattagctaattcacagattccctttcttttttgcctgtgtataggtaacccttctcaagctgtacatatagttgaaagttccaaaatacagaattataaacagcaaagtattaaagtccatgtatcctcccccagtgccaaccaaaacacagtcattaataatatattgtgtttctatgcagttattattctttatattcccccatacacccatagactcacatacaaatgccttacttttattaaacaattt

SEQ ID NO: 666212 - DNA, 641 bp, Homo sapiens
atgtgtgtcattgcctctgaagacctggtgggacaagatgtggaggtggaaaacaatgatattcatgatccttatcctgggtaggcctaggctaatgtgtatatttatgtcctagtttttaacaagaaggtttacagagtaaaaawaaataaattaattaaaaattgaaaactagaaaaaagcttatagaataggacataaagaaaatatttttgtacagttataaaatatttgtgttttaagctgttactacaaaagagaaaaaagttttaaaaatataaaagttaatatagtaaaatagttatggtgagttaaagttaatttattactgaagaaagacaatttttaaaataaatttggtgtagcctaagtgtacggtgtttataaaatctacaatagtgtacagtaatgccccaggccttcacattcactcagcactcctttactgactcacttattgaaacttccagtcctgcaagctccatttagggtaaatgccctacataggcattctattttttaaaaaaagtttatatcctattttcactgaaaattttatatggttagaatgtttaaatacataagtgtctctgtgttccaattggccacagtattcagtacagtaacatgatgtacaagtt

SEQ ID NO: 666213 - DNA, 593 bp, Homo sapiens
tgggtatcaagaagctaacctgtgtccactagacagagcagggcgagagttccatgatcccctatagtaatgactatgccccaagccagcacgaagcagttacagaaaaaagaccattggtccctctgccccccataaagatttatgtggatcacatctctcaaggggaagatgaggcaggaaaacagggtctagaagcagggaacttaaggccaattcacacttcagctatgacaggaaatatcctctccacagtaaatgactttgtaactttacttcatcctcctcatttacatagggcataccccaagtaaccaatggaatcctctagagggtatttaaactctgcaaaattctgtaactgggcccttgagcccctatacttgggcctgctcccacactgtggagggtactttcattttcaataaatcccttcattccttccttgcttcatttgtgcattttgtccaattctttgttcacgacatcaaaaacctggacacagccgggcrcgggcgcagtgcctcacgcctgtaatcccagcactttggaaggctgaggtgggccgataacctgaggtcaggagaccagcc

SEQ ID NO: 666214 - DNA, 533 bp, Homo sapiens
ctctacctgccctggcagttagaatgatgtcctggaattgctaaactaagcttttcagaagtcaaatctgagtattattataaggaaaataacccaaaatacatgttttgtatgwttaaaaaaaaaaaaaaaagcagttgtctccctatttcactgatgcctgagatctcaagatgatatctgggaaattttcaattttatataagtcagttaagaattataggaccttgatgtatctcttcgcagcacaattttaagggacagctaaattggggttttctattttggttcctactattttagctttgaaagtcacgttaagcaatataaaaatgttgctagatgcctttttttcaggagggattgttgattatggggaaacatgaactgataagaagtagtaatacaacttcaaattaacaaattttcaaattaaagtaagaatttcttctaaaatatctaatagataaaaaagatcaaatttattcttgacatatgactagtaaatcaaactctgatagaaaagcctaatg

SEQ ID NO: 666215 - DNA, 603 bp, Homo sapiens
tgttgattatggggaaacatgaactgataagaagtagtaatacaacttcaaattaacaaattttcaaattaaagtaagaatttcttctaaaatatctaatagataaaaaagatcaaatttattcttgacatatgactagtaaatcaaactctgatagaaaagyctaatgcattcttctgtaaaatgatcatttggaatgagaaaagtagcttgtctgaaggccttagtttattcttaattatgtctggaatgcaattgcttggaaagcttgcagagtgatttcagagcaatgatattttatatattgtgacagactgaacaatcagcaggatgttgaacaaaacaatgtagtaccaaatttgctcctgaaccatcgcaaaaattatgggaatattcttttccttagaagagtaattccaagctcaagattttgtttcctcttaaaagtgaagagacattttacatcttgctctcactttacctgatgtaatgagagtacagaagatgctcagtgaaatgcatcattgcttagagagtttaaaattcatagaaatgaatgtaacagatagttttgattccaccatgaaacgcatttgtgcaaac

SEQ ID NO: 666216 - DNA, 496 bp, Homo sapiens
agttttcgaaaatcgtctaaaaataaaggcttacttcttgaatttccattaaaataattatagtaagactgtacttcttaaaatttttatttcatttttatgttttaatctaggccccaaagaaccattttcttcaaaaatatcattttatttaattaacatatatatgaaaaagcccataaggctaaactttaatagggttcatatttactgtatttaagccagagaaagtaaaacaacaagaatactgtttttaaaatgcagaattctccatgcrcgtacaagattttacaaagcgaactctgttagatgaggggcaaaaaagttgtaaactaatagtttttcattaaattcaccttagtttccttcttttatcagcaagtggcctttgttgtagtgttcttggcatcttttctgtcatgaataacctgacaccattttctatcctatttaattatcctctctggcttaaagcataatcagcatcaaaccagct

SEQ ID NO: 666217 - DNA, 640 bp, Homo sapiens
actatttaacttcatgtatgaaatctcagacaacagcaggatttaaagaaataaaactttgggtaatgactagtaaaatttcctttaacagataccacgcctgcaattatgggattcttcctacactacgtcatgcaatgctgtctgagtttctatgctctttgtttataaaagtattaagactatcagtaaaagaagttgataattcagataaagaaagtaattttattggatacaattagatacagattttggagaggacactgaacatgagctgtgggcaactgaagaaaaaaaattaagggcttagggtaagtaaattagatctgcaaaactattcttcaaactttyagaatgagggcaggatcttaaatttttattgttacgtttatatacctaaagcgtcgattttaatgttacttcttttccaaaataaaatattaaaaaatggaaaagtaaaggactagagagtagtaaaatagatgtctacatgggttgaaattaatatcaaagtaatatgtagagataagtaaaacaaattgtgtgaagattattattcatttaaattaaattttaaaatcaaagataattttttaaaaaatcatattggtggtaaaattgatgatatatcaaaatatcg

SEQ ID NO: 666218 - DNA, 640 bp, Homo sapiens
actatttaacttcatgtatgaaatctcagacaacagcaggatttaaagaaataaaactttgggtaatgactagtaaaatttcctttaacagataccacgcctgcaattatgggattcttcctacactacgtcatgcaatgctgtctgagtttctatgctctttgtttataaaagtattaagactatcagtaaaagaagttgataattcagataaagaaagtaattttattggatacaattagatacagattttggagaggacactgaacatgagctgtgggcaactgaagaaaaaaaattaagggcttagggtaagtaaattagatctgcaaaactattcttcaaacttttagaatgagggcagkatcttaaatttttattgttacgtttatatacctaaagcgtcgattttaatgttacttcttttccaaaataaaatattaaaaaatggaaaagtaaaggactagagagtagtaaaatagatgtctacatgggttgaaattaatatcaaagtaatatgtagagataagtaaaacaaattgtgtgaagattattattcatttaaattaaattttaaaatcaaagataattttttaaaaaatcatattggtggtaaaattgatgatatatcaaaatatcg

SEQ ID NO: 666219 - DNA, 550 bp, Homo sapiens
gtaagggagaatcggcttcaacttaaaagtcatcagctgcattagtccctcacaagagatctgcctctctgcactaatcctttgcagttttgaagccagacattgacttctttccagccatgaaagttttagatggcatatttttgcaacagaaagctgtttcatctgcattgaaaatctgttgttagcatagccaccttcctccattatctcagttagatcttctggaaagtttgctgcagcctccacatccgcacttgctgctttaccttgcactcatgttatgaggatgacttctttccttaaacttcataagccaacaattgctaatttcaaccttttcctctgaagctttsccatccctctgacacttcacagaattaaagagagtagcacttttaatttccttcaagaattttttcctttgttttcacaacttggctaactattcagcacaagtggcctagattgcatcctatctgagctttctatatatcttcctcactgaacataatcatttctagcttttgacttaaagtgggagatatgc

SEQ ID NO: 666220 - DNA, 580 bp, Homo sapiens
atgtcaaattccaaagtctttacttctggtatctttttaagccaatatgccaatgtattggacatggcaactttgagatagctaagccaatctttatattttgaaattgaatccaaaataaaatctaaaatctcttctttgttctagtaactttccatccaaaagtcttagttttctagaaagacacttattgcaaattctraacatcttaattgttttttctccactatatattttaagtaaatcttatctaggaaaatgtctagtgtcttagaatgttcattgagaaaaatcttagtatcctaaaattacaggttattctagtaatttctactaactgaaaataatttaacatttcaaatcactatcaaatgatttggtattaaaatatctcattcttataatatgtatgaacacatgtttgatcaacattgtctggtggtgaaacttaactgttgcataatataatggattatttaagactccaaggatattccttcagtgtttagcataatacattccaatggtgatccaacaattaataagtttaggtgtgtctggaacaatattactggattaa

SEQ ID NO: 666221 - DNA, 485 bp, Homo sapiens
tctgtctttcccacgacatactgaattattgaaggttaatgactatacacatatatgggtatattaatacataaacacacaactctctataaattagaggggcctaatattggctgtttcctgatagctgagtcagagtaaaaatctagtggatgctaacaagatttatgatagtctttcttgaaagactagacattgcaaatatgaatggttgtatatttttaaataaagtatttttttagaaaaacttttctggaagattttcttgatatttctaaatttacttttagtatagctctttmaatgataaagtgtactaaaagtcatatttacttcatttcaaaaaatacttcaaatcaaaaaataaaacggaaagatgaacttcatcagtagctgctgtagttgcaaaaagctatatgaagacatgaaaaaccaattaatagtaaggaatggatcagaataaaaataatgattgttatatattc

SEQ ID NO: 666222 - DNA, 589 bp, Homo sapiens
cagcaggtgaattttatggataataatattgtgtccagagtttattccttctgaagggttcttggtctcgctgacctcaagaatgaagccacggaccttcrtggtgagtgttacagctcttaaagatggtgtgtccagagtttgctccttcagaggtgtcgagtttcttccttccagtgggttcgtggtctcactgactaaaggaatgaagccgcagaccctcacagtgagtgttacagctcataaaggtagtgcagacccaaagagtgagcagcagcaagatttattgtgaagaatgaaaggacaaagcttccacagcgtgaaaggggacccaagcggattgccactgctggcctgggttgccaacttttattcccttatttggccccgcccatatactactgattggtacacttcacagagtgctgattggtccattttacagagtgctgattggtccattttacagagtgctgattggtgcatttacaatcttttagctagacacagagcactgaatggtgcgttttacagagtgctgtttggtgcatttacaatcctttagctagacacagagcgctgattggtg

SEQ ID NO: 666223 - DNA, 595 bp, Homo sapiens
caaactcttccttagggaaaacttcatgcaataatatattttgtttgagctaccttacyccttagacaatctgcagtttttctccttttataaaccaattaatccgggatttgtcaattctttagccaactattagtggcaagtgacttctgttcaccaataaaacaaattttttctacctacctgatgtagagaaataaatggaagacaacaaaatcaaacaaaataaataaaaactaaattgtgagcttcacttatctatttacttcataatgcacagcacatcaagctactccagaaaatgttcaatggatgtgtaaaatgtatagattgtggtcacagttttactatttaagcctttacggtttagaaattattcaaaatgaaattgactggtacaatataaactcagtcatctcattcactggaaggttttttgatttccattttaaatatatgttttaagttttcttaaaatcttttcttcaagctaaatagttcatttaggattgagactctgtaacaatacaattatggttgtatgttagaaatgtcaaagcagtcagttttaaatttcttttaaatgtgatatagt

SEQ ID NO: 666224 - DNA, 595 bp, Homo sapiens
caaactcttccttagggaaaacttcatgcaataatatattttgtttgagctaccttactccttagacaatctgcagtttttctccttttataaaccaattaatcygggatttgtcaattctttagccaactattagtggcaagtgacttctgttcaccaataaaacaaattttttctacctacctgatgtagagaaataaatggaagacaacaaaatcaaacaaaataaataaaaactaaattgtgagcttcacttatctatttacttcataatgcacagcacatcaagctactccagaaaatgttcaatggatgtgtaaaatgtatagattgtggtcacagttttactatttaagcctttacggtttagaaattattcaaaatgaaattgactggtacaatataaactcagtcatctcattcactggaaggttttttgatttccattttaaatatatgttttaagttttcttaaaatcttttcttcaagctaaatagttcatttaggattgagactctgtaacaatacaattatggttgtatgttagaaatgtcaaagcagtcagttttaaatttcttttaaatgtgatatagt

SEQ ID NO: 666225 - DNA, 597 bp, Homo sapiens
acaaatttctaattgatttagctgaaactttacactstctatgtagcacaggtaaaaaaaccttcagggcaatattccctagagttcaagtggctttataccattattatgacatatatcaaggttttctgtatgtggttagttacattttgtccaccacagaatactctgaagaaacaaaaatgaaatgagaatattcactacataagtatgttctataacatcatgaattttaagtaccttaagcattgtcaaaaggaatgtgtctcactcaactacaattaattctctatattcacacaaataactacagtatattttctaaatttttctgccaaattaatagaaatactcctgatatcaagtagacacttgatttccacaggctacagattacttaaaaattaacttattgtccatcacatttaaatgaaactgaatcaaaatatcacatctaaatcaaattatactttggtccaaaacttgcttctttacctctccttatttagaatctacaatgggccttttttgttggttttgttttttgttttcctctctcatgttggtgtctctaattattctatactctaaactact

SEQ ID NO: 666226 - DNA, 597 bp, Homo sapiens
acaaatttctaattgatttagctgaaactttacactctctatgtagcacaggtaaaaaaaccttcagggcaatattccctagagttcaagtggctttataccattattatgacatatatcaaggttttctgtatgtggttagwtacattttgtccaccacagaatactctgaagaaacaaaaatgaaatgagaatattcactacataagtatgttctataacatcatgaattttaagtaccttaagcattgtcaaaaggaatgtgtctcactcaactacaattaattctctatattcacacaaataactacagtatattttctaaatttttctgccaaattaatagaaatactcctgatatcaagtagacacttgatttccacaggctacagattacttaaaaattaacttattgtccatcacatttaaatgaaactgaatcaaaatatcacatctaaatcaaattatactttggtccaaaacttgcttctttacctctccttatttagaatctacaatgggccttttttgttggttttgttttttgttttcctctctcatgttggtgtctctaattattctatactctaaactact

SEQ ID NO: 666227 - DNA, 600 bp, Homo sapiens
gtaaagtataaaaccttgccagtagttatagaggaatactctgttggttcatggatgagcaattttaattttttgaatgtattttttaaattactaatttctcatttattttaatctaatttcagaattatcagtgcacaagtttattccgtgaatctctccttccgttgctcagaaaaagaatatgacactgtagtaaaggccacacagtattgccaaaaaaaaaaaaaaaactgtaatgaggaaaatgaggaacagtttgatagaagcaaaaaaaaaaaataagaaaagaaaatatgactcgggcaattcaactttttatgaaatgcaaagcaagtatctttaatttagctcaaatgatctcaattcattaagaaaaattaaaaaggcctttgcagagtcttaaaagcactgcaatacagagtgaaatataaatatatatacaaccactattctctacattaraaattgtaataaggcttcctaaggctgaagatgttaaatgatgaggttcaagccttgcagccttcagcatcagcaagattgatcagttagataatgcaaatataagcattttggtgcctttgcacccttatttca

SEQ ID NO: 666228 - DNA, 607 bp, Homo sapiens
tctttgttaacattttcctgctgggtttgyaacactctgtttgtcccttagtcccaggataccaatatagagtgtagggttggttatagccaggttttcaagaaccacattctcccttgtatggctgctatctattccttaagctggaagtgtaacatgcatacatgtcgcaatggcaaatttttacccaagtttctgtttgatttgcattctggactacactcctgtcagctgctgttcactgttgcaagaagaattttatcagagctgtttactgttagagcaccttgcattgggactcttattttttatagagagcaggaaacactgtagagcattcgtaggttatattaaacttaggctaatggtttttaaggctaaatgttaacaattcctcacatctgtgcaagagcatatgttcaaagtctctttcacctacttcagaagcatatgaatgtgtacccacactgtcataaatatcgtgacagaagagatcaactcctatacacttggtgtattagtctgcttttacgctgctgataaagacatatcggagactgggaagaaaagtcggtttaatttgacttacatttccccatggctgggg

SEQ ID NO: 666229 - DNA, 574 bp, Homo sapiens
ccagcccccatgattcaattacctccccttgggtaggaatcacttggtgggattcacaacacgtgggaattctgggagatataatagaagttgagatttgaatggggacacagccaaaccatgtcacttggagatacccagaactttctctctgaagtttaacacttacatgactcttctaccaatcttacataaagcttgcatacactgactagactttttcctacactttgaaacatgagtgtagaatttatggcatacccctaaaatatctttaaaaactttataatatgaattataatgtataacaggcagagtatattttaggtgatgttcgtattttctgttttmcttacaatgaaggctattaataactatgcaacaaaacaacatatacttctatattttaatagtttaagaatatttgccaaaattaggataaatttatacattaaattatttgcagatcattttgagccctgtcatctgtagctattatcagatagagaaccacatttctaaaagtagtattagaaaaatttcatacctttgtaagtgcaagcaaaaacctaaa

SEQ ID NO: 666230 - DNA, 629 bp, Homo sapiens
attgggcagttgtaatttccctttgaccttaatcactgggcatggtaatactaagagacaccctaatggatctcctgtattccatgcatactcttccttacctctgctgtggagtagtagactgatttcatcttgataatataggtcagtcaccccagcaaacactgtaactcccttcttagcctgttgacttaaaggtaggaggagcccaaagtgtccaagtgacaatcttaacttccagtttaatgaaattgttgttgtgtctcctggtggcagcattcctccctctggaactaagacctctaagcgatcggaacataatgtcgcaggaacaggaagcaaaaattttgttagtggatcactgggtgatggtgagtggtgccacttccacctccaccccttaattgctggacctatgaatgctggctatgggagaaacagtaccatatatttggacacagattcagagcatacacggccttctggagaattttgccccagccctacaaagaatgtcacctagttggtattgtaattgtgacttcaaaaggccattccaccattctatcaattcagytgcttcaggatgatggagaacatggtaagaacagtaaattccatgagcatga

SEQ ID NO: 666231 - DNA, 516 bp, Homo sapiens
gcttgctcacagtgggccatcttttaatccacatttcagctaaccaaggaaataaactattggaaccttttttaactccccaagcaatattaaatgcagagtccctacttactgggcccaaaccaataaattcaggctgatccaactctatgttccttccatccttatcccacacccttcatatccattcccatgcctgttctccagatttctattgatataaattagaaaacttgagcagttttttcttagtgtagtgcacctccttatgggtcagactctcaatmtcacctctaggggcctactgggactttagttataggtctagaagcaaacaggagaattgggggtggctcctgaggagaatcaacattatcttgcctggtaactgcctcaggggaggccatcactgttgtctcaggtagcacagggtttatctcctcagacaaagctggaaagactgatggcagcatgggtcagggaggggatgtcgccactactggggatggggaagct

SEQ ID NO: 666232 - DNA, 529 bp, Homo sapiens
cataaacatgtcatatatatttatatatgtttatatatttatgttatatatacctaaattaatatgtcatatacatttatgttatatatttatatayaaaatatgaaatataatgtaaaacaatatattatatataagatatataatatgttatataatatgatatcttttattgatatataatatcaattatgttatattgttatattatatgttatctattttaattataattatattattaaattattatattataaaatatatcatattatatagtataattataattacaatattatattataatatgttactaattactatgtattgaatattcaaactatatattttattatatataacaatatatttatatatttaacatgaaactatatatatttaactaataactatatataatttgaaattatttcttataaatagcatggtagatattgatgtgtttgcaatatagtaggacactggaaatatgtatcatttcaaaaaattattataaaaatgtttg

SEQ ID NO: 666233 - DNA, 481 bp, Homo sapiens
tcagcacttcctgtggttcctgccccctactcttttggttagtgctatggctgctgggctgttggttttaacccttcatatgctactgatgtcaaagtctaataggagagaatttctcagtgtccttgcagaacagtaaaagatgaacagcttccccaaaggaggcttcctagaaacattaatttatgggacataaaacaaccaactagaatacagagacacagaaggaggatggagaagagagggagaacaagaaataaaggggctatctagattttaaaagtcaataattagtctgcttttagcattactaagatcagattgggccagraggtgagcaatctcctgaaatataaggaaaaatatcaggatataatttctgtagatgaaattcaaccaagagactggacttagtgcttctgatcctaaacaaatcctgaaaaacagtctcaaaaggcaggattgatgggataaaattgag

SEQ ID NO: 666234 - DNA, 598 bp, Homo sapiens
atttataaagaaagaggtttaattgactcacagttcagcatggctggggaggccttaggaaacttacaatcatggcagaagagaaagtaaacatgtccttcttcacatgatggcagcaaggagaataagcaaaagggggaaaagccccttataaaaccatcagaaktcactcattatcacaggaagagcattaaagtaactgcccccatgattcgattacctcccaccaggtcactcccacaacacatggggattatgggaactattaatcatcttaatacaattcaagatgagatgtgtgtggggacacagccaaaccatatcacatgttatatgactattgtaccctgaaccttcactacttgaggggaggggccattgctaatcatgtagttcataaaagtgccatggcccaaggttgcagtctgtctctaggagtctgctgtctggccctgttaagcctctgtgctctgccctagaatgcaatggattacagggccctgcacaactgctactgcttctatctttatgagctctatttatttattcatttagccagttctgatgtgtgtgataaatggcattttcactttttacc

SEQ ID NO: 666235 - DNA, 598 bp, Homo sapiens
atttataaagaaagaggtttaattgactcacagttcagcatggctggggaggccttaggaaacttacaatcatggcagaagagaaagtaaacatgtccttcttcacatgatggcagcaaggagaataagcaaaagggggaaaagccccttataaaaccatcagaattcactcattatcacaggaagagcattaaagtaactgcccccatgattcgattacctcccaccaggtcactcccacaacacatggggattatgggaactattaatcatcttaatacaattcaagatgagatgtgtgtggggacacagccaaaccatatcacatgttatatgactatygtaccctgaaccttcactacttgaggggaggggccattgctaatcatgtagttcataaaagtgccatggcccaaggttgcagtctgtctctaggagtctgctgtctggccctgttaagcctctgtgctctgccctagaatgcaatggattacagggccctgcacaactgctactgcttctatctttatgagctctatttatttattcatttagccagttctgatgtgtgtgataaatggcattttcactttttacc

SEQ ID NO: 666236 - DNA, 598 bp, Homo sapiens
atttataaagaaagaggtttaattgactcacagttcagcatggctggggaggccttaggaaacttacaatcatggcagaagagaaagtaaacatgtccttcttcacatgatggcagcaaggagaataagcaaaagggggaaaagccccttataaaaccatcagaattcactcattatcacaggaagagcattaaagtaactgcccccatgattcgattacctcccaccaggtcactcccacaacacatggggattatgggaactattaatcatcttaatacaattcaagatgagatgtgtgtggggacacagccaaaccatatcacatgttatatgactattgtaccctgaaccttcactacttgaggggaggggccattgctaatcaygtagttcataaaagtgccatggcccaaggttgcagtctgtctctaggagtctgctgtctggccctgttaagcctctgtgctctgccctagaatgcaatggattacagggccctgcacaactgctactgcttctatctttatgagctctatttatttattcatttagccagttctgatgtgtgtgataaatggcattttcactttttacc

SEQ ID NO: 666237 - DNA, 544 bp, Homo sapiens
aactaagactggtctcaaattttgrggattctcattttggtaaccacggagaaattgagtggaggtgcccctcctgacctttgagaaatcttctattggtgcttggtaccagcatgagctatctttatggctcaaaccaatattacaatttgctgaggtctgggagcacccccccagagtatcctggtctcccaaatttggtcatgatctaaagtttattttgctgtacaactcccttttttggggggttttacttgcttccaacaaggaaggcaagttttcctgcttccataatgatggaaggcagaaaactcctttacggagtttgagctcattttcaacagggaagatgagttttgtttcctgcttctaggatgatagagagccgtctccagcatgagacacatccctaggtaagtacctgaattggggttttgtctttgctaaagttaacaaccagctggtcttaagttctccttaccattacagcactcagtaatcatgtaagttgtgcaatcatttgttttgcttaactggttttgtt

SEQ ID NO: 666238 - DNA, 523 bp, Homo sapiens
agaaattaaagctattcaacccctcaaggtccagggactatcacagaagaggtggacatgtaagattctaagggccaattttgaaagataaaataagttcagyttctctataaattaatcattaatgtcaagaccattgatgcaagacctacatataggcccctgtgtcagattaacaaggttttcttgaagtattaactgactcctaaataaagattataaaggttatgaaagggtcttacggaagttatatcttatcattaagattaaaattttacagattgtttataaaattttgaaaaacaaatttaattggcttcatgctgtttttattaggacttattgtttggaaaattaagactcctctatcaaagaaggaaggttttcaccttttttttttaatctttgagttatcactttagtcaaatgaatgacttattttgcaatgacctgtgatatcaagtgttttaaaccttttatatttgacaaactttccaaaatcaaattataaattatgtctttt

SEQ ID NO: 666239 - DNA, 657 bp, Homo sapiens
atgggcttggataatagtatgcaaaataacaagcagcaaggttgccattttgcccctcaaattatatcatcctaacaaagaggcagtctatgcttgccaagatcaaataggaatatctttgagaacattgtaccctaggcttatagacccttcattttcacatatatggtatatacatatatatgtgtgtgtgtgtgtgtgtgtgtgtatatatatgtatataaaatttgtttaagacagggactyactctatctcccaggctggagtgcagtagtactatcacggctcactgcagccttgacctcttgggctcaagtgatcctcccactttagcctccctagtagctggaattacaggcacataccaccatgcccagcaaattttatagactctttgacaatcagatttaacacctaagagctctagggctccacattctccttgtgtagtcccataacacagtggttctcaaactttgtcagtcatgagaatcacctggaggtcttgatgaaacacagattgctgggccccaccctcagagtttctgattcagtaggcctagggtggagcccaagaatttgcagaaataagtgatactgacaccacttatctaaaggctacattttgggaaccactgccataatctgttgcactg

SEQ ID NO: 666240 - DNA, 581 bp, Homo sapiens
aatctgcttacaggaccagctagaagcaaattcagaccacctgtgagaggragtctagcagtgggtacgcacactttggcacacacatggcacatgtgaatgatatgctctaatctatgcatttgggctcatttgccacaaaacttcctgacagaagtagtgtgtgtgtgtgtgtgtgtgtgtgtgtgtgagagagagagagagagagagagatgcagtaaaacacatttctgcacatttagaactgaaacagttcaaatcactgacattattaaatttactatcataagcagccaaagttcatcttattcatcaggaaaaaagtgactgatgtttcgtggcattagtattagatcattttggttcttgccaataaaaacaaagcattagtgtttcaatgttttaatatcatgatttaattctctcaatgatattaggaccaagaagctcaaccaacgtgaagaccccatcaaaattcttgagtcaaaactatggttctgaaatgagttcaccgtcctgacctcccatttcacagtatatattttatgcttgtgactttccaaatatgggctcttaacatt

SEQ ID NO: 666241 - DNA, 581 bp, Homo sapiens
aatctgcttacaggaccagctagaagcaaattcagaccacctgtgagaggaagtctagcagtgggtacgcacactttggcacacacatggcacatgtgaatgatatgctctaatctatgcatttgggctcatttgccacaaaacttcctgacagaagtagtgtgtgtgtgtgtgtgtgtgtgtgtgtgtgagagagagagagagagagagagatgcagtaaaacacatttctgcacatttagaactgaaacagttcaaatcactgacattattaaatttactatcataagcagccaaagttcatcttattcatcaggaaaaaagtgactgatgtttcgtggcattagtattagatcattttggttcttgccaataaaaacaaagcattagtgtttcaatgttttaatatcatgatttaattctctcaatgatattaggaccaagaagctcaaccaacgtgaagaccccatcaaaattcttgagtcaaaactatggttctgaaatgagttcaccrtcctgacctcccatttcacagtatatattttatgcttgtgactttccaaatatgggctcttaacatt

SEQ ID NO: 666242 - DNA, 565 bp, Homo sapiens
cttgttacctggttggagtgcggtggcacgatcttggctcactgcaacctctgcctcccgggttcaagcaattctcctgcctcaggctcccgagtagctggaattttataggccaccatgcccagctaactttttgtgtttttagtagagacagggtttcaccatgttggctaggctgcatttgaactcctgacctcagttgatccatccayctcagcctcccaaagtcctgggattacgtgatacatatttttaaggttcttctgttaaggtagacttcacaggattttattatcccacgaccatatccctgattacaggcatttcagtatgacatttaatttaagaatctttcagaaatattaacatatttgaacacaaataccttattaggaggatttgtgaattattttttgcatcaaaatctgatttttgtaattgttaaatacactgaatacagtctgagtgaatatttgagcagctgggaaaaactaccagggtaggtcagagtgtttagggtttaatgtgtgacaagaaaaagtacctttagataattattgaaatt

SEQ ID NO: 666243 - DNA, 611 bp, Homo sapiens
acatgtgccctacacacacatatttaaagacatccatttttgttatcaacctgaataaagatgcccacctgagaaaaaagcactgttaccaaggcatctgattcagattttagccaatatagagttatgatgaatggggtattggggatactaggtagagagagagtttaaagggcaatgaaatttgttgccaacacaggaacctccttcttcagggtgttctacattcagtttcattacattttcttcatctttttttctaytgtgttgtagcctgagaaatctggatactcatattatccttgtattcctcaccttgaaatgttttatccaagtttcattggtctgcatgtgttatgctgagtgagacattgtatcagcataaaatattgggctatatttgttgttgcctttattattgccatcaataaccttgttcaaggaagatttagaaaagacttagaatcctttctgtgtaatttaagatgctgtattgggttcatcctgtaatacagactcaataagtgtttgttgaagtgttgagtaaacaaattttgcttaagaagaaaagaacagattaatatgtttcatttgtttaatgcatataattg

SEQ ID NO: 666244 - DNA, 361 bp, Homo sapiens
tggagacagtaaaatgatcagtggttgcctttggttaagcaggagataaggatgagtaggaggcacacagagaatttttagggaaatgaagctattcagtgtgatactgtaatggtgaacacatgctgttgtgcatttgtccaaagccatagaatgtgcaataccaggagttattcctaatgtaaactatgggctttaggtgacaacgatgagtcaatgtaggttcatcaactttaacaaattgcaccacactggcgcaggattttgatggtcagggaggctatgcatgtgtggggatataggaactctgtactttctgcccgattttgccataarcctaaaattgttctaaaaaaaaaaa

SEQ ID NO: 666245 - DNA, 616 bp, Homo sapiens
cttttgtcaacatgaatggattaatgcaattattgcagagtggcatcatttttatgagtgggatccttataaagggtgagtttggttccttctctagctcacgctctctcacccatgaaatcccttccaccatgctataatacagcaagaaaaccctcactagacatgacccttcaatctcagacttccgtcagactcatgagccaaattagtttctgttcattacaaattaccaagtctgtggcattttgttatagcagcataaaacagtctaagacaggaagtatgaagataaaaaataatgaaataataatttccactggataatatatcaagaatgtcttcaataataatagggaattctaacaaagagctaacaatatatttgtggagaaagattagaggcatagacttagataaagtgaatggtaagtgcaaagtaagtgtccatcaatgatatacaaattcaaacaatgtaattattagtgataattgagacagttgggaaacactgtgatgatgaaatgattttaactggagatraaaataaaagtgtattatttcaacaagtaaagatactcaagagattattaggaggcagaagcaagtgagcaga

SEQ ID NO: 666246 - DNA, 547 bp, Homo sapiens
gtccacatcaaaaagttagatctcaaatgaacaacctaacatcacaacaataacaacaacaaactagagaagcaagaaaccaaactcaaagctagcagaagaaaagaaataaccaaaatcaaagctgaaatgaaatagattgggacacaaaaattactcaaaaattaatgaatccaaagttttgttttgtgaaaaaaaataataaggtagatagacaactagctagactgacrgagaagaaaagagagactatccaaatgaacacaatttgaaacaacaaagaggagtttatcactaaccccacaggaacaaataaccatcaaaccagaacacctctatgcacaccaactagaagacttagaagaaatggataaagtactgggcacatacaccctcccaagactaaatcatgaaataattgaatccctgaacagaccaataatggactctaaaattcaatcagtaataaatagcctaccaactgaataaaagcccaggacccaatggattcacagccacattctaccagatgtacaaggaaaaacag

SEQ ID NO: 666247 - DNA, 547 bp, Homo sapiens
gtccacatcaaaaagttagatctcaaatgaacaacctaacatcacaacaataacaacaacaaactagagaagcaagaaaccaaactcaaagctagcagaagaaaagaaataaccaaaatcaaagctgaaatgaaatagattgggacacaaaaattactcaaaaattaatgaatccaaagttttgttttgtgaaaaaaaataataaggtagatagacaactagctagactgacagagaagaaaagagagactatccaaatgaacacaatttgaaacaacaaagaggagtttatcactaaccccacaggaacaaataaccatcaaaccagaacacctctatgcacaccaactagaagacttagaagaaatggataaagtactgggcacatacaccctcccaagactaaatcatgaaataattgaayccctgaacagaccaataatggactctaaaattcaatcagtaataaatagcctaccaactgaataaaagcccaggacccaatggattcacagccacattctaccagatgtacaaggaaaaacag

SEQ ID NO: 666248 - DNA, 622 bp, Homo sapiens
tgagaaaaatgtaaataaatgtaacgatgcagtattaagtcataattacataaaattaattgtagtacatatcatactgctgtaatagtattatagccacctcttattgctattgtggttcactcaagtgttgcaagaatcaacttaaaatgtcattattttctctgtgtgagcaacctgtccagtaaactgcatatttcaataaacatgatctcttaaagttcttattttttttttaatcatgtttagtacaatactgtaaaccttgagtaacactctgggacccatgcaaagtgccacagtgatgcttgaagtgacaccgagaagcagagaaaagtcawgatattacaagaaaaagttgaattgcttggtatatactgtagattgagatctgcagctatggttgcccaccatttcaagatgaatgaatgtagcatagggaccattgtaaaaaaaaaaaattcctgaaactgttgttgcatctatgccagcaggagtggaaaccttgtactttttgcaaagtatatttgtatcttatattgaacatgtggcttatatgtgagtgcaggattgctataataaagacatacctatagactttaatataatttgagaaaaaatg

SEQ ID NO: 666249 - DNA, 583 bp, Homo sapiens
gtctcttccacttatgagcctgtaaaatcaaaagcaagttaattactttcaatatacaatgagggtacaagcattggataaatgctcccatttcaaatgtgaaattggccaaaacaaaggggccacaggccttatgccagtccaaaacccaacagggcagtcattaaatcttaaaattccaaattctcctttgaatccatgtctcacattcaggacacactgaagcaagggggcacccccacagccctgggcagccctgcccctgtgactctgcagggtacagcccctgtggttgctttcatgggctcgtgttgagtgcttatggctttctcaagtgcatggtgcaagctgtcagtggatctacmttactgggctctggaagatggtggtcttcttcttacagctccactaagcagtgccccagtggggactctgtgtagaggctccaaccccacatttcctttacacactaccctagcagaggttttccataagggctccaccactgcagcagacttctgcctgaacatcaagacattttcatacatcctccaaaatctagggagaggttcccaaacttcaa

SEQ ID NO: 666250 - DNA, 546 bp, Homo sapiens
cttcctgaaattattcccaaaaattgaggaagagggactcctccctaactcattctaggaagccagcattactctgatatcaagcctggaagagacataacaaaaataaaaaataaaatttcaggtggataaagaaacaagayccaacttatactgtcttcaagagaccagtctaacaatattgatgataaacataggtgcaaaaattctcacaaaatacaagcaaatcaaatttatcagcagatcagaaactaatccactataatcacataaggtttattcctgagatgcaaggttggctcaacatatgataatcaataaatgtgatttatcacataaacaggactaaaaaaaatcacatgaacatctcaatagctgataaaatgtgacatcccttgatgttaaaaaactatcaacaagttaacatcaaaccaacataagttaaatcaataagagccatctatctcacacctaaaaccaacattgtatagaacaggcaaaagcttgaagcattccccttgagaattagaataagacaaggatgct

SEQ ID NO: 666251 - DNA, 586 bp, Homo sapiens
ttgctggtgggaatggaaattagttaaggcactttgggaagcagtttggagtttctcaaagaacttaaaacagaactaccatttgaccaagcaatcccattacctggttttcactcaataaatagaaatatttttgccataaatacacgtgtatgcatatgttcatttcagcactattcacaatagcaaagacatggaatcaacctaaatgcccatgaatggtgggctggttaaagaaaattttgtacacatacacmatggaatacaacgtagccataaaaaatgaatgggatcatgtcccctggagcaaagttgatacagttgtagtacattatcataagcaaattaacaaagaaatcaaaaaccaaataccgcatgctctcacataaggggagctaaacattcagtacacatgagcacaatgaagggtacaatagacactggagcctacttgagggtggaggatgggaggagagtgaggattgaaaaactacctatcaggtactatgcttattaccttggtgatgaaataatctgtaaaccgaacccccatgacctgctatttattcatatcacaaaccggtac

SEQ ID NO: 666252 - DNA, 586 bp, Homo sapiens
ttgctggtgggaatggaaattagttaaggcactttgggaagcagtttggagtttctcaaagaacttaaaacagaactaccatttgaccaagcaatcccattacctggttttcactcaataaatagaaatatttttgccataaatacacgtgtatgcatatgttcatttcagcactattcacaatagcaaagacatggaatcaacctaaatgcccatgaatggtgggctggttaaagaaaattttgtacacatacaccatggaatacaacgtagccataaaaaatgaatgggatcatgtcccctggagcaaagttgatacagttgtagtacattatcataagcaaattaacaaagaaatcraaaaccaaataccgcatgctctcacataaggggagctaaacattcagtacacatgagcacaatgaagggtacaatagacactggagcctacttgagggtggaggatgggaggagagtgaggattgaaaaactacctatcaggtactatgcttattaccttggtgatgaaataatctgtaaaccgaacccccatgacctgctatttattcatatcacaaaccggtac

SEQ ID NO: 666253 - DNA, 586 bp, Homo sapiens
ttgctggtgggaatggaaattagttaaggcactttgggaagcagtttggagtttctcaaagaacttaaaacagaactaccatttgaccaagcaatcccattacctggttttcactcaataaatagaaatatttttgccataaatacacgtgtatgcatatgttcatttcagcactattcacaatagcaaagacatggaatcaacctaaatgcccatgaatggtgggctggttaaagaaaattttgtacacatacaccatggaatacaacgtagccataaaaaatgaatgggatcatgtcccctggagcaaagttgatacagttgtagtacattatcataagcaaattaacaaagaaatcaaaaaccaaataccgcatgctctcacataaggggagctaaacattcagtacacatgarcacaatgaagggtacaatagacactggagcctacttgagggtggaggatgggaggagagtgaggattgaaaaactacctatcaggtactatgcttattaccttggtgatgaaataatctgtaaaccgaacccccatgacctgctatttattcatatcacaaaccggtac

SEQ ID NO: 666254 - DNA, 570 bp, Homo sapiens
ttatataaccatagcaggattayattcaatagcataagtatacatgaaataaggagctagttaagaggagcaatgataacagatatttttggtattcattttagaagaaaatatatttttattttaacgtgtactgtaatttacactcacagaatggaatcactgaaggacaaaatcactttgacatcaaaatatgtcttgaatattgttttaactatgttaggattatgttttaaatgatggatgttttaatacttttagtctaatttactcaatggagcagtcacagcctagtttaaaaaatatcaagtgtggcactatagatgttatgagaatattttgtaaaagaggaattgaagtaaagtgatccatcttggatctctctttcagctaggtgatgctattatagtcctgtctctttataatagtgatgctttctataaatgagaaatagcatcacagagaagtaagaggttcttcaggatccctaccaatgactgcctcattgtatgtgtttaatgatgcctgcaggaaagcttacttactctgacaggatatttccatcagcat

SEQ ID NO: 666255 - DNA, 441 bp, Homo sapiens
taagtccttatttctgcaacttgtcrggtttctatatttgatatgcataactatttttttccattatgcattccgtattccctttacccttgggaagtgctttagctggtgtggttttttgccggtggggtgacataaaccttcatttctaaaaggtctccatcattagcacattagcagtcttgcctgaactgagttataattttccattgacattaatcacaggatatagtagtactaagaaacaccttagggatcttctgtgtttcagacatatacttatgtattttcagtgtgtagtagcagtctaatttcttcttggtaaacggaattaaacaccacattcagtaaattaactcccccttttgcctttttatttagaggcatgagaagtcccaagtgacagggggcagtcatgacttccagcttaatagaaacaat

SEQ ID NO: 666256 - DNA, 556 bp, Homo sapiens
tattatatatgcatgtgtatgttttttctgttttttttcttagaattaataactataaacactagtttgtggtcactgttgtttttttaccttagttttgcttttttttawaaaaaaaatctgtatattaaatcctttttatatctacatcaatattaaagatgatctaacatatgtccccatgttaagcatatcaataactgagagtggtctgaggtttacgttaattgcaggctaacaagctagttatgtttcatgtatgctgacgggagacagaagattcctgggtcacagaccaagtattttattatatacaggagacagcaggagcttcctctttgtgcacgtttcctatgtgccccaagtccctggtgagcctggacatgttgtaggcacatggtttgtgacgtagcaggggaaccatcaaattaggaaattctagtgcttaataatgggatgcaaagaaacctgaccaacatttgctctaaaagaaaacattagctttattgtactggatagtaagcaaacctaccctctgtcacagcaaagaaaaacc

SEQ ID NO: 666257 - DNA, 608 bp, Homo sapiens
gatgtcattggtaatttgatagtgattgcattgaatctatagatcattttgggtagtctggatattttcttcctctccatgaagatgaaataattttacatattttggtgtcctcttcaatttctttcatcagtgttttatagttctcattatagagaacttcgacttaattggytaatttgtaggtgtttaattttattcatggctattgtaaatgggatcactttttaatttcttttttcagattgtttacattatcatatggaaatgctaataatttttctttgttgattttgtatcctgcaactttactaaatatgtttttcagttctaattgttttttgatggagtctttaggttttttcaaatataagatcatgtcatatataagatcatgtcaaacaagaataatttgacttctttctttccagtctggatgccctttatttccttctcttgtctaatttctctagctaggactcccagaattatgttgaataacagatgtaaaagtgagcgttcttgtggtgttccacttcttagaggaaaggctttcagtttttccctattcggtatggtactagcggtgggtctgtgtagcacgtggc

SEQ ID NO: 666258 - DNA, 515 bp, Homo sapiens
aatggatatttcctctagaataaaatgkaagtggataactgtgattccttaggtagtcagtatttagtccccattccctacaatcactgcaagactggaggcaagatctcagagaggaaggagcttggtatgaaaccatattgtctactgacttcctctcttcctatttggatacgctttatttatttatcttgctcattgattgtcctgtctaggacttccagtattatattaaataggagtggggagaatgggcatccttgtctcattctggttctccaggggaatgcctccagcttttgcctgtttagtatgattttggctatgggtttgccataggtgactcttagtattttgaagtatgttccttcaatagctactttgttgatggtttttaacatgaaaggatgatgaatttcttgaaaggcttttctgtgtctgttgagatgatcatgtggattttgtttttagttctgtttctgtaatgaatcacagttattaatttttgtatatag

SEQ ID NO: 666259 - DNA, 515 bp, Homo sapiens
aatggatatttcctctagaataaaatggaagtggataactgtgattcctyaggtagtcagtatttagtccccattccctacaatcactgcaagactggaggcaagatctcagagaggaaggagcttggtatgaaaccatattgtctactgacttcctctcttcctatttggatacgctttatttatttatcttgctcattgattgtcctgtctaggacttccagtattatattaaataggagtggggagaatgggcatccttgtctcattctggttctccaggggaatgcctccagcttttgcctgtttagtatgattttggctatgggtttgccataggtgactcttagtattttgaagtatgttccttcaatagctactttgttgatggtttttaacatgaaaggatgatgaatttcttgaaaggcttttctgtgtctgttgagatgatcatgtggattttgtttttagttctgtttctgtaatgaatcacagttattaatttttgtatatag

SEQ ID NO: 666260 - DNA, 515 bp, Homo sapiens
aatggatatttcctctagaataaaatggaagtggataactgtgattccttaggtagtcagwatttagtccccattccctacaatcactgcaagactggaggcaagatctcagagaggaaggagcttggtatgaaaccatattgtctactgacttcctctcttcctatttggatacgctttatttatttatcttgctcattgattgtcctgtctaggacttccagtattatattaaataggagtggggagaatgggcatccttgtctcattctggttctccaggggaatgcctccagcttttgcctgtttagtatgattttggctatgggtttgccataggtgactcttagtattttgaagtatgttccttcaatagctactttgttgatggtttttaacatgaaaggatgatgaatttcttgaaaggcttttctgtgtctgttgagatgatcatgtggattttgtttttagttctgtttctgtaatgaatcacagttattaatttttgtatatag

SEQ ID NO: 666261 - DNA, 515 bp, Homo sapiens
aatggatatttcctctagaataaaatggaagtggataactgtgattccttaggtagtcagtatttagtccccattccctacaatcactgcaagactggargcaagatctcagagaggaaggagcttggtatgaaaccatattgtctactgacttcctctcttcctatttggatacgctttatttatttatcttgctcattgattgtcctgtctaggacttccagtattatattaaataggagtggggagaatgggcatccttgtctcattctggttctccaggggaatgcctccagcttttgcctgtttagtatgattttggctatgggtttgccataggtgactcttagtattttgaagtatgttccttcaatagctactttgttgatggtttttaacatgaaaggatgatgaatttcttgaaaggcttttctgtgtctgttgagatgatcatgtggattttgtttttagttctgtttctgtaatgaatcacagttattaatttttgtatatag

SEQ ID NO: 666262 - DNA, 551 bp, Homo sapiens
tgaaaccttgtctctattaaaaatacaaaaagttagccggacttggttgcagtcacctgtagtcccagctactcaggaggctgaggcaggagaatgtcatgaatctgggaggcggagcttgcagtgagccaagatcaccccgttgcactccagcctgagagacagagcgagactccatctcaaaaaaaaaaaaaaaatttgtttataagcaacaaatgttttgcatcactatcagatatccataatttatggagttctaaaatagctccaataaaattagttgtataacaaggagttagacacggtatagacaacttatagttttacaccraagcaagcattttttttctacaagtgaattccttgtaaaacatatggtgatattataatgctataattttcctacttctctatcttttggtgattatagttcttatcattccatagaaatacgtctttctgttagcatttcttgaagtgtaatttttcaaaatcataagtttacatccaacaaataaatgagaacaacttgacagattcacctctatttc

SEQ ID NO: 666263 - DNA, 595 bp, Homo sapiens
tacattaagtatttataggtttctgtgtgccaatcatacaacgataatatggtttcacaataaataaaatgaattttaaaaaacaactagccaaagaacatagcctttaaactattatataaaaatcttagaacaccagtcgatatkttacaaagattattcagtttgggttcagcaaaggtcttctagaaagggtcagatagtaaatattttatgctttgcaggtcatatagtctctgctgtagctactcaagtctgccattgtagagtgaaaccagtcatagacaataagcaaatacatgagggtgactgtgttctaataaaatcaaaatgtgaatatcatagaaatttcatttgtcatgaaatataattgacaattatcaagttataaatttgtagttatttaaaaataattcttaacatatgggccatatcttaaaaaggtggtatgctgaattttggtgggggattccatcattgctcctattcagcttctcactctctggtcaaagagaccctctcttcttaatccctaggaaacttcttagaaaatgatttaaaggtacatgataaaatatattttaaaaagccttgt

SEQ ID NO: 666264 - DNA, 595 bp, Homo sapiens
tacattaagtatttataggtttctgtgtgccaatcatacaacgataatatggtttcacaataaataaaatgaattttaaaaaacaactagccaaagaacatagcctttaaactattatataaaaatcttagaacaccagtcgatattttacaaagattattcagtttgggttcagcaaaggtcttctagaaagggtcagatagtaaatattttatgctttgcaggtcatatagtctctgctgtagctactcaagtctgccattgtagagtgaaaccagtcatagacaataagcaaatacatgagggtractgtgttctaataaaatcaaaatgtgaatatcatagaaatttcatttgtcatgaaatataattgacaattatcaagttataaatttgtagttatttaaaaataattcttaacatatgggccatatcttaaaaaggtggtatgctgaattttggtgggggattccatcattgctcctattcagcttctcactctctggtcaaagagaccctctcttcttaatccctaggaaacttcttagaaaatgatttaaaggtacatgataaaatatattttaaaaagccttgt

SEQ ID NO: 666265 - DNA, 547 bp, Homo sapiens
gggttgttaggtgcagcaaattaccatagcacacgtttacctatgtaacaaaccagcacatcctgcacacrtagctaccacacctggctaatttttgtatttttagtagagatgggatttcatcatgttggccaggctggtctagaactcctgacctcatgtgatccaccctccttggcctcccaaaatgctgggattacagcagtgagccacctagcctggccaatttttatatcactgttaatgcatgctaaaaccttcctttggtttgtcttagcacagaatctatgccacaatactgtgtgcaatttcaacacgaactcaagtatatgtaaaattggtatgtaacagattcagagaaagaagtgctttcacacaaggtgagtaatatggacaaacacagtatctaccccctgtgaagggaggccaggcccactgtgcttcacattcctaagtgcgtatcagtggggttaagtggtgatctcggtgtctacctccatgtggcatcaacaaaatagtcaatgtgtgatacaagttggggtagtag

SEQ ID NO: 666266 - DNA, 547 bp, Homo sapiens
gggttgttaggtgcagcaaattaccatagcacacgtttacctatgtaacaaaccagcacatcctgcacacatagctaccacacctggctaatttttgtatttttagtagagatgggatttcatcatgttggccaggctggtctagaactcctgacctcatgtgatccaccctccttggcctcccaaaatgctgggattacagcagtgagccacctagcctggccaatttttatatcactgttaatgcatgctaaaaccttcctttggtttgtcttagcacagaatctatgccacaatactgtgtgcaatttcaacacgaactcaagtatatgtaaaattggtakgtaacagattcagagaaagaagtgctttcacacaaggtgagtaatatggacaaacacagtatctaccccctgtgaagggaggccaggcccactgtgcttcacattcctaagtgcgtatcagtggggttaagtggtgatctcggtgtctacctccatgtggcatcaacaaaatagtcaatgtgtgatacaagttggggtagtag

SEQ ID NO: 666267 - DNA, 523 bp, Homo sapiens
ttattgaatcatgtttgtcttctcaccatatgaagtattttctcagggttttgtttaatatttttacctattcataaaatcaatttttttctctttgatttttacatttttaatctatttggtcagtttagggaaagttttcttgttattgtttgtatatttatttgttgtgatttctrtttgtgtttgttgttgtttgtttgttgagaaaggatctcgctctgtcacccaggctggagtatagtggtgcaatcttagttcactgtagccacaatctctcaggctctgttactccttccaccttagctttccaagtagctggaactacaggcctgtgccaccatgcctggtgaattttttttttttttttttttttttgtattttttgtagagatagtgtctcactacattgcccaggctgatgtaaaactcccgggctccagtgatcctcccttctcagccttcccaagtgctgggattacaggcatgactactgccactggccttgctgcgaaatattttt

SEQ ID NO: 666268 - DNA, 523 bp, Homo sapiens
ttattgaatcatgtttgtcttctcaccatatgaagtattttctcagggttttgtttaatatttttacctattcataaaatcaatttttttctctttgatttttacatttttaatctatttggtcagtttagggaaagttttcttgttattgtttgtatatttatttgttgtgatttctatttgtgtttgttgttgtttgtttgttgagaaaggatctcgctctgtcacccaggctggagtatagtggtgcaatcttagttcactgtagccacaatctctcaggctctgttactccttccaccttagcyttccaagtagctggaactacaggcctgtgccaccatgcctggtgaattttttttttttttttttttttttgtattttttgtagagatagtgtctcactacattgcccaggctgatgtaaaactcccgggctccagtgatcctcccttctcagccttcccaagtgctgggattacaggcatgactactgccactggccttgctgcgaaatattttt

SEQ ID NO: 666269 - DNA, 523 bp, Homo sapiens
ttattgaatcatgtttgtcttctcaccatatgaagtattttctcagggttttgtttaatatttttacctattcataaaatcaatttttttctctttgatttttacatttttaatctatttggtcagtttagggaaagttttcttgttattgtttgtatatttatttgttgtgatttctatttgtgtttgttgttgtttgtttgttgagaaaggatctcgctctgtcacccaggctggagtatagtggtgcaatcttagttcactgtagccacaatctctcaggctctgttactccttccaccttagctttccaagtagctggaamtacaggcctgtgccaccatgcctggtgaattttttttttttttttttttttttgtattttttgtagagatagtgtctcactacattgcccaggctgatgtaaaactcccgggctccagtgatcctcccttctcagccttcccaagtgctgggattacaggcatgactactgccactggccttgctgcgaaatattttt

SEQ ID NO: 666270 - DNA, 559 bp, Homo sapiens
acatatttttacctattcatacaatcaattttgtgttctccttgatttttacatttttaatctatttagtaagtttggggaaagttttcttgttactgttttttaacctatgcttagtttgctacattttctctaataacaaatgtaacataattattgaagacatatcagtaatggtattgtgctttaaacagaatgcagtaaaagtgaaatgctgactgcacattgcttcttgtgtttttatctttaagtaaatattccagtttagcttcagtggagtacattgcagtgaatgagtgcatgcatttaaagttatagataaagttttttatgtaaaaatattaatacacttacatatactgtcctaatgaacatctctccaaaaacgttgttttcttcttactaaaaaccaaataataatgatacatttacataaggaactacaactgatttgttgtaagcacactgtcttcagacattaaaccagctaccaagaatatcatgtttgaatatatayaacgttttcacagttcaattcaatgggaaattttttccatta

SEQ ID NO: 666271 - DNA, 542 bp, Homo sapiens
ttctttttttccacaatgatgaaaatttggctttttttgtcttatttttattcaatctacatgtagtacataggttaagccctgggtttcttattttctgtttaattaaattagaaaaaaaagttgccggttcactaaacagtaaaccacctttatctgcagagatacgttccaagacctccactgaatgcctgcaatcacagatagtattgaaccmtatatatattgtttttgcctatacatacatgtctatgataaaatacaatttataaattagggacaggaggaaattaacaattactaataagaaaatagtaaaattaattgaaataagtgtcacaagagttacttgaatacagcactgtgacaccaagacagccaatctgatcaccatgatgggcactaagtgatgagtgggtggagagcacagacagcctgaatatactggacaaaagtgaggattcacatccctgttgggactgaatggagcagtgtgagatttcaccactctactcagaaaagaatgcaacataaaacatata

SEQ ID NO: 666272 - DNA, 542 bp, Homo sapiens
ttctttttttccacaatgatgaaaatttggctttttttgtcttatttttattcaatctacatgtagtacataggttaagccctgggtttcttattttctgtttaattaaattagaaaaaaaagttgccggttcactaaacagtaaaccacctttatctgcagagatacgttccaagacctccactgaatgcctgcaatcacagatagtattgaaccctatatatattgtttttgcctatacatacatgtctatgataaaatacaatttataaattagggacaggaggaaattaacaattactaataagaaaatagtaaaattaattgaaataagtgtcacaagagttacttgaatacagcactgtgacaccaagacagccaatctgatcaccatgatgggcactaagtgatgagtgggtggagagcacagacagcctgaatatactggacaaaagtgaggattcacatccctgttgggactgaatggagcagtgtgagatttcaccactctactcagaaaagmatgcaacataaaacatata

SEQ ID NO: 666273 - DNA, 519 bp, Homo sapiens
tgcattgcattcactgactctttacaagatttttggtatatgtttatggagagacatagattccaaatgtgaagttgaataagattttgattgcctcagcattacagttgttgttgagagggtaccgttttaggcagcatagtagatgaaggggatgtcattagtartaaaccaaacaagcaaaactccttattttcatgaagtttatattttgaagtgagagaaagaaaacaaatagcatgtactaaacagttattatgttatttgatccaaatagctgaggggaaacatatgaacgtgggaaacaggataagaaatgtcagtgggagattgttgacatcttgtgtaaggtttatagacaagatttttatttaagaacaagaaggaagtgagggatctaactgtatggacatctaggggaagagcgcagaaagagaggtaagagtcagaacaaagaccagagcagatgatgtgcctgatgttgtgaaggaacaggagggagaagagtatgactacaag

SEQ ID NO: 666274 - DNA, 572 bp, Homo sapiens
tcagtgggagattgttgacatcttgtgtaaggtttatagacaagatttttatttaagaacaagaaggaagtgagggatctaactgtatggacatctaggggaagagcgcagaaagagaggtaagagtcagaacaaagaccagagcagatgatgtgcctgatgttgtgaaggaacaggagggagaagagtatgactacaagacagaggagaaaggcaggaagaatcacagatgaggacagacgaaaccaaaggccagatcctaagagccttctagcttctagattatgatcaggggcctcggccctcactgggagagggaaaaaccattgagggactcgacagaggcatgaaataaacagttttacacttcatgttgtactactagatactctgctactagagataatmatacatacagtataactaaggaggaaatgcttgattcatatcaaattgggggtattctctttagagttctacgcaatgtagaagagttacaaactcactgggttacaagtaaaaggggttggactataatctctagggcttttactgtagttctgtggtgagct

SEQ ID NO: 666275 - DNA, 572 bp, Homo sapiens
tcagtgggagattgttgacatcttgtgtaaggtttatagacaagatttttatttaagaacaagaaggaagtgagggatctaactgtatggacatctaggggaagagcgcagaaagagaggtaagagtcagaacaaagaccagagcagatgatgtgcctgatgttgtgaaggaacaggagggagaagagtatgactacaagacagaggagaaaggcaggaagaatcacagatgaggacagacgaaaccaaaggccagatcctaagagccttctagcttctagattatgatcaggggcctcggccctcactgggagagggaaaaaccattgagggactcgacagaggcatgaaataaacagttttacacttcatgttgtactactagatactctgctactagagataataatacatacagtataactaaggaggaaatgcttgattcatatcaaattgggggtattctctttagagttctaygcaatgtagaagagttacaaactcactgggttacaagtaaaaggggttggactataatctctagggcttttactgtagttctgtggtgagct

SEQ ID NO: 666276 - DNA, 585 bp, Homo sapiens
taaaacattaaatgggatttattattttatctgactgaatgggctacccaccaaattgtaagtttcttgagaattgaatttatgtttcatttattttttctagtgcttcctttaatgcctgcaacacagtaagtaatggaagttgagttaacatggttgttgattttacagtaatggtctattaaggaaagcctgaaggactagtctgaatcactgtctcccttcttagtcacccattctgttactcattctagttgtcttttatccctgatgacttcactaaayaggtcactgaataatattatcatgtcataatttaattgtttctatgttcacatctaagttagcctctcagtagcatttgccgtaatttattatcctcatttggaaggagttttctagaattttttaactgtgtctctgctttgttttttcatcaactttcatatatctcttttactgtttgttgttgttgtttttggcttctgctcttcactttcattccatgttttggagcataccaggactttatcctttgattcgttcataggggatctcattattttataagcaataataaaaaaa

SEQ ID NO: 666277 - DNA, 569 bp, Homo sapiens
gaaatcagtggtaacttccttgagtgcccaygtcactggtaaactggacatggcactgatgggcctgtcttatggagaggtgctttcacctcttctctatttcagccagtcttcaatctgatctggagttgaattcctgcctctggaggtgagtcccatcccctacctcaattatactgaaaagacacttgcactcatatgctcaacatcatgctattcacaataacaactacatggattcaacctggttgcccatcaatgttcaactgaataaagaaaacatggcacatatacaccatattatattacacagccatcaaaaagaatgaaatcttatcatttacagcaacatgaatggagctggaggacataattctaagaattgcttcatggagtatttggttttctgtttactaaacatggagtacacatggacataaacatggaaacaatggaacggcagactactagacaggggagggagggagggaagtatgggttgaaaaactacttcttgggtactatgatcactacctgggtgcaatatacccatgtgataaacctgtata

SEQ ID NO: 666278 - DNA, 569 bp, Homo sapiens
gaaatcagtggtaacttccttgagtgcccatgtcactggtaaactggacatggcactgatgggcctgtcttatggagaggtgctttcacctcttctctatttcagccagtcttcaatctgatctggagttgaattcctgcctctggaggtgagtcccatcccctacctcaattatactgaaaagacacttgcactcatatgctcaacatcatgctattcacaataacaamtacatggattcaacctggttgcccatcaatgttcaactgaataaagaaaacatggcacatatacaccatattatattacacagccatcaaaaagaatgaaatcttatcatttacagcaacatgaatggagctggaggacataattctaagaattgcttcatggagtatttggttttctgtttactaaacatggagtacacatggacataaacatggaaacaatggaacggcagactactagacaggggagggagggagggaagtatgggttgaaaaactacttcttgggtactatgatcactacctgggtgcaatatacccatgtgataaacctgtata

SEQ ID NO: 666279 - DNA, 500 bp, Homo sapiens
ccagtaccttttcataataataacagtcaacaaattagaaatgaaaaggaactttctcaacctgagtgcatatcctgaacacccacagctaacatcatatatagtgataaaataatgaatatattcgtgctaagaccaggaaaaaaatatagatgttcttgccacttatattcaacattgcrctggaggttctaggtagggtaattatgcaaaaagtaagtaaataaataaataaataaattgtattcataaataaataaataattgtatttattgaattgtattcaataaataaactgaagaagtaaaattatatttattggccagatgtgatggttcaagcctgtaatcccactactttgggaggccaaggcaggtggatcatttacatggtgaaacctcatctctactaaaaatacacaaattagccgggcatggtggcgagcacctgtattctcagcaactccagaggctgaggcaggagaatcacttgaacccag

SEQ ID NO: 666280 - DNA, 589 bp, Homo sapiens
acccacataaatactattgtgtatgtaaaagggatatgcctctatctccagaagtaaaaatgttttaaaaatgctatataagaaattaatacaaaaattcccagtattagacaaacttatttgcttaaaaatatgaacttatgaagaaggagratattaaaaatatcacttgtctaccttttttgttccagcacaggatatttttagtttttaaatctctgaaaataagataggtgaaaataaacatttcatcttactgtatatttcctttgccaacagagagaggatatcttcatatatattcatcatcaactcttattcaatcttttaattgcctatatgccttctttgttaagggtaatttacaatagctccttatagattaatgctattaacatttactacaagcatagctaatcttttgtgccaagttctcatttgtcttgttggaggacttaccaaaggtagaaactcttcacttatttattcaaagaaaaatttattttatttgtttatattttatctattcttcctatggaactaatacaggggattaaaaatacaataagttttaatgttgaaaaactca

SEQ ID NO: 666281 - DNA, 589 bp, Homo sapiens
acccacataaatactattgtgtatgtaaaagggatatgcctctatctccagaagtaaaaatgttttaaaaatgctatataagaaattaatacaaaaattcccagtattagacaaacttatttgcttaaaaatatgaacttatgaagaaggaggatattaaaaatatcacttgtctaccttttttgttccagcamaggatatttttagtttttaaatctctgaaaataagataggtgaaaataaacatttcatcttactgtatatttcctttgccaacagagagaggatatcttcatatatattcatcatcaactcttattcaatcttttaattgcctatatgccttctttgttaagggtaatttacaatagctccttatagattaatgctattaacatttactacaagcatagctaatcttttgtgccaagttctcatttgtcttgttggaggacttaccaaaggtagaaactcttcacttatttattcaaagaaaaatttattttatttgtttatattttatctattcttcctatggaactaatacaggggattaaaaatacaataagttttaatgttgaaaaactca

SEQ ID NO: 666282 - DNA, 607 bp, Homo sapiens
gtatttccaccttcttttgttaaaaacatgtttgtgcatgtatgcactcactccaagaaaatatgttcattttattttctttctcctttatcatgtgacataagatttattgacttcacatcagcatttaagtattgttaactttatgtaatagtatttgggttggggattggtgcatttctggttgtaaggatagctgtattatgttaggtgtaattatgaccttatgattgtctttacctgaagattatgcatgatctcaggagaygtgtgtgggttcaagttgacaaggggtgggtttgagatacttaatactgagtgtcaacttgattggattagaggatataacttattgatgctgggtgtgtctgtgagggtgttgccaaaggaggtttacatttgagtgagtgcgctgagaaatgcagacccacccttaatcggggtgagcataatctaatcagctgacagcatggctagaataaaaaacaagtagaaaaatgtgaaaagagagactggcctagcctcccagcctacagctttctcccatgctggatacttcctgccctcaaacattggactcccagttcttcagttttggaacctggac

SEQ ID NO: 666283 - DNA, 621 bp, Homo sapiens
catacatgcttctgtttgcatgtgcatgtatgtgtatgattgtatgttacctcaaagctcatgtgaatttggctgccttcagtggacattgtaaagcaacaaaaacatctacttgccgtaatctccactcaagataatctaaggctatgtgtacagttggtaaaaccaaagcattttagagctacacacaaagatcgatcctcatttgatatttaaaccttagtggggatgatattctttcaacagtggcagatggataatgatcttttcacatgaaattcttagtayactactcccttggtatccatggaggttaggtcccagaatctcctgtggatacaaaaatctgtggatgctcaagttcctgatataaaatgatctagttttttcatataatctacacacatccttcacatgctttaatttatcattagattataatatgtaatacaatataaatgttatgcaaatacctgttacattgttcagggaataatgacaggaaaaagtttgtacatattcagtatagacacaatatgttttcccaaatatttttgatccacagttggttgaatccatggatgggaaacccacagacaaagggctgactgtacatgaaaa

SEQ ID NO: 666284 - DNA, 493 bp, Homo sapiens
tttcttaatgaattgagatcatttgagctaaattaaagatacttgctttgcatttcataaaaagttgaattgcccgagtcatattttcttttcttattttttttttttgcttctatcaaactgttcctcattttcctcattacagttttttttttttttttggcaatactgtgtggsctttactacagtgtcatattctttttctgagcaacggaaggagagattcacggaataaacttgtgcactgataattctgaaattagattaaaataaatgagaaattagtaatttaaaaaatacattcaaaaaattaaaattgctcatccatgaaccaacagagtattcctctataactactggcaaggttttatactttacctatcttttggcatgtatattttaaaatgaatttgcattcagcaaaagctagggattttacagatgactgatgcctgtgaaaatgagatttttcccttgaacttgctttaattaa

SEQ ID NO: 666285 - DNA, 493 bp, Homo sapiens
tttcttaatgaattgagatcatttgagctaaattaaagatacttgctttgcatttcataaaaagttgaattgcccgagtcatattttcttttcttattttttttttttgcttctatcaaactgttcctcattttcctcattacagttttttttttttttttggcaatactgtgtggcctttactacagtgtcatattctttttctgagcaacggaaggagagattcacggaataaacttgtgcactgataattctgaaattagattaaaataaatgagaaattagtaatttaaaaaatacattyaaaaaattaaaattgctcatccatgaaccaacagagtattcctctataactactggcaaggttttatactttacctatcttttggcatgtatattttaaaatgaatttgcattcagcaaaagctagggattttacagatgactgatgcctgtgaaaatgagatttttcccttgaacttgctttaattaa

SEQ ID NO: 666286 - DNA, 416 bp, Homo sapiens
tctccatcaacgtgtaaattttgtgttagaatgtaattaattattgtcttgtggttattgaacagttttattagtttttacttctattttaaaattcacttgtatttttatgaaagtcatagcattaccttctttcaaaattttttattaaaggtactattcaggcataaaaaagaatgagatccakccatttacaacaacatggatggaactggaggacattatgttaagtgaaataagtcaggcacagaaagacaagcattgcatgttctcacttatttgcgggatctaaaaagcaaaacaattgaactcatggacatagagggtagaaggatggtcaccagaatgtgggaagggtattaggggcctagggggaaggtgaaaatggttaatggctacaaaaatagtagttaaaa

SEQ ID NO: 666287 - DNA, 549 bp, Homo sapiens
ataccacatgtgcagttcatcagtcataatttttctgggcttccacaaatgagttcaagtaccaatagaactttacctttgctgcttcttggtttctctagttctttttccttctgcagattttgtttttgtttctgttctgctcatatatgataagccattctccagtgttgacagcattgattatgaatttgattttatggtctgaccatttggcaatctataaatggaytaatgaattatagagttttattctctgttgggtgagagatgacagagaatttgggttgtttgttttgtcgttagtaattgattacttgtatatttgtctattttgagcacatattaagaagtgaaactgctctacgacatcaggacaaataagtttttataccttgcatcttttgatctgtgactaaaattatagcattgaaattgactgtgtgtgtgtctgtaattcagaatggcttctcctaattatgtaattatagaatgttgtcctctggtcaaagggtattcataaatataatcataaagaaattattgttc

SEQ ID NO: 666288 - DNA, 549 bp, Homo sapiens
ataccacatgtgcagttcatcagtcataatttttctgggcttccacaaatgagttcaagtaccaatagaactttacctttgctgcttcttggtttctctagttctttttccttctgcagattttgtttttgtttctgttctgctcatatatgataagccattctccagtgttgacagcattgattatgaatttgattttatggtctgaccatttggcaatctataaatggactaatgaattatagagttttattctctgttgggtgagagatgacagagaatttgggttgtttgttttgtcgttagtaattgattacttgtatatttgtctattttgagcacatattaagaagtgaaactgctctacgayatcaggacaaataagtttttataccttgcatcttttgatctgtgactaaaattatagcattgaaattgactgtgtgtgtgtctgtaattcagaatggcttctcctaattatgtaattatagaatgttgtcctctggtcaaagggtattcataaatataatcataaagaaattattgttc

SEQ ID NO: 666289 - DNA, 549 bp, Homo sapiens
ataccacatgtgcagttcatcagtcataatttttctgggcttccacaaatgagttcaagtaccaatagaactttacctttgctgcttcttggtttctctagttctttttccttctgcagattttgtttttgtttctgttctgctcatatatgataagccattctccagtgttgacagcattgattatgaatttgattttatggtctgaccatttggcaatctataaatggactaatgaattatagagttttattctctgttgggtgagagatgacagagaatttgggttgtttgttttgtcgttagtaattgattacttgtatatttgtctattttgagcacatattaagaagtgaaactgctctacgacatcaggacaaataagtttttataccttgcatcttttgatctgtgactaaaattrtagcattgaaattgactgtgtgtgtgtctgtaattcagaatggcttctcctaattatgtaattatagaatgttgtcctctggtcaaagggtattcataaatataatcataaagaaattattgttc

SEQ ID NO: 666290 - DNA, 549 bp, Homo sapiens
ataccacatgtgcagttcatcagtcataatttttctgggcttccacaaatgagttcaagtaccaatagaactttacctttgctgcttcttggtttctctagttctttttccttctgcagattttgtttttgtttctgttctgctcatatatgataagccattctccagtgttgacagcattgattatgaatttgattttatggtctgaccatttggcaatctataaatggactaatgaattatagagttttattctctgttgggtgagagatgacagagaatttgggttgtttgttttgtcgttagtaattgattacttgtatatttgtctattttgagcacatattaagaagtgaaactgctctacgacatcaggacaaataagtttttataccttgcatcttttgatctgtgactaaaattatagcattgaaattgwctgtgtgtgtgtctgtaattcagaatggcttctcctaattatgtaattatagaatgttgtcctctggtcaaagggtattcataaatataatcataaagaaattattgttc

SEQ ID NO: 666291 - DNA, 622 bp, Homo sapiens
tttctacatcttcttctgtatgcactgacctcaactacccaatctttaacatcttatgcaagtttttccagagactgttctgtcaattctatatatctagttctaaaaaaactctcctcccacctatgcagttcaaaatattattgtggaatagaatacaaaatatcattgtataataaatttgtgtggtatacttagtatttcaattttatcatgatgacktggtagaaatatgtgtttatattctgtattctaaaacattatgacatcttttgattttgattttgcttttgctttcctaatttgtgaatgaaataatccagaagaagcttaatgcattttaggaaaaatatactttataaacaataatatttgaaataaaactctgtatttgtagactgtcagctaacatatactatgattttaatgtctttatagaagatatattgataggtgaagccagctggacttcctgggtcaagtggggacttggagaacttttctgtctagctaaagaactgtaaatgcaccaatcaccactctgtaaaaacacaccaatcagcgctctgtgtctagctaaaggattgtaaatgcaccaaacagcactctgtaaaacgcacca

SEQ ID NO: 666292 - DNA, 605 bp, Homo sapiens
attctgtattctaaaacattatgacatcttttgattttgattttgcttttgctttcctaatttgtgaatgaaataatccagaagaagcttaatgcattttaggaaaaatatactttataaacaataatatttgaaataaaactctgtatttgtagactgtcagctaacatatactatgattttaatgtctttayagaagatatattgataggtgaagccagctggacttcctgggtcaagtggggacttggagaacttttctgtctagctaaagaactgtaaatgcaccaatcaccactctgtaaaaacacaccaatcagcgctctgtgtctagctaaaggattgtaaatgcaccaaacagcactctgtaaaacgcaccattcagtgctctgtgtctagctaaaagattgtaaatgcaccaatcagcactctgtaaaatggaccaatcagcactctgtaaaatggaccaatcagcactctgtgaagtgtaccaatcagtagtatatgggcggggccaaataagggaataaaagttggcaacccaggccagcagtggcaatccgcttgggtcccctttcacgctgtggaagctttgtcctttcatt

SEQ ID NO: 666293 - DNA, 542 bp, Homo sapiens
tgagtgctggattaggtgagtgctggattagagatggtgaagagcattcgcctgagagagttgcaaatgccaggctaagaggatytgactgaatcctgtactatctgatataatgtgaggaaatcaatttcaaaaaaaaagtaaatgatataattttaaaatcttaaatggatatttgtatgttaatcataaatatttaatctattttaattaaaattcatagcaatatgtattagtaaattattttgagtaaagccaatttctgtatataaagagattcatactgtttttaaagtattacagagaaacttttttattaacagatgatttatacaaacctatatgaccaaatttaaaacatgtcttggaatcaaacatttaattggattgactgcttcagatgttcactatagttagtgatatttacacagttcaacgaatgccaagagttgcaattattaattccagtaattcaaggtgaaaccctctgatgtttttattcaacatctatattttttgatgctttctccagcctctggaga

SEQ ID NO: 666294 - DNA, 542 bp, Homo sapiens
tgagtgctggattaggtgagtgctggattagagatggtgaagagcattcgcctgagagagttgcaaatgccaggctaagaggatttgactgaatcctgtactatctgatataatgtgaggaaatcaatttcaaaaaaaaagtaaatgatataattttaaaatcttaaatggatatttgtatgttaatcataaatatttaatctattttaattaaaattcatagcaatatgtattagtaaattattttgagtaaagccaatttctgtatataaagagattcatactgtttttaaagtattacagagaaacttttttattaacagatgatttatacaaacctatatgaccaaatttaaaacatgtcttggaatcaaacatttaattggattgactgcttcagatgttcactatagttagtgatatttacacagttcaacgaatgccaagagttgcaattattaattccagtaattcaaggtgaaaccctctgatgttttyattcaacatctatattttttgatgctttctccagcctctggaga

SEQ ID NO: 666295 - DNA, 496 bp, Homo sapiens
gaattgcggtttttgcattgttggaatttgccgtttgatattagaatacattctaaaataaatgtggttatgttatacatcattttagtgggcatttcttgttttatgtcttttttgytaatgatttattatttgctgtctattttatgtttattttggactacagaaatcatgttggacaaaaagcaaatttgagttattttcttaatcgagttcaaaatgggttgtaaagcagcagagacaactcgcaacatcaaaaacacatctggcccaggacctgttaacaaaggtacattgcaatggtggtccaagaagttttgcaaaggagatgagagccttgaagatgaggcacatagtggccatccatcggaacttgacagcgaccaattaaaagcaatcattgccaggcgtggtggctcatgcctgtaatcccagcactttgggaggccgaggcaggtggataactttgagcttagaagttcgagaacagcctgag

SEQ ID NO: 666296 - DNA, 496 bp, Homo sapiens
gaattgcggtttttgcattgttggaatttgccgtttgatattagaatacattctaaaataaatgtggttatgttatacatcattttagtgggcatttcttgttttatgtcttttttgctaatgatttattatttgctgtctattttatgtttattttggactacagaaatcatgttggacaaaaagcaaatttgagttattttcttawtcgagttcaaaatgggttgtaaagcagcagagacaactcgcaacatcaaaaacacatctggcccaggacctgttaacaaaggtacattgcaatggtggtccaagaagttttgcaaaggagatgagagccttgaagatgaggcacatagtggccatccatcggaacttgacagcgaccaattaaaagcaatcattgccaggcgtggtggctcatgcctgtaatcccagcactttgggaggccgaggcaggtggataactttgagcttagaagttcgagaacagcctgag

SEQ ID NO: 666297 - DNA, 622 bp, Homo sapiens
aaaaaaaaaaaaaggtcgtcatcaccgtttggtgatctgctgctggtctgatctactacagcttcctgaatccaggtgaaaccattacatctgagaagtatgttcagcaaatggatgagatgcaccaaaaactgtcctgcagccggcattggtcmacagaaagggcccaattcttccccacaacaatgctcaactacatgtcgcacaaccaatgccttgaaagttgaataaattgggctacaaagttttgcctcatctgccatattcacctgaccatgctacagtttaaacaaaactttcatgttacataacatggcttgttatttttctaacattcattaagagtttcatcaccctttctacttagcaccaaaactagcaccataatttttgttataaaagtactcattcctggtattaattcttgtatctgtcaatttacccaagctatgcagccgtaaaagggtcctaaaatttcagcatcttacaagaacaaatatttatttatcattcacgttacatatgtgttactgattgagttcagttaactcttctacttcttcatgaagaggcataggctgaagaaatagcttaagacacattgcaggctattcttttgcca

SEQ ID NO: 666298 - DNA, 600 bp, Homo sapiens
ttgtttgttggtgaataaaaaaatgatcgtttatcttgggcagaatcaacgagtgagccgttagtagggtggtattggaatcaggattcttaacattcagagaacagtttgaaaacttggctctttggctcttttttttttttgtatcatcaaaaataatatttaaataattgttaacatcctacaacgtgacctgtgaggtatctttctctctayggtgtgaagcatgaccaaatggatcatattttaagaaggcagagtagtcagttgaagaaaagatcttaaatattattttaatatatatgtttattctcaataatgttaaatccacataatcctactgtatatcttaaagaatgacataaatgttcgagttacgcaaatttagttctgaatgttttgtttttcatttgacttatgctagcctcatgataggaacagagaagaaatatgttcttccctgggaaactcccgcagtgttatgaaaacatgaatatggcagaggttgtaagttaactttgaaagtacgcagataaactttgaattatttatctgtgaaattcaaaacatgtgtgggtagctgcttgttggacaactcct

SEQ ID NO: 666299 - DNA, 595 bp, Homo sapiens
agtgggtaatttgaagttatttggtttatttcttttctctcctatatgttatcaaatttaggtaatttttctactctatgtctgcaaatgcattcatgtgcagaagcaccagtagacttaaatttacaagaatgtatctacattaatcttaactactgactagctattttcttttggattctctggacttcaatcactttrtaaaaaaattcaggaataaattgccttcattctaaagattttaagtatattaggtaacaaaagatctgtgaataagaattacatattttagagtgatttataattttagaagatgtttgtgaaatttctgtaaaaagggccgggtgtggtagctcatgcctataatcccagcactttgggaggccaaagtgggcagatcacttgaggtcacgaactcgagactagcctgtttaacatggtaaaactttgttacaattcaaggtgagattcggatggggtcacaaagccaaaacatatcgggacacttttccttttgcttattaaaaaaagataaacaaaatcacaaataacatatacgtatacaccaatgatgtcctactgaaactgccacaat

SEQ ID NO: 666300 - DNA, 544 bp, Homo sapiens
ctggtaatcactattttattctctagctctgtatatttgacttttttaaagattctacatataagtaaaattatctaatagatttttttctgtgtctggcttatttctggatctggctttaaaaactacatcaagtgtcatgacctcaatctgcgattctacctgctactaaatcactctctactcagtttccctgacaacattttgttctccaaacggtcttatcttattaggaatagctaccatatgttaggcgcctgctatgtgtcaggcacttgcttaacatggtgacatttagtcttcacaaaagccctaaataattgatataaagttccttattttagagattaaagggtgagtgctaaattacttaaagsagccaaaatcttacaatttataatgtgcaaagacagaatttaaaccccctactagctatctgtatttctccacccacttagagctctgcccaaactggtactatattttatttattcgtttatgcccagctgtaaatgcagcccatgaaacacggtaattatttaat

SEQ ID NO: 666301 - DNA, 548 bp, Homo sapiens
tttacctccctggttagctgtatttttagttttttttttctttttgtggcaattgctaatgggtttgcattcttgatttgactctcagcttagatgtttttgggatgtagaaatgctactgatttttatatattgattttgtatcctgagactttgctaaaattgttttgcatctagtagtctttgagcagagactaagggctttttagatatactattatatcatatcttctgtgaagagagatagtttgattttctgtcttcttatttgggtgccttttatttctttctcttgactgattgctctggctaggactttcagtagtatgttgaacaggagtggtgagagtcgttttccttttcttcttccagttctcaaaaggaatacttttagcttttgctcgttcagtataattttggctgcgtgtttgtcayagatggccctaattattttgaagtaagtttctttaatgcctgatattgaagtttttttaacatgaagttgttgttgagggttttttaacatgaatttattgagggtttttaac

SEQ ID NO: 666302 - DNA, 548 bp, Homo sapiens
tttacctccctggttagctgtatttttagttttttttttctttttgtggcaattgctaatgggtttgcattcttgatttgactctcagcttagatgtttttgggatgtagaaatgctactgatttttatatattgattttgtatcctgagactttgctaaaattgttttgcatctagtagtctttgagcagagactaagggctttttagatatactattatatcatatcttctgtgaagagagatagtttgattttctgtcttcttatttgggtgccttttatttctttctcttgactgattgctctggctaggactttcagtagtatgttgaacaggagtggtgagagtcgttttccttttcttcttccagttctcaaaaggaatacttttagcttttgctcgttcagtataattttggctgcgtgtttgtcacagatggccctaattattttgaagtaagtttctttaatgcctgatattgaagtttttttaacatgaagttgttgttgagggttttttaacrtgaatttattgagggtttttaac

SEQ ID NO: 666303 - DNA, 640 bp, Homo sapiens
gcacaatgttataaaaatatatgataaaaataatttaactagaaattgagataaaataacacgagataaatttttatccccactcaactggaaaaaatgaaaaaaaagataattcaaagtgttagtgaaatatgattttctttcacacgtagccacactttcaattggtaagcatatgtaggaatacaatttttttcttactaaatgtatttgaaaatgcacacatccagtaatctgggaattccagtcatagaatattaatatrgaaaatctttcttatctgatccaggagatatttacatgattgttcctagcaacattgtaacaataataaatgttaacacaaacccaaatcttcatcaacaataaaataggtaagtaaattgttcaaaaactaaagataatgtcacatagtagtggaaattagggaactacatacatctcaaaatattaatatggagtaattaagtgaatcacaaaaagtctctttacaatatgatttcgtttacatatgcatgaaaactcatgaaaattattttttattttgtataaatgtatagggtacaagtgcaattttcttacatgcaaatatctcagatagtggtcaagtcaggtcctttagggtttccatctcccaaat

SEQ ID NO: 666304 - DNA, 588 bp, Homo sapiens
atttttcgatttcaatgtgagaaatgcgaaacttcctttttttttttttgctaccaaaaatagtgctatacttccactaagactttgactatgttctagcaacagagsccaagtatgtagtcctgaccatggcagaattatatggaacagttacactgtcagtttcttaatgtacattttatgttccttatgcaaaaataataataacctatttgtcttttattagccataatctctttctatttttagaagatagcaaaatgacttgctcatctcaaattagcagaaaattgttttacatattttcttcaaagaaacaagaacgaaaacaaacttagctgtaaattatctcccatgagctgtcttcatttgttcaaagggtagagaaggaaatgacagtgagaaagctagcatgtatgaagcatttattatgtgccagcgactgtgttaggtaattagtattcaaagtggttctttcagggtcaccacatctcatataacagtgctccagacaaattctacaatatcacatactgtggattaaaagagtgagcttcataaacttttttttgtgctaagaactcttaa

SEQ ID NO: 666305 - DNA, 571 bp, Homo sapiens
attagctatgccataatcaagaggagaaaattcaagaaattacaatcaagagtttactgttaaaagaaacatcagtaaaattgattttgaagtatgctgatttgataaatttagcaatacttagagaatgagctactctgaaactatttgaccaagttgggtaataatctgttaacaggtcaacataaaagattaatatacctttcaaaactgttagtttttctttatcttatcataatatatttaactggtaaacttcatcagtcaccttgtgaatacrtgactttcaatggaaagaaactgctatgatataatgcatataaatcataataaaatttttgaaacaaattaatacaaatttaaataatctgtcctacatattattgtagttatgttcactagtccaaagggtatgtttaagcacagaaataaatttaaataagaaaaatacatttatcttactaccaggccatatcacagaactgtaaaattaaatattaggttgagaccacctgattattgtacatatacttaggaaaaattcagattccagacaaaagaaattatttat

SEQ ID NO: 666306 - DNA, 556 bp, Homo sapiens
atttaatgaatagatatgactatatatccattaaaatgaattttaatgaatttttatatattttatatatttatatattttatgggatattcattaaataaattcactaaatgaatgatataatatatgatatataaataaataattatatatatatactcatacacataaaacttgaaaaacaagtacagcatacttgtttctcaagttacaattaaccagagagaatacatttcatctcccacagagattaaattctggtgaggaactgtattagctgaagtattaaggctaagttagtgacactgtttgttactatcaggtagcatttatagaaaatagagtaattattcaattgttggtgrggagtgtgaaatgtgtgaaaaattgaaacaaaatgataaatatttatgtccataaatttttttatgaaaaaatcaaataattcaaagttacattaccctgacaattgtctcagtttttccaccccacagatataatcaaggaggcaatagtaattgcattttttactagagtcttctcacgctttttaagt

SEQ ID NO: 666307 - DNA, 480 bp, Homo sapiens
aattgcattttttactagagtcttctcacgctttttaagttctgtgaagaaatgcaatctcagtcactcctataaccaaagcatggaccatttattgttgcattattggtggttcaagtgctgtaacaaaatataaaccaggtgatttaaaaacaatacaaatttctctctcacagttctggagactggaaagtccaagatcatggtgcctgaggattcagtgtctggtaagggctcatttcctggtwtgcagtaggttgtctttttgactgtgtcttcacatggtgaaaaggaaaaactctggtctcctcagtcccttataagggcactaatcccattcacaagagctccattctcatgacctaataaactctcaaaagccctacttcactgtaccatcatactggggataaggggtcaatgtatgaatttttgtagaacataaatattcagatcatagcagctgtgaaacaaattaat

SEQ ID NO: 666308 - DNA, 593 bp, Homo sapiens
agcatttatagaaaatagagtaattattcaattgttggtggggagtgtgaaatgtgtgaaaaattgaaacaaaatgataaatatttatgtccataaatttttttatgaaaaaatcaaataattcaaagttacattaccctgacaattgtctcagtttttccaccccacagatataatcaaggaggcaatagtaattgcattttttactagagtcttctcacgctttttaagttctgtgaagaaatgcaatctcagtcactcctataaccaaagcatggaccatttattgttgcattattggtggttcaagtgctgtaacaaaatataaaccaggtgatttaaaaacaatacaaatttctctctcacagttctggagactggaaagtccaagatcatggtgcctgaggattcagtgtctggtaagggctcatttcctggtttgyagtaggttgtctttttgactgtgtcttcacatggtgaaaaggaaaaactctggtctcctcagtcccttataagggcactaatcccattcacaagagctccattctcatgacctaataaactctcaaaagccctacttcactgtaccatca

SEQ ID NO: 666309 - DNA, 619 bp, Homo sapiens
tgtgacagttactttgatttttcttgtttatgattacctttggagttttggtaaatacaagttaggtactatgtagagggtatttctattaaaatttgtttgrtgactttcttatggttaaacttgtttgtgttcttggaaggaagaccaaagatgtaaagaataacgtggtttttttttggtaagtcacccatatcattggctaattaatgttattataattctctagtctatctattatgtgttcaactccatagtgtttctatgcacctttggacttaaatccaggtatattattactcaagtgtgtgagattagcttgatcttcttgaagtacagataaatgcctacagactagtttgatacagtctttaggcttttgtgatatattaatcaaactatgtgatttaactatccaagttcctttataaattttagaacaagaagccctgaaaactatattcagcttgatgactgtaatataaacattatcatctccatcggtactgtacatattaaagactccatgttattttgtaaatcagaataaatttcctaagctagattctcattgaattagtttaataaatgcttattaacagtattcatttgaatttta

SEQ ID NO: 666310 - DNA, 619 bp, Homo sapiens
tgtgacagttactttgatttttcttgtttatgattacctttggagttttggtaaatacaagttaggtactatgtagagggtatttctattaaaatttgtttggtgactttcttatggttaaacttgtttgtgttcttggaaggaagaccaaagatgtaaagaataacgtggtttttttttggtaagtcacccatatcattggctaattaatgttattataattctctagtctatctattatgtgttcaactccatagtgtttctatgcacctttggacttaaatccaggtatattattactcaagtgtgtgagattagcttgatcttcttgaagtayagataaatgcctacagactagtttgatacagtctttaggcttttgtgatatattaatcaaactatgtgatttaactatccaagttcctttataaattttagaacaagaagccctgaaaactatattcagcttgatgactgtaatataaacattatcatctccatcggtactgtacatattaaagactccatgttattttgtaaatcagaataaatttcctaagctagattctcattgaattagtttaataaatgcttattaacagtattcatttgaatttta

SEQ ID NO: 666311 - DNA, 595 bp, Homo sapiens
taaaatatatgcaatttctattggggagaaaatcactataagtgttaaattgctaagacatatggtttctatttataattgaaggatatgttaaattgaagtgaaaatgaagagcaatttttataacttccttgcatgccactttcttcwtctctgagttgatgtcttttgattgttaactagggcattgtatgagaagtgcttagcataatgcctagtattataagatattcagtaattgttcatgtatgtagcttagtcatggtcactaccaaaaagtttacacatatattttgaatatgagaccaactgtgagaacaactatagtatttgaaccttaccaccacaacagaacagatcacactgtaccttaagtgtctagggactataaagaatactagagtttaattctgacagtattaacaaattcttctttatcaaagtacttaagcagaatgaagactcagcttgaacataaataggaaagtcagttgagggcatgcaaaggaaaaggcaaatagaagtctgtggttacagtacagacatatcagggtattgagaatatgacactcggaaggtaagttattcccatagt

SEQ ID NO: 666312 - DNA, 568 bp, Homo sapiens
tttttttattattgcttataaaataatgagatcccctatgaacgaatcaaaggataaagtcctggtatgctccaaaacatggaatgaaagtgaagagcagaagccaaaaacaacaacaacaaacagtaaaagagatatatgaaagttgatgaaaaaacaaagcagagacacagttaaaaaattctagaaaactccttccaaatgaggataataaattayggcaaatgctactgagaggctaacttagatgtgaacatagaaacaattaaattatgacatgataatattattcagtgacctatttagtgaagtcatcagggataaaagacaactagaatgagtaacagaatgggtgactaagaagggagacagtgattcagactagtccttcaggctttccttaatagaccattactgtaaaatcaacaaccatgttaactcaacttccattacttactgtgttgcaggcattaaaggaagcactagaaaaaataaatgaaacataaattcaattctcaagaaacttacaatttggtgggtagcccattcagtcagataaaataataaa

SEQ ID NO: 666313 - DNA, 529 bp, Homo sapiens
atatgaatcaagcatttcctccttagttatactgtatgtatkattatctctagtagcagagtatctagtagtacaacatgaagtgtaaaactgtttatttcatgcctctgtcgagtccctcaatggtttttccctctcccagtgagggccgaggcccctgatcataatctagaagctagaaggctcttaggatctggcctttggtttcgtctgtcctcatctgtgattcttcctgcctttctcctctgtcttgtagtcatactcttctccctcctgttccttcacaacatcaggcacatcatctgctctggtctttgttctgactcttacctctctttctgcgctcttcccctagatgtccatacagttagatccctcacttccttcttgttcttaaataaaaatcttgtctataaaccttacacaagatgtcaacaatctctcactgacatttcttatcctgtttcccatgttcatatgtttcccctcagctatttggatcaaataacataataactgtttagtacat

SEQ ID NO: 666314 - DNA, 529 bp, Homo sapiens
atatgaatcaagcatttcctccttagttatactgtatgtatgattatctctagtagcagagtatctagtagtacaacatgaagtgtaaaactgtttatttcatgcctctgtcgagtccctcaatggtttttccctctcccagtgagggccgaggcccctgatcataatctagaagctagaaggctcttaggatctggcctttggtttcgtctgtcctcatctgtgattcttcctgcctttctcctctgtcttgtagtcatactcttctccctcctgttccttcacaacatcaggcacatcatctgctctggtctttgttctgactcttacctctctttctgcgctcttcccctagatgtccatacagttagatccctcacttccttcttgttcttaaataaaaatcttgtctataaaccttacacaagatgtcaacaatctcycactgacatttcttatcctgtttcccatgttcatatgtttcccctcagctatttggatcaaataacataataactgtttagtacat

SEQ ID NO: 666315 - DNA, 529 bp, Homo sapiens
atatgaatcaagcatttcctccttagttatactgtatgtatgattatctctagtagcagagtatctagtagtacaacatgaagtgtaaaactgtttatttcatgcctctgtcgagtccctcaatggtttttccctctcccagtgagggccgaggcccctgatcataatctagaagctagaaggctcttaggatctggcctttggtttcgtctgtcctcatctgtgattcttcctgcctttctcctctgtcttgtagtcatactcttctccctcctgttccttcacaacatcaggcacatcatctgctctggtctttgttctgactcttacctctctttctgcgctcttcccctagatgtccatacagttagatccctcacttccttcttgttcttaaataaaaatcttgtctataaaccttacacaagatgtcaacaatctctcactgacatttcttatcctgtttcccaygttcatatgtttcccctcagctatttggatcaaataacataataactgtttagtacat

SEQ ID NO: 666316 - DNA, 504 bp, Homo sapiens
atgcctagtccctcagcttcaacacttaaaacattcgggattatcctatgctttctgccaccattgattttttcttataacccaggcagaaaacaagtggtgtgtggtgacattggcttaaccacagaaaatggttcagatttggttcaatgcatttgaatttcagaaaattgacttagaacattaaaacagagatttctttcttcctgatgtaatttgtaacttaaagcctgaatcttctaaaatcactcaattatttgagggaagccactgraggatagagctgacacagaaaggaaagaatatgtagttgatgcaaacataaaataaaataacaaggatcctgattaaagaacaaacgcctgaaaacgctttaggtatcctttgctccttcatttggttttagtaggtttaccatttaatcaaattttgatggcaggagatacaataaattacatatgactattgttttcaatattaagaaatccatgcttaagaacatat

SEQ ID NO: 666317 - DNA, 552 bp, Homo sapiens
tgtaatccctacgctttgggaggccaaggcaggaggatcacttctggccaggagttcaagaccagcctgggcaacatggtgagacactgtctccacacaaaataataaactaaaaaaaaaaaaaaaaattgaaaatgaacacacctttgtaacgatcctgaaacatattgccaagctagccaccagaaagttacatcaatttgcttacagccctagataaatgtattagttaggataggctaaagtgttgtaaaaaatgtaacatagaagtgttcatggtgcgaaagagtaaacaattgttttgtggatattcctttaagtggatttatgacctctgactgatcattaacgacctggtgtctttctctttggcacctacatccaggacacataaaggaaaaagggataaaataaatratgactgctttgaaagctttgttcctttggcattaactaaacaaatgtttacaaggagacttggatatttcatcctgagttgcttccaacctatatctgtaaacaatggaaaatgacaacagatgtttaggaaca

SEQ ID NO: 666318 - DNA, 591 bp, Homo sapiens
taaaatttagtatcagctctacatgtagattaattgatgtgacaaaattatgacaaatatgawcactttttgcatactcacaaataatggtaactatgtcatgatagctattcaagcagaagtaattgtaagatgacatcactctaagacaaactcaacttcagaggcattcaaatatggaaatcatgcctcttgggatttatgaaatgcagtcaaatatagataggcataatctaacaaaaatttcaaaaagaaagatataaataatagagaagaaatactttcaaaattcataatatgaaaacatggtttattttaggagggagaagtatttttatgtcctctagctaagtatttggctgtgtgaaaattcaaaaggcaatgataaaaaaaaaagagataaaacatgtatgaaaaaataaatatatttggacgtacactgaaattgagacgaaataaataaacagcttctgcattacaacttgaaagcttaaagagtaaaaataaaaagaatacaaaattacaagcaaaacgaggaaaattttattgaaagaaaactataatgtgcactaggttaaattctagcagctt

SEQ ID NO: 666319 - DNA, 591 bp, Homo sapiens
taaaatttagtatcagctctacatgtagattaattgatgtgacaaaattatgacaaatatgatcactttttgcatactcacaaataatggtaactatgtcatgatagctattcaagcagaagtaattgtaagatgacatcactctaagacaaactcaacttcagaggcattcaaatatggaaatcatgcctcwtgggatttatgaaatgcagtcaaatatagataggcataatctaacaaaaatttcaaaaagaaagatataaataatagagaagaaatactttcaaaattcataatatgaaaacatggtttattttaggagggagaagtatttttatgtcctctagctaagtatttggctgtgtgaaaattcaaaaggcaatgataaaaaaaaaagagataaaacatgtatgaaaaaataaatatatttggacgtacactgaaattgagacgaaataaataaacagcttctgcattacaacttgaaagcttaaagagtaaaaataaaaagaatacaaaattacaagcaaaacgaggaaaattttattgaaagaaaactataatgtgcactaggttaaattctagcagctt

SEQ ID NO: 666320 - DNA, 591 bp, Homo sapiens
taaaatttagtatcagctctacatgtagattaattgatgtgacaaaattatgacaaatatgatcactttttgcatactcacaaataatggtaactatgtcatgatagctattcaagcagaagtaattgtaagatgacatcactctaagacaaactcaacttcagaggcattcaaatatggaaatcatgcctcttgggatttatgaaatgcagtcaaatatagataggcataatctaacaaaaatttcaaaaagaaagatataaataatagagaagaaatactttcaaaattcataatatgaaaacatggtttattttaggagggagaagtatttttatgtcctctagctaagtatttggctgygtgaaaattcaaaaggcaatgataaaaaaaaaagagataaaacatgtatgaaaaaataaatatatttggacgtacactgaaattgagacgaaataaataaacagcttctgcattacaacttgaaagcttaaagagtaaaaataaaaagaatacaaaattacaagcaaaacgaggaaaattttattgaaagaaaactataatgtgcactaggttaaattctagcagctt

SEQ ID NO: 666321 - DNA, 591 bp, Homo sapiens
taaaatttagtatcagctctacatgtagattaattgatgtgacaaaattatgacaaatatgatcactttttgcatactcacaaataatggtaactatgtcatgatagctattcaagcagaagtaattgtaagatgacatcactctaagacaaactcaacttcagaggcattcaaatatggaaatcatgcctcttgggatttatgaaatgcagtcaaatatagataggcataatctaacaaaaatttcaaaaagaaagatataaataatagagaagaaatactttcaaaattcataatatgaaaacatggtttattttaggagggagaagtatttttatgtcctctagctaagtatttggctgtgtgaaaattcaaaaggcaatgataaaaaaaaaagagataaaacatgtatgaaaaaatamatatatttggacgtacactgaaattgagacgaaataaataaacagcttctgcattacaacttgaaagcttaaagagtaaaaataaaaagaatacaaaattacaagcaaaacgaggaaaattttattgaaagaaaactataatgtgcactaggttaaattctagcagctt

SEQ ID NO: 666322 - DNA, 561 bp, Homo sapiens
actggcagcttttaaggcatgaatagatacaggttaagtagtttgagcaaaaaaaaaaatagataaattctctgtattttgtaatgaatatcatcatggccgtgcagtgccagttttcttgctactaataaggctaagtgtgaccctctggtgaggtgataactgctcaacctcattaataataagggaaatgtaaattaaaatcacaataacatacaaaaacacacctacaggaataactaaaataaaaaatcctgggaaaaccaagtattggctagaatgtgaagaaagaagttttatattgtacaagtatgtatataaattactataaacatttaagacaattactcagtggaattagataaagcgaaacgyatttctaaatgctgctacttgacaattccactcctaaatgacacgtgcacatgagcactaccacaggactttcagtctgtcaactttattgctgctaatttgagtaccaaggtactaaataacatattcatataattatataatagaatatattataatatgttaatacatttgaatgctatgtgg

SEQ ID NO: 666323 - DNA, 531 bp, Homo sapiens
ctttctgcaaaataatatagtagggctacattcatacaatgagttttttattattaaactacctctgaatctattgttgactaaactagcttattctgtttgctttttagttacccaattataagtattgtagaaaagttggaagggtaggtgtttctcctcaaatggttagacaatgtgtcacagagtttaaaaatccatcttgaaaacaaactttacaactccactatttaccacctacctgactttaaagcatataatcactctttgcctcggttttcccatctgtartttgaggtaataataccattaaactcatataatggttcagaggattaaatgtgcccaaaagacacttacctagtgggctgggcacagtggctcatgcctgtaatctcagcattttgggaggcagaagcaggaggatcatttgagcccaggagtttgataccagcctgggcaacatagcgagacacccatctccacaaataataataataatggattagccaggcacagtggcttgtgcct

SEQ ID NO: 666324 - DNA, 622 bp, Homo sapiens
cagggggacgggatatagacaaaggcagcgatttacccatggtgttcatcctttttcccatcttccagtgaccagagttactcctccagaaatcctggttgggctacatggactgtctagctagtatgatgtccagtcattccagttacctttcaaccagtgcagctatctggtctctgtgatcaaagcaaaaatgtgatttatctgcagggcagctccagctggaaaacaagctgagttctggagttctcagggcttggggaaagaaatattggccaggttgggtgcrgtggctcacacctgtgatcccagaacattgaggtcaggagttcgagaccagcctggccaaaatggagaagccctgtctctactaaaagtacaaaaaattgccaggcgtggtggcgtatgcctgtaatccagaagcttgggaggctgaggcaggagaatcgcttgaacccaggagccagaggttgcagtgagccgagccactgcacgccagcctgggcggcagagcaagactctgtctcagaaaaaaaaaaaaaaaagaaaagaaagaaatattggtcaaaataagtgaatgtgaatcaatacataaactgacccaagtatatagtcacaatct

SEQ ID NO: 666325 - DNA, 622 bp, Homo sapiens
cagggggacgggatatagacaaaggcagcgatttacccatggtgttcatcctttttcccatcttccagtgaccagagttactcctccagaaatcctggttgggctacatggactgtctagctagtatgatgtccagtcattccagttacctttcaaccagtgcagctatctggtctctgtgatcaaagcaaaaatgtgatttatctgcagggcagctccagctggaaaacaagctgagttctggagttctcagggcttggggaaagaaatattggccaggttgggtgcagtggctcacacctgtgatcccagaacattgaggtcaggagttcgagaccagcctggccaaaatggagaagccctgtctctactaaaagtacaaaaaattgccaggcgtggtggcgtrtgcctgtaatccagaagcttgggaggctgaggcaggagaatcgcttgaacccaggagccagaggttgcagtgagccgagccactgcacgccagcctgggcggcagagcaagactctgtctcagaaaaaaaaaaaaaaaagaaaagaaagaaatattggtcaaaataagtgaatgtgaatcaatacataaactgacccaagtatatagtcacaatct

SEQ ID NO: 666326 - DNA, 622 bp, Homo sapiens
cagggggacgggatatagacaaaggcagcgatttacccatggtgttcatcctttttcccatcttccagtgaccagagttactcctccagaaatcctggttgggctacatggactgtctagctagtatgatgtccagtcattccagttacctttcaaccagtgcagctatctggtctctgtgatcaaagcaaaaatgtgatttatctgcagggcagctccagctggaaaacaagctgagttctggagttctcagggcttggggaaagaaatattggccaggttgggtgcagtggctcacacctgtgatcccagaacattgaggtcaggagttcgagaccagcctggccaaaatggagaagccctgtctctactaaaagtacaaaaaattgccaggcgtggtggcgtatgcctgtaatccagaagcttgggaggctgaggcaggagaatygcttgaacccaggagccagaggttgcagtgagccgagccactgcacgccagcctgggcggcagagcaagactctgtctcagaaaaaaaaaaaaaaaagaaaagaaagaaatattggtcaaaataagtgaatgtgaatcaatacataaactgacccaagtatatagtcacaatct

SEQ ID NO: 666327 - DNA, 576 bp, Homo sapiens
gtgaatgtgaatcaatacataaactgacccaagtatatagtcacaatctagatatttgtctgaaaacttttctttgtcatgmaaatatactctatagaaaattttttaacacagaaaaaatttcattgtaacaatgtgttctgtaatttttaccattggattattagtgggtatatgttttaacatgttcctgcaattataaatatttataagtaaatattcttgcctcaaatattgcagacagtttctgggtgtatattagctgtgtcaagtgccgtatatacattttaaatgctaagtatgttaatttggtctccttccagaatggttgtgccaatttatactccctaagtcatttatgagtttgcctacccatctgcatactcatcagtatgagtttttaaataatttttaactctgtgaaattaattaaggagaaatgtgggacatgttattttattgttatttttttgaagaattttttttaaattttcaaatttctattctctacaatggacatagttttttcagttgcatgtacctttactctcagtgcttatttctcattataattta

SEQ ID NO: 666328 - DNA, 576 bp, Homo sapiens
gtgaatgtgaatcaatacataaactgacccaagtatatagtcacaatctagatatttgtctgaaaacttttctttgtcatgcaaatatactctatagaaaattttttaacacagaaaaaatttcattgtaacaatgtgttctgtaatttttaccattggattattagtgggtatatgttttaacatgttcctgcaattataaatatttataagtaaatattcttgcctcaaatattgcagacagtttctgggtgtatattagctgtgtcaagtgccgtatatacattttaaatgctaagtatgttaatttggtctccttccagaatggttgtgccaatttatactccctaagtcatttatgagtttgcctacccatctgcatactcatcartatgagtttttaaataatttttaactctgtgaaattaattaaggagaaatgtgggacatgttattttattgttatttttttgaagaattttttttaaattttcaaatttctattctctacaatggacatagttttttcagttgcatgtacctttactctcagtgcttatttctcattataattta

SEQ ID NO: 666329 - DNA, 576 bp, Homo sapiens
gtgaatgtgaatcaatacataaactgacccaagtatatagtcacaatctagatatttgtctgaaaacttttctttgtcatgcaaatatactctatagaaaattttttaacacagaaaaaatttcattgtaacaatgtgttctgtaatttttaccattggattattagtgggtatatgttttaacatgttcctgcaattataaatatttataagtaaatattcttgcctcaaatattgcagacagtttctgggtgtatattagctgtgtcaagtgccgtatatacattttaaatgctaagtatgttaatttggtctccttccagaatggttgtgccaatttatactccctaagtcatttatgagtttgcctacccatctgcatactcatcagtatgagtttttaaataatttttaactctgtgaaattaattaaggagaaatgtrggacatgttattttattgttatttttttgaagaattttttttaaattttcaaatttctattctctacaatggacatagttttttcagttgcatgtacctttactctcagtgcttatttctcattataattta

SEQ ID NO: 666330 - DNA, 510 bp, Homo sapiens
tgagtagctgggactacaggtgcatgtcaccacatctggctaatcttttaaatttattttttatatagatgaggcctcactctgttgcccaaggtggtcttgaattcttgggctccagcgttcctcctgtttctgcctcccaaactgttgagattacaggtgcaagccaccgcaaccagtccttttttattttctaatataygtttgaatctctttgtgcattatttcttatgtttgatttatctatctaaccacgtgcctgtaaaaatacagtttattttatattatatggattttaatgcatgataaactgtctgtattagtatttatttaaaaaagtcaactattttttattctaaatgatatttagagcttcttgaccaagtctattaaaattgattataattaatattacaaattaaatgagaataatttaaaaggaggaccttcttatagtttttccattatgaactcttttaggtaacattttctgatgaaagagtgtttacc

SEQ ID NO: 666331 - DNA, 551 bp, Homo sapiens
ttttaaaaattacaatgtaattacaaataaatttcttcttttctccttcttctttaaatgggaattattyctctttttaccaggtaggaatgatgttaggtttactgtgttttaaatgcacttattactttccaattaatttcaaaactttgtaaaaagtaatatatcttctatatttaaaggtttgagcgtagttcatagaaccatgttgttgaatatgcaattatttactagagtaattgttttcctgggaacaatataccaatattgttctatggaccatatctaagattttaaatattcaagcttatgtaaaataaatgtcgtctgctctaatatagtcatttcacctgcatttaaaattatcacctatcaagtcagaatggttgctgaacttgaaaaattatatttaatgggaaatcatgaatgaacacagatgtttctcattcaagtatcatttcccccctagttgatggcttcttgcttagtagggcatggaatttaagactagaaactactttcctgagaaaaagtgataaagaatagggtta

SEQ ID NO: 666332 - DNA, 551 bp, Homo sapiens
ttttaaaaattacaatgtaattacaaataaatttcttcttttctccttcttctttaaatgggaattattcctctttttaccaggtaggaatgatgttaggtttactgtgttttaaatgcacttattactttccaattaatttcaaaactttgtaaaaagtaatatatcttctatatttaaaggtttgagcgtagttcatagaaccatgttgttgaataygcaattatttactagagtaattgttttcctgggaacaatataccaatattgttctatggaccatatctaagattttaaatattcaagcttatgtaaaataaatgtcgtctgctctaatatagtcatttcacctgcatttaaaattatcacctatcaagtcagaatggttgctgaacttgaaaaattatatttaatgggaaatcatgaatgaacacagatgtttctcattcaagtatcatttcccccctagttgatggcttcttgcttagtagggcatggaatttaagactagaaactactttcctgagaaaaagtgataaagaatagggtta

SEQ ID NO: 666333 - DNA, 503 bp, Homo sapiens
ttacacaaaggagacaatacaacatgcattcttttctgtctcacttattttgcacaacacggtatcagggtaattcttccatgtggttgcacgtatccacatttcatttgtattgctaagcaatattctattgtatcaatatatgactttttatccattcactgattgatacacatcttgtttatttctagtgttagaccattacrgggaaaaaatgggcctatcatcctgaggcataggttttaatttatcctaggaaaatacctagtagcaaaaaatgcttaacctgggatagctaatcatttgcctttataaggaagtatcaaactattttccaaggtgacttaatacttaacactcttacaaacagtatataaaaattcccgttgttccatattctagacagcactaggtatttcaaacttattaattccaactatctagtatattgaaaaagttgtttttataactattgtgagtttgttgagcttcttgaaattata

SEQ ID NO: 666334 - DNA, 581 bp, Homo sapiens
ttctgctagtgtgtaggtcatattttgttttctgttttgcgtttttcaatcattgtctttttaaagagtaatgttaaaattcttttgtaaagcagtgtaatgtrccttttttgttttggttttgttgtttttggtaattagtgctcctgtgatctctctaataatttttgccttaggtttgtgaagattcattgttattcttgaagacttataggattccttttacactgtgacttgtgactaattttgaattctttggggggtttggggtaacataggggttgaagtacatttttctcgtacagatatccagtggtaccttactatttgtttaaaatatttactttttgaaaaaaactttcctttttctcccttaaattagctttatgcttctgccaagaatcacttggccaaatatgtgagactttatttccagaatctttattccatttcattgatttctgtctctatttttcttccaattttactctctcctgtgtgctattactctataatactcctttaaatcagatggtatatgtttcccaaatttgttcatctacttcatagttgcttttatt

SEQ ID NO: 666335 - DNA, 633 bp, Homo sapiens
gtaaactgcatgtcatgggtgtttggggacagaaattactgcatcacccaggtattaagcctagtacctattagttactgatcctctccctcctcccacccttcaccctcagttaggccccagtgatttgaaagaagttctattgtgggtaaaatgaygccggctacagataaatctttttgttcatagaagattcaaccaatgcagcaaacttaatttttgtcttaatataataaatttccacagccaccctcaccttcagtaaccaccaccctgatcagttagcaggcatcaatatcaaggcaaaatcttccatcagccaaaagactatgacttactgaagaatcagatgattaacattttttatcaatgaagtatttttaaattaagttatgcactttttttagacacaatgcttttgaacactaaactacagtatagtctaaacctaccttttagtgcaccaagacaccaaaaagttagtgtaattcattttcattttattctgatattagctttattgcattggtctggaaacgaacttgcaatatctccaagctacagatgtacctgctttctgtttttttttttgtattcattacttttttttttttattagagaaagggaagtaa

SEQ ID NO: 666336 - DNA, 633 bp, Homo sapiens
gtaaactgcatgtcatgggtgtttggggacagaaattactgcatcacccaggtattaagcctagtacctattagttactgatcctctccctcctcccacccttcaccctcagttaggccccagtgatttgaaagaagttctattgtgggtaaaatgatgccggctacagataaatctttttgttcatagaagattcaaccaatgcagcaaacttaatttttgtcttaatataataaatttccacagccaccctcaccttcagtaaccaccaccctgatcagttagcaggcatcaatatcaaggcaaaatcttccatcagccaaaagactatgacttactgaagawtcagatgattaacattttttatcaatgaagtatttttaaattaagttatgcactttttttagacacaatgcttttgaacactaaactacagtatagtctaaacctaccttttagtgcaccaagacaccaaaaagttagtgtaattcattttcattttattctgatattagctttattgcattggtctggaaacgaacttgcaatatctccaagctacagatgtacctgctttctgtttttttttttgtattcattacttttttttttttattagagaaagggaagtaa

SEQ ID NO: 666337 - DNA, 609 bp, Homo sapiens
taccaaaagtttcatgaggatatgtctgatctatacatcttataaaattaaaattttaaatatatattaattcaaatagttttgttgcttttagggaaatagtctttcaagatattctaattgagcatatgtttctggaaaaagaccaactttggctttaactcatttttaaaaattttttatttaaaaacaacatgctggtttttaaaaattcaatcgccatcagtacttaacatacttactatgtcctgattggtagcttgaacaaactagaatctgagattttattccttaattgtcaaagaagccaattgaggttacatgtcatttgtagtataaaaacaaaaaaatcatttctttttatattttgcaatggaagccaatttcgtttcaaaggaaaaaatgacttttagttctttttatggaaacagtagcaccatttgatgaatycttcatattgaccattattttcttaaaaacaaatctatccaccttttctacttttcaaatttttataaattacgtttctggagagagttttccaatgttagagacgtcaatttctctgagctaaaccctccagtttttttttttaatggtccccaagga

SEQ ID NO: 666338 - DNA, 478 bp, Homo sapiens
agcaaggccctgggcctggcacacaaaaccatttttaattcctaggcctccagacctgtgatgggaggggctgctgtgaagacctctgacatgccctggaggcattttctccattgttttggtgattaacattttacttctcgttacttatgcagccaggttgaattgttcctcagaaaatgggtttttcttttctatcacatcatcaggctgcaaattttctaaacttttatgctctgcttcccttttagacataagttccrattccaaaccacttctctgtgaatacataaaactgaatgcttttaagagcacccaagtcaaatcttgatcgctgtgctgcttagaaaatttcttctgccagatgccttaaatcgtctctctcaagttcaaggttccacagatctctagggcaggggcaaaatgctgtcagtctctttgtaaaacatagcaaaagtcacctttattccagttccca

SEQ ID NO: 666339 - DNA, 559 bp, Homo sapiens
tgtctcaaaaaataattaaaaaaacattagccaggtgtggcagtgcatacctgtggtcccagctactcggggggctgaggtgggagaatcatttgagcctgggaggttgaggctgcagtgagccaggatcacactgttgcactccagcctgggcaacagagcaagaccctgtctcaaaaaaaataaataagcaaaaaatagaagaaagaaaaaatttatggaacacacacacatgcacacacacacatatagagagtgygtgagagtgggagcaagagagagagagaaaccaccaattgcaggtgaatgggcctctttatttattaccattaagaagtaaaagaaagggtgagtacctcaaggtgtttctttcaataaccttggaatctgcatgagaatttcaagccacattgagaagcttaaatatagcggaatttgtgagttgatagttttaacctcaaaacgaagatccaccacaaaaaaatttctgtttttatttcccaacactactccccaaccttattctagcttattcctggcccactgcttctgtttcaga

SEQ ID NO: 666340 - DNA, 528 bp, Homo sapiens
ctaattcattctatgaagccaccctaatacccaaaccaggaaaggacacaaccaaaaaataaaactacagaccgatatccttgatgaatgtagatgctaaaatccttaacaaaatactagctaaccaaacccaacaagataatatcaaaaagatcatccaccatgatcgagtggatttcataccaggaatgcagggatggtttaacatakgcaagtcaataaatgtgatataccacataaacagaatcaaaagcaaaaatcacattatcatctcaatagatgcagaaaaagcatttgacaaaatccagtgttgcttgatgattaaaactctcagcaaaatcggcatacaagggacatatcttaaggtaataaaaaccatctattaaaaaccacagccaacataatactgcatggagaaaagttgaaagcattccctctgagagctgaacgagacaaggatgcccactctcaccactcctcttcaacatagtactggaactcctagccagagcaatcagacaagagaaa

SEQ ID NO: 666341 - DNA, 528 bp, Homo sapiens
ctaattcattctatgaagccaccctaatacccaaaccaggaaaggacacaaccaaaaaataaaactacagaccgatatccttgatgaatgtagatgctaaaatccttaacaaaatactagctaaccaaacccaacaagataatatcaaaaagatcatccaccatgatcgagtggatttcataccaggaatgcagggatggtttaacatatgcaagtcaataaatgtgatataccacataaacagaatcaaaagcaaaaatcacattatcatctcaatagatgcagaaaaagcatttgacaaaatccagtgttgcttgatgattaaaactctcagcaaaatyggcatacaagggacatatcttaaggtaataaaaaccatctattaaaaaccacagccaacataatactgcatggagaaaagttgaaagcattccctctgagagctgaacgagacaaggatgcccactctcaccactcctcttcaacatagtactggaactcctagccagagcaatcagacaagagaaa

SEQ ID NO: 666342 - DNA, 528 bp, Homo sapiens
ctaattcattctatgaagccaccctaatacccaaaccaggaaaggacacaaccaaaaaataaaactacagaccgatatccttgatgaatgtagatgctaaaatccttaacaaaatactagctaaccaaacccaacaagataatatcaaaaagatcatccaccatgatcgagtggatttcataccaggaatgcagggatggtttaacatatgcaagtcaataaatgtgatataccacataaacagaatcaaaagcaaaaatcacattatcatctcaatagatgcagaaaaagcatttgacaaaatccagtgttgcttgatgattaaaactctcagcaaaatcggcatacaagggacatatcttaaggtaataaaaaccatctattaaaaaccacagccaacataatactgcatggagaaaagttgaaagcattccctctgagagctgaacragacaaggatgcccactctcaccactcctcttcaacatagtactggaactcctagccagagcaatcagacaagagaaa

SEQ ID NO: 666343 - DNA, 565 bp, Homo sapiens
tatcctttttcctctctttttttgtaaatggaaacacatattttacatcttaattacaccttaatttttctgcacattgcttatttttctttaatggctgtaagatattccattatacagatgcactgtaatatatttaaagagttgcttttttgatagatatttaggttgtttctcatattgtgttgttaagttatactaaataaagtttttgcacatattccatttcacacatgtgcargtatctctatattccaagatgaggaatttctaggtcaaagagaaaatatattagtaattttcataggtattggcaaattgccctctgttctcctaaaccccatgaagtgtgggtttttaaactttttcataatgcctacgatatcttcaaagtataatctgttttcttttttttaattatactttaagttttagggtatgtgtgcacaacgtgcaggtttgttgcatatgtatacatgtgccatattggtgtgctgcacccaataactcatcatttaacattaggtatatctcctaatgctatccctcccccctccccccaccc

SEQ ID NO: 666344 - DNA, 553 bp, Homo sapiens
ctggctttattctttctgcttaaaattgctgtggctatttgggctcttttttggttccataagaatttaaagtaatttttttctagttctgtgaagaatgccatttgtagtttgataggaatagcattgaatctataaatcattttgggcaatacagccattgtaacaatatcaattcttcctatctgtgagcatgacatgttttttcatttttgtcatctctgatttttttaatgttttgaaattctcaagtggagatctttcacctcttcaattagacttattcctagccattttattcttattgtagctattgtgaatgggattacatttttgatttggccctcagcttgggtgtttttgtaattttgaaatgctactggtttttgtaccttgattttgtatcgtgaaactttactaaagttatttattggaactaggaatctttgggcagagactatggagttttctaggtatagaatcatagcgtatatgaagagaaatagttttasttcttctccttttatttggatgctttttctttctttctctt

SEQ ID NO: 666345 - DNA, 596 bp, Homo sapiens
ggggtaagcacagggcgtaggaggaatgaaaatgagggaaaggaacccaagctgagatttgttttctgtgggaggtggagaatagatctcaaagcaggtgaagcttagagcattttgaagaatgagttaaagttggaaatgagagtatgggagcagagacatcctgggcatagaaacrtgaggatctgaaaaaagaaaagaggtaaccacgcattggttgggtatggctggaagcggagatgggcagggtggggatgtggagaaagctgaggctagaggtagtgttgaatacatgtgtcaagagttcaggagagagagggatggagaagctgccctgctggccatcagtatggaggtgggagttggagctgtgggttaagatttgcagagacagcatatggactcagtgtgctagtccattctcgtgcggctaataaagacatacccaaaactgcctaatttattaaggaaagagtttcaatggactcacagttccacatggctagggaggcctcatgatcatggcagaaggcaaaggaggagcaaaggcacatcttacgtggtggcaggcaagagagcctgtgcaggggagctgt

SEQ ID NO: 666346 - DNA, 601 bp, Homo sapiens
tcactatagctaaaatgtggaagcagcctaagtgtccattgagggattaatgtatgagcaaaatgtggtatatacatataaggaatactattcaaccttaaaaaggaaaaaaattctgacatatgctgcagtatggatgaaccttgaggacattatgttaaatgaaataagccagtcacaaaaagacaaacactgtatgattccacttataagaggtatttagagtagaaaaaaaaatcataaaagccagtagaatggtggttgccagggggtgaaggagagggaaatggggagttatcatttaatggatatggagtttcagtttttacaagatgaaaagagttytggagatggatggtggtgattttgtacaacattatgaatctaataccactgaaatgtacacttaaatatgttaaaatggtaaattttgttgtgtatattttaacacaattttttaaaattgaaaaaaatacactggagagagatcagaggatattgcaaaaccaggttatgagtaagaaatatgacagctggatgtttagactgatgttgcttcaaggaaaagaaatactagtattaaaatgaagagattagcagg

SEQ ID NO: 666347 - DNA, 549 bp, Homo sapiens
tattagtggggatgtcagagcatggggarcatgtacagatgagacagggaaaaagaacaaattgggttggaggaggggaggaagttcaatgtagtagaatgcagtgtataatggcagcagtggtaagcaatgagactagaagatagggccaaagaagacagtctacaccaagaaattgagctctcatcttgagactagtgggaagtattgaagactttgtttgtgtttattagtgagagtgacatggccagatttgtatttcacagagattgctctggcagtcccctgactagaaggtcagtgaggaaacgtgaggtaataaaggtgagaaatgctggcaccctgagcttgcagtgtacacagagttcagaggcactggggatggaaagaagtgggtagatttgggagctgtttgagagttagaatcaacagaatgtggcaactgattgggtggactgggaatgaggaagtcagtcttgtgaaaaatgaggtcctgatttctgacttggataatttggtgaatgatgctgctattcacagggataggga

SEQ ID NO: 666348 - DNA, 541 bp, Homo sapiens
tatttgtcaaagcaatatgcctcagaaacctagaaaaagctaaactgctaactctgaagcagaggtaggagtacattgaccaaaaccattcagcactaaaacgaaggaaggatacctttgagttttgggagaggccaatccttgtcgattcttttttcctttttctttttaagttgtttatctaaatagtgttaatacattaatgtttacyctttgtaatctaacaccattttttatattttcttttttcctaattaaatttatacaaatgggctaattaacagagccatccaattcactgcaataattctcagctggggggaaggggtggcggaaggatattactgaaaagcactaagagctaaccaatgttgtcctcaatattgtaatatagccttatgtttagaaaacaaaagaacgacagaaagtgaagtgcagcaaaaaggcttcttggtagaaacacaagaaacacaagatctgaacatcagtggtgcttagaaggacaggaggtacacgtttgaggctgggaagtctactctgc

SEQ ID NO: 666349 - DNA, 610 bp, Homo sapiens
ggacaaactagaaaaagcaaattcttgaacacatttaaaatatttaagcttagaaaaatttaagattttagaggaaaaccatcaaatgtcttgctgtagatttatttaactaacacatacattattcattcttttgtgaactaaatggtttcaacacatagaaatatttgaggatgtgtattaagggtaaaataaattatgtttaaatatgaagtttctttctggcctggtcccccgaggttgaatgagaattgaactggactcaatttgttttctaaattcattcagtgctttctctagaagctgcttgtctttagctttsaaagtagatcttgcctcctttttgtgatatgagtgccacctagagtacactctgagaactcccttaagcactatcgttaaactaaacgataactgaaaattggcttttggaactccgtccttccttaagcaagtaagaacctcagtagcaatcgtattttaaaggagaaaacaaaggtcttcactttcagtattatgacaaggtcaagtttgcaagtcagaacgttacctaaatctttcatttacttagaacaccattaaaccatgtgttaggacgatggctacacca

SEQ ID NO: 666350 - DNA, 495 bp, Homo sapiens
tatcttgtgcgtgtggtggggagacaaatcaggtagggaacaattccttctcgccttacctctctagcttccatgttcttttatggaacaaatcagattaatactwatgttaaggagagctttaaaggagaaagagaatcaataaatcacagcctgaaagttgtgtatgttgtgtgcaagctcagaggggcagtcttcttcaatttgccttgtgctggtgaattgcttgaatgaacttcggtatttcttaacaccaggtactggagcccaccttctttctctccctctggtttcctctttaaatcacagcctgaccccagtctttatagtccattgtaagtggaagttatagctctattcttcacccacaccttgctccctatcattgatacttagaagaaagtaacaatttgcagtactggctgaactcctttgggaaagtttctggagtgtatcaaataagaattcatcatagtaacatggtcgttactggct

SEQ ID NO: 666351 - DNA, 341 bp, Homo sapiens
catccaaaagataaaggctttaaattggcaaaggtatgaaaatagaagacaagggcactaaacaagctttacacacattttcaaggaattgtaaaaatgtataattataatgagaaaaatagggaatcatggtagagaagtagaaactacaaaaatcagcaaatacaaaatataaactaataaacacagtataatatttttaatttaaaacatktgttggattggattaaattttcagtcaccaaattctggtcatggaccaaagctgaaaaactcattatttttaaataaaattatgtttggaacacagccacgctcattagcttacatattgtttttgg

SEQ ID NO: 666352 - DNA, 468 bp, Homo sapiens
cttggctgaagattttttttctttaataatgttgaatatagacccccaatctcttctggcttataggatttctgctgaaagttctgcttttagcctgatggggtgccccttgtaggtgatccgccttttttcattagcttactttatcattttttcattyattttggccttggagaatctgatgattatgtgtcttggggatggacttcttttttagcatcttgtaaaggttctctatattttttgaatttgaatgttggtctttctagagaggttgaggaaattttcgtagatgatatcctgaaatatgttttctgagttggttgctttctccccatgtgtagagcacaccacagccaccatttagagaaaagccccatttcttgctgctatgggcccttgaccccctgttccccaacaagcagagcccctagctcaggcaagcagtgcagctgcttcaccctctgg

SEQ ID NO: 666353 - DNA, 566 bp, Homo sapiens
cacctaatgctaaatgacaagttaatgggtgcagcacaccaccatggcacrtgtatacatatgtaacaaacctgcacgttgtgcacatgtaccccagaacttaaagtataataataaaaaataaaataaaaatgggcaaaggacttgaaaataaaaaaaaaagaaaatgtagttagaactttaccttatagaatatgcaaaaattaactcaaagtgagtcaaaaatctgattatagatgctaaggctaaaaagtattattctaatttttaatttttgtgggtaaataggaggtgtatgtgtttatgggatacacaacctattatgatacaggtatggaatgcataataaccagatcatgaaaaaatgacacattcattccctcaagcacttatcttttgtattaaaatcaatccaattactcttttagttatttttacatgtacaagtaaattattattaattatagtcaccttgttgtgctatcaaataatagatcttattcattctttctaaatattttttgtatccattaaccattccaactgcattccccctgctgccccca

SEQ ID NO: 666354 - DNA, 625 bp, Homo sapiens
atgaactgatagcatctaattgagatttacaaaatgcaccttccaacaacataagaatacacgatttttctcaagtgctcatgaaatatatgccatgagagactatatcctggcccataaaataacttataaagaatttgaatataagatataaaaagtgttatttaactataatggaattagactagaatcagtaacagaaaaacacaaggaatgctttcaaacatttggaaagtaaccartgcatctctaaataatccaagggtcacagtcaaagtctaaagaaattttatagatacatagatagttagatacattataggtatagatatatagtcaaagggaacataaacacaaacaattcatatatatctaaataaaactgaaaacatagcatataaaaatttgtagagcccagctaaagttatgctgatagtgagtttataaaccggatgcttataaaaggagaaaaggtttttagatcaataatctaagtttcaacatcaagaaattataaagagaacaaaatgaatctaagggaagaagaagaagaaaggaaattgtaaagaaagaagcacaaatcagcaagattaaaatacaaaaaaagaaaaagtcattaaaacaa

SEQ ID NO: 666355 - DNA, 635 bp, Homo sapiens
gctcaccctacatccaatatgacctcatcttaactaattacatttttaaaaactctatttttaaataagatcacactgtgagttcctgggagttaggacttccacatactattttgggggaatacaattcaatgtttaactgcagcaaaagccaagtgagggttagctattcagagagccgaaaaaagagaaaaacagagtttaaagaaggaggtagtatctttacactgtttttagttttgtttatgttytcgtttttgggtctctctctgtcgcccaggctggactgcagtggcatgatgttggctcactgcaacctccgcctacctagtgcaacccctgcctcctgggatcaagtgattctcctgtctcagcctcccaagtaactgggactacaggtgtgcaccaccacaacccactaattcttgtatttttagtgaaggcagggtttcaccatgttgcccaggctggtcttgaactcctggcctcaagtgatctgcctgcctcagcctcttaaagtgctggaattacacacatgagctaccacacccagcctttcacactgttttaagagactaccaatattcaatttttttgcatagctgtacagtctctgacttacagtggtttggttt

SEQ ID NO: 666356 - DNA, 581 bp, Homo sapiens
tttctatgtatttcctttcaaacatccaagataatatgtaaatcaattaagtcagtaataattggactcgtatttcttaaaaaatgacagattgaaaatatgaacattgatttttatagctataaaaagtgtaaaatacatagtataatcatatcctttgaattttagctttagagataattatttatttagctttatttcttggtttttgtttgcttttgataagaggaatgragtatgagagcttaagagacttgtccaaattgacccaattagaaaataaacccacgaaatagaaaagcatttccatgaattttgtcttttaaagtgtatctgagaaaccactaaaccagcaattctaagcccaataagataaatatgccatgcaagaaaattatgttattctcatgtaccgaaataaactaattattcagtgaaaataaaatagtcaagagtttataatgaagaacagaaaaaagaatcaagttggtattcaaatgaatggaataccatagaatgtggtatattgaaggaatatatagaaggaacaatgttaaatcacttaggtattagaaatatct

SEQ ID NO: 666357 - DNA, 617 bp, Homo sapiens
aaacaaaacagcctcataacaataaatgtaaatggtttaagttatttcaaaagtaagtgacactcaaaatttttgtgtgtgaaatgttaaataactgtatgctatgaagatgaggaaaatctaaactaagcacataaaatgccttattgtcatctacatctagattttccagatcaatattctttggtcctttgtaagatacagtttccctttttcatgttaaaaacaaagctattggtagaataatcagtaaactatctttttagaaaataaacctaaatttcatatagtcatcaaattcagcaataattttgtrttaatacaatgaggccattattatttttcctattaattatttatggtaccactcttaaacatttttgaaaattgttgaaaaataaaatcagcacagccaaccaaaagtgcagtatgaaatgttttttagattgttctctaagacaattttgagtaaattaaactaaattgaaatagtgaggagaaaaatcacataatgaaaattcaaatttcccatatttattcttactggatgcaaacatataattatagtattgaaatcaataaaagaaaatatagcaataatgtcaacttggtataat

SEQ ID NO: 666358 - DNA, 552 bp, Homo sapiens
aactgtactgtctgaaggaatgaatggaagtttttaattccttgagccatggccagaaacarctagaggaataagatatttcctctaatgatgtgaataaagcaaagtgtggagcaatgttaccttacaagcatctttatgcaaattaagtgcattttttgttgttatttgacatctcactccataaatgagattcaacctgcatgtaggaaatgaaaaagatgatcttgacttaactaatatttcatccataaaggtaatttttgatttatgggctgaacttgtccataaaaacattgtgaaaaagaaagtttatcttcaactttcttcaccttcctgtctcgttttctatgtttccttttcgcttccagatcccagtgtttttttctgacaatattcttcaggctataggtgtccatacatttcctggatcttcatctcttaccacagaatgtggagttggtatcttaagtcattacatatcctaaaaaaacaggtagatccatattaaacagagtttcatagaaaggtatggatttgaattctgtttat

SEQ ID NO: 666359 - DNA, 539 bp, Homo sapiens
taaggggcttttcccccttttgcactggacttctctcttgccggctgccatttaagacatgactttgctcctcatttgcctattgccatgattgtgaggcctccccagccatgtggaaatgtgagtcaattaaacctctttcctttgtaaattactctrtctcaggtatgtctttattagcattgagagaatgaataatacaataaattgttactgggagtggggtgctgttttaaagatacccaaaaatgtgaaagtgactttggaactggggaacaggcagaggttggaacagtttggaggactcagaagaagatagggaaatgtaggaaagtttggaacttctgagagacttcttgattggctttgaccaaaatgctgatagtgatatggacaataaaatccaggctgaaagggtcttagatggagatgaagaactttactctagttggaaactagagtaaaggtcactgttgctatacaaaggactggtagcattttgcccctgccctggagatccatgaaactttgaatttgag

SEQ ID NO: 666360 - DNA, 569 bp, Homo sapiens
aaattatctatttcatcttgggtgagtcgtgaaaatattttcaagacttggtccaatttgtctaagttgtcaaatttatatgttttagagttgtttatagtattcctttattaccttttatatatatatataggatttataattgtatcctatttttattcctgatatttatactaataatttggttattcttttttccttactgttactagagatatgttaatattattgattttttcaaagaataaactctttgtctcattggttgttttccaatatttatgtttttatttttttattttattcacttatagtcttattattttctttcctatgcttactttgggtktattttacagctttttatatatattctttaagtgggagagtagatgatttatttgatgcttttaatttttttgaatgtctttatttatagctatacatttctttctcaacactgatttagctgtctcccacaaattttggtacgttgtctattccatttcattttatttcaatatattttcacaaattcatttgagacttttttgacccatagattattt

SEQ ID NO: 666361 - DNA, 635 bp, Homo sapiens
cctttaaaactctgtttattcttgtttaagcatttggatttcagaaaaacattatgtcacttgaatttgaatttttttttatttttattcaaactgtgaacccaaaagtatttgaggcaggtttcaatcaatttagaaagtttattttgccaaggttaagrattcacatatgataaagccattcatatggtttggggaccttagaattttattttgttttaacattctccctcttctggccaaggtttgccagagacagcatcaatggcctccaaatgtttattttgttccatagcattgccagggctaaaggactgtctgcctcaggtccatcctgtccctcggtgggacactctgtggcagagggacttagagtcaagagacttatagccaattaaatattccaggccagacaggaatgaacatggacaggcattcattatcccataatttttttttttgttttaaagagccaacaaacaaaaagccgaaggcgaggttacaaaactgaattatatttaacttctgtgtgttgagctactgcaatcttggttttagttacagacataaaacaattcactatataaagcataacattgttctgaaaaataaattttaaatatatatttatctgc

SEQ ID NO: 666362 - DNA, 635 bp, Homo sapiens
cctttaaaactctgtttattcttgtttaagcatttggatttcagaaaaacattatgtcacttgaatttgaatttttttttatttttattcaaactgtgaacccaaaagtatttgaggcaggtttcaatcaatttagaaagtttattttgccaaggttaaggattcacatatgataaagccattcatatggtttggggaccttagaattttattttgttttaacattctccctcttctggccaaggtttgccagagacagcatcaatggcctccaaatgtttattttgttccatagcattgccagggctaaaggactgtctgcctcaggtccatcctgtccctcggtgggacactctgtggcagagggacttagagtcaagasacttatagccaattaaatattccaggccagacaggaatgaacatggacaggcattcattatcccataatttttttttttgttttaaagagccaacaaacaaaaagccgaaggcgaggttacaaaactgaattatatttaacttctgtgtgttgagctactgcaatcttggttttagttacagacataaaacaattcactatataaagcataacattgttctgaaaaataaattttaaatatatatttatctgc

SEQ ID NO: 666363 - DNA, 635 bp, Homo sapiens
cctttaaaactctgtttattcttgtttaagcatttggatttcagaaaaacattatgtcacttgaatttgaatttttttttatttttattcaaactgtgaacccaaaagtatttgaggcaggtttcaatcaatttagaaagtttattttgccaaggttaaggattcacatatgataaagccattcatatggtttggggaccttagaattttattttgttttaacattctccctcttctggccaaggtttgccagagacagcatcaatggcctccaaatgtttattttgttccatagcattgccagggctaaaggactgtctgcctcaggtccatcctgtccctcggtgggacactctgtggcagagggacttagagtcaagagacttatagccaattaaatattccaggccagacaggaatgaacatggacaggcattcattatcccataattttttttkttgttttaaagagccaacaaacaaaaagccgaaggcgaggttacaaaactgaattatatttaacttctgtgtgttgagctactgcaatcttggttttagttacagacataaaacaattcactatataaagcataacattgttctgaaaaataaattttaaatatatatttatctgc

SEQ ID NO: 666364 - DNA, 602 bp, Homo sapiens
agggtttagtgtagtagattgaaatgtgctggttgtaggtgggactccacagggtgtcaccattgagttgtttctgtcctcttacatgtctcagttactctctatagaagtattgcaccttcaaaaatcctcaaaatgttgagcgcccasctcctatatgcatttcccttttaagctaattttgtttagggctccctgtagggccgctgtatatcatggggtgtcaaccccccagacatttgcagttggcccttggtcactcagggacaccttttggccgagaagagcaaaatgccttgcctctttggagctgaggaaactcagtctctcatttaactataaaaatgacagtttagtttctcatgcaaatgcacatacaagccaaccaagcttaatttggagagaaaaagtgatggagaaaatcctatagaatgcacctccaaattagaattaagatcctaaacgacaacctcctggggggaggatcccacagctaagaccactttatctagactgtcctcagccacccctaactctcttttgccaaggtcaaatcttctcatattacaaggtaatctctggtacccaaaagtcaaagaggt

SEQ ID NO: 666365 - DNA, 631 bp, Homo sapiens
cagttacaaaattcaatgtagaaaacttgttgctgcatagcattctaaatttttgtttatgcaatcctttggctcccttttattttgtttttccttccagaagttttttggcattttgtctttgttcctagaattctaagattgtacagtaacatgtcttggtgcatattcacttttttgaggtgaaatatatatttagtaaaattatctacttttaattaatttatgagattagggaaatatgtaaattcatgtaactacccctgcaatcaacagttagaatatttcagtcatcttgttacayagtttagacttttctagaatttcagtctttagtgtctcttttctttaacttagcatactacttttgagattcatccatactgttgttttgtcagtactttatttcttgttgttgatgagtagtattacattttatgaagataccgtaatttgtttatatattttagttgatgtgtctttgggtgtgtttggggaaaacacttaaaatgtgttttttctctgctctcacaccaccacaacaataattaacacagaagacttctgtgaccaaatgtgggtggtggttctctccaccactaaacaagcagtctatgctgcaatggacaca

SEQ ID NO: 666366 - DNA, 559 bp, Homo sapiens
ttgggaggtgattctcatgaggcggagccctcaggaatgggattagtactcataaatgagaccccagagagctctccttccaccctatgagtggccaggaagtgagccctcaacagacacctyatctgccagcaccttgatcttggactttccagcctctagaaccatgagaaataaatttctattgtttataagccaaaaaaaaagaaagaaatgtagtcctacatacttggtagaatagattcagtttagcttaaagattgcatttcccctttactttgcatgtagatatggaaaggtggttatattctggaaagatggtaagtgttatgcttcttgttcatgaaattcacagatgtcaaagctgagactaccatcttggaccatgaaatggcctaacatagctcagtagagcaaagataaaagaatccttagtacttgccgccacagaaaactacagcagacctgggctacctgcctctggactttcattgagaaagaaataaacttctctatcttcttacagttatagttactttgagttactttcacccatagc

SEQ ID NO: 666367 - DNA, 622 bp, Homo sapiens
gctggtctcaaactccttaactcaagcaattcacctgcatcagcctcccaaagtgctgggattacaggcatgtgggctattttataaggatcaaaaatagcacttccaattatacattaattttcctaattttaaaatgtaaattgagaaagaagtttttacatttatttctaaatttacattttaaaattaggcacaaatgtataatttgaagtgttattttggatcctgacaaaatagccagtatacctgcaaaacactggaattatttaagtagctgtcattgcttagttcagtcaaacttcaactccagcaaaattcttctcttatgtaataaaagaatctttagaatagcaagccgttcttagtctgcaaaakaaaacagctcattgacctacaaaactttagtatataagaagatagtaggacatatcctggtaaagttactaaatttcaaggaaaaagagaaataaaaactacaaaagcctaggtagaaacataaattgcctataaagacaacaattaagtgctattattttagttcccagtatctcaacaataccaggaaacagaaatctacagatcaactttaacagataactgtaggggaaaagatacatgc

SEQ ID NO: 666368 - DNA, 590 bp, Homo sapiens
tctggcttcttatttctcatctggcaatggtcataaattcctaactttccaataatgcattgcagattctaagaaacgaataatattatcagatcattactttgcaacaaatcaggacttctttggtttttctttcatatcaccaactgataagactctgtaattttttaaactcaaaggaatttacttttgtcactaagaaagtgatgagactgagaagaatcatctcttttaatgctgtaaagcaaagatcctaagagtttcactctgacataacaaaaaagatgtactaaagcagatgtgcttgttcatttcacaatagtcagtagaaaaatcatattaattattasagaacaagatcattagaaacacatacccaaatctcagatgattataggtaacaagccggtaggcagagggcagagtactttttttgtttttttgtgtttttttggagaaagggtctcgttctattgcccaggctggagtgcagtgacaccatcacggctcactgcagcctcaacctcctgggctcaactgatactccccctcagctgtcctagtagctgggactacaggcacatgccacc

SEQ ID NO: 666369 - DNA, 633 bp, Homo sapiens
tatggagttataaaaccattcaaaaaaaagagaaggatgtttttatatctactggcatccagctgctgttattatgtataataacatatttgcagtaaattacagaaacaaaaaatatagactttggaatcagagagccctgaattcaaaattgtgatctcccacttcctatcgctgtraccttgagaaagttaactagcttcttcaaggtcctatcactcttccactctgaagattatatctgactcaggacacatttggaagatgaaatgaggccccgatataaactgctcagcatatcatcatacatgctctacatctgctatgagacaggaagtatgaggtttgcacacaaagatcctctcttctccaggtttccttgttaagaaaattcaggaggagaaacactccccaattccttccttgtcctttgctcttggtaagagtgagtgaagaaactgagctgctttgcctctgccctttctagattctctctcttttgaattggccttcctgtaggggaaaaaaaagtattctggctagatgacctgtatgtgttaagattaatggtgacgactatgtattatttcttcattggtttctgaacttcaatgagtaagatgaggacagctt

SEQ ID NO: 666370 - DNA, 571 bp, Homo sapiens
aaaaccttatttaaggaagaaattggtagagatcacttaaattctagttaatttatactaaaatattttattttgaaaataagaattttaaggctgggtgcagtggctgacgcctttggctagcactttgggaggcccaggtgggctgaacgttaggggccagragttcaagaccagcctggtcaacatggcaaaaccccatctctactaaaaatacaaaaattaaccagacatggtggcacatgtctgtaattccagctactcatgaggctgaggcacgagaattgcttgaattcaggaggtggaggttgcaatgatccaagattgtgtcactgcaagccagcgtgacatagtgagactccacctcaagaaaaaaaaggagagagaataagaattttaggtgatgtcatctaagaggtggaaagatctgcttctgattaatatattctatgtagcaagagctggatggagcaatatttttgcatctatgtgtggagtgatggtgagacatcaggcagcctaaacaagtatttctttacaatatctgtgttttaggcactgtatagtagca

SEQ ID NO: 666371 - DNA, 571 bp, Homo sapiens
aaaaccttatttaaggaagaaattggtagagatcacttaaattctagttaatttatactaaaatattttattttgaaaataagaattttaaggctgggtgcagtggctgacgcctttggctagcactttgggaggcccaggtgggctgaacgttaggggccaggagttcaagaccagcctggtcaacatggcaaaaccccatctctactaaaaatacaaaaattaaccagacatggtggcacatgtctgtaattccagctactcatgaggctgaggcacgagaattgcttgaattcaggaggtggaggttgcaatgatccaagattgtgtcactgcaagccagcgtgacatagtgagactccamctcaagaaaaaaaaggagagagaataagaattttaggtgatgtcatctaagaggtggaaagatctgcttctgattaatatattctatgtagcaagagctggatggagcaatatttttgcatctatgtgtggagtgatggtgagacatcaggcagcctaaacaagtatttctttacaatatctgtgttttaggcactgtatagtagca

SEQ ID NO: 666372 - DNA, 571 bp, Homo sapiens
aaaaccttatttaaggaagaaattggtagagatcacttaaattctagttaatttatactaaaatattttattttgaaaataagaattttaaggctgggtgcagtggctgacgcctttggctagcactttgggaggcccaggtgggctgaacgttaggggccaggagttcaagaccagcctggtcaacatggcaaaaccccatctctactaaaaatacaaaaattaaccagacatggtggcacatgtctgtaattccagctactcatgaggctgaggcacgagaattgcttgaattcaggaggtggaggttgcaatgatccaagattgtgtcactgcaagccagcgtgacatagtgagactccacctcaagaaaaaaaaggagagagaataagaattttaggtgatgtcatctaagaggtggaaagatctgcttctgattaatatattctawgtagcaagagctggatggagcaatatttttgcatctatgtgtggagtgatggtgagacatcaggcagcctaaacaagtatttctttacaatatctgtgttttaggcactgtatagtagca

SEQ ID NO: 666373 - DNA, 574 bp, Homo sapiens
ggagggaacagaaaatattcttattataacaataaaatggtaaaattacagaagacaaaacactccagagcttgacrtctatagagaactgcaattttggtcatcttcttcttcttaatatgttactgcaataaaggtataaaggacaacaatgagcagatttttcttccacacaaagtttataatatactggaaaatattatctcagacatatagttgttgttgtatagatataagaaaccaggggataagtgtataaaatttactccctggaaagtccttaaaatataaacagtgggcgcctacaatcccagctactcaggaggctgaggcaggagaatatcttgaattcgggggtcagaggttgtagtgagccacttcactccagcctgggagaaagagcaaaactccgtctcaaaaaaaaaaaatacacacacacacacacatatatatatatatatacacatacatacacatatgtatatatgtatatatgcctacatcacagaatataacaaaagagatgctgttacattatggagcagaggacccgattctctgaatattttaagat

SEQ ID NO: 666374 - DNA, 522 bp, Homo sapiens
tactgattatttcccaaaggccccaacatacaaacacctcggggattagggcttcaacacatgaaatttggagaaggatgcatacacattcaattgataactctgtatattcttactatactatttttttcaaaactaattgctgattttttttaatgctgaaaattaccttcctagaatatgaaattaccttggtgttacaggaataaaattatttctttattcacgttccttgttgcaaacacagccttttttattagtccattttcatgctgccaaaaaatacatacccaagactgggcaatttacacaataaagaggtttaatggacttacagttcyacgtggctggggaggcctcacaatcctggcaaaaggcaaggaggaacaggtcacgtcttacgtggatggcagcaggtaaagagagagagtgcttgtttagggaaactcccctttttacagccatcagatcttgtgagacttctttactatcacaagaacagcatgagaaaaacttgccccc

SEQ ID NO: 666375 - DNA, 522 bp, Homo sapiens
tactgattatttcccaaaggccccaacatacaaacacctcggggattagggcttcaacacatgaaatttggagaaggatgcatacacattcaattgataactctgtatattcttactatactatttttttcaaaactaattgctgattttttttaatgctgaaaattaccttcctagaatatgaaattaccttggtgttacaggaataaaattatttctttattcacgttccttgttgcaaacacagccttttttattagtccattttcatgctgccaaaaaatacatacccaagactgggcaatttacacaataaagaggtttaatggacttacagttccacgtggctggggaggcctcacaatcmtggcaaaaggcaaggaggaacaggtcacgtcttacgtggatggcagcaggtaaagagagagagtgcttgtttagggaaactcccctttttacagccatcagatcttgtgagacttctttactatcacaagaacagcatgagaaaaacttgccccc

SEQ ID NO: 666376 - DNA, 580 bp, Homo sapiens
gtgcccacacatggggctcgaacccaggtcaaagggtcactggagtgacagttggagaacgtggaactaagctggaagacacccgagtactcttaagcaatccccatggttagtaagaaggggagctcggaagcatcagggtaacaatgtgacaagtgtgggctctggttcattccaccttggmaccttttcacactgatgatgaggaggaaggagggtataatgaagtaacagagcaggtttgtttgccagctaaagctaaagtggcaaaggaggaagaggtccatcctgacccttctgcaccccctccttattttgaagaaaaagagtggcctgaccctccagatctttcttttccagaggacactgggtgaaaagtagttgccccagtgactgtttgagcagtgcctcgagcaaccaccctcagttctattcagacagaaatccagcaagctagatgtaagggtaatatagaggcttggcagttccctgttaggatacaccccccagatcaacagggaaatattataactacatttgagccttttccttttaaattactcaaagaatttaaacaagc

SEQ ID NO: 666377 - DNA, 580 bp, Homo sapiens
gtgcccacacatggggctcgaacccaggtcaaagggtcactggagtgacagttggagaacgtggaactaagctggaagacacccgagtactcttaagcaatccccatggttagtaagaaggggagctcggaagcatcagggtaacaatgtgacaagtgtgggctctggttcattccaccttggcaccttttcacactgatgatgaggaggaaggagggtataatgaagtaacagagcaggtttgtttgccagctaaagctaaagtggyaaaggaggaagaggtccatcctgacccttctgcaccccctccttattttgaagaaaaagagtggcctgaccctccagatctttcttttccagaggacactgggtgaaaagtagttgccccagtgactgtttgagcagtgcctcgagcaaccaccctcagttctattcagacagaaatccagcaagctagatgtaagggtaatatagaggcttggcagttccctgttaggatacaccccccagatcaacagggaaatattataactacatttgagccttttccttttaaattactcaaagaatttaaacaagc

SEQ ID NO: 666378 - DNA, 578 bp, Homo sapiens
tagttaaggctctaaatcacttgattttgaattaatcaaaagggagattaccttaggtaggcgtgaactaatcagctgaaagttctccaaagtggagccaggcttccactgaagtaagcgactctctctattactgagtttggagaagtaacctgtcatgttgtgggcgggtctgtggaagagccatgtgacaaggaactgcagatggcctctaggagcttagagcagtctggccaacagccaggaaaaaaaaaaaaaatcttaaaaaaggaccctctgtcctacaaccacaaggaggtaaattctccaacaactaaagtgaggttggaaacagatctcttcacagttaagccctgatgaaacggcaaccctagaaaacacctagcttgcaatatggcaagaccctggagcagagaactgaggtaarctgcacctggacttctgaactacagaaactgaagttgtaagccactgagattgtggctttttttttaatacaacatagaaaacaaacatactcctcttgacagaaatgtttttaatttagagtacagaaagataaaacacaataataagta

SEQ ID NO: 666379 - DNA, 556 bp, Homo sapiens
tttatactattatgccctcagatttcctgtcagcacaatttcctgttgtaaaatcaagtggtcactggtaaacttttttattttttaacttttatgttaggttcaggagtacatgtgcagatttgttatacaggtaaactcatgtcacaggagtttgttgtacagattatttcatcacccaggtactaagcccagtacccaatagttatttttctaatcctcttcctcttcccaccctccatactcaagcagaccttagtgtctgttgttcccctccttgtgtccatgtgttctcatcatttagctcccacttgtaagtgaaaacaggcagcatttggttttttgttcctgcgttagtttgctaaggataatggcctccagctccatccatgttcctgccaaggacatgatctcgctcttttttatggctgcgtagtattccatggtgtatatgtactgcattttatttatccamtctgccattaatgggcatttaggttgattccatgtttctgctattgtaaatagtgctgcaattaacatacacgtgcatata

SEQ ID NO: 666380 - DNA, 676 bp, Homo sapiens
ccaactctttctagagagtaagtttggctgtgtgtggatgaaggaggagggaggatttttgcacagggagggaggttctttcaagagctggagatgggaaccaagggggaagaaggctgaagaaagcagaaacagggggcactggagacagaaacacctgctctgcaattttgtccagcaaggtccagccccatctggttttctgactttccattttgatgaggaaaccccagataaaaagttttgagaattcagttgcccatcatctctgcagacttaaaatgcatagaaaacacaccagttttcaatctttaggcttttcccctcccaagttaaacaagtcagagagaattaaagtctcttaacagaacgcaktcaccattaaagtttaatctacttcctggaaaattatccatggattttaattaagttcccctaaatgccagtgaacccagagggttccacacaaaggaagagaagcagcctgccaggctgtgctctctggcgcctttcaccagcttctcggagataagttagggggagcagtgcgtacttttgtctttctcatgactgggcccagctttatcgcaacataaagaaaactcatgtcatggtatgaagaaagtctttgaaggctccttcagtagttgttttaacaacacgggacacagccttg

SEQ ID NO: 666381 - DNA, 676 bp, Homo sapiens
ccaactctttctagagagtaagtttggctgtgtgtggatgaaggaggagggaggatttttgcacagggagggaggttctttcaagagctggagatgggaaccaagggggaagaaggctgaagaaagcagaaacagggggcactggagacagaaacacctgctctgcaattttgtccagcaaggtccagccccatctggttttctgactttccattttgatgaggaaaccccagataaaaagttttgagaattcagttgcccatcatctctgcagacttaaaatgcatagaaaacacaccagttttcaatctttaggcttttcccctcccaagttaaacaagtcagagagaattaaagtctcttaacagaacgcagtcaccattaaagtttaatctacttcctggaaaattatccatggattttaattaagttcccctaaatgccagtgaacccagagggttccacacaaaggaagagaagcagcctgccaggctgtgctctcyggcgcctttcaccagcttctcggagataagttagggggagcagtgcgtacttttgtctttctcatgactgggcccagctttatcgcaacataaagaaaactcatgtcatggtatgaagaaagtctttgaaggctccttcagtagttgttttaacaacacgggacacagccttg

SEQ ID NO: 666382 - DNA, 709 bp, Homo sapiens
ggacctgtttgtgtaggcctttgcaggccattgtgggaacattttcaggtctcccagggaaaaagagaaaacaatattaatcaaccactgccttagtcagtttgggcagctataacaaattatcataaactgaatggcttaaacaacaccatctctttttctcacagttgtagaggcttaaagtccaagatgagagtgtcagcatgatgaggttcttggtaaaagcctcttttctgattgcagatattcatcttcttgtatcctcacagaggggagggagacagagaagaagcaaactctctcatgtcccctcttataaaggcactaatctcatttatgagggctctgccttcataacctaatcacccctcaaaagcctcagctcccaataccattacattgggggttaggattttaacatatgaattttggagggacacaaatattcagtccataacaaccatgattgaccatgatagaggtagaatagaaaacaagagaggagcaaaaagagtrgagatgagaaatagtctgctgtttaaaagatagaagcagatggagtctgcaaagtataaaccaagggctggctttttctgtaaaggatcagatagtagatattttgggccttgtaggccatatggtctctgtcacaatgattcaactctgcctttacagtgtgaaagcagccatagacaatgtagaaatgaat

SEQ ID NO: 666383 - DNA, 709 bp, Homo sapiens
ggacctgtttgtgtaggcctttgcaggccattgtgggaacattttcaggtctcccagggaaaaagagaaaacaatattaatcaaccactgccttagtcagtttgggcagctataacaaattatcataaactgaatggcttaaacaacaccatctctttttctcacagttgtagaggcttaaagtccaagatgagagtgtcagcatgatgaggttcttggtaaaagcctcttttctgattgcagatattcatcttcttgtatcctcacagaggggagggagacagagaagaagcaaactctctcatgtcccctcttataaaggcactaatctcatttatgagggctctgccttcataacctaatcacccctcaaaagcctcagctcccaataccattacattgggggttaggattttaacatatgaattttggagggacacaaatattcagtccataacaaccatgattgaccatgatagaggtagaatagaaaacaagagaggagcaaaaagagtggagatgagaaatagtctgytgtttaaaagatagaagcagatggagtctgcaaagtataaaccaagggctggctttttctgtaaaggatcagatagtagatattttgggccttgtaggccatatggtctctgtcacaatgattcaactctgcctttacagtgtgaaagcagccatagacaatgtagaaatgaat

SEQ ID NO: 666384 - DNA, 709 bp, Homo sapiens
ggacctgtttgtgtaggcctttgcaggccattgtgggaacattttcaggtctcccagggaaaaagagaaaacaatattaatcaaccactgccttagtcagtttgggcagctataacaaattatcataaactgaatggcttaaacaacaccatctctttttctcacagttgtagaggcttaaagtccaagatgagagtgtcagcatgatgaggttcttggtaaaagcctcttttctgattgcagatattcatcttcttgtatcctcacagaggggagggagacagagaagaagcaaactctctcatgtcccctcttataaaggcactaatctcatttatgagggctctgccttcataacctaatcacccctcaaaagcctcagctcccaataccattacattgggggttaggattttaacatatgaattttggagggacacaaatattcagtccataacaaccatgattgaccatgatagaggtagaatagaaaacaagagaggagcaaaaagagtggagatgagaaatagtctgctgtttaaaagatagaagcagatggagtctgcraagtataaaccaagggctggctttttctgtaaaggatcagatagtagatattttgggccttgtaggccatatggtctctgtcacaatgattcaactctgcctttacagtgtgaaagcagccatagacaatgtagaaatgaat

SEQ ID NO: 666385 - DNA, 601 bp, Homo sapiens
ttttggttttcttcccttttctgcttcttactatttatatgttatgcagaaatcagaggtacaaacagcatggggtttctctgcagatgtgatragaagaaatgagtaagagaaaactagaatgaaattaagaatgattgccttgatattccatacaggagctgacacccaggctcgttagagctgctgttattgctgtttatcgcgtattttcttcttttgtttcttgggttgggagacttttataggctgaatacttagtctgcattgtgctctaacagaaacttcagcttctatttttgcgtaattttgaacatcaagctgcttttcctttgaactccaatttttagctgtgggacacctttggtctggtctgcttcctgggtaaccacttccttctcttgcttctttgggaagaaattaagaaattgattgactcttttctgttcagacaaaaatcaacctactgaacaaataacctagagtcaggagtcagcgtttcctgacgtggcccaataatgttaaactcattaacacactggatatttcagtgtgtttagcatggacagataaaaaagaaatgttgaataatgtttagcct

SEQ ID NO: 666386 - DNA, 601 bp, Homo sapiens
ttttggttttcttcccttttctgcttcttactatttatatgttatgcagaaatcagaggtacaaacagcatggggtttctctgcagatgtgatgagaagaaatgagtaagagaaaactagaaygaaattaagaatgattgccttgatattccatacaggagctgacacccaggctcgttagagctgctgttattgctgtttatcgcgtattttcttcttttgtttcttgggttgggagacttttataggctgaatacttagtctgcattgtgctctaacagaaacttcagcttctatttttgcgtaattttgaacatcaagctgcttttcctttgaactccaatttttagctgtgggacacctttggtctggtctgcttcctgggtaaccacttccttctcttgcttctttgggaagaaattaagaaattgattgactcttttctgttcagacaaaaatcaacctactgaacaaataacctagagtcaggagtcagcgtttcctgacgtggcccaataatgttaaactcattaacacactggatatttcagtgtgtttagcatggacagataaaaaagaaatgttgaataatgtttagcct

SEQ ID NO: 666387 - DNA, 608 bp, Homo sapiens
ctcatttgctgcttttatgtaaggtagcttggatggctctgggatatccccactcttcttgagtacttttattttttattttactctcttttttctctccttaacttcatatttgtcatcatagtagcagatgaatggagatactggagacaggtcatacacttctctttctggacacttgtgtccataatggccttttgcatgcagtgacagcaatatgctaaggctgatggttttgaagggtcttyggctttttgggtggtctgggtttggtcgtgaggtgatattgcctccagatttctgtgcaagcatctgtatagtggcctagcatatgacattggtcacactgtttatcccaagaatgtctgaaaagacatgagtggtccaacatcttaggcacaggacagtatttgcaaaggggggctggacaggaatacaggaggtgtcctctccaggagcacaggaagcagcaacgaacttttcatggtaagggacagttttttgataaatggccgtgtttgtcacaatttctacagataatgttttcattggctgaataatatcgctgggtccatcttccaggttattggttattagctatctgggcc

SEQ ID NO: 666388 - DNA, 529 bp, Homo sapiens
ttctttactatccccttagctgagcaagactgaacagtttgcatttacaattcctgtggtaaacaatctgcagcctgctaagcgttttcattgttttacagaagggtctagtaatggtaaagctccttattctggctcaaaaagtaaagttttccagacaccctatgcttcagggactacagatgcccaccactatggccagctaattttatttatttatttatttattttatttttagtagagacgagatttcaccatgttggccaggctggtctcaaactcctgacctcaagtgatccacctgcctcggcctcccaaagtgctggtattacrggcatgagccactgtgactgccctcttttactaattcttaagatgggcatattcatttgctagagctgcgatgagagaaggcttaaacaacagaaatttattttctcagagttacggatgctagagtccaagatcaaagggtcagcatgtttggtttcttctgaggattctccttggcttccagatggttgcctc

SEQ ID NO: 666389 - DNA, 621 bp, Homo sapiens
atttatatttaaaaatagttaaaatagaatttctgaattcagaagagagaatatcagtaaccaggctgttttaaatttatttgcttgatgatgttatgtaggtcttaacattttaggacagcttggccgggcacagtggctcacgcctgtaatcccagcacagtggctcatgcctgtaatcccagtgggaggccaaggcrggtggatcacctgaggtcaggagttcaagaccagcctgaccaacatggtgaaactccgtctctactaaaaatgcataaattagccgagcatggtggcagacgccaccttcaaattattaccattgtaaggctgagttgggaggatcacttgagcccaggaacttgatgttacagtgagctttgatcactccactgcactccagcatgggtgacagactggaaccctgtctctaaaaacacaaaaagtaaaagaaaaaaaaaaagaaatcacttgttgcaactgactgaaggccagctcaaatgagctttagaagaaaaggaggtgactggcatatggaactggaagaacaccagcacagctggatttagtagtccaggtgaagcgccaagcaccaagaccttcactcacactctctccaac

SEQ ID NO: 666390 - DNA, 565 bp, Homo sapiens
aaaaacctctttgttaacatccatataggcaatttcatgcaaggttggcacagctagtttgttagccccatgaacaatcactgtggctgaagaattggacataatgagaatcattatgattgacagytctattaggaccatatggtgtggccaaagagtgccctaaaacagtgggactgaatcctgagagccaatggtactcttttaaacaataaacattttgtaacgctcccttttctatactgtgtctgtaagaattttatcagaaggaaagcagaaccactgggatacatatattctctcttcctctcactgtctctcagtctctttctctctctctcacacacacacacacacacacaaacacacacagcacatgtggaaaattggggatttattgaccttatgaactgtggtatctggtgagagtctatatgaggctgttgtgtctttagtgctaaaacctcaagtccacagggcaagtagttgggaagcaaagatggatatgaaataaggaaagtagtgataaactagaatctatgaggctgagctggaaacatgagga

SEQ ID NO: 666391 - DNA, 625 bp, Homo sapiens
cgataaatttgacttcaaacttgaaaacgtctgctctttgaaagatattcttaaaagaatatcttaagtactgggccaggtgcagtagctcacacctgtaatcccaacactttgggaagccgaggtgggcagatcacttgaggtcaggagttcgagaccggcctggccaacatggtgaaaccccgtctctactaaaaatacaaaaattagccaggcgtggtggcacaaccctgtaatcccagctactggggaggctgaggcaggagaatagcttgaacccgggtggtgtaggttgcagtgagcaaagatmgcaccactgcactccagcctgggcgacagaggaagacttcacttcaaaaaaaaaaaaaagaaaaagaaaaaaagaaagaaagaagaaagaaaggagaagaaagagagaaagaaagaagaaagagagagaggaagaaagaaagagagagagaaagaaagaaaaaaaagagagagaaagaaaaataagctgaggactttgagaaagcatttgcaaattatacatttgataaaggacttacagctggaatataagaattctccagattgaatcataggaaaacaaacagtgtttaaatatgggcaaaggagtttaata

SEQ ID NO: 666392 - DNA, 536 bp, Homo sapiens
tttgagtcctttgctacccagctatgtgaccacgtaaccctggccaagttccttaacttcttattcttcgatttcctcatctataaaatgaagataatagagatcatgaggattaagtaagataatgaatgttaaatacttagtacacttccagatgcacaggaagtgcttgataaatacttgataaacgttagctgggctggttgtggtggctcaggcctgtaatcctagcatgttgggagggtaaggaaggaggatcatttgrtgccaggagtttgagaccagcctgagtgaaatagcaagacctcatctctacaaaataaacataataataaattagctggtcctggtggtgtgtgcctgtagtcccagccactcaggaggctgaggcaggaggagaacttttgcccaggagttcaaggctgcagtgacctatgatggcactgctgcactccagcctgggccataaagtgcaaccctgtctctaattttaaaaatataataataataggctgggcgcagtggctcacgcctgt

SEQ ID NO: 666393 - DNA, 536 bp, Homo sapiens
tttgagtcctttgctacccagctatgtgaccacgtaaccctggccaagttccttaacttcttattcttcgatttcctcatctataaaatgaagataatagagatcatgaggattaagtaagataatgaatgttaaatacttagtacacttccagatgcacaggaagtgcttgataaatacttgataaacgttagctgggctggttgtggtggctcaggcctgtaatcctagcatgttgggagggtaaggaaggaggatcatttggtgccaggagtttgagaccagcctgagtgaaatagcaagacctcatctctacaaaataawcataataataaattagctggtcctggtggtgtgtgcctgtagtcccagccactcaggaggctgaggcaggaggagaacttttgcccaggagttcaaggctgcagtgacctatgatggcactgctgcactccagcctgggccataaagtgcaaccctgtctctaattttaaaaatataataataataggctgggcgcagtggctcacgcctgt

SEQ ID NO: 666394 - DNA, 592 bp, Homo sapiens
tgcgatgttatagttttttatctagtgatgtatttagtagacataaaattaatgagtaaaactaaatatatttttaaaggataaaattgttcttactaaattttagaaaaacatgtagccttctgactcaaggactttgtatgttaaccacataagcatggtgactagtggggctttaggtgaagtttgagcaaaggtgctgccaaaaatttgcaaattttctcaataaagttcgatgtgatcatctctaaagtttcttcccatttatttcaatattttattcctycttctttttcaataaaatcgaggacctaatacatgctcaattcttgatggggtccaattgagcacatactagctcctcagttgaattagaatcatttccatttacgacataatacatatttttgaagtatctacttcataaacactggagaaatgcatagaaactctagatagaacttctagatgagaaggcagatcttgaagtaattttaactatgaactctaccaaaaagaggtacagcatataatagagcatgctctgaaactcccaactctggcacttttaactatctttgatgattgtggc

SEQ ID NO: 666395 - DNA, 451 bp, Homo sapiens
tgttttggtgcaagaggcgtgtcctgctcatgctgacccttcaggagccctaggagactccaccccagcagcagagtgagatgtctctgaaggaaagggtgggatgagaggagaaaagcagtaggaaagtatgaggagctgcaggagaaagtcctcactccaccaagggggtctagtgggaagaaatggggcaagtgactccactctgtggaacttggaagcccaagacaagaatttccattcccaggctgtccacatagcttgtcaccactccccctacccmccatgtgcccagatgaaaaatcgccatcctttagagccacaacagaggaaagggctcagcactgctttcaccattgccccttgtctcccgctctccatttattttaaccacactgactgttctcacattactgtaaccacagttggcctctggaatcttcctccaacc

SEQ ID NO: 666396 - DNA, 590 bp, Homo sapiens
catttcacagtaactactacatggaaagatctttaattattttactcatgacctacttttggagcmgtacctagtactggggaagtgcttaatgattgatgaatgacagttgattgaatgaatatagatagatattgtgccctatcctatgtgacccaggaactcaggacaaagatggactcaagagggaatagtggcttgttccttccagacaatctttgggtgactggtgacctaagagtttggcctacctgcaatcatgcaatcatgtacccatcaactttttaggtttggattagaattggagaggctggcatagaggcaactagtgcttgtcaaatttttgggtttggattagaattagagaggctgagatagaggtaactggtacagggaaggcttgcagaaagataattgttaggtcccatagagtcttggtgtacaagttccttctgctgaggcatagagagaatgcttagtctctggggaagcactggatcatgaggcccagctatattgtgattcctctttttcccactatttttgaaaccttctagaacctggacaagtggctgagaatgtaagttttc

SEQ ID NO: 666397 - DNA, 590 bp, Homo sapiens
catttcacagtaactactacatggaaagatctttaattattttactcatgacctacttttggagccgtacctagtactggggaagtgcttaatgattgatgaatgacagttgattgaatgaatatagatagatattgtgccctatcctatgtgacccaggaactcaggacaaagatggactcaagagggaatagtggcttgttccttccagacaatctttgggtgactggtgacctaagagtttggcctacctgcaatcatgcaatcatgtacccatcaactttttaggtttggattagaattggagaggctggcatagaggcaactagtgcttgtcaaatttttgggtttggattagaattagagaggctgagatagaggtaactggyacagggaaggcttgcagaaagataattgttaggtcccatagagtcttggtgtacaagttccttctgctgaggcatagagagaatgcttagtctctggggaagcactggatcatgaggcccagctatattgtgattcctctttttcccactatttttgaaaccttctagaacctggacaagtggctgagaatgtaagttttc

SEQ ID NO: 666398 - DNA, 568 bp, Homo sapiens
ccaagtccaaagtcaatgaggtatgaactttatggcttccaccagaaggagaagcaagtcacatagaaatgagtgaagatgtatgacgaattttgcagaaaaattatacgatcaatcacatcttacctacctagtattgagctcttgaaaaacagagcctgaaaacaatccctttctgactttcttaagatctagcactgtggctaatggacagtgagtactcagtcactgtttgagtaatgaacaaacattcttcaaaaactacaaggcagcctattgtcatatgaaaaatcttcaagcgatctagattttttattccctatgtatttctatttctagccagttatcactttacaatgaagcaaaattgtcctgatccaaaaatttatccaaagtattatattacttttacaaaaatgtagaacacaatgataataactaaaatgtgtatgacattttctaatctatttagtgtgctttctcacrgtaaatcaagtccagaaagctgtgttttaggccctttatctctttgagtgttggtttcttctatgaaatgcatggtttgtct

SEQ ID NO: 666399 - DNA, 567 bp, Homo sapiens
cctcacacatgctcatgtcttctgtactcattgctcttacacatacctgaaaattactccacctcaaacctscctggactatgccctcatcatctaatagttttatggggtacaattttgtctgcaggtttctttctcactactatggtttgaatgagttccccaacatttgtgtattggaaataatccccaatgcaatgatattgagagatgagaccttttcttaaaacaaacaaacaaacaacaaacaaaaaacacttttattaagttcagcgtacatgtgcaggtttgttacataggtaaatgtgtgtatgggggtttgttgtgcagactatttcctcacccaggtatgatgcctagtactcatcagttattttccctgatcctctccctccctacaccctccatcttccaatactggtgagattatgaagaataaaggaagcttatacactgttggtgggagtataaattagtttaaccactgtggaagacagtgtggcaatttctcaaagacctaaagactgaaatattaatattattccacccagcaatcccatactggtt

SEQ ID NO: 666400 - DNA, 567 bp, Homo sapiens
cctcacacatgctcatgtcttctgtactcattgctcttacacatacctgaaaattactccacctcaaacctgcctggactatgccctcatcatctaatagttttatggggtacaattttgtctgcaggtttctttctcactactatggtttgaatgagttccccaacatttgtgtattggaaataatccccaatgcaatgatattgagagatgagacctttycttaaaacaaacaaacaaacaacaaacaaaaaacacttttattaagttcagcgtacatgtgcaggtttgttacataggtaaatgtgtgtatgggggtttgttgtgcagactatttcctcacccaggtatgatgcctagtactcatcagttattttccctgatcctctccctccctacaccctccatcttccaatactggtgagattatgaagaataaaggaagcttatacactgttggtgggagtataaattagtttaaccactgtggaagacagtgtggcaatttctcaaagacctaaagactgaaatattaatattattccacccagcaatcccatactggtt

SEQ ID NO: 666401 - DNA, 632 bp, Homo sapiens
tatgctgtgatgtcattattagctgagtatcataggctaggattcagtataggccaggattgggagtgagggaaccttctggactatatagtgccaggccttaggggaagtgtttcaaaggatgtgaatacatgggaattcccacataagcctaatcagggcggtgaataggactggcaagggtctgaatagcatgtcttactcaaagctcaaagtcaagccttaaggtgatttggctgttttgggaagagtygccacctgtgattaggattgcaggggcctgtgttctccagatagagatctgaaaggagccaggaagatgtctggaaccccagataatcaggacaagattctgaaaagtcccatggaaaaactctgctcccatcaggatgcctatatccaaagccagtcaccacccagagggaatatttcagacctaatgccttaactcccactattatcagtgcattccgtgattgacaaccatatctcctaccaaactcacccaaacttgagtctcaatactgtttcataggcttaatcatagtcttcagttccttctgttataagactgatatcacaaacctaacccatgggatggttagagcagagcagtttgagtgttcttgtcc

SEQ ID NO: 666402 - DNA, 632 bp, Homo sapiens
tatgctgtgatgtcattattagctgagtatcataggctaggattcagtataggccaggattgggagtgagggaaccttctggactatatagtgccaggccttaggggaagtgtttcaaaggatgtgaatacatgggaattcccacataagcctaatcagggcggtgaataggactggcaagggtctgaatagcatgtcttactcaaagctcaaagtcaagccttaaggtgatttggctgttttgggaagagttgccacctgtgattaggattgcaggggcctgtgttctccagatagagatctgaaaggagccaggaagatgtctggaaccccagataatcaggacaagattctgaaaagtcccatggaaaaactctgctcccatcaggatgcctatatccaaagccagtcaccacccagagggaatatttcagacctaatgccttaactcccactattatcagtgcattccgtgattgacaaccatatytcctaccaaactcacccaaacttgagtctcaatactgtttcataggcttaatcatagtcttcagttccttctgttataagactgatatcacaaacctaacccatgggatggttagagcagagcagtttgagtgttcttgtcc

SEQ ID NO: 666403 - DNA, 659 bp, Homo sapiens
ttggcaggcaagctcaccatctacttcagaggaccacagcacagattaagggaggctggatgctaatttacacatatggaaatgctttttctcgccgtcgatggctctgttgtggacagatggaattagcaagaacttcgaagtcgtgaaggcaaacacatcaaaaaaaaaaaaaaaaagaaagaaagaaaagaaagccagcctctctcttttctttcccactttttctctttctgttggcctgtctcctttctctttcttttttccatcattcccttgtccttctctctttttcttttacctttctcttgtgagactcttctgactgtacaagagtaaataaatattgycccagaatggctcctggcattaataatgcattggtcatatttcaattgcaaattgttctttaacagcaaatgtacccccgtcaccccacccatatcaattgtaagtaggattcagatgccagaaaacacctgacaaattaaggcttaaggctggtcttcagaggattgtggtctccccgccagcactgaccttggacatcaacagccccttccctgagttggtttccctgtcagctcctgtggatgggtccccttctcgacagcctcaccactctactgagaaagggttctttagatgcattcggcttg

SEQ ID NO: 666404 - DNA, 659 bp, Homo sapiens
ttggcaggcaagctcaccatctacttcagaggaccacagcacagattaagggaggctggatgctaatttacacatatggaaatgctttttctcgccgtcgatggctctgttgtggacagatggaattagcaagaacttcgaagtcgtgaaggcaaacacatcaaaaaaaaaaaaaaaaagaaagaaagaaaagaaagccagcctctctcttttctttcccactttttctctttctgttggcctgtctcctttctctttcttttttccatcattcccttgtccttctctctttttcttttacctttctcttgtgagactcttctgactgtacaagagtaaataaatattgccccagaatggctcctggcattaataatgcattggtcatatttcaattgcaaattgttctttaacagcaaatgtacccccgtcaccccacccatatcaattgtaagtaggattcagatgccagaaaacacctgacaaattaargcttaaggctggtcttcagaggattgtggtctccccgccagcactgaccttggacatcaacagccccttccctgagttggtttccctgtcagctcctgtggatgggtccccttctcgacagcctcaccactctactgagaaagggttctttagatgcattcggcttg

SEQ ID NO: 666405 - DNA, 613 bp, Homo sapiens
ctcacagttcatcggccacatcgggttacatgccctcatttcacccatcaccagcaagggagatgctgtttctacaattaattaggatttgttcctgatcgtcacaggccagaactatctacatggtcagcgcagcaatgcaaaagtaaggatggtttggggtaggctgcccaaagtttctgccacactgacaattagagccagattgtaccgtgctgagcaaattacatacataaataaagcaggtaaagagccatcttgtataaatctgcacacagggaagtcatttacttacttctggatatgcaatagggtcaaacgtcatcactgttctgcctgacgtggctatctcaaagctctattccttctacaatgagcccacgttgtcctcatgaagcacagattaccacccttcacttccctccaataagaacagatcctctgtagaaaagaaatccaagctattcagcatgtcctttaaccctgtctgatctggaccctgaatccctcttgkatcctcttccaacaatttactctcactcttcagttagaaatgcagtgttttgcttcctaatgcaaagtttcttcatccttccagacttaactcaaatgc

SEQ ID NO: 666406 - DNA, 623 bp, Homo sapiens
agtatccatataaatccatggtatctagtwtacaataaaaattctctaaacacaccaaaaagtagaaaaatgtggcttgtaatcaagagaaaatatagtcaaaagaagcagactggcagctgactcaggtgttagaatttgtaaaacataacttcaataaataaagctattataactttggaaaataaattactgaaaaaagtgaaccagcaaacattgagcactctcaggagacagataaaagctacaaaagagaacctgatgaaaattttacaactgagaaaaaaatacaatatataaagtgaatagtacagtaatatgcttaaaagattgaatacagcaggagacaggatcagtaactagatcaatacaaattatttaatgcaaaacccagagaagaaataaaatttaaaataaattactcagaaccatggtgacatattgcacagtttgaagcagtctaatatgcatataattaaacttttagaaggacagaaaagagaagatggggtgaaaaaataaatgaaaacacaatggccagaaatgttcaaatttggagaaaaatgttcaaatttggagacaaatattcatgtacaggttcaagaaccccaggaaatcacaag

SEQ ID NO: 666407 - DNA, 589 bp, Homo sapiens
atctcttggcctttataaagcagtgtggtatgtgcagaaatacagtcctgagaaatgtacaagataaacaagaagccgagaacagcggttagctatatttgcaggagaaatttcctggaggtttcaaaatggactttgacgcacattacctcattttgcccttacggaagtcctgagtaatagaattgttcctttaggaaattaaggagttaaggcccagggaagatgtcaattgcacaaggtcacaaatatagtttgaatgtatgtccctgcccaaatctcacattgaaatgtaatccccagtattggaggtggggcctggtgggcggtgactggatcatgggggcatatttctcatkaatggcttagttccatccttttagtactgttctcaagataatgagtgagttctcctgagatcgggttgtttaaaagtgtgtagcaccaccccccttcccctcttgcttctgcttttgccatgtgacatgcctgctctccctctaccttccaccatgattgggagttcctgaggtctcgccagaagcagatgtcagcattatgcttcctgtacagcctgaagaaccttgag

SEQ ID NO: 666408 - DNA, 490 bp, Homo sapiens
acaattttccagatttgggcacaacaaatataaatacacttcactgtctttaggtaacatatcagctagaagacaagacaaatatgtgctcttttctgtacaaatcctaatgttgccttttagccaaggtgcgttcacaggtattattactctygttctgccttttaagtgagagcacattttggacttagggagcttaaaattagtgactttaatggaattcatagggctggtaacccatgacttggaaagggctgctgggaaaaaaaaatctatggagggtgggccagattagagaggctgagattgtgcctctgtgagcactgtgagatgcttttattcccctctacctgagatcaaagatcagcctccttctgaattggcttcttctgaggctgctggaacctgtttggtgtttgttggttggctggctgtctttggcattccttggcttgtagaagcatcaccctgatctctaccttcatgttca

SEQ ID NO: 666409 - DNA, 565 bp, Homo sapiens
ccaacactataaaaatgaaagctggagtggccatgacacatactaaattgaagaaaaaaatataaatatataatatggaacataccctatataaatgtgtacatatatttaaacatatatattcacaaaagaactaaataaatgaagcatagaygattaaaggatagacaaatccataattatacatgtaaaacttttgtcttagtaactgataatataaataaaattattaaagtagaaaagacgtaggaaaattatcacccaaatagacctaatgaacattaatagaaagctggatacaacaaggaaagaatacatattccatagtaaagttaaacaagacacctataatagaaaagtacctaaaaaatcctgaaatacttggaaactaacgcatttatagaaaactcatggttcaaagcagaagactcaaggacattttaaaaaatattttgatatgaacgaaaataaatataaaacatatgaaatttttttcaatgctttttcatcttctaaaaaattttctacttttattttagattcaagaggtacatgtacaagtttg

SEQ ID NO: 666410 - DNA, 562 bp, Homo sapiens
aataaacatataagtgcatgtgtctttttgatagaacaatgtattttcctttgggtaatgggattgatgggttgaatagtagttctaagttctttaaaaaatatatccaaagtgttgctgggtgtggtggctcatacctgtaatcccagcactttgggagaccaaggcgggtgggtcacctgaggtcaggagtttgagaccagcctggccaacatggtgaaacaccatctccactaaaaatacgaaaattagccaggcgtagtggtgcatgcctgtaatcycagttacttgagaggctgaggcaggagaatcgcttgaacccaggagacagaggtagtagtgagctgagattgtgccactgcactctagcctgagtgacaagagcaaaactccattacaaaaacaaacaaacaaacaaacaaacaaaaaaccttcaaactgcttcccatagtggctaagctaatttaccttcccatcaatagttataggtgttcccttttctctgcaaccttcccaacatgttattttttggctttttaataagagacattctgagtggtgt

SEQ ID NO: 666411 - DNA, 272 bp, Homo sapiens
ccaaaattcaatttttttttatcaaatctcttggcaaattagaaatacaaaaataaatttttagcctaacaaagaataacagtgaaaagcataaagaaaggattatactgaatgtttaccctctaagattaggaaaagacaagtatgtttgttgtcaccaattctctccaaaaccgtattakaagttctacctcaagtaacaagacaaaaataaacaaacagaaggcacacagattagaaagaaaaaaattagagtatttacagacaatgtt

SEQ ID NO: 666412 - DNA, 508 bp, Homo sapiens
tttcacaggctggcattgcctgtgacttttccaggcacatggtgcaagctgttgatggatctaccattctgcggtctgggggatgatggtcctcttctcacagctccactaggcagtgccctagtgaggactctgtgtgggggctccaaccccacattgtactattagaggttttctctgagggctccacccctgcagcagacttctgcctgggcatccaggcatttccatatatcctctgaaatccaggcagaggctcccaaagctcaattcttgtcttttgtgcacacgaaggcccaacaccacgtggaaactgccaatcttggggcttgcaccctctgaagcaacagccttaactacattggccccttttagccayggctggagctggagtgcctgggatgcaaggcaccaagttctgaggctgcagagagcagctgggccctggccctagcccatggaaccatttttctctcctaggcctccaagcctatgatggaacgggctg

SEQ ID NO: 666413 - DNA, 585 bp, Homo sapiens
aacaatcttgtcacattggattaaaaagcaagacccaattaatgctctttacaagagacccacaacagcacagacagcctaaaaggaaaagagtggagaaawataggccatgcaaaaactaaccagaaaaaaaagctgaaatatctatatgaatgtcaggtaaagtaaaccacacacatcgaccttggttaaaatgtgtgagtgtcagaacatatttgcaacaatgtaactacgacaattgccaccctggtgactgccaagattgacttagctgaactgattagctaaatgggtgcccttttcttcctttattgcttaataaggtggaaaaaacttttgaatttgaggcagacctttactcttttctttgatctagttcttctgagaaatctgataaagcagacttgtccaagagtcactccatgaaagatccctggatgtcctagacaaagggctaactgggtctggattggccctgctcccagtccgggggatgcacacaaactcagcttcccacagttctggagtcattctacttccagaaaagtgattacgacttcccatggacctcaaggtcactgggga

SEQ ID NO: 666414 - DNA, 634 bp, Homo sapiens
tttttccagggtggttctgtttgccccagactaacacttcatgcaatttaggaaaactattccaagttttgtctgtatgcagaagcctttattctgtaaatcaccaatgctggaaattctaattcagatacaagtttcaaaacaggattatccttgattatttgggcactcaacctgggggaattactaattcatcatttatgcaaatgatcatagcagtattccccaaaataggaatcataaaaatagaaaaaaacactgtaagaaaccatcactaactctgtcataagtcactaatgattctacttcttccctaaatggaatacagatcagtctcaatttattgggcataagtactgatgtacwgtcacattgcttaagattttcttgttggctagtaatgatgatgcctgtcccatcgcaaatactccttgctgtatctgaatcaatgaaacagacaaggtagggaaaagctacttggctaaggttaaacttcatggcctacaggatttgctcttttagtctgagttaggcaattagagttcctggttctgaaatcccagagaaactactgtttttattttcctcatagtggtcatgatgctggtttggtgcattctattcagagttttaa

SEQ ID NO: 666415 - DNA, 634 bp, Homo sapiens
tttttccagggtggttctgtttgccccagactaacacttcatgcaatttaggaaaactattccaagttttgtctgtatgcagaagcctttattctgtaaatcaccaatgctggaaattctaattcagatacaagtttcaaaacaggattatccttgattatttgggcactcaacctgggggaattactaattcatcatttatgcaaatgatcatagcagtattccccaaaataggaatcataaaaatagaaaaaaacactgtaagaaaccatcactaactctgtcataagtcactaatgattctacttcttccctaaatggaatacagatcagtctcaatttattgggcataagtactgatgtacagtcacattgcttaagattttcttgttggctagtaatgatgatgcctgtcccatcgcaaatactccttgctgtatctgaatcaatgaaacagacaaggtagggaaaagctacttggctaaggttaaacttcatggcctacaggatttgctcttttagtctgagttaggcaattagagttcctggttctgaaatcccagagaaactactgyttttattttcctcatagtggtcatgatgctggtttggtgcattctattcagagttttaa

SEQ ID NO: 666416 - DNA, 580 bp, Homo sapiens
aactaaaaaagttcacagcaaaacacattaaatcaagtggtcaaaagtcaaagacataattttaaaatgctaaaagaaaaaaaaaagataaagaaataccctgtcaaccaaaaatrctatgtctgactaactctcagacagaagaaaaaagggatgaaggcttttccaggcaaacaaaagctgagggagtttattaccactagacctgccttacaagcaattctaatggaagttcttcaagttaacatgaaaagaaaatgacggtatagaaagcatgaaattcattggttaagataaagaaatatagaaagaagtaccatattatggtagtagtggtaagtaaatcattctcaattttaatataaatttaaaagacaaaagtattagaaatataactaaaatatattaaaagaaacatagtatgaataaatacagattgttataataaaacctgtggggaaaagttgaactgcagagattggatgcaattgaactgaagttgttatcagcttaaaataaactgttataagatattttatgtaaacttcaagataaccacaaaaaataaagtacttgtaga

SEQ ID NO: 666417 - DNA, 560 bp, Homo sapiens
tattaaaagaaacatagtatgaataaatacagattgttataataaaacctgtggggaaaagttgaactgcagagattggatgcaattgaactgaagttgttatcagcttaaaataaactgttataagatattttatgtaaacttcaagataaccacaaaaaataaagtacttgtagaccttagagcttacacaaaagagaaaagaaaggaatcaaaacatatcattacaaaaaaatcaacaaacaatgaaagacagcagaaaaagggaataataccaaaacaactacaagactaacagggaaaaacctaactaaatggcaataataaatactttcctatcagtgaatactttaaatgtaaatggattaaactcctcaatcaaaagacataggrtgatttaatttttttaaaaaaaagcaagactaaattatatgttgtgtaaaacaaacccattttagatttaaggatgcacaaaggctaaaagtgaaaagataatgaaaaaaacttattttatgcaaatgctaaccaaaagagagcaggagtgtctagatatacataaa

SEQ ID NO: 666418 - DNA, 560 bp, Homo sapiens
tattaaaagaaacatagtatgaataaatacagattgttataataaaacctgtggggaaaagttgaactgcagagattggatgcaattgaactgaagttgttatcagcttaaaataaactgttataagatattttatgtaaacttcaagataaccacaaaaaataaagtacttgtagaccttagagcttacacaaaagagaaaagaaaggaatcaaaacatatcattacaaaaaaatcaacaaacaatgaaagacagcagaaaaagggaataataccaaaacaactacaagactaacagggaaaaacctaactaaatggcaataataaatactttcctatcagtgaatactttaaatgtaaatggattaaactcctcaatcaaaagacataggatgatttaatttttttaaaaaaaagcaagactaaattatatgttgtgtaaaacaaacccattttagatttaaggatgcacaaaggctaaaagtgaaaagataatgaaaaaaacytattttatgcaaatgctaaccaaaagagagcaggagtgtctagatatacataaa

SEQ ID NO: 666419 - DNA, 563 bp, Homo sapiens
aggcaaagagttcatgaccaagaacccaaaagcaaatgtgacaaaaacaaagataaatagataggacctaattaaactaaaaagcttctgcacagcaaaagaaataatcagcagagtaaacagccaatccatagagtaggagaaaatatttacaactatgcatctgacaaaggyctgatagccagaatctataaggaacgcaaacaagtcagcaagaaaaaaacaagtagtctcatcaaaaaatgggctaagaacatgaatagtcaattctcaaaagaagatataaaaatggccaaaaaatactcgacatcactaatagagaaaaccggaatgcactactgccttactcctgcaagaatggttgtaattaaaaaatcaggaaataatagatgttggcatcattgtggtagaaaaggaacacttttacatgctgatgggaatgtaaactagtacaaccactatggaaaatagtatggagattccttaaagaactaaaagtagaactaccatttgatccagcaatcccactactgagtatctacccagagggaaaaaaatcatta

SEQ ID NO: 666420 - DNA, 563 bp, Homo sapiens
aggcaaagagttcatgaccaagaacccaaaagcaaatgtgacaaaaacaaagataaatagataggacctaattaaactaaaaagcttctgcacagcaaaagaaataatcagcagagtaaacagccaatccatagagtaggagaaaatatttacaactatgcatctgacaaaggtctgatagccagaatctataaggaacgcaaacaagtcagcaagaaaaaaacaagtagtctcatcaaaaaatgggctaagaacatgaatagtcaattctcaaaagaagatataaaaatggccaaaaaatactcgacatcactaatagagaaaaccggaatgcactactgccttactcctgcaagaatggttgtaattaaaaaatcargaaataatagatgttggcatcattgtggtagaaaaggaacacttttacatgctgatgggaatgtaaactagtacaaccactatggaaaatagtatggagattccttaaagaactaaaagtagaactaccatttgatccagcaatcccactactgagtatctacccagagggaaaaaaatcatta

SEQ ID NO: 666421 - DNA, 308 bp, Homo sapiens
aaaagaaaaacacagaatttatgaaaagatatttaacaagtattttcactggatttgaggacgcagttcacatacaaaaaatcaattatatttctatatactagcaatgaattggaaactgaatttaacaacagtaccatcttgaaagactacatactggatgattacatttatatgacattctagagaaggcaaaacaatagagaaatcaatggtattcaagggcttgctggaggttatagaagaggggcaaggaacttttgggaatggtasaaatattatttatcttgattgtgatgatacatgac

SEQ ID NO: 666422 - DNA, 592 bp, Homo sapiens
gaaggcaaaacaatagagaaatcaatggtattcaagggcttgctggaggttatagaagaggggcaaggaacttttgggaatggtagaaatattatttatcttgattgtgatgatacatgactataaaagtttatcaaagatttgcatgctacatactacaagacattagtgagcaaaatgaagaagacacatcaatggagatctatgacctatacattgacgagaagacagaatatggccacaatgccaayctataaataattgtacacagtcctagtttttgtagatagtgatgacagcaaaaaaagattggaaataaccaaattttgaaaaagaataaagttgaagattttatactacttgatttcaattaaccataaagctaaagtaattaagaaagcatggcatttgcaaaagaatacacatataaattaattggatggactggagagtccagaattaatcccagccatacatatcacttaggtagtttaatatagaagtgataggcttgtcaataaatggtgctatgctgtttggacactcatatacaggaacactgacctcaacacatatctcataccatgtgcca

SEQ ID NO: 666423 - DNA, 600 bp, Homo sapiens
gcaaaacactattgactaggtaggtgacttrtaaacaacagaaatatatttctcacaattctgtcagctggggaatccaagatcagggtgccagcatggtcagtttctggtgagaatccactttctgcttcatagatgactgtctcttcactttagtctctcatggcagagtagggcaagagaactccctggagcctcttttatatgggcactaatcccattcattagagtggagccctcataacctaaccacttcccacatgtcccacctccatataacatcacattgggcattaggtttcaatgcataaattttggaggaatacaaatattcagtctgtagcaaccactgttcatctatggttggtacctttaggtttatatcagcagaaagggcatggaagggaactggaatgtactaaacacctaattcttaccttatggcttcatatctattttatcttcctaagaaaaatcttgtgaaagcagcattattatttccattttgaacattaaaacaaacagagtgcaagaatgcgtgaataatttgtccaagtttacccagatagcacagtggtacagggcatgacttgaatccag

SEQ ID NO: 666424 - DNA, 600 bp, Homo sapiens
gcaaaacactattgactaggtaggtgacttataaacaacagaaatatatttctcacaattctgtcagctggggaatccaagatcagggtgccagcatggtcagtttctggtgagaatccactttctgcttcatagatgactgtctcttcactttagtctctcatggcagagtagggcaagagaactccctggagcctcttttatatgggcactaatcccattcattasagtggagccctcataacctaaccacttcccacatgtcccacctccatataacatcacattgggcattaggtttcaatgcataaattttggaggaatacaaatattcagtctgtagcaaccactgttcatctatggttggtacctttaggtttatatcagcagaaagggcatggaagggaactggaatgtactaaacacctaattcttaccttatggcttcatatctattttatcttcctaagaaaaatcttgtgaaagcagcattattatttccattttgaacattaaaacaaacagagtgcaagaatgcgtgaataatttgtccaagtttacccagatagcacagtggtacagggcatgacttgaatccag

SEQ ID NO: 666425 - DNA, 537 bp, Homo sapiens
agaaatagtcaaaataaatagcmtaacattatgtcttaaggagctagaaaaaagatcaaactaaacccaatgttagcagaaggaaggaaaaaataaagatcacaacagaaataaatcaaatagagaaccaaaaaaaatgaataaaaccaaaagttgacactttgaaaaaaattgacaaaaccaacaaactcttacctagagtaactaaaaacaaaaacagagaaagctcaaataagtaaaattacaaatgaaagtggagacattacaacagatggctcagaaataaaaaggttcataatggattgttatgaacaattataggtcatgaattaaataacctagagaaaatggttaaatttgtagaaaaatacaacctaccattattgaatcaggaaaaaatggaaagcctgaaaagatgaaaaacaaataaaaagactaagaaagtaattaaagccttccaataaaagaaaacccagatcagatggcttcatggctgacttctctcaaacattcaaagaattattaccaacatcttaa

SEQ ID NO: 666426 - DNA, 537 bp, Homo sapiens
agaaatagtcaaaataaatagcataacattatgtcttaaggagctagaaaaaagatcaaactaaacccaatgttagcagaaggaaggaaaaaataaagatcacaacagaaataaatcaaatagagaaccaaaaaaaatgaataaaaccaaaagttgacactttgaaaaaaattgacaaaaccaacaaactcttacctagagtaactaaaaacaaaaacagagaaagctcaaataagtaaaattacaaatgaaagtggagacattacaacagatggctcagaaataaaaaggttcataatggattgttatgaacaattataggtcatgaattaaataacctagagaaaatggwtaaatttgtagaaaaatacaacctaccattattgaatcaggaaaaaatggaaagcctgaaaagatgaaaaacaaataaaaagactaagaaagtaattaaagccttccaataaaagaaaacccagatcagatggcttcatggctgacttctctcaaacattcaaagaattattaccaacatcttaa

SEQ ID NO: 666427 - DNA, 608 bp, Homo sapiens
ggagtctcagaaaggaaggagagagatgaggggaaaagaaaaattatttgaagcaataatggccaaacatttttcaaatttgatgagtastataaacccacagagaaacatgcagcaacaactctaaactgttgacctctaaaagggtcaaccaattctaaactgaagaaaccctaagctgaagacatttttctagatgtatcacagtcaaaatgctcaaaaacagtgataaagagaaaatcttgaaagcagccagatagaaagatactttacatagaggagaacaaagggtgttctactatttcccataagaaataatgcaaataagcagatgggagagtaacatctttaaagtattgatataaaaatatagaattctatacctacagaaaatatccttgtaaaacctaagtgaaataaatattttatcagacaaaaataaattgaaatgatttatcatcaataaacctacactataagaaatgataaagcaagtttttcaggcaggaggaaaatgaaaccaactggaaatatctatttacacagaagaacattagaaatggtaaccacatgggtaaaatagtaaatatgcctgtcttactgtttta

SEQ ID NO: 666428 - DNA, 608 bp, Homo sapiens
ggagtctcagaaaggaaggagagagatgaggggaaaagaaaaattatttgaagcaataatggccaaacatttttcaaatttgatgagtactataaacccacagagaaacatgcagcarcaactctaaactgttgacctctaaaagggtcaaccaattctaaactgaagaaaccctaagctgaagacatttttctagatgtatcacagtcaaaatgctcaaaaacagtgataaagagaaaatcttgaaagcagccagatagaaagatactttacatagaggagaacaaagggtgttctactatttcccataagaaataatgcaaataagcagatgggagagtaacatctttaaagtattgatataaaaatatagaattctatacctacagaaaatatccttgtaaaacctaagtgaaataaatattttatcagacaaaaataaattgaaatgatttatcatcaataaacctacactataagaaatgataaagcaagtttttcaggcaggaggaaaatgaaaccaactggaaatatctatttacacagaagaacattagaaatggtaaccacatgggtaaaatagtaaatatgcctgtcttactgtttta

SEQ ID NO: 666429 - DNA, 593 bp, Homo sapiens
aaccagttagttagagcagggaagagtcatgtaaggcattatgagaaaggatgatagtctcagtggaatatgagaacatttcaggagtccagaagcatcactcatgaattagctaacatctttcaagaaattttgttaaatggcacatcagcagccatgggccctaattctatttttctcttctttcaaagtactaaatttgaaattttaaagtggtcaatgttcttayagaaattgacatagaaatatctgcctatcaagtagttcaaccagccccaccacacagcaattatccaaacaaactaataaatggccttaagcaattggtatctgaaaatgaagtttaaaagcccttgaaatttaagataagcaattttatagaagtgaaacaaaaattaattaaagctaaaatgtgaaatgtcataacataggctatatcagactggtatatttctgatattctaaaatttttagaattcagaagtatctacttttctggcttcctgtatcaagttatacatacaaatacattctgaggaaaatgtaattgctcccatgcttttgaatcttgccacctatagtgaataataaat

SEQ ID NO: 666430 - DNA, 593 bp, Homo sapiens
aaccagttagttagagcagggaagagtcatgtaaggcattatgagaaaggatgatagtctcagtggaatatgagaacatttcaggagtccagaagcatcactcatgaattagctaacatctttcaagaaattttgttaaatggcacatcagcagccatgggccctaattctatttttctcttctttcaaagtactaaatttgaaattttaaagtggtcaatgttcttatagaaattgacatagaaatatctgcctatcaagtagttcaaccagccccaccacacagcaattatccaaacaaactaataaatggccttaagcaattggtatctgaaaatgaagtttaaaagcccttgaaatttaagataagcaattttatagaagtgaaacaaraattaattaaagctaaaatgtgaaatgtcataacataggctatatcagactggtatatttctgatattctaaaatttttagaattcagaagtatctacttttctggcttcctgtatcaagttatacatacaaatacattctgaggaaaatgtaattgctcccatgcttttgaatcttgccacctatagtgaataataaat

SEQ ID NO: 666431 - DNA, 362 bp, Homo sapiens
gtgaaatttctcttgttttattttgacactgacattatgatagtcctgtaagcctacgtgagtattaagaagagttcgtcaaccagcctgaccaacatggaggaaccccatctctaataaaaataaaaaattagccaggtgtggtggtgcatgcctgtaatcccagctacycgggaggctgagacaggagaatcgcttgaactagggagtcagaggttgcagtgagcctagatcacgccattgcgctctagcctgggcaaccagagtgaaactccattttgaacatctcaaaaaaaaaaaaagaagaagaagagttcctatcaaaaagaagatttaagagtgacagccaagttatactgtcc

SEQ ID NO: 666432 - DNA, 362 bp, Homo sapiens
gtgaaatttctcttgttttattttgacactgacattatgatagtcctgtaagcctacgtgagtattaagaagagttcgtcaaccagcctgaccaacatggaggaaccccatctctaataaaaataaaaaattagccaggtgtggtggtgcatgcctgtaatcccagctactcgggaggctgagacaggagaatcgcttgaactagggagtcagaggttgcagtgagcctagatcacrccattgcgctctagcctgggcaaccagagtgaaactccattttgaacatctcaaaaaaaaaaaaagaagaagaagagttcctatcaaaaagaagatttaagagtgacagccaagttatactgtcc

SEQ ID NO: 666433 - DNA, 555 bp, Homo sapiens
tttgcctcagtcagatgcgtggggaactaacagttcaggatcatctttatatatgttaaagtcttaagattttctagggaacccagatgatatgaagcagggcttgtataccatcctagggtttgtttatttctagtctgcccttatgtttaaatgaaagatcttaaagccaaacgaaggatattttctagaatctgtaccattgttgagtcccagatactgggttttgtctccctatccaattgagggtcaccagaagtatggcctagtgtctcagcctgtgtattatgcattgataagtgaccccagggtaaaagctgtccaagtattttactgacccttctaggttctcawcctctgctctgatcatattgttagtattttgacatattttggaaaatatttcaattttcccctccaaaatgataagttgctttcaatagcaagtttacctaagccaacattgctggaagtggaggccccatgatattttaattctagaaaaccagaatacactagtaacatttgaaaaagaaggaaatatgtggtttgaca

SEQ ID NO: 666434 - DNA, 559 bp, Homo sapiens
aaaaccttttggagttgtacagcaattgttctaatcctacacatcaatctggggagaaytgccatccttattacgctgtgccttccaatccatgtacacagaaacttcttccaattagttttctatgattctttcattattttgtaattcagcctacagatcttatacatattttgttagatttagaactaagtatttatttggagcaataaatagcattggagtttttaatttgattttctctcatttttagtatatagaaatataactgatttttgtgtgttcttctttcatcctgtgaccatactgaactcatttattagttctaggaatttttgtagattcctcaggaaattctgtgcaattatatgcctgcaaatataagcagttttatatctttttttcactctgtgcccttttaaattatttttcttgcattattgtgctggcttagaatttcagtaccatgttgaataaaaatggtaagagtagatgttcttgtcttgttcttaatcttaaagggaaataattcattcagtctttcatcactaactgtgat

SEQ ID NO: 666435 - DNA, 554 bp, Homo sapiens
ttagccattggtcattaatagtgtgtcatttaattttcaaacatttatgaatttccagttttctttgtactgttgatttctagttttgttttaatttttgtttaaaaagatactttttatgattccaatgttcttgaatttgttaaaacttgttttgtggcctaccatgcaggcatttctgaagaatatgtgttctccagaacgtgcactttargtacacttaagtataatgtatattttgcttttggggtagactcttctatgtatgtctgttagtcccaattagtttataatgttgttcaaatcctgtacttccttatttatcttctgtctggttgttctacacattatttatgggatattgaggttacctatcattattgtgctgctatatttctctcttcaatcttatcaaagtttacttcatatatttagaagctttgaggtttcacacgtaattataattgttaacactcattattatataatgtcttcatttgtttcttgtaacaggtttgattttaaagtctatttcgtctgagattagtataggt

SEQ ID NO: 666436 - DNA, 402 bp, Homo sapiens
gttttgctgctaaattaaagaacagctgctaatacatttagattgtcaatttcakgggtttgtgaccactgtagttgtataagaacccacattcagtggatccttcaaaactttactgttactgtcttgaaatccttaataattttatctttgaacttgtgttttgtaagtgaactctgatgggacaatggagcatgagccaggagcatcgggcctcagctcacatgtcatctcaccttttgccatcttgctcccccactgatacctagagaccactaccacctcttacccagcaggaggtctgagtccaaatacaaggagactcagggtcatatcctgagtaattttgagcgctctgtgagtatccctgtttccaaggcagagtgaaattaagagcaaaga

SEQ ID NO: 666437 - DNA, 402 bp, Homo sapiens
gttttgctgctaaattaaagaacagctgctaatacatttagattgtcaatttcaggggtttgtgaccactgtagttgtataagaacccacattcagtggatccttcaaaactttactgttactgtcttgaaatccttaataattttatctttgaayttgtgttttgtaagtgaactctgatgggacaatggagcatgagccaggagcatcgggcctcagctcacatgtcatctcaccttttgccatcttgctcccccactgatacctagagaccactaccacctcttacccagcaggaggtctgagtccaaatacaaggagactcagggtcatatcctgagtaattttgagcgctctgtgagtatccctgtttccaaggcagagtgaaattaagagcaaaga

SEQ ID NO: 666438 - DNA, 402 bp, Homo sapiens
gttttgctgctaaattaaagaacagctgctaatacatttagattgtcaatttcaggggtttgtgaccactgtagttgtataagaacccacattcagtggatccttcaaaactttactgttactgtcttgaaatccttaataattttatctttgaacttgtgttttgtaagtgaactctgatgggacaatggagcatgagccaggagcatsgggcctcagctcacatgtcatctcaccttttgccatcttgctcccccactgatacctagagaccactaccacctcttacccagcaggaggtctgagtccaaatacaaggagactcagggtcatatcctgagtaattttgagcgctctgtgagtatccctgtttccaaggcagagtgaaattaagagcaaaga

SEQ ID NO: 666439 - DNA, 402 bp, Homo sapiens
gttttgctgctaaattaaagaacagctgctaatacatttagattgtcaatttcaggggtttgtgaccactgtagttgtataagaacccacattcagtggatccttcaaaactttactgttactgtcttgaaatccttaataattttatctttgaacttgtgttttgtaagtgaactctgatgggacaatggagcatgagccaggagcatcgggcctcagctcacatgtsatctcaccttttgccatcttgctcccccactgatacctagagaccactaccacctcttacccagcaggaggtctgagtccaaatacaaggagactcagggtcatatcctgagtaattttgagcgctctgtgagtatccctgtttccaaggcagagtgaaattaagagcaaaga

SEQ ID NO: 666440 - DNA, 489 bp, Homo sapiens
gtggtatgtaaattcatgtgccatcttccttaaagcacatttttttgtgtgtgcctgaatcaccaacaacacattcaaaataggatcttttacattgaaagaacattatgcttcgttactatggaaactatctgctctttctgaaaagctttcatagtccctgtttctctttttctctctgcatgttttacccctcaagttccttagctgccactttgtgtctgcctttgctctgactttgattgagtggaattttatgaccttcatactcctagtataatcatttatttgatctaaaattttgatttcttatccaataaaagaagtttaagtaatcagrtgtcatttcacttctattatttctttaatttttagatggcaagttgtcacaatataaatacatcttatagacgaataaatatttaagtaaatagaattatttctagtcattgtgcagattatatgatcatttttcattttaatttagag

SEQ ID NO: 666441 - DNA, 439 bp, Homo sapiens
agaccatcctggctaacaaggtgaaaccccgtctctactaaaaatacacacacacacacacacacacaaaattagctgggcatggtggcaggcgcctgtggttccagctactcaggaggctgaggcaggagagtggcgtgaacctgggaggtggagcttgcagtgaaccaagatcacactgctgcactccagcctgggcgacagagcaagactccgtctcaaaaaacaaacaaacaaaacaacaacaacaacaaaaaaaacaaatagtagaattttgataaagataagrtagtgagtgccaataatccatatttaaatagagttgtgctgtgccttttaattatttatacaaacacttttttgtatgttgaattgtttggaacactacagactgacttttggtacttttgatgataatttttatgtgccagtttagcta

SEQ ID NO: 666442 - DNA, 578 bp, Homo sapiens
attcaggtaatactgatgaagataatcctcaagacctttacactctgggtcagttccaagatggctgagaagctgtttaaaataaycaaaaaacaacttgataggattgacaatttcatgttttttaatgtgttgaatgagattgctaactacaatcagcagatatacatacgtggtatcacagatgttaggttttcaaaaataaagaatgtgttagaaaaatgcctgccaatcacttgaatgttacaaccttttattattattattactatactttttaaaagaatctggctgttgagtgcagactgtgctgtttcacctttcattacaaagactcagtgaataaaacatatttgatagcttggcaatagaagaaaaatttgtatttaaatgaggacagaagacactgggctggaattgatacgattatgccacaattggtgagtcataactaatgacacagtctagagctcatgaagcaaatctgacaatgtgagtgagaggaatgcaatcagcatactgggaggaaggcaggtgcatgcccacaggtggcaccacagaggggtacttagcacaac

SEQ ID NO: 666443 - DNA, 578 bp, Homo sapiens
attcaggtaatactgatgaagataatcctcaagacctttacactctgggtcagttccaagatggctgagaagctgtttaaaataatcaaaaaacaacttgataggattgacaatttcatgttttttaatgtgttgaatgagattgctaactacaatcagcagatatacatacgtggtatcacagatgttaggttttcaaaaataaagaatgtgttagaaaaatgcctgccaatcacttgaatgttacaaccttttattattattattaytatactttttaaaagaatctggctgttgagtgcagactgtgctgtttcacctttcattacaaagactcagtgaataaaacatatttgatagcttggcaatagaagaaaaatttgtatttaaatgaggacagaagacactgggctggaattgatacgattatgccacaattggtgagtcataactaatgacacagtctagagctcatgaagcaaatctgacaatgtgagtgagaggaatgcaatcagcatactgggaggaaggcaggtgcatgcccacaggtggcaccacagaggggtacttagcacaac

SEQ ID NO: 666444 - DNA, 606 bp, Homo sapiens
cctgtgcctgtaggtcccttgctctctcttttttgctctgtatcttctggttgggcaagcatgtcctggacacctcccycaccttccttttggctcttcaaggtgtacttccatcttctctctgtatttgtaaataataaactgtttttgttatttcatgtgttttgttgggttgcctcctctgtgtcttacctgactgacacacccaaatctaacctctttcccagtcaaggctctcctagggagtagctaagttggtacaaatacactggaaataggttagacaagagctattaggttgtctgccagtgtgattaacttttctgtgagagggactcctggtcacacttgggcactgggcattaggcgttaggctgtctgccacaataaaaagtatcccatgaaaaacactctgtaaaattcacagttcctccacaggaaccctattatggcatgtttggagtttatacccactctcctgggagagagaacccaaaaccaaaacacaacaaccaaatctcttataccactgttgggagtgtgaatgagactatccttagccagggtattttctaaggccacatccccaccttggagacaactcac

SEQ ID NO: 666445 - DNA, 543 bp, Homo sapiens
caacatatatgatatctaaaactatgaaactctgagaagaaagcatagaagtaaaccttcaagacgttgcattaggtgatgttttcttagacatgacaccaaaaacaaaagaaacagaagataaaaaaatagataaagtgaacttcaacactttaagagacctttgtgctttaaaggataccaccaagaaaatgaaaagacaactcacaaaatgraacacaatatttactaattatatatttgataaatgacttgtatccagacagtataaaatattttgcaactgaactttaaaaagttgggcaaagtatttgaatagaaatttcctaaggaaaatacaccagtaagctcataaaagatgttcaacatcattagtcattatggaaatatgaattaaagccacaatgagacaagattcaagttcattaggattgctacaatcaaaaagtcagacaataacatgtattaccaagaatagggacaaattgttacccttgaaaatagttggtgagaaagtaaaatgttgcagccactatgaaaaag

SEQ ID NO: 666446 - DNA, 557 bp, Homo sapiens
tgcaatagtaggaatgaatttagggcactgcagagagtaattatcttatgttcttgttatctcctttgggtcgtgtagcaagatttttttccaagaaaaatctctcctctcctgcagccctcaagaattgagtgagcatgtatacaaagaaaacttttatatgtaccagttgtaattgagacaacaaaaaagagtaatatcaaaacaatattcaaagaaattgttttccataaaatattctatagctgaaatttacttactcattgattgcagtcaaagtatgcaaaagctggttattcagatcycactggcccactatcagaactgtttacctaaaatgtaattctacatgatattgccaattgatattaagtgccattataaaaaaaatacagtctcgtggagctcatttctgagtctcttttaagaataatttgaaaatattgtttattacacagcagagaaatttctgtctgcaatttgtacaaagaataatatattttttattagcaaatgtttgttttgatcttatctttgcagtgaatttgtctaagtaa

SEQ ID NO: 666447 - DNA, 587 bp, Homo sapiens
tttccttctcatttagaaaaaaaaaatggaattgacagtcttttggtttccctcttcaggattttttaaaaagcagagcatgatmgcttacacctatattcttagcactttgggaggctgaggtgagaggatcatgtaaggctgggaatttgaggctgcaattagctataattgtgccactgcaattcagtatgggcaacagagggagtttttttatatctaaaaataaataaatagacaaacaaataagtaaataaataaggcattccactgtcttctgacttccattgttaacattgagaaatctcctgtaatttctggctaatctttcttttcatgtgttttaaatattttcagtcttctcctttagttatgtaaccatgttaaataaacttgtgttgtatcctgcacttgtaattttagtgtcttcttttttctgaacatttcattactgcagttttttttctgttttgatataagagagagggagagagagagagaagaaagagagagagagagtgagcactaatgtttttggaacattatcttggagaatatactgaaattttcatatgaagtaaatttat

SEQ ID NO: 666448 - DNA, 587 bp, Homo sapiens
tttccttctcatttagaaaaaaaaaatggaattgacagtcttttggtttccctcttcaggattttttaaaaagcagagcatgatcgcttacacctatattcttagcactttgggaggctgaggtgagaggatcatgtaaggctgggaatttgaggctgcaattagctataattgtgccactgcaattcagtatgggcaacagagggagtttttttatatctaaaaataaataaatagacaaacaaataagtaaataaataaggcattccactgtcttctgacttccrttgttaacattgagaaatctcctgtaatttctggctaatctttcttttcatgtgttttaaatattttcagtcttctcctttagttatgtaaccatgttaaataaacttgtgttgtatcctgcacttgtaattttagtgtcttcttttttctgaacatttcattactgcagttttttttctgttttgatataagagagagggagagagagagagaagaaagagagagagagagtgagcactaatgtttttggaacattatcttggagaatatactgaaattttcatatgaagtaaatttat

SEQ ID NO: 666449 - DNA, 587 bp, Homo sapiens
tttccttctcatttagaaaaaaaaaatggaattgacagtcttttggtttccctcttcaggattttttaaaaagcagagcatgatcgcttacacctatattcttagcactttgggaggctgaggtgagaggatcatgtaaggctgggaatttgaggctgcaattagctataattgtgccactgcaattcagtatgggcaacagagggagtttttttatatctaaaaataaataaatagacaaacaaataagtaaataaataaggcattccactgtcttctgacttccattgttaacattgagaaatctcctgtaatttctggctaatctttcttttcatgtgttttaaatattttcagtcttctcctttarttatgtaaccatgttaaataaacttgtgttgtatcctgcacttgtaattttagtgtcttcttttttctgaacatttcattactgcagttttttttctgttttgatataagagagagggagagagagagagaagaaagagagagagagagtgagcactaatgtttttggaacattatcttggagaatatactgaaattttcatatgaagtaaatttat

SEQ ID NO: 666450 - DNA, 335 bp, Homo sapiens
atataaatttatatatatatttctatatagatattatatataatatatattmtatatagaatatatagaatatagaatatatatatttctatatatatttatatatatttctatatatagatatataagtatatatatctatatatatatttatatatatagaaatatatatatatatggaatgaaaaagtgagatttggttttactccctaaggagtctacaatgtaattggggaatagagatttagcaggggtggggggcagtgctggggagaacatatgattttaccaaagaatgtgaaatctgcaagattccttaaatacaatagaatctg

SEQ ID NO: 666451 - DNA, 550 bp, Homo sapiens
atatggtagttctatatggggggaacccctaaactgttttccatactggttatactaatttacattcataccaacaatgtgtgagggtttcctttactctacatcctcaccaggatttgttattccctgtctttcggataaaagccattttaacagtagtgagataatattttattgtagtatgatgttgaaaactttttcatgtacctatttgctatttatatgtctccttttgagaaatatctattcagatcttttgctcatttttaaaccggattattaaatttttcctgtagagtggtttsagctccttatgtattctggttattaatcccttgtcagctggatagtttgcaaatattttctattctgtaggtagtctcttcactttgttgattgttttctttgatttgcagaaaaattttaacttgaggtgattacatttgtccatttttcttaggttgccagtggctgtaggatattactttaaaaatctttgctgagaccaatgtcctgaagattttgtttaatgtttccttgaagtagtttt

SEQ ID NO: 666452 - DNA, 470 bp, Homo sapiens
tgataaacccaagaagaaataatttttccctcatcaaaatccttagtgcacttgggattacatcacatattcttcttatagsagtggtctttctattagcattgaaggtccttaagagcaagattgctttttaaacatctgtatttctttaagtattctgtgcaaagtactatgctagaccctacacttactcaaacattttagcttaatgaattaaaatatgactcaaaatggaatggtaagttgttccatcttaatatactaagaaatatcaccaacagcaactacatcaagaaaccaagaagatgacctttaatggaatatttgatggacgctgaagtgagtctattaacaaaaacaaacaaaaagaatcagggactacatttgccattaattctaaaattgttgccatttagggcctcactgaaatatagggccccaaatagctgttgctcttccaatagcagttc

SEQ ID NO: 666453 - DNA, 560 bp, Homo sapiens
aatcacgttctatcttctggtttaaggctatgcagatatcaagagacatacagtgatccattttctttgtgtggaaatgatcaaacactacaagtcagttaatgtgttttcaatggtgaggggttaataccaaaagatttatattagaattgtatagcatctatatttctaaaccttagttatttgtaatgaacaattagaagtctgacctgtttggaacttattttggggtaaatattacaaatagtatcccaagccttcttgcaaaggacatgcaaataatgaaaatattatattaagaaccactccactgttattaaaatgaagatgaaaagaattaaatcaaagtctgccacagaataatttataaataccatattgaacattttctaaatatgcccacattcttgggagtggcagataatgtgttaacagtataataagcacsagttaataaacattatgcgtattctctattacagatgagtatactttttggcccttttaataaaggataggggaataagcatctccctgtaagaagaacaacagaaatggat

SEQ ID NO: 666454 - DNA, 543 bp, Homo sapiens
tattatttactttatggtaaattttgcaaaatgctttgctgtgtttctgttttataatgaatattcaaattgattttactattaaggatcatttacacaatcagattaaaaatcagagttgtggmatctatttttaaaaagtaaaacagaacacaaaggagaaaaagaagaggaggacaaaagagaagaaacagaagcaacagcactaagttagatccaggtccctaaagataagtaacaatatctgtatgaacttttctgattgcttattttattttgtaatgaaaacaaagaaagaagaggatgaggaggaacatgaggatgaggagactgaggaggaaggcaaggagaagaaggaagaggagcaagaggtaaaggagaagaaaagaaaaaagagagataagattattaaaaatcaaactaaatacatattgaaaaaacaactgaaaaacaaaccaaaagtagcaacactctaacagagcaatagtataaacaaatttattcaaagcattaattttatattagtctatatcaggctttcta

SEQ ID NO: 666455 - DNA, 630 bp, Homo sapiens
agcttatttgctataagaattctgatataattctgtatttacaggctyattctcactctctcacaatccacaggcatacaaacattaaagtgtgtgtgtgtgtgcgcacatgcgtttgacagagagagaaaaagacttgaataactgtttcttataagacttcatttgtggtgatggttgctacttgtatttctataaagactactcctggtaatgattgacaaacaggatatatgttaattaaatgttcagtgacttcatagttaaatatacatataatgcacattccaatttttttaaaacatatcaatcaataaatagctaaatgttttaaatcacagctggtcagaatttagttgttaatattcagataccatttcaatatcatgtagagtcattatgaatagcatctgtctgcagtactctgaagataaaggtggtaaaacatgtgttagtcaatgctctacctgttatacagccttttaaaacaaatccttggcatgagattgtcatttgtctgtttctcataaaagctgagtgtacaacatcctaaaaatccagttcagcttttttattcttgttacatttctgcagaattttaatataactttccttttgtgtatttatgcc

SEQ ID NO: 666456 - DNA, 630 bp, Homo sapiens
agcttatttgctataagaattctgatataattctgtatttacaggcttattctcwctctctcacaatccacaggcatacaaacattaaagtgtgtgtgtgtgtgcgcacatgcgtttgacagagagagaaaaagacttgaataactgtttcttataagacttcatttgtggtgatggttgctacttgtatttctataaagactactcctggtaatgattgacaaacaggatatatgttaattaaatgttcagtgacttcatagttaaatatacatataatgcacattccaatttttttaaaacatatcaatcaataaatagctaaatgttttaaatcacagctggtcagaatttagttgttaatattcagataccatttcaatatcatgtagagtcattatgaatagcatctgtctgcagtactctgaagataaaggtggtaaaacatgtgttagtcaatgctctacctgttatacagccttttaaaacaaatccttggcatgagattgtcatttgtctgtttctcataaaagctgagtgtacaacatcctaaaaatccagttcagcttttttattcttgttacatttctgcagaattttaatataactttccttttgtgtatttatgcc

SEQ ID NO: 666457 - DNA, 630 bp, Homo sapiens
agcttatttgctataagaattctgatataattctgtatttacaggcttattctcactctcwcacaatccacaggcatacaaacattaaagtgtgtgtgtgtgtgcgcacatgcgtttgacagagagagaaaaagacttgaataactgtttcttataagacttcatttgtggtgatggttgctacttgtatttctataaagactactcctggtaatgattgacaaacaggatatatgttaattaaatgttcagtgacttcatagttaaatatacatataatgcacattccaatttttttaaaacatatcaatcaataaatagctaaatgttttaaatcacagctggtcagaatttagttgttaatattcagataccatttcaatatcatgtagagtcattatgaatagcatctgtctgcagtactctgaagataaaggtggtaaaacatgtgttagtcaatgctctacctgttatacagccttttaaaacaaatccttggcatgagattgtcatttgtctgtttctcataaaagctgagtgtacaacatcctaaaaatccagttcagcttttttattcttgttacatttctgcagaattttaatataactttccttttgtgtatttatgcc

SEQ ID NO: 666458 - DNA, 542 bp, Homo sapiens
ggacaaaccttttgggcaaacaccattcaactcttaagattttctatcaaaatgtgtaattttctcccatacgttttcagtaatctccaccataaagaacctggatttagaacacttggattcagtaatctccatcataaagaacttggatttagaacacttttttccacatgtatttacgcaatgtttctcaaagtatattcctgagaaaagtatttcaaagagttgttctatgagtaaaaagtttcttggtcacgcagttttggaaattactgcttactattaacacctcctggatatttgctttgtacattaatttattaaggagaaaycatataggaaaatatgctaaaattttaggaagcacatgtttttcccaaacaccaataaacactaaatattgccaattttattcaaatgatacctatcaataccttacagaaaaagggttatgtgtaccaaaggtgctgatctgacctattatgttgactacatggtatctgtttcaaaattataaacaaaattaccatgagtattactaa

SEQ ID NO: 666459 - DNA, 536 bp, Homo sapiens
gaataaaaacaggctgccacagccagcagtggcaatccgcttgggtccccttccacaccttggaagccttgtgttttcrctgtttgcaataaatcttgatgctcactctttcggtccacactgcctttatgagctgtaacaaccaccgcgaaggtctgcagcttcactcctgaggccagcgagaccacgaacccaccgggaggaatgaacaattccagacgtgccaccttaagagctgtgacactcactgcgaaggtctgcagcttcactcctgaagccagcgagaccacgaacccaccagaaggaagaaattccgaacacgttcgaacatcagaaggaacaaactccggacacaccatctttaagaactgttaacactcaccatgagggtccgcagcttcattcttgaagtcagtgagaccaagaacccaccaattccggacacattaatagaatagtcccagttcatccttcgtatcttttgtaacatcaccatcagtcctttcacttacccacatgctgtaattgcccaacac

SEQ ID NO: 666460 - DNA, 536 bp, Homo sapiens
gaataaaaacaggctgccacagccagcagtggcaatccgcttgggtccccttccacaccttggaagccttgtgttttcgctgtttgcaataaatcttgmtgctcactctttcggtccacactgcctttatgagctgtaacaaccaccgcgaaggtctgcagcttcactcctgaggccagcgagaccacgaacccaccgggaggaatgaacaattccagacgtgccaccttaagagctgtgacactcactgcgaaggtctgcagcttcactcctgaagccagcgagaccacgaacccaccagaaggaagaaattccgaacacgttcgaacatcagaaggaacaaactccggacacaccatctttaagaactgttaacactcaccatgagggtccgcagcttcattcttgaagtcagtgagaccaagaacccaccaattccggacacattaatagaatagtcccagttcatccttcgtatcttttgtaacatcaccatcagtcctttcacttacccacatgctgtaattgcccaacac

SEQ ID NO: 666461 - DNA, 552 bp, Homo sapiens
gttttaaaatgtatttttgacctatctttagtttcactaattctttccccaaacatgtctggtctactaatgaaaccattgaaagcatttttaaaaaaaatctattggagttattttaatttctagccttttcttttggttctttgttaraattttcatctctctgcttatactaatcatcttttattgaatattttctacattttccactagtgtccttaacatcttaatcatagttatgtaaaatttcttgattgctatttccaaaatatgcatcgtcatcactgagtcttgttctgatgatcatcatgtctcttcagattgtgatttttttccttgccttttaccatgttttgtaattttgttgccattgttgagagccagacatgttgtatccataatagatattgagataaattgatgctgagataaattgatactgagataaactgaggatgtatgttaatctgtcttggagttggactgcatttagtatttgttatagctcaagtttctgaaggtttcaaattcctctagtgtccttgtttttgt

SEQ ID NO: 666462 - DNA, 652 bp, Homo sapiens
gggcactcccacccccagtcaagggaggcagtgagtgattgtgctacctttsctgagaaaccatgctttgtccatggatctgtgcaactcacagatcaggagatccccttatgagcccacaccaccagggccttgcgtgccaagcacagagttgtgcagactatcatcaccgctcaggctgtggccagtgacagcagactggagactgtctaagatgactgagttcccaggggaaggggtggttactatcactgtggctccagttggctgttttcccctggtggtgctggggagacagggaggtttagatcaggagcacagcagctgtggcagatcatggccagactgcttttttaggtggaacctggatccatccctagtcattgggtggggcccccttgtgggaatttcagcaactccagccataggtttatggacagaactctgatcttcctgggcagaactcctgtggggaggggcagccacagtctctgtggttcagcagacttagtctttcctgcctgctgtctctgaagggtctggacattctggacaagggagattccctccagtgcagtgcaccctctctgccaaggggcagccagagtgctttgttaagtggtccctgatcctgtacatactccctaactga

SEQ ID NO: 666463 - DNA, 652 bp, Homo sapiens
gggcactcccacccccagtcaagggaggcagtgagtgattgtgctacctttcctgagaaaccatgctttgtccatggatctgtgcaactcacagatcaggagatccccttatgagcccacaccaccagggccttgcgtgccaagcacagagttgtgcagactatcatcaccgctcaggctgtggccagtgacagcagactggagactgtctaagatgactgagttcccaggggaaggggtggttactatcactgtggctccagttggctgttttcccctggtggtgctggggagacagggaggtttagawcaggagcacagcagctgtggcagatcatggccagactgcttttttaggtggaacctggatccatccctagtcattgggtggggcccccttgtgggaatttcagcaactccagccataggtttatggacagaactctgatcttcctgggcagaactcctgtggggaggggcagccacagtctctgtggttcagcagacttagtctttcctgcctgctgtctctgaagggtctggacattctggacaagggagattccctccagtgcagtgcaccctctctgccaaggggcagccagagtgctttgttaagtggtccctgatcctgtacatactccctaactga

SEQ ID NO: 666464 - DNA, 659 bp, Homo sapiens
ccataggttagccattcaagatgatcttagagcaaggggtggcaatggtacatgtataatgcatttcatctctctctatctaatcaaaaaccatgagaagtgttagctatagatacatgagattaaatataagattcaaaatacacaaaacaaaaccaaaaccacaaatactcttcgtcaccattcttctgaattcatgratagggtatatatttttttctaaagttatcatttagaatagttgtctaaactaagatttgtaataatttatgttattttattagcacttagcatatattaattcattcaatattcaaaacaaccacacgagctaggtatctaataaaattcccatttgaaacatgaggacaattaaagcagcgaaaagtgaagttactttccagagctgaaatttggactcaggcagttcggctccagaatctgttcttaacaccacacatggatatatatcattgttataatatcattgcttctataggcctgaactgaagctctctggggcctgacgtttacttttagtaatcttttgcattcagcaaatcatcagttctaagcactgaacattatgagtcctctgataaaaaagataatgtcaaaagtcagtagtaggggaaaatttacctctaaaaaaaagcaac

SEQ ID NO: 666465 - DNA, 420 bp, Homo sapiens
gggtaagtttagagcagggatcagcaaagtatagcctacaggtcaaataaagcytgacatctgtttgtttgtttttaatagctttttaaattataatttagataccatacaattcaccatttaaagtataaaattcagtcttctagtaaattcacacagttgtgcaaccatcaccaccatctaattttggtattttcattccgtatacaagaaacctcattagaagtcagtccccatttccctctttctcctttcttccccccacctccatcctaagcaaccactagtctactttctatctctataaatttgcctattctaaaaatttaaaaatttgaattgaaaagtgaatgaaaacggaatcatataataggtcgcccttgttactgacttctttcatttagcataatttttaaaaat

SEQ ID NO: 666466 - DNA, 288 bp, Homo sapiens
gatctacatatctctccttatgtcagtaccacactgtcttggttattacagctttgtagtaagttttgaaatcagaaagtgtaagtcctccaactcagttttttctgcaggattgttttacctacctgggtctctgacatttccatataaattttaagatcactctgtaaatttctgaaaataaacaaaaaaagctgcctgrtattttgacagagattgcttgaatctgtagatcaatttaggaagtattgccatcttcacaatattgtctttcaattcatacatatg

SEQ ID NO: 666467 - DNA, 587 bp, Homo sapiens
tgtacaatgaaatgttacttggtacttaacaatcatgttaccgagaaaaacttagtaacacgaaaaggggctagtgatgtaaggctatattttaaaaatagcagaactcagtactgtgtatatagtttgcaacctgttgttgcaaaaaatgagtataatatatgcaatatatgcacatatatatacatatatacgtgtgtgtgtctatgtgtattccctgaatgtttggtgggttacaggtgagtttcacttttttgttagatcctacataatttccaaattatttttaaatgagaaaaaggttattttagaaacatatctaagttatttgataatagaaaatgataccagcatatttatcatattccttaaaaataccatcttagttgggttagcaagaacaattctcacaatgggytttccttttctttcctgacacctaaagtccactgacttgtgagttttagaaatgtctcaatttttcttcttttccagcgctgatatattacgactggacaaagttctagtgtcagcagctaggacagcatgattgacattaacagtaggttgggcagttctgagatgta

SEQ ID NO: 666468 - DNA, 493 bp, Homo sapiens
tggactcacctgacagaccaagagaaactgcactcccggagaagagaaatgcatccccaggaagctgaaggcccagtatgtaaattcttggctcctggagaggaacctgaggtagtgtgatggttaatattgagtgtcagcttgattggattgaaagatgcaaagtattgttcctgggtgtgtcactgaggctgttgccaaaggagattaacacttgagtcagtagactgggaggcacccactctcaatctgggtgggcaccatctaatcagcagccagcaaagctaggataaaagcaggcagaggaacgtggaagggctagactggctgagtctactgggctttatctttcttccatgctagatgcttcttgccctcaagcatgggactccragttcctcagcttttggactcttggacttagaccactggtttgccaggggctctcagtgtttggtcacagactgaaagctcttaaggctgcactgtcggt

SEQ ID NO: 666469 - DNA, 632 bp, Homo sapiens
gggactacaggcacgtgccatggggtttcaccatggtggccaggatggtcttgactgcttgacctcgtgatccacccacctcagcctcccaaagtgttgggattacaggcatgagccactgcgccctgctggctttcctacttttgaggtttggggactcggacaggcttccttgctcctcagcttgcacatggcctactgtggcacttcaccttgtgatcatgcgagtcaattctccttaataaactcccttacacatatagatctatcctattagtcctgccctctagagaacactgactagtatgggcagcaatagaacattgttgactgtttctctcattttttttcccccatctccaccaattctgtgtcttgttttgttttatttcatttcatttgtttcttttgcatatggctgagaagtcatcccccagtggtggcaacaatgagcgggaatttggttttaaagtctgatcatttaacggtttctataaatggattaatatgttatataaatctgttttctgttaaataaaaagatgacagagaatctggttggttagtrttaatttgtttatcaatttgtctatttttagctcaaagacgttagtgcccatcgggaaggagag

SEQ ID NO: 666470 - DNA, 499 bp, Homo sapiens
ctggtttattgatgcatgcctttgtttacaatatgaatggtaattcttcactgtctgtaatgaatactatgcttactttacaaaattaaagtgaagaattctttctgtctagagagaaaatattctgtgtcttaccagaataattttctgtgttatatgatgaccttataatgtctttgattatttaaggagaaaaaaattcctcatttatgaaagacataagggttttttctaactgcattgctgttagtatatatttttaaatgttttattgtcactttaattaaataggtaaccaaatattgcttcttaggtatccatggcctctcgtaagcaagtgtccaaactgttctgataactkttaaaaatttaccttccccaaataggatcctaaatgtagaaaaaaaatgaaataaaagtttcaagattttttttacacctaaaactttcatctttgagatttcccagaaagctccggggaaaaaaaatgacaaggttt

SEQ ID NO: 666471 - DNA, 604 bp, Homo sapiens
tgagtcaatgaagaaaatttaaaaatttcgtgaatcatgaaaatagaaacacaacataccaaagcctatgggatataccaaagcagtgttaagagggcagtttacagcaataaatgccatagatttcaaataaacaacctaatgtacatctcaaggaagcagaaaagcaagaacaaagcaaacccaaagttagtagaagaaaagaaataataaaaatcagaggagaagtgaacaaaattgagacaaaaaatacacaagatcaataaaatgaaaagttaatgtcttgaaaaataaagaaaatcaacaatacattagctagactatccaagaaaaaaagagaaaagacccaaataaataaaatcaggaatgaaagaggagacatcacaactgataccacagaaataacaaaggataacttgagactatatgaacaactgtatgtcaacaaattggaaaacctagcagaaatggataaattctgggtcacaaatgacctayccaagattgaaccaagaagaaatagaaaacttgaacagatcaattaaaagtaatgagattgaatcagtaataaaaagtcttccatgaaagcaagcccaggacctga

SEQ ID NO: 666472 - DNA, 472 bp, Homo sapiens
gagtgtcttctttcctctaaacaaccatatcaacactctagtaagggttctgaaccaggctgagatgactgaaataacagaaatagaattcagaatatggacaggaatgaagatcattgagctacaggagtacattgaaacctaatccaaggaagctaagaatcatgataaaacaatgcagtagctgacagataaaatagccagtatagaaaagaatgtaattacttgacagagctgaaaaacacactacaataatttcataatgcaatcacaagtattagtagcagaatagatcaagtggagaaaagaatctcagagcttgaagactggctttctgataatagayaatcagacaaaaatagagaaaaaagaatgaaaaggaacaaacaaaacctccaagaaacatgaaattatgtaaagagaccaaatctatcactcatttttgtcccttaaagaaatagggagagtgtaa

SEQ ID NO: 666473 - DNA, 472 bp, Homo sapiens
gagtgtcttctttcctctaaacaaccatatcaacactctagtaagggttctgaaccaggctgagatgactgaaataacagaaatagaattcagaatatggacaggaatgaagatcattgagctacaggagtacattgaaacctaatccaaggaagctaagaatcatgataaaacaatgcagtagctgacagataaaatagccagtatagaaaagaatgtaattacttgacagagctgaaaaacacactacaataatttcataatgcaatcacaagtattagtagcagaatagatcaagtggagaaaagaatctcagagcttgaagactggctttctgataatagacaatcagacaaaaatagagaaaaaagaatgaaaaggaacaaacaaaacctccaagaaacatgaaattatgtaaagagacmaaatctatcactcatttttgtcccttaaagaaatagggagagtgtaa

SEQ ID NO: 666474 - DNA, 566 bp, Homo sapiens
gctattggagcattatttttttagacagaaatgtctgattagacggggctgctggctgctgtctcctcagagaactgcagaggaaggggcgtgatgggaaggtgtggccacagcggcaggctcagtttccacaatctgcttaggtactcctgcaataaggaggytattttcacacagggcttatgagactcagtctcatctctccatagactctgtgcttttctcatttcccctacaggccagcactcaaaaatacataatggatgaataaatgaatgaatgaatgaatgaaccaacaagtaaaaagagcccagatgttatcacaaaatatcaccatttctcttggcttggaggtgggggtagggggctgggaatgggaaggagattgggaaaagatcctttttttccttttaatcttcccaggaaggacctgactgagcaaatcccttccctacagtcagacacactggcaggtgtccttgggcccagattagaaaggtggctccaggccctaggtgctgctgctgtggttggtatgcaggcaaacgctcccagtgcattcgaaa

SEQ ID NO: 666475 - DNA, 594 bp, Homo sapiens
agacctgatcagttttgctagtgcaaattagttcagaggcccagagctgctcctttctgtttgctggtatgggaggtttgtttgatttaacatgattgaggaaatgaaatatccctaagacaaagaaccaatactgcacttctggagagtggctgaagggaaactggattggaattgcacattagtagtggatccaaaataaaaccagaaggagaaatgttctttagaaggaaaatgtgatgactaatcatttgaaatarattgtaccttcttcttatctttttttttcttaaaggagcataaatgagtctcagttttctaacaaggtcctatgagtttgggacattgtctttccttccttcggttcatgtcaaggttttagatacattatcttgttattattcacaatatttctacaaaatcattattattattacccctatttaacagataaggaatctcatattccaaacaaagatacagtaaatccttatttggaaaatgtgacttaaagcaaagatacagcaggtcattgaataatgtcgtttcctgcaataatgtcattggatttcatcatgacgttgatgagggaaa

SEQ ID NO: 666476 - DNA, 594 bp, Homo sapiens
agacctgatcagttttgctagtgcaaattagttcagaggcccagagctgctcctttctgtttgctggtatgggaggtttgtttgatttaacatgattgaggaaatgaaatatccctaagacaaagaaccaatactgcacttctggagagtggctgaagggaaactggattggaattgcacattagtagtggatccaaaataaaaccagaaggagaaatgttctttagaaggaaaatgtgatgactaatcatttgaaatagattgtaccttcttcttatctttttttttcttaaaggagcataaatgagtctcagttttctaacaaggtcctatgagtttgggacattgtctttccttccttcggttcatgtcaaggttttagrtacattatcttgttattattcacaatatttctacaaaatcattattattattacccctatttaacagataaggaatctcatattccaaacaaagatacagtaaatccttatttggaaaatgtgacttaaagcaaagatacagcaggtcattgaataatgtcgtttcctgcaataatgtcattggatttcatcatgacgttgatgagggaaa

SEQ ID NO: 666477 - DNA, 605 bp, Homo sapiens
tgctgggtttgtgaccccccattctaccagcttaatgagactgtgcaaataagaccagtgttatagccctattgagagacaggactagctggatttcctaggccaactaagaatccctaagcctagctgggagggtgaccacttacacctttaaacacggggcttgcaacttagctcacacgcaaccaatcagatagtaaggagagctcactaaaatgataattaggcaaaaacaggaggtaaagaaatagccaatcatctgctgcccgagagcacagtggaagggacaaggatcgggatataaacccaggcatttgagctggcaacggcaaccccctttgggtcccctcctcttttatgggagctctgttttcactctatttcacgctattaaatcttgcaactgcactcttctggtccatgtttgttacagctcgagttcactcgctgtccaccactgctgtttgccaccatcacagacctgccgctgactcccawccctccggatccggcagggtgtccgctgtgctcctgattcagcgaggtgcccattgccgctcctgatagggctaaaggcttgctattgtccctgcacggctaagtgc

SEQ ID NO: 666478 - DNA, 637 bp, Homo sapiens
cgtgccttgaactcctatgaccacttatagaataatggttttttttgagacagtgtctcactctgttgcccaggctgaagtacagtggtgcaatcatggctcactgcagcctcaacctcctgggcccaagccatcctcccacctcagcctccctagtagctgggactacaggcacgtgccaccatgctcagmtaatttttttttttaattttttgtggagacaaggtctccctatgttgcccaagttggtcacaaactcctgggctcaagcaatcctcccgcttcagcctcccacagtgctgggattacaagcatgagccaccgcacacagccagagtaatgtttttagatacacaaagtcaaatacatagggtttcaatggaaaccaattacactgaaattaaaaatatttttaatcaaatgtgtgaaatactgttacacatgtgcttctttattaacccgatctagcagctggtctaataacttttgcagtttcaaaccagtgatcagtgtaaatgatacttgaaggtatgtgcaacgatagtaatgtcatgaaaatctcttcagtttctgatagtgagaaagacataggtactgctaatactattgtggggttttttgcccacatttataataa

SEQ ID NO: 666479 - DNA, 590 bp, Homo sapiens
actttatggtactttgttatgacaacccaaggacactaatacaattytttttctccatcagctttctctctctttccattatatttaagagcgacttaattaggtttctgtcctcattataagactaaggctgttcttttaatgctgtcaataaattccccatcgtgaaattcaatgtttatttctctcattacaaattttacaaatcttaatcagtatgtaaaactttttttaatttaaaagtttaaaattttgtgggttcatacaaggtatatgtagttatggggtacatgagatgttttgatgcagacatgcaatgcataatgatcaaatcatggaagacagagtatccaccccttcaagcatttagacttatgttacaaacaatccagttgtactcttctagctatgtttaaatgtaaaattaaaatattatttactgtggtcactctgtcttgctaccaaatactaggcttcattcattcattcaaactataaaaatagataatttttttctagattgtgtgcatggaagtacccattaatcatccccacctacctccagtagtcactaattgacacagatgatc

SEQ ID NO: 666480 - DNA, 597 bp, Homo sapiens
atcccgtaatagaggtgcttacagtttgagtgtcagagacattttcagtgttactatagccttttttttctacagcacaccttcaacacggtgggtcactggagaatagttcagctacaaccaccactcttccatcagctctcagactctactgcacaattaatttcatcattttgtattcattcactcatttattcagtccttcatatagcactgtctccttttaaatgattttgagtaacactgataaagcaaaaacagagttgttttaaaactttgagcttgcaaatattaacatttcacataaaattaaaatacattaaaataccttttaaaaagtagctttatcttatgygttttcttaaacatgttacattttcaataatagagtatctctgtgattccacgggaaatggcatttgtcaaaaaattctcttataaaaagtgcctttccttggtatgttttctaaaagcctaaaattttcttaacgcatttcattaatcctcttatgctgtgatgtagaaggtggtcactattctcattttacagatacaacaagaggcataagaagttaagagatgtgatacagagaacca

SEQ ID NO: 666481 - DNA, 532 bp, Homo sapiens
attttttatagcagtgcaagaatggactaatacaaaaaattggtaccagtagtgggrcattgctataaagatacctgaaaatgggaaagtggctttggaactgggtaatggatagaaactggaagagtgtggagagctcagaagaagacaggaagattagggaacatttgtaacttactggagacttgttaaattgttgtgaccaaaatgctgatagcaataaggacagagatagctaggctgatgaggtctcagatggagatgaagaacttcttgggaactggaacaaagttaacttttgttatttgttagtaaagaacctggtggcattgtgcctctgccctagttatctgtggagctttgaacttcagggtgatgatttcgggtacttggtgaaagaaatttccaagcagcaaaacattcaaaaagtgatctggctgcttctaattacctatgatcatttgcatgagcaaataaatgatctaaaactggaacttatatttaaaagagaagcatagcataaaagcttgga

SEQ ID NO: 666482 - DNA, 560 bp, Homo sapiens
cacattcagggaaaattaaactcaactcaacgcaactgaaataaaataaatttgacttgtatcagtttttttaaggtattcatactgaagtactacaaatgaggtggcttacaacaacagaaatctattctcataattccagaggccagaagtcagaaatgaagaattagatctttctgaagtctctgacagagactctgttccatgcctgtcttcgagcatctggtggttactggcaattcttagtgttctttgatttgtagacccatttgcaaccttcactggcacattctttttcttccctgtrtccagatctcctcatttctgtaaagataccagtcactggaatagggcccacactaactgggtatgacctcatcttaacttgactatatctgcaaagaccttatttccaaatgaggtcacttttacagatgaggacttcagcatatctttttaggggacacagttccacccatgactcactatttacatctaaaaaaagctgttgccttgtagatgaacagaggtcatcctattaaacggctcacttcatgttt

SEQ ID NO: 666483 - DNA, 599 bp, Homo sapiens
ctcagtaagatgtttcatgagaaaatcaaccccaacacacgtaatcatcaggttcttcaaggttgaaatgcaggaaaaaatgatatgaacagccagaaagaaaggccaggtcacctacaaagggaagctcatcagactaacagtggaattctamgcagaaatgttgcgggaagtcagggaccccgaacagagggactggctgaagccatggcagaaaaacataaattgtgaagatttcatggacatttatcacttccccaatcaatactcttgtgatttcctatgcctgtctttactttaatctcttaatctcatcatcttcataagctgaggatgtatgtggcctcaggaccctgtgatgattgtgttaactgcacaaattgttcataaagcatgtgtgtttaaacaatatgaaatctgggcaccttgaaaaaagaacaagataacagcaatgttcagggaacaagggagataaccctcaggtctgactgcctgagagccaggtggaacaaaccatatttctcttcttatgaaagtgaataggagaaatatcactgaattctttttctcagcaaggaacagccgtgagaaagagaatg

SEQ ID NO: 666484 - DNA, 634 bp, Homo sapiens
tagtgtttctcaaactctagtgagtgtatgaatcctgtggggatcaactgcagattamggtacagtggtaggtctggggtggggcctggggttctatgtttccaacaaggtcgcaagtgatgactgtgctgtgggtccacagccgcacttgaagcagtgaggaactaagccttgctgctcagctcacaataggacccttattcccaccctagaggtcctttagtaattctgccactaccacacaccctccaactctgtgcagcccagcaattatgccagagcaagctttcctgcatacccttgtaaacatgtttgtgaagcttatggaaacgtctgtttatctgtatgagttaccctgctagttcacatacctaccaaataagaatctctgggcacctgcgacacaacttcatcccatgcccatctcatccacgatggttttaaaagccaactgtttccacaggtttctattataacagggggattttatagatcacatttgctattcacaggtttagcctggacaactgatatttttcccaaacagtagaacttttaagttgggggaaaaatgttctctgcagcattcagataaatggatgaagaagcacttcttagaggttgccaatcatca

SEQ ID NO: 666485 - DNA, 577 bp, Homo sapiens
agcagatgctgaagccatgcttgtacagcctgaagatctatgagccaattaaacctctttttgttataaattacccagccttaggtacctctttatagtaacacaaaaatgaacacaaattctaaccagaaataacttactcaagacaggcaaagtctactcaaaactacaaaaaaaaagttataaactcccatatttactgcactgcattacttcccatattaatatagatcctcacttgtattcttgttgcttaaatcaactggaaaacttggctgtgtatggctttttagcaaacaaacaaggatttaacataacattaaggaaaataagcagaartagggcatgtttaaatttacatcagatgacaaggttaatgacttaaaagttccgagaagtataaacttggatgtgataaatgcatgtgatcagaggactgtgcaagaggaggccaaaatcacagattcaatctctgttgatgaacaacagttttttttttttttatttgtttaaatggaaaccaagctgaagcctaagttctatctttaaaatgcacccttaggagcaaggaaaaagg

SEQ ID NO: 666486 - DNA, 580 bp, Homo sapiens
agcacttggtcaaagccattcaacaagtctctaggaagttccaaactttttcacattttcctgttttcttctgaggcttacaaactatttcaacctctgcctgttacgcacttccaaagtcgcttccacattttcaggtatctatatagcagtgccccactaccttgtaccaattcactttattagtctgttcttacactgctaataaagacataccttagactgggtaatttataaaggaaagaggtttaatggactcacagttccatgtggctggggagtcctcacaatcatggtagaagatgaaggaagagaaaagggacttcttacattkcagtgggcaaagagagagcttgtgcaagggaatttctgtttataaaaccatcagatctcatgaaaattattcactaccatgagaacaacatgggaaagacccacccccatgattaaattacctcccatcaggttcctcccatgatacaaggaattatgggagctacaattcaagatgagatttaggtggggacacagccaaaccatatcagcacataatatgaacaagagttattattattatttt

SEQ ID NO: 666487 - DNA, 619 bp, Homo sapiens
ctttccagtcatccttgtcattgaagaattctttaacatttttcagcactctgttgtacatttctgactgtactaagacagtcccttcctcatatcccagcttttattccaatggataatgaaattcttgaactctatgcttacaacttttcaaaattcacatattgagtacagggttcaagtgtttggttgcttcgaatattgtaattgtttccatcagttgtgaaacccacaaaaaggagggtcacaccaatatccttagaattgaggtcattgaaatccatgtaggcatttgggtcttccccacattaaarcaccaactgttaggcaaaaagccaatgtcaaaagagcaggctggcatgtggacctcttgctttatctatcttccctctaattagctttccttttagcctacagtccttctctccactccttcaagtgcaaattcagctacctcttctttgagccactctctcagtttaagccctaaaatgcttctgtttacttcttcagacctatactgcagtgggatttatgctctctgaagttacagtggaatggagattgggtgtggcttaagcacaggtagttcacatttgagagccagccttcctctctt

SEQ ID NO: 666488 - DNA, 619 bp, Homo sapiens
ctttccagtcatccttgtcattgaagaattctttaacatttttcagcactctgttgtacatttctgactgtactaagacagtcccttcctcatatcccagcttttattccaatggataatgaaattcttgaactctatgcttacaacttttcaaaattcacatattgagtacagggttcaagtgtttggttgcttcgaatattgtaattgtttccatcagttgtgaaacccacaaaaaggagggtcacaccaatatccttagaattgaggtcattgaaatccatgtaggcatttgggtcttccccacattaaagcaccaactgttaggcaaaaagccaatgtcaaaagagcaggctggcatgtggacctcttgctttatctatcttccctctaattagctttccttttagcctacagtccttctctccactccttcaagtgcaaattcagctacctcttctttgagccactctctcagtttaagccctaaaatgcttctgtttacttcttcagacctatactgcagtgggatttatgstctctgaagttacagtggaatggagattgggtgtggcttaagcacaggtagttcacatttgagagccagccttcctctctt

SEQ ID NO: 666489 - DNA, 580 bp, Homo sapiens
cctaaataatgacacagatatgtttgtcttacacatttcactttattgtcaagttattagtatgtttattttcaaaaggtattttttgcaatttctttttattattccgtactttttaaatttacttcattatcacrtcttcctttattctttttaaatagtttttgcttttgttattttgttttcccttttttactcttggtttgtaatacatctttccttatttgctcctttctcatttgatctcaatgttaatccaactgttttccacatctgattcactaaaattttagcccttaaaaaaaaattcctgtttttcctatctcctcttgcccattctcttctccttgcctcacttcttttatctttttccattttactttcattttttgtttctctagatgttgttttgacatatgagttaatgtactggtacaattttgcatctgtaaattagagcttcagaatcaactgagtgtatttattctttatttttaggcctaaatttatcttaccttttattgattttataatatactatactctttcattttagtctgcatatgttagccaaagaaag

SEQ ID NO: 666490 - DNA, 580 bp, Homo sapiens
cctaaataatgacacagatatgtttgtcttacacatttcactttattgtcaagttattagtatgtttattttcaaaaggtattttttgcaatttctttttattattccgtactttttaaatttacttcattatcacgtcttcctttattctttttaaatagtttttgcttttgttattttgttttcccttttttactcttggtttgtaatacatctttccttatttgctcctttctcatttgatctcaatgttaatccaactgttttccacatctgattcactaaaattttagcccttaaaaaaaaattcctgtttttcctatctcctcttgcccattctcttctccttgcctcacttcttttatctttttccattttactttcattttttgtttctctagatgttgttttgacatatgagttaatgtactggtacaattttgcatctgtaaattagagcttcagaatcaactgagtgtatttattctttatttttaggcctmaatttatcttaccttttattgattttataatatactatactctttcattttagtctgcatatgttagccaaagaaag

SEQ ID NO: 666491 - DNA, 516 bp, Homo sapiens
aatcttacctacctaatcctggcatggtcaggatcacatttctcatgttgactacaaaattgctgtgatatatcctgcaaatgcttttctgaaatcacacacattgtgtctatcgcagtctatagaccaactggayaagtaactcatttttataaaaaaattaagctgctctgatgagatttgttcttggtaaactccataattatgtatcactttcttctaaaaactatgtgagatggctcccttctttattagtttggttgcaaactctgtgagactcaaacaaatgtgaaagaactgcagaaaactgcttcctaattgtcagacttgcgtactgtgttcagaaaaacacaataacaagtcttgcttcagaattgcttctgtttaccctcattttgatcaaaagcaagtaattaagaaattttctctctggaagacttctaataagcacatttccattatctttaaccacacagtgtgagctgactttcttttcttactgaatcctataatgtg

SEQ ID NO: 666492 - DNA, 543 bp, Homo sapiens
aaactattctgtggcagtggtaagatttgaacccaggcagtttgaccctggcatctataacagatgcgcstatgaccacagactttgtttcctttgccactttggtggtctgtctcctagagcagagaatcactagtactattacaaaccattccagtaacaaattaacctacttaaaaggagcttgcggaaatgaaaatataacttgaattttgacttgaaataaactgaactttaaaaatcctttgaggctttttaaaaaatgtatttgaagaatttccaatcagatcaacttaggaaggcccacttaggtcaaatcagacatggaggaattaattttcttgtggagctggtgttgagcctaagtccatcgtgctgcctgggtggggaatgccaggcagctttccttctttgctttccctgttctctcctcaatcactcatctctctagataaggccacagaacagccagagtgatcttttaaaaagtaaataagatcatggcagcctatttgtttgttgatctgtcagtcaaaaaactaa

SEQ ID NO: 666493 - DNA, 283 bp, Homo sapiens
tacatatctgttggtgttaggacagaccttcaattcctagaagtaatatagacatgagttaaaatgtaattcagtgattaaacatgttattggagccagaatgcttcaytgaaacacaagtctaatgcattccagttctatgagattttgcctgatttttgttttgttcattactgaaattttgtctggttgttgttactttacaactgaactctaccactctcctctacattcactatgaagcactcttacaaattctatatgctgtaaataagattttccc

SEQ ID NO: 666494 - DNA, 567 bp, Homo sapiens
catacacaaataatttcctaagaaaggtaatgtgcgacataattttctaaatgattacatgtctgaaaatatgtttttattttgcccttagaattgattttttttctggatacagaaatgtagatggtaaataattttccttcataattgtgaaggcattattcaattatcttttagcatctgttgtytgacatcttgtcattttcattctcttgaatgtaactttttttcctataataataattctgtgaaatagttttttttggttttgttttgttttttgagacagtctctctctgtcgccccggctggagcgcagtagcgtgatctcggctcactgcaagctccgcctccctggttcacgccattcttccacctcagcctccggagtagccgggactacaggtgaccgccgccggctaattttttgtttttgtatttttagtagagacggggtttcgccgtgttagccaggatggtctcgatctcttgaccttgtgatccgcctgcctcggcctcccaaagtgctgggattacaggcgtgagccaccgcgcccggcggaaata

SEQ ID NO: 666495 - DNA, 567 bp, Homo sapiens
catacacaaataatttcctaagaaaggtaatgtgcgacataattttctaaatgattacatgtctgaaaatatgtttttattttgcccttagaattgattttttttctggatacagaaatgtagatggtaaataattttccttcataattgtgaaggcattattcaattatcttttagcatctgttgtttgacatcttgtcattttcattctcttgaatgtaactttttttcctataataataattctgtgaaatagttttttttggttttgttttgttttttgagacagtctctctctgtcgccccggctggagcgcagtagcgtgatctcggctcactgcaagctccgcctccctggttcacgccattcttccacctcagcctccggagtagccgggactacaggtgaccgccgccggctaattttttgtttttgtatttttagtagagacggggtttcrccgtgttagccaggatggtctcgatctcttgaccttgtgatccgcctgcctcggcctcccaaagtgctgggattacaggcgtgagccaccgcgcccggcggaaata

SEQ ID NO: 666496 - DNA, 601 bp, Homo sapiens
atgatagagaaataaaaagatatagagacatagatgtccaggtgtggtgagctgtctgagaaataataaattggagcccaataattcaaggaagagatgagaaggtagagtagtagattccaacaagaaaacaacagattggtactaagaagagagctgattaataatggtgtggaggcaagaaacttagaatagtgatgactggtgtttaatttttagttacttttggatctgggcagaaacgcccttcattatcccccaaatcttcaggacaatctgtcaccaattctataaccacactagcattgacttaatgcagtactgctttggataataaaaaaaaaggcattttcatttttacataggagaaggaacaagaaagagttggagcaggcagtgcccaatgaggtaatggtgagaggttctcaatgactcattgaaagtaagaagttacakgcagctttaagtcagtgttagcccctcttcttgaatacctgcaaaaatatcaagagtcttggacttctggttatttcagttggaagcctgaattagttctcataaatttcaaacaaggtggtgcctccagaaggctggagaactt

SEQ ID NO: 666497 - DNA, 601 bp, Homo sapiens
atgatagagaaataaaaagatatagagacatagatgtccaggtgtggtgagctgtctgagaaataataaattggagcccaataattcaaggaagagatgagaaggtagagtagtagattccaacaagaaaacaacagattggtactaagaagagagctgattaataatggtgtggaggcaagaaacttagaatagtgatgactggtgtttaatttttagttacttttggatctgggcagaaacgcccttcattatcccccaaatcttcaggacaatctgtcaccaattctataaccacactagcattgacttaatgcagtactgctttggataataaaaaaaaaggcattttcatttttacataggagaaggaacaagaaagagttggagcaggcagtgcccaatgaggtaatggtgagaggttctcaatgactcattgaaagtaagaagttacaggcarctttaagtcagtgttagcccctcttcttgaatacctgcaaaaatatcaagagtcttggacttctggttatttcagttggaagcctgaattagttctcataaatttcaaacaaggtggtgcctccagaaggctggagaactt

SEQ ID NO: 666498 - DNA, 582 bp, Homo sapiens
tgaaccttgaatatgtacaatttttatttgtcacttaattataccccaataaaactggaaaaaaaattgtccttaacttgtctattctccctaatgaaaataaactatattataccatagataggttgctttttatataccaattattttctgtgtagggaataagagagtgaaactgtaatttccattttgtggtcatgtctatgttagctgcaatctgatagaacagtgatattgtttgaatatttgtcccttccaaatctcatgttgaaatttgacccccagtgttggaggtgagacctagtgaaagatgcttgggttatgggggtgaatctctcattaatggcttagcaccttctctgagtcaatgagtgagttcttgctctattaattcttgtgagagatggttgttttaaaaagcctggcacatcctttctctcctgctctctgtctctctttccatgcgacaagctagcttcccctccccttccaccatgactgaaagcttcctgaagccctcaccagaagcagatgctggcrccatgcttcttgtacagcctgcagaaccataagctaaataag

SEQ ID NO: 666499 - DNA, 528 bp, Homo sapiens
tcccctctgcattttggaattcaattagccagagtcaaggaaccctgacaggcacagcctttatcacactgcctggcatacagattctggtccttggattgtcttaaagtcagggagggcagagcgtgcatccatgtgcccaccagtaccttggtgttcggtaggttgaagagtcgaaagyaataaatggtggcccagtaacacaaacccaaagctccacagtttgactaagatggattggaaacccatgagagaccatataggctgaagacaaaaatcggatcaagaaatatttaggtacggatataggttcataaagggtctgactccaatgctgagcatctgtggaacaagcttatgtttttattcaggtcatccatgctgggtaccatgcttttcataaagaaaaatgcaggggccaggcacagtggttcacacctataatctctgcactttgggaggctgaggcgagaggatacttgagcccaggagtttgaggctgcagtgagctatgagtcatgccactgc

SEQ ID NO: 666500 - DNA, 625 bp, Homo sapiens
gctacttggtgcctcaggagcagatcaagtttttgaggggtcacaatttatataagttagaggggttatttctaagaaaaaaaatatattacaaatataaaattaggcaaataattaagtatgtatttaaaataaaataaatgataacaaaatttaaaatatatgtaacacaaaaatttttatatctagaaaaataacatagtatttttattttctgactatacattttccacatttttgcttcctactctttgatcacgttttttgaaaattgtgtaatattttctagagaggataaaaggatagtctttcttctataaaaatgtatggaaattgtgttttattaataggttcacaaaggtttcttttgagctttccaacaatgggcaccagagcacatattcttattcactttggtcatgattctggataaagtaagagttttcctggaagcaattcctacacagaaaggcctaacaatagcttaactatgtacagaggtggctgagaactatatctaacttaccaactccagactcactgatgacctgtctcattctctccttacccagatctcaaaactacccacaataatcraaaacccaccttccaaaagaagaaatgt

SEQ ID NO: 666501 - DNA, 601 bp, Homo sapiens
cttggtggtgggatgtaaccctataattttggggcatgttattcttttgttggaaatgtgtatygtttttaatctgttgctggtttaatattttcatagtttatatttttaatacttggatattttgaataaactttgtatcctatttaaaaaatttgattatttgagccaatttgtatttggagttgtttctattttgttatgtttcagtttcttatttctttttggaaaaaatattctttgagttctccttgggagagaaaagatattattccttcatgttttgtagcttggaagtatggccaaattttaattcagaatatgtttaattaactggtacagtggctcctgccagtattcaatctctcagtgcccctttgttttagaagagatgctactttcaaagtgattgtgaccatactctatgctagaatttgtgctaataatattccctctaccttctgctacactagttttattttttaggtttgtatcagttctgaactgctgactcaagtgaagtaataaaaaatgctagttacattaaaacattatgaccatcatttacattgtctaaagttcttataaagccttagagatt

SEQ ID NO: 666502 - DNA, 605 bp, Homo sapiens
ggtctggacacagaaagcaaattattatgtatatagcaaaataaaaataaaataaaataaatgccctttctgaatatgaactttaatccttaaattagtgtaattttatattataataaaggtaaaataaaaatttcatataaatgtccctcttattaaaaaatggaaagaaatcaaaatgaagctaattcttttagaaaaaaattatataaacaatataatagatttttttttaccataartgtactttctactgataaacatgtaaagttaaacagacaaaaatgaaaacagtaatcatcatgtaccaaatatcattttgggaaatcatattagaattgtttaaggcaaactacatttttaactcttgattaaaaataaatagtggcatctttgacataagtggcctagtttttcaaataaattattaaatataattaacaagtgaaagattttaaaaacgttacattttaaaatgtatctaaacacatataactaaagaaatggcatctgtgtgagagatgagggattccattttaaagatcaagaaacccacatcaactagggtaaaagctaatgaatcagtacagaatttaaaacttgat

SEQ ID NO: 666503 - DNA, 605 bp, Homo sapiens
ggtctggacacagaaagcaaattattatgtatatagcaaaataaaaataaaataaaataaatgccctttctgaatatgaactttaatccttaaattagtgtaattttatattataataaaggtaaaataaaaatttcatataaatgtccctcttattaaaaaatggaaagaaatcaaaatgaagctaattcttttagaaaaaaattatataaacaatataatagatttttttttaccataagtgtrctttctactgataaacatgtaaagttaaacagacaaaaatgaaaacagtaatcatcatgtaccaaatatcattttgggaaatcatattagaattgtttaaggcaaactacatttttaactcttgattaaaaataaatagtggcatctttgacataagtggcctagtttttcaaataaattattaaatataattaacaagtgaaagattttaaaaacgttacattttaaaatgtatctaaacacatataactaaagaaatggcatctgtgtgagagatgagggattccattttaaagatcaagaaacccacatcaactagggtaaaagctaatgaatcagtacagaatttaaaacttgat

SEQ ID NO: 666504 - DNA, 573 bp, Homo sapiens
gcattgaatctgtagattgctttgggcagtacagtcattttaatgatattggtttttccaatccatgagcatggtaattttttccatttgtttgtgtcatctatgatttttttcatcagygttttgaagttccccttgtagagatctttcatctccttgattaaatgtgttgctacttattttttgtagctgttgtaaatgggatagagttattgatttggttcttagcttaaaagttattggtatataaaaatgctactgatttttgtaccttgattttgtatcctttattgtggtcatttaccaaatctaggagtctttttgagggattttttagggctttctaggtataagattgtatcatcagtgaacaaagataatttgacttcctcttttctaatttgcattagtaataaaaaatctctcaataaaaaaagccctgggaccagatggaataacacataaattctacaatacatacaaagaaaaactagtaccagtcctactgaaactgttccaaataattgagaaggaaatcctccttaactcattctatgaaactagtctcaccct

SEQ ID NO: 666505 - DNA, 573 bp, Homo sapiens
gcattgaatctgtagattgctttgggcagtacagtcattttaatgatattggtttttccaatccatgagcatggtaattttttccatttgtttgtgtcatctatgatttttttcatcagtgttttgaagttccccttgtagagatctttcatctccttgattaaatgtgttgctacttattttttgtagctgttgtaaatgggatagagttattgatttggttcttagcttaaaagttattggtatataaaaatgctactgatttttgtaccttgattttgtatcctttattgtggtcatttaccaaatctaggagtctttttgagggattttttagggctttctaggyataagattgtatcatcagtgaacaaagataatttgacttcctcttttctaatttgcattagtaataaaaaatctctcaataaaaaaagccctgggaccagatggaataacacataaattctacaatacatacaaagaaaaactagtaccagtcctactgaaactgttccaaataattgagaaggaaatcctccttaactcattctatgaaactagtctcaccct

SEQ ID NO: 666506 - DNA, 573 bp, Homo sapiens
gcattgaatctgtagattgctttgggcagtacagtcattttaatgatattggtttttccaatccatgagcatggtaattttttccatttgtttgtgtcatctatgatttttttcatcagtgttttgaagttccccttgtagagatctttcatctccttgattaaatgtgttgctacttattttttgtagctgttgtaaatgggatagagttattgatttggttcttagcttaaaagttattggtatataaaaatgctactgatttttgtaccttgattttgtatcctttattgtggtcatttaccaaatctaggagtctttttgagggattttttagggctttctaggtataagattgtatcatcagtgaacaaagataatttgacttcctcttttctaatttgcattagtaataaaaaatctctcaataaaaaaagccctgggaccagatggaataacacataaattctacaatacatacaaagaaaaactagtaccagtcctactgaaacygttccaaataattgagaaggaaatcctccttaactcattctatgaaactagtctcaccct

SEQ ID NO: 666507 - DNA, 609 bp, Homo sapiens
ctttatacaattctatgtttacttcatcttgagtgaattcatcacagttccaatcatttctcttaccatttcacaaaccttccatcactattagctgcgtggttattaatatcagactcctacttactgatatcagcaatctacaatgtctaagtctgacctaagttccaaacttatgtcttgctactccatataccttaaactggttccaacagaattgctccatgcagttaatatagttaattgattagttaatttacttttgaaatagttagaggtcctcgggaagtaacaaaaacaaagctgtagaggacagttccagttttctgacattcaattttccccagtgctattcaatggtaacatcttggaaaactayagtacaatattaaaattaggaagttggtataatccacagggttttcttagattccaccagttttatactcactcatttctttggttgtttatgtgtatttgcatgagtatgtgttaagttctgtgcaattttatcacacgtgcagatttatataaatataaccacaaacaagacacagaactgttccatactaatcataaggtttcctcatgctacctttttatatctac

SEQ ID NO: 666508 - DNA, 609 bp, Homo sapiens
ctttatacaattctatgtttacttcatcttgagtgaattcatcacagttccaatcatttctcttaccatttcacaaaccttccatcactattagctgcgtggttattaatatcagactcctacttactgatatcagcaatctacaatgtctaagtctgacctaagttccaaacttatgtcttgctactccatataccttaaactggttccaacagaattgctccatgcagttaatatagttaattgattagttaatttacttttgaaatagttagaggtcctcgggaagtaacaaaaacaaagctgtagaggacagttccagttttctgacattcaattttccccagtgctattcaatggtaacatcttggaaaactatagtacaatattaaaattaggaagttggtataatccacagggttttcttagattccaccagttttatactcactcatttctttggttgtttatgtgtatttgcatgrgtatgtgttaagttctgtgcaattttatcacacgtgcagatttatataaatataaccacaaacaagacacagaactgttccatactaatcataaggtttcctcatgctacctttttatatctac

SEQ ID NO: 666509 - DNA, 565 bp, Homo sapiens
tcgactttttaagattctacatataagtaagatcatgtgttatttatctttctatgttgtcacaaacaacgggatttctttgtttttatggctgaaaagtattccattgtgtatttgtaccacatttcctttattcattcatccattgacgaacacttagatagattccacatcttggctattgtgaacaatgctacaatatacataggagtacagatatctcttccacatagtgatgtgatttcctttggctttatacccaatagtggattgctagattacatggtagctctatttttaacattttgtggagcctccatccaattttccacaataggtttactaatttacattcccactttcagggtacaaggrttcccttttctccacatcctcaccaacacttgttatctgtcatttttttttataatcaccattctaacaggtatgacataatatccattgaagctttaattagcatttccctgatgattaacgatgttgagcattttttaatatacttgttagctatatgtatgtcttcttatgagagatgtctgtttag

SEQ ID NO: 666510 - DNA, 618 bp, Homo sapiens
gattcacttgggatgtaattgcttgctctcagtaagtgttctaatcagaaccgccaaaatcacttcactactcctaattccagtggagtcaaagaaattagagttgcaaataacttgttaagtcacccttttaatcttttctctaggcagggctattccccatggtgtatttttcttttttgtcaatctaaactttagagaggttcagtaagtgtgtctcctggtgcttccattccaaggctgaaactggyaaaatgtctctgcaaggaatgaaaattatatatttttatcagtatccagtctgaacttctagacatcaaccgtgatggttccttttaccattatcccatacaattttatgagttcctggttgcaagttcaacagccaaagagggatatatgttcctgccaagattgtctttccttgctactgtcactttaatcagaaacatgattaacagaacatttgtaacattgatagtgattacaaagttacgccactgggaaggatagaaaactcaaacaattttatgtcatttatagtcatcccacatttttgtttcctgagtcacttttcttaaacataggccattttctttctgtgaaagttaaagatgt

SEQ ID NO: 666511 - DNA, 618 bp, Homo sapiens
gattcacttgggatgtaattgcttgctctcagtaagtgttctaatcagaaccgccaaaatcacttcactactcctaattccagtggagtcaaagaaattagagttgcaaataacttgttaagtcacccttttaatcttttctctaggcagggctattccccatggtgtatttttcttttttgtcaatctaaactttagagaggttcagtaagtgtgtctcctggtgcttccattccaaggctgaaactggtaaaatgtctctgcaaggaatgaaaattatatatttttatcagtatccagtctgaacttctagacatcaaccgtgatggttccttttaccattatcccatacaattttatgagttcctggttgcaagttcaacagccaaagagggatatatgttcctgccaagattgtctttccttgctactgtcastttaatcagaaacatgattaacagaacatttgtaacattgatagtgattacaaagttacgccactgggaaggatagaaaactcaaacaattttatgtcatttatagtcatcccacatttttgtttcctgagtcacttttcttaaacataggccattttctttctgtgaaagttaaagatgt

SEQ ID NO: 666512 - DNA, 573 bp, Homo sapiens
atcaaaactgaccaatgtgaaaggattaaagggaagagtgcttggtgctcacaaggtgccaaaaattgtaccttttcccatgagaccacctagaaaacctcatgagtcattgggcatttggtagagtacacagaagaatcttgcctcaaatatgaagtatcttagcccaactccagtcattccttagaaagggttaaaagcattatctcaaaagttaaagctgtttctaagtaatttagctgcatcccagaacaaagctcaaaaatgtatttgtcataaaaaaacctcaatgcacacctaggtaaaactcacaatgttttatattcaatcaaagattataaggcataaggaagaaaaattacccataatgaggacaaaattttatcaatcaaaagtgactctaacataaaacagatgttagaattagcatacaagtacatgaaaacagttattgtaacatcattccatacgttcaaaaagttaagtagagtcatgaaatayatatttttaaaagaaccaaattaaacttttagagattaaaactacatgtgagataaatagtatatgtgatgg

SEQ ID NO: 666513 - DNA, 622 bp, Homo sapiens
atactataaatttaaagcgaccagaaaatgacaaaacaataaattatagcaaattagacaacggtgataaaagagattcataaaattattaaattaatctaaaataaagaaaaaagaaagataaaaggagcagagattgggaaaatagaaaacaaacagtatatgatatatttaaacccaacaatatcgtaactcacattaaattcaactatctaaatatctcaaatgtgaagatcattcttaagacaataaaatattttacagcatttaacaaatacttccttgtttaaaacttttttattgactttccgtcactcaggctaattttggaaatcctgatggtctcccacaagattctgtataatccagtccaatctcccttattttgaatgtatctcatatgacattcttcttttccatcaagctgaaatttggkttactaagatgctgtgtgttctctcccaatttaaccaaagtagttttttctttcctaaagaatctttgtgctgaactctttgtcacagttaaatcttacacaggttcagagtgtcattctatattctctgtctagaatctgaccttaaaattctgagtgaactgttcctccctctatttctatatc

SEQ ID NO: 666514 - DNA, 602 bp, Homo sapiens
gtaaatgtacatatttatttatttcacaattagaagcattttgtttaaagggattttcactgccccttttgtcaagttatcacaatttgacttttaaaaaatatgaattacaatagctaattcacccatacattttatgagcatgaagcagttttctttaagatgataatactaagctatctttttataagtagctagtgtatatatmctaatatagttatagtggttacctctaggggaggttatgaaaatgttaaattttttagtataattatataatacgtagtattacttttataatcataggcaaaattactagtactaaaaaataacctacataaatacatgctggataataatgctttcccagcatggacacaatagtccaacaaaatataaacttaagtggaatgatcattttgagacaaaggggcctggtcatatatatatatattaaatgacatttcttagcttgtgccataagcagctacagtcactaatacatgtctttgagactactggatactttggtttttattattaacctaatacatacatgcaatgatcatcttcctcactaaataataaaaataacatttctc

SEQ ID NO: 666515 - DNA, 566 bp, Homo sapiens
taggtccagttggtcaagtgttgagttaaaattcaggattcctttgttagttttctgcctcaatgatctgtctaatactgtcagtggggtgttgaagttccctactattattatgtggccgtataattcttttcataggtctagaagtacttggtttatgaattagggtgatggggcatatatatttagtatagttaaatcttcttgttaaattgaacactttataaatatgtaatgtcattttctgtctttttaaacttttttggtttaaaatttatttcatttggccaggtgtggtggcttatgccctggcttatgtaatcccagcactttgggaggctgagttgggtagatcacttgaggtcaggaattcaagaccagcctggccaacatggtgaaaccctgtctctaccraaaaatagttgggtgtggtggcgcacacctgtagtcccagctacttgggaggctgaggtgggagagttgcttaaattggcagtggggtagaggttgcagtgagctgagatcatgccactgcactccagcctgggttacagagtgggactctg

SEQ ID NO: 666516 - DNA, 597 bp, Homo sapiens
agtgtgtgatcaatcttagagtatgtgctaagtggagatgagataagtatatattctgttgttgggkagagtatttatagatgtctgttagttccgtttgttcaagtgttgagtttaggtcccacgtttctttgttagttttctgcactgataatctaacattgccagtgagatgttgtctcccactattattgttttgctatgcaagtcttttcataggcctgtacgaaaatttatgagtctgggtgccccagtatttggtgcatatatatttaggatagtttaaatcttcttttcaaactgaaacctttatcattatgtaatgcccttctttgttctttttgatcattcttggtttaaagtctcttttctctgaaataagactagcaccatctgtttgtttatttatttatttattttctgtttgctgggtagatatttctctatcccttaattttgaatctatagttgtcattgcatgtgagatgggtctcttaaagacagcataaagacaggctcttgctactttatccaacttgccactctgagtcctttaagtgaggtatttaacttatttatattcatcgttaatactga

SEQ ID NO: 666517 - DNA, 597 bp, Homo sapiens
agtgtgtgatcaatcttagagtatgtgctaagtggagatgagataagtatatattctgttgttgggtagagtatttatagatgtctgttagttccgtttgttcaagtgttgagtttaggtcccacgtttctttgttagttttctgcactgataatctaacattgccagtgagatgttgtctcccacyattattgttttgctatgcaagtcttttcataggcctgtacgaaaatttatgagtctgggtgccccagtatttggtgcatatatatttaggatagtttaaatcttcttttcaaactgaaacctttatcattatgtaatgcccttctttgttctttttgatcattcttggtttaaagtctcttttctctgaaataagactagcaccatctgtttgtttatttatttatttattttctgtttgctgggtagatatttctctatcccttaattttgaatctatagttgtcattgcatgtgagatgggtctcttaaagacagcataaagacaggctcttgctactttatccaacttgccactctgagtcctttaagtgaggtatttaacttatttatattcatcgttaatactga

SEQ ID NO: 666518 - DNA, 597 bp, Homo sapiens
agtgtgtgatcaatcttagagtatgtgctaagtggagatgagataagtatatattctgttgttgggtagagtatttatagatgtctgttagttccgtttgttcaagtgttgagtttaggtcccacgtttctttgttagttttctgcactgataatctaacattgccagtgagatgttgtctcccactattattgttttgctatgcaagtcttttcataggcctstacgaaaatttatgagtctgggtgccccagtatttggtgcatatatatttaggatagtttaaatcttcttttcaaactgaaacctttatcattatgtaatgcccttctttgttctttttgatcattcttggtttaaagtctcttttctctgaaataagactagcaccatctgtttgtttatttatttatttattttctgtttgctgggtagatatttctctatcccttaattttgaatctatagttgtcattgcatgtgagatgggtctcttaaagacagcataaagacaggctcttgctactttatccaacttgccactctgagtcctttaagtgaggtatttaacttatttatattcatcgttaatactga

SEQ ID NO: 666519 - DNA, 604 bp, Homo sapiens
agcatgtagcttctaaaactttctcttattttcttttgttctatttacataataccattgggcttgtagcctattttattgttatatgctgtcacrtataattgatttcgggtgaaaaatttattaacttcaaggattcatgctctcagatgaataaatgccccttttagacacatatttatgaagaatatataatgactttaattgtgtgtacctcatgataaatttatattaaaatccttataattattgtgagaagcttactcatacattttcttaaaaacttttttgcttgtttcaaacaaatgcaacctttgacttctaggctgaatggttaattttattttcaattttcaatttcttggcttgacgaagtatactaatgatgtttctttgtctcaccaggcctcagaggaaatgttgataatgatttgcagactttaaaggttgattcatgataggtgcatatattgagtaagatcttttcccacagctcatctttgctctaaagtttaatattgtaatttaataaaaatggctttgcagctatgaaagctagcttggtaaagagatatatgtatttcaaggctggttcaggttcaaa

SEQ ID NO: 666520 - DNA, 604 bp, Homo sapiens
agcatgtagcttctaaaactttctcttattttcttttgttctatttacataataccattgggcttgtagcctattttattgttatatgctgtcacgtataattgatttcgggtgaaaaatttattaacttcaaggattcatgctctcagatgaataaatgccccttttagacayatatttatgaagaatatataatgactttaattgtgtgtacctcatgataaatttatattaaaatccttataattattgtgagaagcttactcatacattttcttaaaaacttttttgcttgtttcaaacaaatgcaacctttgacttctaggctgaatggttaattttattttcaattttcaatttcttggcttgacgaagtatactaatgatgtttctttgtctcaccaggcctcagaggaaatgttgataatgatttgcagactttaaaggttgattcatgataggtgcatatattgagtaagatcttttcccacagctcatctttgctctaaagtttaatattgtaatttaataaaaatggctttgcagctatgaaagctagcttggtaaagagatatatgtatttcaaggctggttcaggttcaaa

SEQ ID NO: 666521 - DNA, 604 bp, Homo sapiens
agcatgtagcttctaaaactttctcttattttcttttgttctatttacataataccattgggcttgtagcctattttattgttatatgctgtcacgtataattgatttcgggtgaaaaatttattaacttcaaggattcatgctctcagatgaataaatgccccttttagacacatatttatgaagaatatatartgactttaattgtgtgtacctcatgataaatttatattaaaatccttataattattgtgagaagcttactcatacattttcttaaaaacttttttgcttgtttcaaacaaatgcaacctttgacttctaggctgaatggttaattttattttcaattttcaatttcttggcttgacgaagtatactaatgatgtttctttgtctcaccaggcctcagaggaaatgttgataatgatttgcagactttaaaggttgattcatgataggtgcatatattgagtaagatcttttcccacagctcatctttgctctaaagtttaatattgtaatttaataaaaatggctttgcagctatgaaagctagcttggtaaagagatatatgtatttcaaggctggttcaggttcaaa

SEQ ID NO: 666522 - DNA, 604 bp, Homo sapiens
agcatgtagcttctaaaactttctcttattttcttttgttctatttacataataccattgggcttgtagcctattttattgttatatgctgtcacgtataattgatttcgggtgaaaaatttattaacttcaaggattcatgctctcagatgaataaatgccccttttagacacatatttatgaagaatatataatgactttaattgtgtgtacctcatgrtaaatttatattaaaatccttataattattgtgagaagcttactcatacattttcttaaaaacttttttgcttgtttcaaacaaatgcaacctttgacttctaggctgaatggttaattttattttcaattttcaatttcttggcttgacgaagtatactaatgatgtttctttgtctcaccaggcctcagaggaaatgttgataatgatttgcagactttaaaggttgattcatgataggtgcatatattgagtaagatcttttcccacagctcatctttgctctaaagtttaatattgtaatttaataaaaatggctttgcagctatgaaagctagcttggtaaagagatatatgtatttcaaggctggttcaggttcaaa

SEQ ID NO: 666523 - DNA, 508 bp, Homo sapiens
tttaataaaaatggctttgcagctatgaaagctagcttggtaaagagatatatgtatttcaaggctggttcaggttcaaagttaaaacaagatttttttttctattgccatgtccatctttctctaccaagggaaatcacctcttcaaaggaaaagacagtaaatctctaaatctccatatttactcargtcccgagactctgcagggcaaaagctgccaagtctatagatttacaatgttttatgataatgattttctccaagggctcacccaagatgaaaagataaattaatttatccacttccaaccactagtgaaagtttagtctccattccaaaagctgccttcagaacagtacctgcacaatataattcatcagtggtgattaaaatttaagagcctctggatatggccatcttgcactgggcctatcaagtggaaagcactgtaaaaaagatgactttaaagctgaaaagggcattataactttttttctgaccttgtgat

SEQ ID NO: 666524 - DNA, 508 bp, Homo sapiens
tttaataaaaatggctttgcagctatgaaagctagcttggtaaagagatatatgtatttcaaggctggttcaggttcaaagttaaaacaagatttttttttctattgccatgtccatctttctctaccaagggaaatcacctcttcaaaggaaaagacagtaaatctctaaatctccatatttactcaggtcccgagactctgcagggcaaaagctgccaagtctatagatttacaatgttttatgataatgattttctccaagggctcacccaasatgaaaagataaattaatttatccacttccaaccactagtgaaagtttagtctccattccaaaagctgccttcagaacagtacctgcacaatataattcatcagtggtgattaaaatttaagagcctctggatatggccatcttgcactgggcctatcaagtggaaagcactgtaaaaaagatgactttaaagctgaaaagggcattataactttttttctgaccttgtgat

SEQ ID NO: 666525 - DNA, 528 bp, Homo sapiens
tggagtctttaggggtttctacatataagatcatgtcatctgaaaacaaataattttgctttttttgttccaatattgatgccttttgtttcttttcattgcctaattgcttgatttggtacttctagtactatgttaaacaaaggtgtctaaggtatgcaccattgtcttctttctgcctaagaagtagagcttttcagttttgactgttgtttatgtcatctgtggattgccatatatagcttttattaygttgaagtatattctttctattcctaatttgttgagaattttcaccatgaaagggtgttgaattgtgtcaaatgcattttctgtgtctattgtgataatcaaatagattttgtcctttattatgttaatgtagtatattgcatttatttgttcatagaagttgagccattcttgcatcccaagagaaattcccacttgatttcaagacaagatccttttgatatactgttgaattcagtttgctagtattttgttgcatcttcttacaactatgct

SEQ ID NO: 666526 - DNA, 528 bp, Homo sapiens
tggagtctttaggggtttctacatataagatcatgtcatctgaaaacaaataattttgctttttttgttccaatattgatgccttttgtttcttttcattgcctaattgcttgatttggtacttctagtactatgttaaacaaaggtgtctaaggtatgcaccattgtcttctttctgcctaagaagtagagcttttcagttttgactgttgtttatgtcatctgtggattgccatatatagcttttattacgttgaagtatattctttctattcctaatttgttgagaattttcaccatgaaagggtgttgaattgtgtcaaatgcattttctgtgtctattgtgataatcaaatagwttttgtcctttattatgttaatgtagtatattgcatttatttgttcatagaagttgagccattcttgcatcccaagagaaattcccacttgatttcaagacaagatccttttgatatactgttgaattcagtttgctagtattttgttgcatcttcttacaactatgct

SEQ ID NO: 666527 - DNA, 543 bp, Homo sapiens
caaaatcaacttaaattttaatgcttatgttctgtattttgtaaatgaaaattgttgtatgtaaaatayatcaaattgtgtattgaagctaattatcattttggtcaagagacatttttaggttttggttacttttggagtagaggttggtcaagagaaatacagagatgggactcagctgaattatttcccattccaaccaaacaaatatttttgtttgatttttgagtattgtttccaatatgttaatccttgccagattcatggatattcaggaagtaaacaatactacttcaggaaacaactgatcacctgtggcatggacctgtggagtgagccattttccaaatataagtaaagatttcagggctgctttgggaatgtctgagaccctggaatatgcattggtaatctcacaaagaaaattcttaggagtaattaagataactgctacttcaggggttcactatgtcagtaaagtagagccaaagtgagccagagtaagagctgcaagaagatggaagaagaggcatacactacttt

SEQ ID NO: 666528 - DNA, 606 bp, Homo sapiens
cagtttcaattagacttcctgaaaaatatcccaggcttcccactggtccaggatgtgtcctgttctgctgaaatggaaattttgcttcaactcacaatatcaacagttcagattccttggtctttctggcatgtgattaggagaggttggactagtgggaaaataataatacataagagaggactttgctataatttatcttcccctcattatgtccctctcctcttgaaaacccccacacttccacatataccaccttctccaacaccattactactataatcactgccattatcagtgtctctgttgcttgagttgagtctttattcttcagataaggaatctcaagtttctaggtaacagaaaagataggatgtatattaaatgtagggaatcctctcctagtcaaaattcagctgccttttttaatgatacaaagcaaaaaccctaaagtcactaaggatttgctttccttataagttagaatagaaaaaaattggtaaatattaatgaattgaattttgtaataagatattttttaacttacrtaattatctttatctttattttaattctgatactatctaaaaatataatgtaagaatt

SEQ ID NO: 666529 - DNA, 589 bp, Homo sapiens
tgccttttttaatgatacaaagcaaaaaccctaaagtcactaaggatttgctttccttataagttagaatagaaaaaaattggtaaatattaatgaattgaattttgtaataagatattttttaacttacataattatctttmtctttattttaattctgatactatctaaaaatataatgtaagaattccaacactcatttctcaaatctattagtggtcagcttaaatgttactgtttggaatgtaataattatgttatagtctataatattatattctttattaatcatttaagcaaaatatgtagtatgtccttttttaatttagtttactgatttcctcatccaaatttattaactgaaggtataacactttttataccagcaatatatacccaaagtcatgaggaaaatagaataaagaacataatcatttaaattactcctgtgtattactctgttctcacactgcgaataaggacatacctgagactgggtaatttataaaggaaagaggtttaattgacccacagttcagcgtggctggtgaagccttacaatatggtggaaggcagaagaggagcaaag

SEQ ID NO: 666530 - DNA, 589 bp, Homo sapiens
tgccttttttaatgatacaaagcaaaaaccctaaagtcactaaggatttgctttccttataagttagaatagaaaaaaattggtaaatattaatgaattgaattttgtaataagatattttttaacttacataattatctttatctttattttaattctgataytatctaaaaatataatgtaagaattccaacactcatttctcaaatctattagtggtcagcttaaatgttactgtttggaatgtaataattatgttatagtctataatattatattctttattaatcatttaagcaaaatatgtagtatgtccttttttaatttagtttactgatttcctcatccaaatttattaactgaaggtataacactttttataccagcaatatatacccaaagtcatgaggaaaatagaataaagaacataatcatttaaattactcctgtgtattactctgttctcacactgcgaataaggacatacctgagactgggtaatttataaaggaaagaggtttaattgacccacagttcagcgtggctggtgaagccttacaatatggtggaaggcagaagaggagcaaag

SEQ ID NO: 666531 - DNA, 406 bp, Homo sapiens
gtgtccattttatctaccttaaccaaattttcacttatgattgctcatagcatagtcttatactctttctatttctgtaggattgacagtaatatcctttttatttttatttcataatttgagtcatccgtttttttcttagtycatctagctaaagttttgtcaattttgttgatctcttcatagaaagaaacattgtttttccttaatttttttcttttctttattttgtttatctctgctctaatatttatttccttctctttgctagtgttaaattccattacactttttggggcccatgatctattatgtaaaaatatattgaggtttattaagctttttgctattaaattatttttatttcaatagatttttaacctggagtcaaaatatatactaatga

SEQ ID NO: 666532 - DNA, 333 bp, Homo sapiens
caactgaatgtccccaggatgaacatccctgggatgagatatcagaaactgataacttgatgaccagaaagcaagaagtagtcaattgctaattgcacataaaaactgtggcattcaaagtcatcttcactgctgttaaaaagaagttattccatctttcacttcctgtcactaggaaagagtgattgctctcagtrggcttacttaaacttgagagacagaacataacacatttgaaaattctaattgtttccacttattaaattctgatgcaagttcttattgggattcagaataaaacaatattctgcatcagatttaaattgtagaaca

SEQ ID NO: 666533 - DNA, 607 bp, Homo sapiens
acactacacacatgaccataggatatcaagtgactgtattactaaagygcactagcatataccttttattatcatatctatgaagtcataaattgcagtatgtgtgggagcagtttgccatatgattaaaaggaggcatttgagagaaagagttcaaacaagtctagaagacaaaaatgttacatgcataggtggcctatgttcctatatcacctatgattattgcacaaagttctcttcctcaactaataactataaccttgaataaaaaggcgtgttttcatacaaccagctgatggatgatgaaaaattccaggtctggtttatagatgagcgaccatgatagatagatataagccaaaaatggggtgctgctgcactacagattcacatggggtttgggggagtgtgattctaacagacaaagtttgagcaacatgtctggacatcaaccttgtgtgaaagaacagacttaatggaaaaatgttcataagcttctgcaccataatgaatgacttcataggttggccagaaaggaaaagatttgaaattaggggaaaagaagtctgtagaagaagtatatggatttacttatgcatgcagtgaa

SEQ ID NO: 666534 - DNA, 576 bp, Homo sapiens
ggatttacttatgcatgcagtgaatgcagaactttatcttttatgtcaaygtccatcagtaaagatgtactaatgtacaatagaggcactgagcaatcaagtgaattggaccactcatctaataaagctcagtccctttctcattataaaatataatgtgaataatgttaccctcatgtgagagatagtgtattagtccagtctcacactgctataaataactacctgagactggataatttataaagaaaaaatgattaattggctcacaattctgcaggctgtacaggaaccatagctggaaaggccttatgaaaatttcaatcatggtggaagatgaaggggaagcaggcacatcttacatgctggggcaggaggaagagagagtgaagggggaagtgctacacacttttaaacaaccagatctcatgagaactcactcactatcacgagaacagcaagaggaaaatctgcctccgtgatccaatcacctcccaccatgccccttctccaacactggggagcacaactcgacatgagatttgggtggagacacaatccaaaccaaataattct

SEQ ID NO: 666535 - DNA, 576 bp, Homo sapiens
ggatttacttatgcatgcagtgaatgcagaactttatcttttatgtcaacgtccatcagtaaagatgtactaatgtacaatagaggcactgagcaatcaagtgaattggaccactcatctaataaagctcagtccctttctcattataaaatataatgtgaataatgttaccctcatgtgagagatagtgtattagtccagtctcacactgctataaataactacctgagactggataatttataaagaaaaaatgattaattggctcacaattctgcaggctgtacaggaaccatagctggaaaggccttakgaaaatttcaatcatggtggaagatgaaggggaagcaggcacatcttacatgctggggcaggaggaagagagagtgaagggggaagtgctacacacttttaaacaaccagatctcatgagaactcactcactatcacgagaacagcaagaggaaaatctgcctccgtgatccaatcacctcccaccatgccccttctccaacactggggagcacaactcgacatgagatttgggtggagacacaatccaaaccaaataattct

SEQ ID NO: 666536 - DNA, 580 bp, Homo sapiens
atgaccaaggacgacttggagatcagaagcaaaatggagtcttattgttataattttgcaaaggcagttttaacaactagtaataggcacttgaaggaaccatgttctgacaaatgcatgacaatcatgtgcttagatcttttaacctctgaaaactgaaggtttagtttaccycacttggaaagcaattagaccagcagaaatgttggctgaagacaacatcatccttaggaatttagcaactatgtcataaaagaaaatggtctgtaattttcatatcttaaaatttccttgttgggctctagcatctaggttatgatgctctccaaaaatgagttataaactcttattttttcattctcttgaagagtagatgcaagattagtgctatttactacttactattttgaaaaaataaaacaccaataaagccttcttggcctaaagtgttctctgtggcaagtttgcaaataatggtttcattttttaatagatataggactactttgaggtattttttcatgtcatctatgttatcaaattattaatgtgctttttcaataatatcgttattatctta

SEQ ID NO: 666537 - DNA, 580 bp, Homo sapiens
atgaccaaggacgacttggagatcagaagcaaaatggagtcttattgttataattttgcaaaggcagttttaacaactagtaataggcacttgaaggaaccatgttctgacaaatgcatgacaatcatgtgcttagatcttttaacctctgaaaactgaaggtttagtttaccccacttggaaagcaattagaccagcagaaatgttggctgaagacaacatcatccttaggaatttagcaactatgtcataaaagaaaatggtctgtaattttcatatcttaaaatttccttgttgggctctagcatctaggttatgatgctctccaaaaatgagttataaactcttattttttcattctcttgaagagtagatgcaagattartgctatttactacttactattttgaaaaaataaaacaccaataaagccttcttggcctaaagtgttctctgtggcaagtttgcaaataatggtttcattttttaatagatataggactactttgaggtattttttcatgtcatctatgttatcaaattattaatgtgctttttcaataatatcgttattatctta

SEQ ID NO: 666538 - DNA, 631 bp, Homo sapiens
tcccaactaaaactagaaaaaaagacaaagttgcacattattctactcttcaacaacacactagaggtattagataattctactagataagataaattgattttgggaataataacataaaaaattttttcaactctattagcagataaaacaatagtatacttgaaatactgagaagaatccataataagattaacaaaatcaataaaataattcagaacaatagcaaggtatgaaaatattatacataaaaatatccttcatattcataaacactgacaaagacagcaatgatagaaagcatgatttttaataaaaagaaagataaacacttaagaaaatactttacaagaaatatacaaaacttatgttagaaaaactaaaacactctgaaaaacacaaaaataggtttgaacatatggaaaaaaagaaagccctcctttttctgaatgtagttcccctaaattaatttttaaatttatgsctatttgataaaaatgctaaatatctttcttatggacttaggccaattggtattagatttcatacgaagaaaaaacccactgaattaaatattgaaaacaaaaagtaaaaagaagatctagtcataaaatatattaaataacagtgc

SEQ ID NO: 666539 - DNA, 535 bp, Homo sapiens
acttatagctgccaaatatatgaggcaaacattgacatagctgaagaaagaaatagcaacaaaacaatactgggaaacattaatatccagtttttgttattaacagaacaccacgtttaagactaataaagaaacagatgttaacaacactatcaccaattggatctaacagatatatacagaacactccaaccccaaatggcataatattcttctcaagtgcaagtagaatattctccctgatagacaacatgttaagccaaagaacaactcttaacaaatttaagaaacttgaaactatacaaaatatyttctctaatcaaaatgagataaaataagaaatcaatagaagaaggaaaactagaaaattcacaattatggtgaaattgaacaactcaaacttaaacaaccaatgggtcaatgtagaaatcacaaagtgatttagaaaatatctgtaaacaaattaaaatttaaacacaacataccaaaacttatgggatgcaccaaaagcagttctaaaacaaaagtttatagt

SEQ ID NO: 666540 - DNA, 535 bp, Homo sapiens
acttatagctgccaaatatatgaggcaaacattgacatagctgaagaaagaaatagcaacaaaacaatactgggaaacattaatatccagtttttgttattaacagaacaccacgtttaagactaataaagaaacagatgttaacaacactatcaccaattggatctaacagatatatacagaacactccaaccccaaatggcataatattcttctcaagtgcaagtagaatattctccctgatagacaacatgttaagccaaagaacaactcttaacaaatttaagaaacttgaaactatacaaaatattttctctaatcaaaatgagataaaataagaaatcaatagaagaaggaaaactagaaaattcacaattatggtgaaaytgaacaactcaaacttaaacaaccaatgggtcaatgtagaaatcacaaagtgatttagaaaatatctgtaaacaaattaaaatttaaacacaacataccaaaacttatgggatgcaccaaaagcagttctaaaacaaaagtttatagt

SEQ ID NO: 666541 - DNA, 535 bp, Homo sapiens
acttatagctgccaaatatatgaggcaaacattgacatagctgaagaaagaaatagcaacaaaacaatactgggaaacattaatatccagtttttgttattaacagaacaccacgtttaagactaataaagaaacagatgttaacaacactatcaccaattggatctaacagatatatacagaacactccaaccccaaatggcataatattcttctcaagtgcaagtagaatattctccctgatagacaacatgttaagccaaagaacaactcttaacaaatttaagaaacttgaaactatacaaaatattttctctaatcaaaatgagataaaataagaaatcaatagaagaaggaaaactagaaaattcacaattatggtgaaattgaacaactcaaacttaaacaaccaatgggtcaatgtagaaatcacaragtgatttagaaaatatctgtaaacaaattaaaatttaaacacaacataccaaaacttatgggatgcaccaaaagcagttctaaaacaaaagtttatagt

SEQ ID NO: 666542 - DNA, 651 bp, Homo sapiens
ctagaataaaccctctggtcttggattacaattggtgttatcaatatgagtttatggttgtttacacagaaacacacaataagatagatgtaggaatctctctctttctctctgtttatctttgtctctttctctccattactaggaaacaataacaggttagaggcttgcaagtagaatttgaattactaaatggrgacattatgaaaatagaaaatcgccatttgacaaacaacacagtaatatttgttgaaggcaaaaatcactatcgaatgctataactggtaagcaaaagtatgatagaaacaagatagatacatgatattaacaacaccccataagatattaactgtaaagggacaaaaggaacttttagtagagaaaactggcaaataaagccataacaaagggatgaaattttacatcactaataatgtgacatatcacgtatctcctgttatgacacactgaaaaggcatacattacttctgtgttattcctaccaaaaatggataagctaaatttaatcaagagtcatcagccaaacccaatggagaaatcccacaagatgaaattctcaaagttgtcaaggtcatgaagaaaggattgaggaaatatgtcaaattggacaataagagacatgacaactaa

SEQ ID NO: 666543 - DNA, 651 bp, Homo sapiens
ctagaataaaccctctggtcttggattacaattggtgttatcaatatgagtttatggttgtttacacagaaacacacaataagatagatgtaggaatctctctctttctctctgtttatctttgtctctttctctccattactaggaaacaataacaggttagaggcttgcaagtagaatttgaattactaaatggggacattatgaaaatagaaaatcgccatttgacaaacaacacagtaatatttgttgaaggcaaaaatcactatygaatgctataactggtaagcaaaagtatgatagaaacaagatagatacatgatattaacaacaccccataagatattaactgtaaagggacaaaaggaacttttagtagagaaaactggcaaataaagccataacaaagggatgaaattttacatcactaataatgtgacatatcacgtatctcctgttatgacacactgaaaaggcatacattacttctgtgttattcctaccaaaaatggataagctaaatttaatcaagagtcatcagccaaacccaatggagaaatcccacaagatgaaattctcaaagttgtcaaggtcatgaagaaaggattgaggaaatatgtcaaattggacaataagagacatgacaactaa

SEQ ID NO: 666544 - DNA, 619 bp, Homo sapiens
ttctccttgctattgccttattattctccttatttaatccctgtattaataatgccatcaaatgtgcaacagtccagtctgaagggaggaagcagagaggaagtgtcagacaaatagaatggtaaccagtcttgtgttggaaagtgggggggtggaggggaagtgagagagagagaatttaaatgagaatggaagaagccagkggagaagaaaaaattcaattaagaaataaaagatatgtaaaaacaaataataactatcccacaagaggaaagatgacaagacgttagtagacatctatggaaaattagtcttgaaaagtagaagtaacaccctgaaacagagtggagaagaaagttacacagaaacataagtgaaggaggagaaaaccacacaatgatctgatagggcagtatttttgatactataaagatgaattaatagaaatgtaaaattaataaatatatgtacagaatacaagccaggttttttattattatatattgcaacagacataaaatcactctgagaaatacactcacttccatgcttcttcattgtggattggtaacatatactatgtgaagtctagcaatctgtggaccatacttaaagtagg

SEQ ID NO: 666545 - DNA, 619 bp, Homo sapiens
ttctccttgctattgccttattattctccttatttaatccctgtattaataatgccatcaaatgtgcaacagtccagtctgaagggaggaagcagagaggaagtgtcagacaaatagaatggtaaccagtcttgtgttggaaagtgggggggtggaggggaagtgagagagagagaatttaaatgagaatggaagaagccaggggagaagaaaaaattcaattaagaaataaaagatatgtaaaaacaaataataactatcccacaagaggaaagatgacaagacgttagtagacatctatggaaaattagtcttgaaaagtagaagtaacaccctgaaacagagtggagaagaaagttacacagaaacataagtgaaggaggagaaaaccacacaatgatctgatagggcagtatttttgatactataaagatgaattaatagaaatgtaaaattaataaatatatgtacaraatacaagccaggttttttattattatatattgcaacagacataaaatcactctgagaaatacactcacttccatgcttcttcattgtggattggtaacatatactatgtgaagtctagcaatctgtggaccatacttaaagtagg

SEQ ID NO: 666546 - DNA, 547 bp, Homo sapiens
agcattcaacaggaacttttatcatgtacctaccatataacttggaatagggccaatgggccaaaaaygactttagagagcactttgcaaagaactcctgggtcaagaagagctcttttcactctactgcaaggaggaggtgatcgctgtgtgacctgcttgtccaagtctgaaaaacacaggaaaagtgacagagaaaacggagcagtgaaaagtgtgggctgcttcagcaggacagagagctgggacttctgggttctgaagccagctggggcatgaagaggacgtattagaagacattcaccatagaagcaatttctcttctaatatttataaacacagattatactaacataacagctacaacttcttgttttaacagtctaacaaatatcacagtaactacccaggggagatgccagaattatatgtaaaaggtaatgtaacacaatgttttcaggctactgaaattcagtcgatgcaaactcaacaaatgtgtctttgtgaaggggtcaagttgctcatatcacatgctgatttgaaggag

SEQ ID NO: 666547 - DNA, 510 bp, Homo sapiens
gggtgggttttatattttggtgttgattttgcttacctgtatttcttattttttctatagtcaacctgtgtggtttttaaatatttttaaagatcacttttaaaaaaatcaggggaaggggaagatgcgcttttttgattactatttggaaagccagcctataggatatcaccagcctattggtttttcccacaccagcatcacttagaaaactggatttaaaaaacaatattggagttattcttagctttaggagagagttcatcacagaattaatgctttgaatgcattttaaatatattctaacttataaaagtgtacctacaataaagaaaatgtggcacatatacaccatgggttactatgcagccacaaaaaagaattgagytcatgtcccttgcggggacatgggtgaagctggaaaccatcatcctcagcaaactaacacaggaaaagaaaaccaaatactgcatgttctcactaagtgggagttgaacaatgagaacccag

SEQ ID NO: 666548 - DNA, 585 bp, Homo sapiens
ctttcctgttattgtccgtttctgaccaagttttacagatacctggagttttaatcacccttgaaaggttttttcctttttcttaagacagagtttcgctgtgtcacccaggctggagtacagtggtgcgatcttggctcactgcaacctccgcctcctgggttcaagtgattctcatgcattggcttcccgagtagctaggactacaggtgtgcaccaccatgcccagataattttttgtatttttagtagagacagggtttcagcatgttgcccaggctggtttcaaactcctgagctcaggcaatctgcccgccttggcctcccgaagtgctgaaattacaggcatgagccaccaatcccagcctcaaagggttttaagggaagagatttcaaatgaatgaaattattctgcaacaagaagtgcttamtaaatgttccatacctgactgatgggatgctttaacatacagaaattagcacacataaatctagcaacctcaccattttgaaactaaggggaaaacagaaaagtcggtctctgcataaatagaagttgtaaagtccctgctcctgactgagaag

SEQ ID NO: 666549 - DNA, 614 bp, Homo sapiens
ggttctgcaggctatacagaaagaatggtggcatccacttctgggggggcctcagagagcttccaatcatggcagaaggcaaagtaggagcagaccgtcttaggttagtgcacaagtaatcacagtttttgccattacttttaatggcatccaactaatatatggcaggagaaggagcaagaaagagagagagagaggaggtgctacacacttttaaacaactagatcttakgagaactcactcagcatcatgagaatagcgccaaggggatggcgctaaaccattcgtgagacgcctgcccccaagatccagtcacctcccaccaggccccacctccaacactgaggattataatacaacctaagattttgtggggacacagatcatatcacttggcaaaacaacaacatagaaaagttatcaccagcctcttgcttttcctttctgtaccttacgccctgcaaagtgcgtgccccaagctctcccccaactcaattattccctctctgacgaagcagttggtgtgacccactcagtgaagtgtccttattaagggagagtttccacaacaggactttttccaactccccttctccaccctccagtttcccat

SEQ ID NO: 666550 - DNA, 644 bp, Homo sapiens
ttcagtgggttttggccagcttctttactgcaacatgttttatcagcaaggtctttgtgacctgtatgttgtgccaacctcctctctcatcctgcgacttagaatgcctcacctcttgggaatgcagcccagtaggtctcagccttatagtacacagcccctactcaagatggagtcgctctggtttagatgcctctgacaaaggccgggccacactgagggttgtctaaggacaggtaatttggagctggagctgtagaggcagcttagtatagcaatcagggtggggttagctagctttcatggactttctgtggtttagctaatttgaataattttgtggactccaggacataggggctgtccctaactgtcccatacctggctctggggcaattacagtgggtgcacagaggtccagagtctgagagatgctggcagtgtgaactgaatcagccattcaaaaaggggaactagtcggcctttagccaggcccccaaactagatgaagatagcatttagaaaaaccaaaaactacattacagatacttaataaatattttctgagttatcayattgatttaaaaaacctgaaattcctttttcagagtttacttaggccacagttaagaggcttaaaatgt

SEQ ID NO: 666551 - DNA, 579 bp, Homo sapiens
tggctggggacacagccaaaccatatcagcacctgtcatttaatattcacaacactataaggagtcatcttgctyatattatagttgttcagagaggttaagtcaattctcttaagccacacagtagagtcagttctgtctttaaagctcttaaccatttctctatattgctactattatgtccagccaaatcttctttcatttctaaatacagcaaatttcagaattaactgttataccttcaagaactttcattttgtgctttcaaagagggcaaatgaaaataattttttctataaatccatattgagtttttttcctggtgaggtcttacagcttagaattttgaatcttggggtttttcttccctttttgtaaacatcgggatcagcatattgcatggttgagaacccaggtaagggtgctgtggggggaagaaaaaaaaatacactatgaagtgaacgatacagatatccagaaacatgaacatatctgcccagtgtgtctgactcaatgacataaaaccacacacaaaagcaaaagtttggtgggactctaattgtacatcagcacccctaa

SEQ ID NO: 666552 - DNA, 550 bp, Homo sapiens
aagtaaccaccttgacctaattgacactccacccaacaacagcagaatttacctttttttcaagtgcacagaaaaagttaccatgatagaccatattctaggccataaaataaaaggattcaaatcatgtaaaatatatgatctctgaccacagtagaattcaattagcaagatctatggaaaatttctcattatctgaaaattaagtaacacacttctaaataatccatgagtcagagaagaaatcagatggaaaattagaaagtattttaaaccgaacaaaaattaaaagacaacatatcaaaatttggaggatgctacaaaagcattacatagggggagatttacagctttaaatgcttaaatttgaaaatgaaaaaagtattataccaattacctcaatttytgccttaagaagctagaaaaagaggaggaaattaacccaaaataaacagaagaaatgaaataataacaaagtaaaaatcagtgaaaagatagaaaaacaatagagaaaatcaggaaaactaaaagctagttttatgcaaagatc

SEQ ID NO: 666553 - DNA, 463 bp, Homo sapiens
tttctcaactagataaaaaggtcacctagaaaaacctacagcttacatcatacttagtggtgaaagactgcatgtttttccttaagatctggaataagacaaggatgtctgctttcatcacttctattaatcttgtatttgaaggtctagtcagtgcaaaaagggaagaataagaaataaaagacatccagattggaaagaaataaacttgtctttatttataaacaacacttggtatgattctcaatgtaggcaatctgctggaatctattaaaaatctactaatattagtaaatacatttagcaagatttcagtctataagatcgatatttaaacattactatgaggccaggcacagtggctcaagyctgtaatcccagcactttgggagactgaggtgggcagattgcttgagctcaggagttcaagaccagcctgggcaacatggtgaaaccttgtctc

SEQ ID NO: 666554 - DNA, 634 bp, Homo sapiens
tatacatgaatgtgcatagcagctttatttgtagtagccaaaaactggaaacaatccaaatgtccgttaacagatgaatgaataaacaaatgatgccatattcataccatggaatactactcaacaataaaaaagtaatgaactataaattcatgttaatataataatacaaaacaatattgccaagtgaaaaaatatatatagtgtgattttgttcatataaaatttaagaaaatgcaaattaatctatagtgacagaaaccaaattagtagttgccgagggggagaggatgggaaggggcagaagaaaggactgacacagaggccaaaggaacttttgcatgtgacagatatgttcattatcttaatggcggtgatcatctcacaggtatctaacttatttacttgtatactttaaatatctacwgtttgctatatgcacattctatttcaataaagctgtctttttttaaaaaaaaaatcccttacttcaaattaataggataggttaaggtaggacagaggtgcaggtcatcaagcatagctacatggaaagaaaagacaaacctgtccctggaagtattgtaaacaggatgcaatttctttattaagctttccttcctgcctacaggag

SEQ ID NO: 666555 - DNA, 477 bp, Homo sapiens
gtttctttagtttctatagcaagtattgaaaatttttttcactgttagctttccaccaggcctttcctcatgtcttttacaaattcacttcttggccaggcatggtgattcacacctgtaatctcagcacaggaggccaaggtaggaggatcacttaaggtcaggagatcaagcccagccttggcaacatagcaaaactgtctccccaaaaatttataaaaataaaacaaaataaaataaataaaatgtttcatttacccacaattccgtttccttaggccctgtgggaggtcagctgttgatgtcagggccgacacttcacagctggccggtggaaccaggtgtcagttctggtgatctggcagaagtccttggtacctggtggcaggggacccctccctccccaacacactcastcttcacacctcctcatctcctcagccactcacaggagttcagtgcagggctggggaaggg

SEQ ID NO: 666556 - DNA, 565 bp, Homo sapiens
aaggttgcctcatggcccaatatggttgctagaactccagccatyacattagtgttttacggttaagaaagagggtggggagagtcaatttcttagatccctttaagaagcttttaaggccaggtgcagtggctcaagcctgtaattccagcactatgggaggctgaggtgggagtgtcagaggcatttgaaccagagggactccatcttgagtaggggctgggtaaaataagactgagaactactaggctgcattcctagaagggtaggcattctaagtcacaggatgacataggaggtcagcacaagaaacaggtcacaaagaccttgctgataaaacaggctgctgtaaagaagctggttaaaaccccccaaaagcaagatagtgataagagtgatctctgattgtcctcactgctcattatatgctaattataatgccttagcatgctaaaagacactctcatcagcaccatggcagtttacagatgccatggtaagatctggcagttaccctatatggtctaaaaatgggaggaaccctcagctctgggaattgcccacc

SEQ ID NO: 666557 - DNA, 565 bp, Homo sapiens
aaggttgcctcatggcccaatatggttgctagaactccagccattacattagtgttttacggttaagaaagagggtggggagagtcaatttcttagatccctttaagaagcttttaaggccaggtgcagtggctcaagcctgtaattccagcactatgggaggctgaggtgggagtgtcagaggcatttgaaccagagggactccatcttgagtaggggctgggtaaaataagactgagaactactaggctgcattcctagaagggtaggcattctaagtcacaggatgacataggaggtcagcacaagaaacaggtcacaaagaccttgctgataaaacaggctgctgtaaagaagctggttaaaaccccccaaaagcaagatagtgatargagtgatctctgattgtcctcactgctcattatatgctaattataatgccttagcatgctaaaagacactctcatcagcaccatggcagtttacagatgccatggtaagatctggcagttaccctatatggtctaaaaatgggaggaaccctcagctctgggaattgcccacc

SEQ ID NO: 666558 - DNA, 567 bp, Homo sapiens
ttcccaaaaaaacttcctctccctcctgaagcctaatggtcttctcttgttgaacagctggtgctcctacccactgtgggactcctgaagaagacagtgagctacaacccacgcccttctacccgccacctcaccccagccacagtaggaaagtagagggtgcaagaggcccgtctctgtgcaaggaagaaggcacactcacccaggcatttctccagggcatgtttgtttcactggcaagtgctccaaggggaagtccggggtgccgtggaagcataggatagctgtgaaggtctggcatcrgacagcctggcttggaatctaaggctctgccacacacgaggctgtgtgatctcaggcaaatcgcctaccctctcttaacctcgatttcctaatcagtaaaatgggaactaatcttagtacccagggccgatgttgaaaatattcaataaccagctgaggcactaacctattaaatggcaggcagccagtacaagggtgcacctgctaaatattagccctgctcacctctcctgcagaggttgctgtgacacctgatatgttgca

SEQ ID NO: 666559 - DNA, 567 bp, Homo sapiens
ttcccaaaaaaacttcctctccctcctgaagcctaatggtcttctcttgttgaacagctggtgctcctacccactgtgggactcctgaagaagacagtgagctacaacccacgcccttctacccgccacctcaccccagccacagtaggaaagtagagggtgcaagaggcccgtctctgtgcaaggaagaaggcacactcacccaggcatttctccagggcatgtttgtttcactggcaagtgctccaaggggaagtccggggtgccgtggaagcataggatagctgtgaaggtctggcatcggacagcctggcttggaatctaaggctctgccacacacgaggctgtgtgatctcaggcaartcgcctaccctctcttaacctcgatttcctaatcagtaaaatgggaactaatcttagtacccagggccgatgttgaaaatattcaataaccagctgaggcactaacctattaaatggcaggcagccagtacaagggtgcacctgctaaatattagccctgctcacctctcctgcagaggttgctgtgacacctgatatgttgca

SEQ ID NO: 666560 - DNA, 567 bp, Homo sapiens
ttcccaaaaaaacttcctctccctcctgaagcctaatggtcttctcttgttgaacagctggtgctcctacccactgtgggactcctgaagaagacagtgagctacaacccacgcccttctacccgccacctcaccccagccacagtaggaaagtagagggtgcaagaggcccgtctctgtgcaaggaagaaggcacactcacccaggcatttctccagggcatgtttgtttcactggcaagtgctccaaggggaagtccggggtgccgtggaagcataggatagctgtgaaggtctggcatcggacagcctggcttggaatctaaggctctgccacacacgaggctgtgtgatctcaggcaaatcgsctaccctctcttaacctcgatttcctaatcagtaaaatgggaactaatcttagtacccagggccgatgttgaaaatattcaataaccagctgaggcactaacctattaaatggcaggcagccagtacaagggtgcacctgctaaatattagccctgctcacctctcctgcagaggttgctgtgacacctgatatgttgca

SEQ ID NO: 666561 - DNA, 567 bp, Homo sapiens
ttcccaaaaaaacttcctctccctcctgaagcctaatggtcttctcttgttgaacagctggtgctcctacccactgtgggactcctgaagaagacagtgagctacaacccacgcccttctacccgccacctcaccccagccacagtaggaaagtagagggtgcaagaggcccgtctctgtgcaaggaagaaggcacactcacccaggcatttctccagggcatgtttgtttcactggcaagtgctccaaggggaagtccggggtgccgtggaagcataggatagctgtgaaggtctggcatcggacagcctggcttggaatctaaggctctgccacacacgaggctgtgtgatctcaggcaaatcgcctaccctctcttaacctcgatttcctaatcagtaaaatgggaactaatcttagtacccwgggccgatgttgaaaatattcaataaccagctgaggcactaacctattaaatggcaggcagccagtacaagggtgcacctgctaaatattagccctgctcacctctcctgcagaggttgctgtgacacctgatatgttgca

SEQ ID NO: 666562 - DNA, 539 bp, Homo sapiens
atccctctcaggatcccccaggccttcccagggaaactgacttgatgtccagagagagggtaccacagaaacgcccctttcagcaagagtaacaatttgaagtaacaatttttctcaaggtcagtccccaacaaggcaggcscgggggtcacctgcctgggctcccacgctgccatccctgagaccttctctcctcctttaccaagctctgcctgttccttccacgcctggggcggctgggagcagctctctcaggggagtctccatgggaacctcgagggggaattccgagccccataaaccgcctaccgcctggacttggcttctctaacagttgctcaagaacgctggcacacagattgagaggctcagcacaaaacgcctcggttttcttcattttctttccccaacaccgttgccccagccaacccctagtactgaggaatgcgcccaattgtgtaagctggagacaggcaggccaagatctgacaggttttggcacaaagtataaaatcaatgtataatcacctaacaggcct

SEQ ID NO: 666563 - DNA, 539 bp, Homo sapiens
atccctctcaggatcccccaggccttcccagggaaactgacttgatgtccagagagagggtaccacagaaacgcccctttcagcaagagtaacaatttgaagtaacaatttttctcaaggtcagtccccaacaaggcaggcgcggggktcacctgcctgggctcccacgctgccatccctgagaccttctctcctcctttaccaagctctgcctgttccttccacgcctggggcggctgggagcagctctctcaggggagtctccatgggaacctcgagggggaattccgagccccataaaccgcctaccgcctggacttggcttctctaacagttgctcaagaacgctggcacacagattgagaggctcagcacaaaacgcctcggttttcttcattttctttccccaacaccgttgccccagccaacccctagtactgaggaatgcgcccaattgtgtaagctggagacaggcaggccaagatctgacaggttttggcacaaagtataaaatcaatgtataatcacctaacaggcct

SEQ ID NO: 666564 - DNA, 539 bp, Homo sapiens
atccctctcaggatcccccaggccttcccagggaaactgacttgatgtccagagagagggtaccacagaaacgcccctttcagcaagagtaacaatttgaagtaacaatttttctcaaggtcagtccccaacaaggcaggcgcgggggtcacctgcctgggctcccacgctgccatccctgagaccttctctcctcctttaccaagctctgcctgttccttccacgcctggggcggctgggagcagctctctcaggggagtctccatgggaacctcgagggggaattccgagccccataaaccgcctaccgcctggacttggcttctctaacagttgctcaagaacrctggcacacagattgagaggctcagcacaaaacgcctcggttttcttcattttctttccccaacaccgttgccccagccaacccctagtactgaggaatgcgcccaattgtgtaagctggagacaggcaggccaagatctgacaggttttggcacaaagtataaaatcaatgtataatcacctaacaggcct

SEQ ID NO: 666565 - DNA, 618 bp, Homo sapiens
tgttgggattacaggcatgagccactgcgcctggccgcccagcctcttttttaaagtttgtatttgtgtggaatgtgcactaaagattttgggcaaagttaaaaattgaaagtcgcatggctttaagaggggaaagaggcaagacaggtagagttaaatgttaacctgggtgatatcccagggccctgaaagatgcagaggacacataaaaccagtaggcggtgctcttctcagtcctaacgagtgtatttacactcaccccaaaataaagcttctacagaataaaactgtttaaaataaccattgcttatacaaatgtaagctttctgttgccctttcaatactgttttaacctctgtgactttgttattgttatggaaatgatttcctttcatttacatttctgacctctctgtttacttcacagcagaaagactattctagttttctatcaagaaaaagcaagattaagatagctaaagrtgactgcgtttttgggaacataaaggaagaagatctctgaagaaagctctcatattttaaaatatccttggaggctatctcaagacagtgaaagaacttggggattcaggtgggctacctaccatcagtggagga

SEQ ID NO: 666566 - DNA, 533 bp, Homo sapiens
cggggccatcaggaaagccccaaggggaagagggactttgaagaaagagtagagccatgtgagcaaaggtggggcaccctagagaaagggaaggatagttacagatgggagattaaatgtggcattgtagaaaaatgagtaaacttgttctgtgctagcgaagttttaggttaagggagtagttaggagataaagctaagaagtgggatggatcagaaatatatgtatatcctaatgcagcatctctacagtatatgtagagcagtttgtccyttgaggatgcacaaaaacagaagcattttatttaatagttttttttccaaacattgagattatcatcagtgtcagaatatgagaagaaaaatacaattgatgacatgcattccacagtatataaatataacatgaagaataaaggaactagggtagcacatgataaaacaaaaattgaaacaaaattcaaaacttattttgtaaaatgatacatttcttagtagttatgtgagagaagaaggagctattagcctttttgg

SEQ ID NO: 666567 - DNA, 502 bp, Homo sapiens
aggacaaattcttttttaatgtgctaaggaattcagtaaaattatggyacatacatagaatacagtcatcccttagtatccagtttcttttaacagcatctgacaagaaaattgtctctctgtggtactctcctaagagcagtgtgcctttcaggggagtcagactatcacatatctctccccgctacttttcccacctctccaagcaggcttcattatgtttacctaggtttcacatccattcacaggggcacagactcagtcctcagtgaatcttgaaagattactggttcattattcacactttttattagtgcctgtaattctgtttgaagagggatgggtttctcttcccttagtatcctcttcaaacccctgtttgaagagggatggtttcaggacctcatgcagataccagaattcacagatgctcaagtccctggtacagaatgatatggtatttgcatataacctatgcacatctttccatatactttaaata

SEQ ID NO: 666568 - DNA, 639 bp, Homo sapiens
gtccttaaccattaagaatactattatatcttaaagttttacagattgacctaagattgtggatccaaaatttgagatataaaagaaaattaggcatgacttttcatcaagtcagtgaatcacaagcttccatcaaaacctttttattgttgtttgggttgagacaatcacgctggttgrcataagaagctcttgttgccgcgatctaagtgactgcgtcatgtgaaaggataaatgactccatcttcaagtctctcaggcagtgccacagagcacagagtgaggagttttaagtgtcaggctacaccagccctcaaaaacctgacccccaaagttctgcttttaacaatgccagctagtctgcctctgaaccagtcagtggacactgttcctcatggacactgttccttgggaaccagggccctggtcagcaaccagcatgctttctggggcgtggttattcccatattgactgttcttgcactagactatgtggtttttcctctgccaggaaccagttcttttatttttctttcctggaggtctttactgccaactagatgtcaccccattatcagaagctgctctgttaccaggggatcagtgctgtatgcaagctttcttccgtatggctgagga

SEQ ID NO: 666569 - DNA, 639 bp, Homo sapiens
gtccttaaccattaagaatactattatatcttaaagttttacagattgacctaagattgtggatccaaaatttgagatataaaagaaaattaggcatgacttttcatcaagtcagtgaatcacaagcttccatcaaaacctttttattgttgtttgggttgagacaatcacgctggttgacataagaagctcttgttgccgcgatctaagtgactgcgtcatgtgaaaggataaatgactccatcttcaagtctctcaggcagtgccacagagcayagagtgaggagttttaagtgtcaggctacaccagccctcaaaaacctgacccccaaagttctgcttttaacaatgccagctagtctgcctctgaaccagtcagtggacactgttcctcatggacactgttccttgggaaccagggccctggtcagcaaccagcatgctttctggggcgtggttattcccatattgactgttcttgcactagactatgtggtttttcctctgccaggaaccagttcttttatttttctttcctggaggtctttactgccaactagatgtcaccccattatcagaagctgctctgttaccaggggatcagtgctgtatgcaagctttcttccgtatggctgagga

SEQ ID NO: 666570 - DNA, 577 bp, Homo sapiens
ctccttgacaagtgtggtctgttgtgctgtatgtagactgcaaatgtggccatcgactcctcctgtcccagtacccaagtgcccctgccctgtagatctgagtgccttctcattgacttgaagctccgctgtgtgacttgctttggtccatgggaagtgagcaaaggtgatacaagcaaaggcttgaaagatgctcgtgcattggggcttgcccccatcgctgctctttgaaaccctgccaccctgtgataaagtgcagcatagctgctgggggatgagaggtcatgtgaatagaggcccctgggccccagcccagcccatcatcaaccagcaaagtcacccaagaccaaaagacttccaggctgatctgaagaattatgagctaaataaatgattgwtagttagtttgagatgggtggttgcagcaaaagagaactgacacatattaaaatatatcagtaccttcctatcaagaaatggcttttttcttgtctaatcaccaccaggcctattaacatgaagtgtgttacacattcttgtcacttttattaacctctgttttgacaaacaaaagcat

SEQ ID NO: 666571 - DNA, 619 bp, Homo sapiens
acatgtcactatacatttgtccacacccacagaatgtacaaccacaacaatgaaccctaatgtaaaatacagactgtggctgataatgatggatccgtgtaggttcatcagttataataaatgtgccactcttgtgggtgatgttgataaggaggtaatgtatgcatgcatggaataggggggatatggaaaatctctgraccctctgctcaattttgttttgagtctaaaactgctctaaaatataaagtccattaaaaaaaaatccagaccccctaccttatgcaataccccaaattaatctcagatgattcacagaccaaattgaaaaataataataacaacatttctgaaagaggaaaacataagaaactatcttcatgaccttggggtgggcaaagatttcacaaataggacaggaaaagcactaaacatatgcttttttaaaagtgataaactagactttgttaaaatgaggagctctgtttatcaagcaatattaagagtttaaactggcaaagacaggccaggcacagtggctcacgcctgtaatcccagaactttgggagggtaagatgggtggattacttgaaatcaggagttcgagatcagcctgacc

SEQ ID NO: 666572 - DNA, 613 bp, Homo sapiens
acatgtcactatacatttgtccacacccacagaatgtacaaccacaacaatgaaccctaatgtaaaatacagactgtggctgataatgatggatccgtgtaggttcatcagttataataaatgtgccactcttgtgggtgatgttgataaggaggtaatgtatgcatgcatggaataggggggatatggaaaatctctgaaccctctgctcaattttgttttgagtctaaaactgctctaaaatataaagtccattaaaaaaaaatccagaccccctaccttatgcaataccccaaattaatctcagatgattcacagaccaaaytgaaaaataataataacaacatttctgaaagaggaaaacataagaaactatcttcatgaccttggggtgggcaaagatttcacaaataggacaggaaaagcactaaacatatgcttttttaaaagtgataaactagactttgttaaaatgaggagctctgtttatcaagcaatattaagagtttaaactggcaaagacaggccaggcacagtggctcacgcctgtaatcccagaactttgggagggtaagatgggtggattacttgaaatcaggagttcgagatcagc

SEQ ID NO: 666573 - DNA, 591 bp, Homo sapiens
tgccagcagcatcagaaaaggtcaattctcmgaatctgcactatgtaaatgaatactttgtatctcagaaatacacatgcagtatatttactttaaagtaaaaggatgtgttcatcgtcattgggaggtatcctctaacattgcattattctctttaacattcacagttatgctatccatatttatgagctgaaaagacagattactggcttgcatgagtccttgtttcttacatttgtcttctaagttttgtttggtgatgacattattgtgcaaggagctacagatggttttattttgatggggccaaggcttagccctgtgtcctcttccataggatgctaacatttctttctgcttttgttcttcctgagtcactgatgtacacaatacatcataatggattattcttcatcttgctcttgtcaaccaaagattaggtcattttgtcaccaaggaaaacttaaactgtgaaaaagaaatcctctatttcctagtggtgcctgataaatgttagtcataatgaattcgttaatagtctcccactttggaataatatgtaaaagaaaaggaatgctacacaatgaagaa

SEQ ID NO: 666574 - DNA, 591 bp, Homo sapiens
tgccagcagcatcagaaaaggtcaattctcagaatctgcactatgtaaatgaatactttgtatctcagaaatacacatgcagtatatttactttaaagtaaaaggatgtgttcatcgtcattgggaggtatcctctaacattgcattattctctttaacattcacagttatgctatccatatttatgagctgaaaagacagattactggcttgcatgagtccttgtttcttacatttgtcttctaagttttgtttggtgatgacattattgtgcaaggagctacagatggttttattttgatggggccaaggcytagccctgtgtcctcttccataggatgctaacatttctttctgcttttgttcttcctgagtcactgatgtacacaatacatcataatggattattcttcatcttgctcttgtcaaccaaagattaggtcattttgtcaccaaggaaaacttaaactgtgaaaaagaaatcctctatttcctagtggtgcctgataaatgttagtcataatgaattcgttaatagtctcccactttggaataatatgtaaaagaaaaggaatgctacacaatgaagaa

SEQ ID NO: 666575 - DNA, 559 bp, Homo sapiens
cctactaatttttataaattagctgatacagtccatatgtacattatgttgacagttgccagtaacaaaatcagtgagcctcaatgtaactgcaatgaagtacagaaagttggacatacaaggccatttggatgcaaatcagtaaaaataaaccataaagatatgaatagcaaaaaatgttaaggtckccagtgttttctacttaatcatgagctagtcctttcttcacatgtcaaaatgtcttatgtgctaccctgcatatcatgaatattttcttaaatgaaaatcattagagtttgtcagcttaagcaagagcttttgtatttatactgaaatagatctctaaaactttctttcaccctgagagaaagaatgctcccctaggatacagcagatcatgttttatggcaggccattttatagtttatcacatctccccagcagggaccaaaccagtaaaataaagcttaaatgtgataagtggacttacgtgtttatctttatggcagggttacatattttctctcatgcctttctcccatctgtgttttcgatgatg

SEQ ID NO: 666576 - DNA, 559 bp, Homo sapiens
cctactaatttttataaattagctgatacagtccatatgtacattatgttgacagttgccagtaacaaaatcagtgagcctcaatgtaactgcaatgaagtacagaaagttggacatacaaggccatttggatgcaaatcagtaaaaataaaccataaagatatgaatagcaaaaaatgttaaggtctycagtgttttctacttaatcatgagctagtcctttcttcacatgtcaaaatgtcttatgtgctaccctgcatatcatgaatattttcttaaatgaaaatcattagagtttgtcagcttaagcaagagcttttgtatttatactgaaatagatctctaaaactttctttcaccctgagagaaagaatgctcccctaggatacagcagatcatgttttatggcaggccattttatagtttatcacatctccccagcagggaccaaaccagtaaaataaagcttaaatgtgataagtggacttacgtgtttatctttatggcagggttacatattttctctcatgcctttctcccatctgtgttttcgatgatg

SEQ ID NO: 666577 - DNA, 546 bp, Homo sapiens
aagagggtaatcataagaagaaaagtaaaaataatagtgaaattttaaagtgcttactgagtgccagcactatttttacatgttttacatatattatcttacatcatccttacaacaactctatgaaatagatactattattattctcctttcatagaaaaaaatgaagctcagagagcttgtctttcccaaggtcacacagctagcaactgaaactactaaaccatattatttttaaaaaggcagagaaataacttcatagagactgaaagtacaagtgagaaagagagaggagggtgaaagcatgtcaagatattggaaggggagcatggttgagtccagtgtcagaactctgctctgtttaaatgcagtggaggtggaggtcagtrctactgagaaaatccagggagtgagccacgtgcgagacatatgcaaccttcctgacactctgagtgccactgccaagggaagaaaggaacctgtgggttgagaagatagtgtgccctggaagttgtcacacagtgaggatgaagatgggggttgaat

SEQ ID NO: 666578 - DNA, 596 bp, Homo sapiens
tacttatgtatctgtctcccctaccagattataagtagcattgacaaacagcaggagttcaacacacatttcttgtatggataaccttgagcaaaccactgtgatttagtaataatgcctctcacctctacatattctattctcccagttaccatgttagcaccaggtacaggagcatgaaacataacgcagcctccaaattggtcacttcctatttcttctccaaactttccttggagacaggtctgtgtagcaaattctccttcaaaacagtttttaaagcatcattaaaaaaaaatgtcggaatcctcttatattgaagattttctcataactaagtgtatcatttgattcacrtatgatctcaacctcatcctagaacatagttatttgcattcacatcatttcctcttttagatagcaagataggtaagtaccttgtcttgttcaactttgtattccctaaagtacttatacagtatttttcagagaagatactaaacaaatatttgaatgatcaagggaatattgataatgggatttagttttattatttatgaagccttccccaagatttgaggattaacataatcaat

SEQ ID NO: 666579 - DNA, 583 bp, Homo sapiens
taccttgtcttgttcaactttgtattccctaaagtacttatacagtatttttcagagaagatactaaacaaatatttgaatgatcaagggaatattgataatgggatttagttttattatttatgaagccttccccaagatttgaggattaacataatcaatgcaattttatatttgtagaayatgagaatatgcattatgtcacttacttttttacaaccatagtaaatagaacaggaagtattcttaatttaaatggatgaaactaggtttcatgtacattgtgataattgacgcagatgaactgatgaactggaatgagaacgtagctcatttgacataaaatcccatgggctttgtcttatacttccttttgaagaaaagactattatttaagctgcatcagttattgttcaactacttatagtattgtaatgatatgaatgattacataaaaaatttaaaagagacatgtaagatgcattctgcttcctgctatagatatgagaactgtgatataaacatcactaaaattcaccaatatccatttcccttctatttctgggtatatgggttttgcact

SEQ ID NO: 666580 - DNA, 559 bp, Homo sapiens
tctgttttttccagtaattccctgcatctctaaatgatcttccatattcaattcaaaagggattaaataatgtatggatgactaacacaaactcacaattactcttaagttcttagagtcctgcatcagttttataatggttacaaacaataaactctacctatcagtttgtagatattactgaagtacaaacttgttagaactcttatccaattcaccttagtctccatggcagagaytggagtctagaatctgacatatagtaggatttcgatacatatataaatataattttaaaagacttggggtacaacttactagaactatgtctaggtcatttgaacatataaaattcttacttaacatgacagaaaacaaacaactgataattagaaatatgctgatagactggattaagaaaatgtggcacatatacaccatagaatactatgcagccataaaaaaggatgagttcatgtcctccatagggacatggatgaagatggaaaccatcattctcagcaaactatcgcaaggacaaaaaaccaaacactgcatg

SEQ ID NO: 666581 - DNA, 688 bp, Homo sapiens
aatgctttcaaacctggaattttgaattgagatggagcctttattccttagggaaagatacacttgaaacattgtgaaattacaactgctaaaacgaaagtgcctaaatatattaatataattatttaaaggtcattgatctaaacataatttcatttttattctttaagaacttagttattcagaatccttgatgtagaatatataaaaacataagctctgattctttattagagttttctatgtctgttgagctaattaaaatctgtacaacacatattaatgtttactagtaaataattttgtttgactttaatggtgttttgatttagaattmttaaagaacaaggctacaactagacctataacttaacactgatgaagatatatacattttaggaatacaaaccttgaacctgaactacctgttacaggaaaaactatataatttagtaatgctttggtcacaagagaacgcctgatagctttaatagaagatttgaaaagttctcttacaatataaaggaaaggtctttcattaactgcctctatttttctcccccttcctttacttttcatctcagattggattttatattaaagtaacaacctcttattttaaaaatttaggaggaagaagctagaagcaagattataaaataatctgtctgaaataaggcccaacaaa

SEQ ID NO: 666582 - DNA, 688 bp, Homo sapiens
aatgctttcaaacctggaattttgaattgagatggagcctttattccttagggaaagatacacttgaaacattgtgaaattacaactgctaaaacgaaagtgcctaaatatattaatataattatttaaaggtcattgatctaaacataatttcatttttattctttaagaacttagttattcagaatccttgatgtagaatatataaaaacataagctctgattctttattagagttttctatgtctgttgagctaattaaaatctgtacaacacatattaatgtttactagtaaataattttgtttgactttaatggtgttttgatttagaattcttaaagaacaaggctacaactagacctataacttaacactgatgaagatatatacattttaggaatacaaaccttgaacctgaactacctgttacaggaaaaactatataatttagtaatgctttggtcacaagagaaygcctgatagctttaatagaagatttgaaaagttctcttacaatataaaggaaaggtctttcattaactgcctctatttttctcccccttcctttacttttcatctcagattggattttatattaaagtaacaacctcttattttaaaaatttaggaggaagaagctagaagcaagattataaaataatctgtctgaaataaggcccaacaaa

SEQ ID NO: 666583 - DNA, 562 bp, Homo sapiens
ttcacagagctactaatggtaaagctgggattcaaacacagacaatttaactccagagcccaaattccaacatttaattgcttcccacttttcctcaagcatgggcaagtgcttcattgggaagagtttttaatccaaattcctgttcaaattcttggtttctactttaccacttctatgccctcaggcaagttcttagtttccattattctcagtttcttcaactgtaaaatgtggaaagtgtgrcatctgaagactgatggtatcatatatatgacatgtaacacagtgcctaacaggcggtaaaatgatagccactcttgtttttatttccataatgtggcctatatcatgtcaatccctggcccagtaaaccattaggcttcttattacactggaacagtgcctggcatgtaataagcaccatgtgagtgctaattattagaattattggctgggcactgggccacctagaacaaagacaatttcccagcttcacttgcagtgagactgatcaatttctgtgcagtgggttacaaaaacagacattatctcgtggcat

SEQ ID NO: 666584 - DNA, 608 bp, Homo sapiens
acctcattaacacatctaagaaactggagcacattttaatcatgtgtgtttttaatagcctagttatttaaaaattggtaaactacttctgtttttaacagagggattcagatgaactagaatattccctttccatttttaaaatcattcatttcctactatgtcccaggcactatgctaagcactaggcatataggaattaaaaagctgggtatggtggctcacatctgtaatcccagcattttgggaggctgaggtggacagatcccttgagttcaggagttcgagaccagcctgggcaacatgatgaaaccccatctttaccaaaaatacaaaaaattagcatgttgtgttggcatgtgcctatggtcacagctactcaggagtctgaggtgggtggatcrcttgagcctgtgaggcggaggttgcagtgacccaagatcacaccactacattccagcctgggtgacagagcaagaccctgtctcaaataaattaataaataaataaaaatttttaaaaagaaatttaaaagagaaaagagccatgccttcgtacaactaattatcaaaggaagtagattgattttcatatttaatgatataatt

SEQ ID NO: 666585 - DNA, 564 bp, Homo sapiens
cttctgaatcataaattcctcaaaattaaatctaatgcaaaatcacatttcctataagaaaaaatcaaatttgcagtttcatcagaactgaaatacatggactcgagttcaatgtggaaggaatcccctgcttgggctgtgtttctactaatgatattatagtgccctctctccttacttctgagacactattttatttttatttttattttttttaataaaggaaggagttcaaagaatgtcttaagagaataatgcccagatttrtgggcaatattatgtcttgggaaacacattttgttgtaaacatttttttttaattcttcttagaggtaggctgtgtattgtgggaaatggagggcctcctctcatctgtgcaccatatgaactgatagttgaacagctgtggtatatacacacatttatgcacatattaaaagtgatcgctacatctgaacctacattctctaaggaaaaccacattgagaatcatcacattgtagcagcttaccgaagcttatctatcttaggtgaggacaaaacccttcactggggagtttattt

SEQ ID NO: 666586 - DNA, 429 bp, Homo sapiens
ttaagggttaggcaatctaagttgttggaaaaacagcactaacaagataagcaaagtccttcctgtcttcaacttatattcagataggagaagttytgtgaggaaagtaaaacagggtaatctactaagggtgccttggtgagcttagcaaaaattcttcttccaacaaatcaactcaacaatggagcactaacacaagtctcatgagtttaagtactgattacaaaactaaatttgataaaacatctttgctcaatgcacactccagcccatcgatttcagggttaattaatgcctaatgggctcttgaataagttcagtttgaaaccttggtgtaccatttactattcattagctattcatgacacctctgaaatggagataacatatatatatatatctcaataaataactatgtataatcacata

SEQ ID NO: 666587 - DNA, 429 bp, Homo sapiens
ttaagggttaggcaatctaagttgttggaaaaacagcactaacaagataagcaaagtccttcctgtcttcaacttatattcagataggagaagttctgtgaggaaagtaaaacagggtaatctactaagggtgccttggtgagcttagcaaaaattyttcttccaacaaatcaactcaacaatggagcactaacacaagtctcatgagtttaagtactgattacaaaactaaatttgataaaacatctttgctcaatgcacactccagcccatcgatttcagggttaattaatgcctaatgggctcttgaataagttcagtttgaaaccttggtgtaccatttactattcattagctattcatgacacctctgaaatggagataacatatatatatatatctcaataaataactatgtataatcacata

SEQ ID NO: 666588 - DNA, 429 bp, Homo sapiens
ttaagggttaggcaatctaagttgttggaaaaacagcactaacaagataagcaaagtccttcctgtcttcaacttatattcagataggagaagttctgtgaggaaagtaaaacagggtaatctactaagggtgccttggtgagcttagcaaaaattcttyttccaacaaatcaactcaacaatggagcactaacacaagtctcatgagtttaagtactgattacaaaactaaatttgataaaacatctttgctcaatgcacactccagcccatcgatttcagggttaattaatgcctaatgggctcttgaataagttcagtttgaaaccttggtgtaccatttactattcattagctattcatgacacctctgaaatggagataacatatatatatatatctcaataaataactatgtataatcacata

SEQ ID NO: 666589 - DNA, 329 bp, Homo sapiens
tctgtttctcccattagaagtgagtttcatgaaggcaaggactatgtctgtcttgagtattgtgtaacaaygtttcacaataattatatattgaatggatacataaagaaaaaaatgaatacaataaggacaggtgttacattttggggtatctatcaaatacagcattttagtaagctaaacaacttcagacaacaaagacttcacaaggagaaccaatcagagagtcaatcagttaacaagcctgcagtgacccgccggtcatttgggaagcaaacttcgttaggtgtcctactaagtacaggagatgggccaatatacaaaccatg

SEQ ID NO: 666590 - DNA, 551 bp, Homo sapiens
gggctgagaatgctcagttctgaatgtaaaaagcaatgattgaccttgtaatccatgacttagccaagacattagccctaagaagtttgaccagtggctgtaggagcttccttcatatttactggtacaatattgtgcatatttgagagagttgttaggctgctgtggtggtttatgagtgcttataaaatcctttacatctatttaatattgtgatataacgttagtcagttgaaaagataccaattagttcattcatgaggaaaaattgtaagggctttcagtgagaaaagacctcaaaggcatacttttctcattctttataaagcaactgtgacattttataatgtttgaccaaccattgtatagtgaatgctgttgaatttttgtaatgtacttmaaatcttatctcccattttctttaatacttttacaatagttatggtctgatgctactcatcatctggaaataagatgaatttaatagaaagaatgtttctcatttattcttcaaaaccatttttatgttaaccaacattaaaaaagctgtg

SEQ ID NO: 666591 - DNA, 632 bp, Homo sapiens
aaggaagggttgggaaaatatcatcagctaaacctgatagtcatctttgcttctacccaactagatctactttctcaatttcattttaaaccaatggatttcaaaccaaaacttaccaaggaatgttatgattttctacttatgatttgtccaacaccgtctgtaatagttttttgatgtgttcaaattcattttcaaccactgcagaaggtaagaagtttttctctctttatcctcacattggaacataaaacacaaccatcaccttctggaacttgcacgtagaaagcctggacaatgaagaagaggcccttttcactgtacctgatagcaagataagagatagagggtctctccagtgaaataatactcaggtgtcctgcaagagacaagccatcctagctaaaccaaaatctgttttgcctctagagaattggcactgagattagtcagaattgttttaattgtctccctgcaaatgtcctyaaccctccttggatttgaacactctctagtttaaggaagaatgactggaactgcatgacagacatccccagccaaaggagaaagagaaagggtaggactatgagaggaagaagggagtggtgtgtgaaagtggacctagaacacca

SEQ ID NO: 666592 - DNA, 601 bp, Homo sapiens
ttgaacaaccccaaattaataatattgattcaaaggacatatgcagaaaactcacacaactattgcaaaatacacattctttgtcagcataaatatttataaaaatttatttcattttattttttgagatggagtctcattctctcacccaggctggagtgcagtggcacaaccttggctcactgcaacctctgcctcccgggttcaagtgattctcctgcctcagcctcctgagtggctgggattacaggcacatgccaccacaccaggctaatttttgtatctttagtagagataggattttgtcatgttggccgtgctggtctcaaactcctgacctcaggtgatccaccygcctcggcttcccaaagtgctgggattacaggcatgagccaccatgcccggcaaaaatttatgatgtacaagtccatatagcagctcataacaaatttccaacatctttacgtacagacatatttatcaatccaaaatgcagctttgaaaatctaaaacagtaacataaacttaaaaaaattaacatttatgtgctaaagaagatatagtactgaaaattagacaatatttagaactggtcattatt

SEQ ID NO: 666593 - DNA, 634 bp, Homo sapiens
cacaaccataaccttgaaacatttaagtattaagggagtcatcagaatttttacagtgcccctcaatttaaatgcaccccatatgtagtggttgcattgtgccagatccaagctagtggcctacttccacacatttccttactctgccatttttggcatgctttccactgccccatgctaatttccctgcaatctttctattgctccaacctcattctttcctcattatatagacccacaatatatttagtcctgtatcaaatttccacgctgtcaaaagtgcaaactcatgaygattttcagcattactatttcagtagaaaatatttgtttggcttaaaatattttaaggtgttttattgctttccaacataattttattggttccaggaaacattttatcaaaatattcatttcaaactgtcgtaatccttttgcattgttgcactgagcttctgcttagtgtcttatgaggcaaaaatcatggtgagcagctgcattctcatctggagctcagggtcctcttccaagtttattgttggcagagttaagttattggggttgtagaactgatgtcccattgtctgctggatgtcagatgggggtcatactcagcacctggctactctcaggg

SEQ ID NO: 666594 - DNA, 643 bp, Homo sapiens
ttagtcccatttaaacaggtagacatcactcagttcctgagccacttctagataatccaagactatatttggatccaggggatctgaagttaaccttactgatctcagtgtggtggcttatcagtctgggttgaagaccttggtattcacatgcccaccaaacctaaaggtctctaatttctatcagttatgccagttgaaaaacatgggtttcagacaagattgtctgatttccactattttttttttccctgaagctgagaccctggaccgtatcacagattatttgtctagggccttggtagcacacctaagtcatgccagctacttcttccaaaagcttggatcatgccttcatgcacccatacacactgactgagatgctgcttcttataggatggacacttacaacctcttagaaatgtcatgaccagcwtccaacctgagacttatatacagagctccaccatcagactggaccctttgcatgatgataatgctgctgatgatgatgattgtgaaaataaaacaatcataacagttgtagtagttagcattaaccttgaatactgatactattattagcaagactactactaacagtagctagcatatatttagtattactataagccatttcatc

SEQ ID NO: 666595 - DNA, 535 bp, Homo sapiens
aacagattaattaggtattataccagtaaagtccatttgtcaaaaaatttggaatacctttttatgtaaaagaataagcatgtagattagctttaagtccaacaacatttcaacatttttcaaaaaaaaatctttaaaaaatatttcaaagatcctactatatctgagatgccttgttattataaagaggmtatttcttaagaatttatgcactatatgcatttctaagtgtatgcacttttttttggcctaaattgcttgcctatgaaggattcaggaaattatattctctcctcaacatttccctgaaaaccatctgaaaaattccagtaaagtgcaaccgcttcatcagtaactacacttcacagttatttccacaaacattatttttattaaaaaaataattttctgctgagaatatattatctctgctacagccctcctttggtggtttaaaaaaaacaagtagttctttgtgtatgttattgttgaaacagaatagagaaaataccagcagctgggacatgttagaaac

SEQ ID NO: 666596 - DNA, 559 bp, Homo sapiens
gctctaactacaaaaaaagatacatatatcagatgatgcatatgctaattagcttcatttagtcattccatatgtatgcacatatcaaaacatgatgttgtacaccatgaatgtatatactttttatttgtcaattagaaacattatgtgaaaaaaatagacactttctttttgtgtaccckttttcttttccttcagattaatcatctggctgtgtctctatattgtcaaaactcctagttaattctctctaccaataaatttaatttttgatcatttccatgcctatactcagaactatattcagagtaaatagaacagcttttgaaaatgactttttctatgcagagaaagggttgaatctctcccacttaaagctgtgtgatctcatgcaaataaccttaacctatctggacctcagttttctaataggaataatttctacctcataaagctattacgacagtagatgaaaagaaaaaaagtattaatttgtttgatatttccagcaccatgttcatgataggtaaaataaatgatgactttcataattaaagtt

SEQ ID NO: 666597 - DNA, 574 bp, Homo sapiens
aaaaatgttaaataatgaataaaataatataattaaacatttatgaaacagaacagtctctcagggtgatttctctatgaccctcagttttacttacattcctctgcaggcacacttaagtaaaaccctaggaaacacaagagattatttttccaagtgttggcatctrcattactttaaaatgatatttcttatttttagaaagagaatcactttttttttccaaaggagtataacagtttcttggcctttacctctgaactctcaccttcccaaaaggcatctccagcaatgtacaaactcctccataagaaatgatttaatttggcaaatgacaaaaataccaattaactttatgttaattgactcaactgtgtgatgtctggaaaatttgatgactcacaagaaagtctgacaaaaatgttttcacatcagagggaaattgcaaaacttctggccgtgcaccaaataggccaactttggcaacatcctgtaataaacactaggagaaaattgttaggtatgcaacaatttattcaggacatttttttaaaggtttccattggataaaatg

SEQ ID NO: 666598 - DNA, 614 bp, Homo sapiens
tcaaatcagtcaaaagagttgggccaattttgtctgtaaacattacttgagattgactcaattctaaaattatgtaattttgtcttttgtttctgaagcctgatacattggactgggaccaaccaactataagaaaaacaatacaacattaattttatttggatccatcttatatttctatgtattcagacaagttagccactcccccatgatgaattatttataatgagttaccatatcttaagaaatttatatatattaaaatacacaaaacaaataaaaccacacttctaaaaagaagcaaactctctggacttctaaagaacaggygacctaaaatggtatgctcactgttctctgaaagtcaaccagaggatgccaaattacagtacccactccagacttcctacaatattaagcatttagaaatgttaatatttctaaaacagtaacccaatcaagatgagaataatgattgatcttcatggaatgtggagaagaaacagaaggaatcccaaaggtggcaatttacaataacacaaagatgtgcagtttgaaactgtcatcttgcatagtacctagaaatgaataggaagaaaataagaactgcaaaa

SEQ ID NO: 666599 - DNA, 543 bp, Homo sapiens
ttatagtacaggaggggaaagagatttcaagaaatctcttgtaggggacacagagtagtgaggcctgagctatcatcaccctataaaatacrcacacacacacacacacacacacacacacactcgggagagacatggttaaactgtagaaacaaacaatctcaagtttaagtcactttattcaacaagaatttcttgctcatgctctatgtctaagataagtaagtgtaagtgatgggcaaggaaagatggaggtagtggattcagctccacatagtcactcagggatccaagctaaggagacttctccagctcattgctttactttcagaagttcatggactttttggttatgaggatggggaaagagacagattgaataattacatagagtctttatttgacttaaccaggaaatgaaatgtgtggcttctactgacatttcactggccagaaatagttatatggccaagtcagctatgaaagggctgagaaatgcagtctcccacatgcctgctagaataggagtagttatcaacgaaa

SEQ ID NO: 666600 - DNA, 610 bp, Homo sapiens
atgcaaagagactggtggcattttgcctctgccagagatctgtggagctttgaacttgagagagatgatttatggtatttggcagaagaaatttctaagtgacaaagaggaagcatagcataaaagtttgggaaatttgtagcctgaccacgcaaaattctatggatctaccctagaattgtagatccattgacagcttacaccatatgtctgaaaaagccacagacactcagcaccagctgtgaaagcagccagcagtggggctgtaccctgcaaagccacaggggtggatctgcccaaggccataggagcccmcctattgtgtcagcatgacctgggtgtgagacatggagtcaaaggagatcattttggagctttaatgtttagtgactgccctattagattttgcattttacatttccaccaacaatatatgaggagactcataggcccaacaccatgtgtaagccaccaaggtttggagcttgcaccctctgaagtaacagcctgcggcccttttgttttggccaatttctcccatttggaatgggtgtatttacccaatgcctgtaccaacattgtaactaggaagtaactaacttgttttgat

SEQ ID NO: 666601 - DNA, 610 bp, Homo sapiens
atgcaaagagactggtggcattttgcctctgccagagatctgtggagctttgaacttgagagagatgatttatggtatttggcagaagaaatttctaagtgacaaagaggaagcatagcataaaagtttgggaaatttgtagcctgaccacgcaaaattctatggatctaccctagaattgtagatccattgacagcttacaccatatgtctgaaaaagccacagacactcagcaccagctgtgaaagcagccagcagtggggctgtaccctgcaaagccacaggggtggatctgcccaaggccataggagcccacctrttgtgtcagcatgacctgggtgtgagacatggagtcaaaggagatcattttggagctttaatgtttagtgactgccctattagattttgcattttacatttccaccaacaatatatgaggagactcataggcccaacaccatgtgtaagccaccaaggtttggagcttgcaccctctgaagtaacagcctgcggcccttttgttttggccaatttctcccatttggaatgggtgtatttacccaatgcctgtaccaacattgtaactaggaagtaactaacttgttttgat

SEQ ID NO: 666602 - DNA, 293 bp, Homo sapiens
gtgatcaaataatttctcacaaggatgtcaataccattccacaaggaatgarcattttcttcaacaagaaatgggaaaattagtgctgggaaaactggatatccacatgtaaaagaatgaaattggactcttactttgaccatatacaaaaattatctcaaaactgaataaaatataagaaaacataggagcaaatcttcatgacctttgatttggcaatgatttcttaaataagacactaatagcacaggtaacaaaataaaaattagataaattagaccatcaaaatcaag

SEQ ID NO: 666603 - DNA, 546 bp, Homo sapiens
cctagttctcagtcgttgggactgcgggacttgcatcattgagagttacaccatcagcttcccagttctcagggcttcagactcagactgagttacaccactagctttctaagtcctccagcttgcagacagcagatggtgggatgccttggcttcaataattatgtgaaccacttctcataataaatctcctctcatatgtcatatatataacataatccatgtctgtttctctggagaatgctaactaatacatggaatcaggtagagaatcaacataaaatggttacgagcacagattgtagctggagtacttagctagatttggatctcgactctgtcattcattacctgtttcatcttggataagtaactctrtctcactttcctctttttaaaatgcggctaacaatagtacctgcctcttacattgttttaaaatttaagtgaattaatacatatgaacacatagaacagtgtctggttcatggtgaatgttatgtttgttaaataaagtacatttcccaacacagtggccaggtgatt

SEQ ID NO: 666604 - DNA, 496 bp, Homo sapiens
actttttgaaatacacattgctgagccccacctgcagaattcctgattcagcaggtctgagtggggtcaagaatrtacactttcagtaagttcccaggtgatgctaatgctgctggtcaggggatcacactttgcaaactattgttggtaactggaagccagaagcaggttttattcctaaaaagaaaatttaaagtataatagtatttgatatggtttgtctgtgtcaccacccaaatctcatctccaactctaatccccacgtgttgagtgaaagccctggtaggaggcgattggatcatggggcggtttcccccatgctgctctcgtaatagtaagttcttgcaagaactgatcattttataagtgccagtttcccctgctctctctctctcttttctgcagccttgtgaagaaggtacttgcttctcctttgtcttccaccatgattgtaagtttcccgaggcctcccagccatgtggaactgtgagtcaat

SEQ ID NO: 666605 - DNA, 578 bp, Homo sapiens
gcaaaattacaaattattctggtgaaaatacataaatgaatgttagtataaacgtgattcttgcatgaacttatatttaaaatgcctaatacatacatgtatttatatgcaccagcatggaacaaagagatgactatcaaagactgaaactaacttaagaataaccaaaccccaaaagactraactgcagaattataaaaatttgagtgttaggttcctgactgtcaaataaatttgagcttcctaaaatgcaaagtttaagattacattcctattttctcgggcaaagtttcatttcttagaaaaagagcaaagagtatcagaaaatgtcttttataagtttggaaaaaggtgaatcagaaccgatagtcctctcgtgcaaggctacaaccaaagcttaataattgacagtggatgagaaataaccaattaattttgtattgtactcagtaataatatttaaaaacttattgagctctttctaatggatacgtttatattattctaaatgatttatatttaataacatatatgaagcttccaaaaactcttggaaatacagactacaataatacttt

SEQ ID NO: 666606 - DNA, 623 bp, Homo sapiens
aaggttctataagagcttgcactagccttcaaagagcatttaatttagtagtgttacaagaaacacacagaaatctgatgagaaactggttggtttaagacataacatagaaagagatgttatgtgagagcacaaacattggaaaaccaattctccatgctgaagtggtcaagaaaatttatggtaattaaacatgcacagttgcttgttttgcctaattgtagaaacattcccactggctgaactctacttttaaaatgactctcaagtctttcattattgatttattggggaacacaaacaatcctgacaaatcctcttctcccatttctcacctamtgtgttaccccctcgaccatcataaccctcacaaagagtggttgatgtcacaagaaacagtttagcatagtgtccataattgtctttcttttatcccctataaaatatttcagcttctccagtaactcagagctgagcatatccagataaaagataaggttagattactaaaaagaaactagagtgaagaattatgattgggtgaccccatttgaactaaggaaatatattgcaaacacactcaactaggccagaaaagacatgttcttcccagaggcttgcca

SEQ ID NO: 666607 - DNA, 558 bp, Homo sapiens
agactacaataatacttttggcaagaactgagatacagaaaagttagataatttgccataggtcacagaattttgtcagaagtagaatttaaatgcaggtactcaacctccagaggcctttgttctatctactctttctactgcctccattaraagggatgacattcaaagagaatgacagagctctattgtaccgtttgcagcatctttttgcaagcatttcctcatttaaacatggttaaaagcaaaatgaagtatgagggagaagagaggaggtaaaagaatacctagaagttttaagtgaatttgatattcctagccaggataaacaacttttcatctttagaacaaaaagaagagaaaggaaaagaaagaaagaagaaaggaaagaaaggaaagaaagaaagagagagagagagagagagaaagaaagaacagtcaaaaacaaacaaacaaacaaacaaacaaaaaagaaacaaaaacaagtccttggcctgaagaggatatattaagagatgacagaaggaatggacttctagcaaggttctttgcctcctg

SEQ ID NO: 666608 - DNA, 558 bp, Homo sapiens
agactacaataatacttttggcaagaactgagatacagaaaagttagataatttgccataggtcacagaattttgtcagaagtagaatttaaatgcaggtactcaacctccagaggcctttgttctatctactctttctactgcctccattaaaagggatgacattcaaagagaatgacrgagctctattgtaccgtttgcagcatctttttgcaagcatttcctcatttaaacatggttaaaagcaaaatgaagtatgagggagaagagaggaggtaaaagaatacctagaagttttaagtgaatttgatattcctagccaggataaacaacttttcatctttagaacaaaaagaagagaaaggaaaagaaagaaagaagaaaggaaagaaaggaaagaaagaaagagagagagagagagagagaaagaaagaacagtcaaaaacaaacaaacaaacaaacaaacaaaaaagaaacaaaaacaagtccttggcctgaagaggatatattaagagatgacagaaggaatggacttctagcaaggttctttgcctcctg

SEQ ID NO: 666609 - DNA, 558 bp, Homo sapiens
agactacaataatacttttggcaagaactgagatacagaaaagttagataatttgccataggtcacagaattttgtcagaagtagaatttaaatgcaggtactcaacctccagaggcctttgttctatctactctttctactgcctccattaaaagggatgacattcaaagagaatgacagagctctattgtaccgtttgcagcatctttttgcaagcatttcctcatttaaacatggttaaaagcaaaatgaagtatgagggagaagagaggaggtaaaagaatacctagaagttttaagtgaatttgatattcctagccaggataaacaacttttcatctttagaacaaaaagaagagaaaggaaaagaaagaaagaagaaaggaaagaaaggaaagaaagaaagagagagagagagagagagaaagaaagaacagtcaaaaacaaacaaacaaacaaacaaacaaaaaaraaacaaaaacaagtccttggcctgaagaggatatattaagagatgacagaaggaatggacttctagcaaggttctttgcctcctg

SEQ ID NO: 666610 - DNA, 592 bp, Homo sapiens
aaggctcttcattacttatgaaaattcatatgctcctggtagatgtgacaccttgaacttataataagtatatcttacccagaatcataaaaactaatttggaaagaatttcagaggtcacaagttcaagctggcaagtatttttattgtgattttttttagataagaaaactgaagcccagagatgtctttctccagcattaggcttttctgtaatcattcattttggtatgtatgtgggaagggaattkaattaatgacatctttcttacataaccttttttttttttttaaaggctttggattgtacttgtgtgatcatgtcttttttctttctttctttctttttttttttttttttttttttttgaaacagggtctcactctgtcacccaggctggagtgctgtggtatgatcacagctcactgcagccttgaactctcaggtgaggactacaggcacaccaccatgcctggctaatttttgtatttttagtagagacagggttttgccatattgcccaggctggtcttcaactcctaagctcaagccacctgccggcctcagcttcccaaagtgctgggattacag

SEQ ID NO: 666611 - DNA, 606 bp, Homo sapiens
attatagggagtttatgaaatagtctacttctatagagaaggaagtgttgtatattggtgcagcttttgtaataagggctgtatgtatttaatacttttaattagtttatttacataaaacagcttcatcaatacaaaattcacataccatatagttcatccatttaaagtgcacaatccagtagtttttagtatattcagagttgtgcgagcattaccaccataaattttagactattagtattaccctgaaagaaatcccatacccactagcagtcactttccattttgccccagtcttcccattcttaggcgatcattaatcactttctgtcycaatagatttgcctattactgacaattcatataaatggaattacatatatgtatatgtgtatgtgtgtgtatgtatgtgtgtgtgtatttatatatgcacagaccacattttgtttatccattcctcagttgatagacatttgggttgtttccactttggggctatcatgaataatgctgctatggatatttatgtataagtttttgtaaggacatatgttttcatttctcttaggtgtattcctaggagtggagttgatgagcaatatg

SEQ ID NO: 666612 - DNA, 609 bp, Homo sapiens
atatttaattcctttaataatattttcactattttttaaagttatttctcagtggttgctttagtgtttaccatatatatcttatagaaatctccttcagatatatactatgaataacactactcaaattagatatagagttgtgactcctatatagctcttttctcctccttcatttttttatgctattgttgccatacgtatgatatatacatatgttagaaagccaataatacatttttgtatttattattttgtattatgtgttctaaagaggctgacagaaggaaaaagatctagtttatatttatgtagtttgttatattaattttaattttctyatttactctttcgtgatctcttcatttctttctgtggattcaagttaccatgtggtggtatttctttaataaaagtgggccccccttccaaattctttgtgctattattgtcaaataggttatatttccatatataggccaataacactgtgactttagatccgttaaaagaagaaggagaaatatgtagtttttacaatcttttataactacctatataattgttttcactgaagctcttcaatttttacacgcgttgaattactgt

SEQ ID NO: 666613 - DNA, 647 bp, Homo sapiens
aaaaatgagaagggagaactcccccttggcagcacatatcagaaactgatcagagtaaaggcagtccatatgcaaagtatgtaactctacctccatccagcctccactctaccataacatgcactcttactgatagaaaagcatcttgttgtgaaggtatgttggggcaaataaaaaatgatggaatgctgaaaatcattgaaataggaacttcgtcataaaagaaccaacttaaggagcctagttcatgactgcaatgtcaggaatggatttgaatttaggtcaatcatgaygctgagctgtgagcaccaggcagctgggtgttacaggagtatcatgcaccttagagtgagagtggccagggttcaattcccaagccattgcataccataaggcatgtttttacatccactgactctcatttttctactactttagatcctcatgaccatattatttttttaatgtacacagcacgtttgctatactttagctcttcagtgacttattccttccactacctccttcaaaatctgtcccttcccatccagctggaaaatggagggaaatgtctttacaatctaattttctagggctggggctcagacagaggatgccagagaaggcacaatagaaagtgaagaaga

SEQ ID NO: 666614 - DNA, 546 bp, Homo sapiens
gatttgcacagttccaaagcaggaaacccagtgccatccaatagccatatcatataagccatatatgtaattttaaatgttctggaagccacattaaaaaataagtaactttaattatgttttatttagttcagtatatccaaaatagtatcatttcaacatgtagtcagtatagaaatgattgagatattttgcatttttttcatattaaatctgggaaattcagggtgtgtttttcatttacagcatatgtcaatacaaactagtgactcctgttttgcattttaacataggtagatataaccatttctctggtttgtggtgggcttcccaatctctttctttatttagatgactctggatttgaatataattggttgacaatctagtccttgtgtccctaccttgatctcctacatttacctctatgctgatacccatggacacaamgagatccacacatattacaatgtacgtgtgaacagtccctaaagatctgcactggtcattagaagctgaatttctaaagtgggtgtttgtcctgtt

SEQ ID NO: 666615 - DNA, 595 bp, Homo sapiens
gtgggagaagttcggggcagataatccaaaaggccttacatctattaaaagatatcaatttagtcctaaaacaggacagatccactaaaggattgcctaygtttcattttatgttttttaaaaaggcccttaaaatgtactgtaaattggattccacatagaaagaatcctgggaagaattttcaacaagtttcaaaacaaacaacaaaaagcaaaggacaagatttcaaatgtgaccccagtttaaggatgcaattaatttgaaatgttctcataaagtacaattccaggaacagtaaattggtgaccaagttaaacttttgtttctttaaaagtccaatatcaaatagagcaggtggccctattttcagaataattccatgatgcactttgacgtaacagaaagaaaaggtatccatagatacagaatgttgttggtggtgatttttaatttttggtaaagataacaagatatgaaacaattttcctgttaattaaaacttactctatttctgagcatgatattttaaagaaattttatatatataatgaatatttggatatatatgtggttaatggttattttaacaaacat

SEQ ID NO: 666616 - DNA, 554 bp, Homo sapiens
gatagaagcaaatttgatatagtttctttcttcatgtttatttattcatttatttcttcatgtttccagtcttgcctctttgagatcaccatgagaacataaccagcctagacttctaaaggaatgtgatagacaagtatgtgagaarcatatggaagggagaccagttgtctcaactgaagcaatcctgagttgggcatgtgagaaccatgtgaccagtccacagctagccatgtgagagaacccagccaagactagcaaaactgcctctccaccctgcagctaaccacaggcttacaatgggcccagaaaaccggcagccaacctatagacatgtgaagaattataaatgcttatttttttaaactattaagttctagggcagtttgatgcattctactattttggcaataagataactgatacacttgtcaattagcaaacaatttttaatcttccaattttaacttccaattatgcagctcagaattatgtcaagaggtctagagaagagcagcattctttactagtgttctatagaatgtgtgtgggtt

SEQ ID NO: 666617 - DNA, 554 bp, Homo sapiens
gatagaagcaaatttgatatagtttctttcttcatgtttatttattcatttatttcttcatgtttccagtcttgcctctttgagatcaccatgagaacataaccagcctagacttctaaaggaatgtgatagacaagtatgtgagaagcatatggaagggagaccagttgtctcaactgaagcaatcctgagttgggcatgtgagaaccatgtgaccagtccacagctagccatgtgagagaacccagccaagactagcaaaactgcctctccaccctgcagctaaccacaggcttacaatgggcccagaaaaccggcagccaacctatagacatgtgaagaattataaatgcttatttttttaaactattaagttctagggcagtttgatgcattctactattttggcaataagataactgatacacttgtcaattagcaaacaatttttaatcttccaattttaacttccaattatgcagctcakaattatgtcaagaggtctagagaagagcagcattctttactagtgttctatagaatgtgtgtgggtt

SEQ ID NO: 666618 - DNA, 576 bp, Homo sapiens
atacatttttgttgtttaagycactctgttgtactttgttgtggcagctgcaaaaaactaatgcaaggtacaactcgatatctaacttataaggccaagttgaacatattaaaacattctcctacttgggtcatgttgacttttaaaagaaattgttgatttatggggaaaaaaaagttgaggtaaaaccttattagctagatttttttcaagggcagaaaaaagaaatctgtagatttaaatccccaaacaggaactaatcaatactttatttatttcatcaaaattcccaagagtataatcatcttctgctgaactcttaaaaaatcccacggagactataagtaataaagatttagaaaaaaatctcttcagagaagtatgactagaatgccaccactaactgagctttttaaaaagttaattgtactttttaaatcagaagatagaaaagtttattcagtaaaaaagtaaggctccttccgacccatgtacgctatagttgttatttaagattcaaaggtgtgaccttcctctcctcagccttaccccaccttcctagggtttacttactac

SEQ ID NO: 666619 - DNA, 576 bp, Homo sapiens
atacatttttgttgtttaagccactctgttgtactttgttgtggcagctgcaaaaaactaatgcaaggtacaactcgatatctaacttataaggccaagttgaacatattaaaacattctcctacttgggtcatgttgacttttaaaagaaattgttgatttatggggaaaaaaaagttgaggtaaaaccttattagctagatttttttcaagggcagaaaaaagaaatctgtagatttaaatccccaaacaggaactaatcaatactttatttatttcrtcaaaattcccaagagtataatcatcttctgctgaactcttaaaaaatcccacggagactataagtaataaagatttagaaaaaaatctcttcagagaagtatgactagaatgccaccactaactgagctttttaaaaagttaattgtactttttaaatcagaagatagaaaagtttattcagtaaaaaagtaaggctccttccgacccatgtacgctatagttgttatttaagattcaaaggtgtgaccttcctctcctcagccttaccccaccttcctagggtttacttactac

SEQ ID NO: 666620 - DNA, 576 bp, Homo sapiens
atacatttttgttgtttaagccactctgttgtactttgttgtggcagctgcaaaaaactaatgcaaggtacaactcgatatctaacttataaggccaagttgaacatattaaaacattctcctacttgggtcatgttgacttttaaaagaaattgttgatttatggggaaaaaaaagttgaggtaaaaccttattagctagatttttttcaagggcagaaaaaagaaatctgtagatttaaatccccaaacaggaactaatcaatactttatttatttcatcaaaattcccaagagtataatcatcttctgctgaactcttaaaaaatcccacggagactataagtaataaagatttagaaaaaaatctcttcagagaagtatgactagaatgccaccactaactgagctttttaaaaagttaattgtaytttttaaatcagaagatagaaaagtttattcagtaaaaaagtaaggctccttccgacccatgtacgctatagttgttatttaagattcaaaggtgtgaccttcctctcctcagccttaccccaccttcctagggtttacttactac

SEQ ID NO: 666621 - DNA, 578 bp, Homo sapiens
ttctcacatgttgtgggaaggacccaggaggaggtgattgaattatgggggccagtctttcccatgctattcttgtgatagtgaataagtctcatgagatctaatgggtttatctggggtttccgctttgctacttcctcattgtctcttgctgcygccatgtaagaagtgcctttcacctcccatgatgattctgaggcctccccagccatgtggaactgtaagtccaactaaacttctttttcttcccagtctcaagtatgtctttatcagcagcatgaaaatctttatcttgtgcatattgatggctccaactctaattcaacaccacaggattcattctagactgccccctttgcttattttagcttttatctggtagtgattttagcttttatctgatagtgataaatctggctcccatgatctaaaacatacacatacatcaaaacacataacatggtttcagaactgccagaaggtatcgctatgcacagttccttttgtttttagcttttcagtttccagtgaaaacaatgtcaatgttttctaaagttattcaggtcaattacttttcc

SEQ ID NO: 666622 - DNA, 578 bp, Homo sapiens
ttctcacatgttgtgggaaggacccaggaggaggtgattgaattatgggggccagtctttcccatgctattcttgtgatagtgaataagtctcatgagatctaatgggtttatctggggtttccgctttgctacttcctcattgtctcttgctgctgccatgtaagaagtgcctttcacctcccatgatgattctgaggcctccccagccatgtggaactgtaagtccaactaaacytctttttcttcccagtctcaagtatgtctttatcagcagcatgaaaatctttatcttgtgcatattgatggctccaactctaattcaacaccacaggattcattctagactgccccctttgcttattttagcttttatctggtagtgattttagcttttatctgatagtgataaatctggctcccatgatctaaaacatacacatacatcaaaacacataacatggtttcagaactgccagaaggtatcgctatgcacagttccttttgtttttagcttttcagtttccagtgaaaacaatgtcaatgttttctaaagttattcaggtcaattacttttcc

SEQ ID NO: 666623 - DNA, 565 bp, Homo sapiens
taggcgataataacagtttgcatctcttaacggtgttatgaggaactaactgaattaatatatggaaagtgtttagaacagtgcttggcacacagaaagcattatataagtgtaagctattattccatacactccccttctcctcctctccaagagacagactctagaaaggctgatgttttttgtccattaaggtgtcccagtagtgtccctaggctggcacaaagcagacattcaaataatatttgtggaataaataaatctataaaaccttagttttcttattatagatttttaaacatgaatgtatattacttattataacattaaaaataaaaatactaaacaatcctgctgaagtaaaaattataattaagtaaaaatcatgaaattgctactttcatccacaatggataatttttttttgagayagagtcctgccctgtcaccctggctggagtgcagtggtgcgatctcaactcactgcaacctctacctcccgggttcaagcaattcttctgcctcaccctcccaagtagctgggactacaggcacctgccaccac

SEQ ID NO: 666624 - DNA, 605 bp, Homo sapiens
gccctgtcaccctggctggagtgcagtggtgcgatctcaactcactgcaacctctacctcccgggttcaagcaattcttctgcctcaccctcccaagtagctgggactacaggcacctgccaccacttccagctaatttttgtatttttagtagggacagggtttcaacatgtgggtcaggctggtctcgaactcctgacctcaagtgatccacccacctcggcctcctaaagtgctagaattacaggcatgagccaccgcactcagcccatgatggataaatttaaaatccaagagcaaatgaaactaatccatatatacccccaaaaatttgtctttccagttaatatctgaaggcatacatcatcaaatatgaaatatcagttttattgaggttgaatttatacttctctttgggaggtaagctcagttctttaggtcagatctctactttaaaaactaactggraaaatgggtatgatcagcttctcacaagtcttccaagcatatggattattccatgaattactgaaaaaggattttaaagtgttaagtataaactaatttaggctctatagacacaggcctcataggcatggtaggga

SEQ ID NO: 666625 - DNA, 630 bp, Homo sapiens
tctctttgggaggtaagctcagttctttaggtcagatctctactttaaaaactaactgggaaaatgggtatgatcagcttctcacaagtcttccaagcatatggattattccatgaattactgaaaaaggattttaaagtgttaagtataaactaatttaggctctatagacacaggcctcataggcatggtagggatatagtattcatgtttattaattrataacttattgtcttatgagaaaacacagtcaaatacagacatgcctcatttaaccagcactgacagcacatgggcgtttcacagaatttaacttaccaaatagcctaaagttatctttccttataaagttaaaacattttcatgggcagtttttcaaaatgtatgcaattcttccttgcttttttgcatgtagcaggcattgcttgattaaactttatgttggatgacttaaccttttcataatgactcaatgtcatcattacaaaaattaattattactctgggttataatacagtattgttctcaggagtttttgaggtttggaaagatatttatctcactaaaagctctagagtgctatgattcttcttattagaaggatgagggtaaagaaggggtctaaactg

SEQ ID NO: 666626 - DNA, 547 bp, Homo sapiens
aaaatgtatgcaattcttccttgcttttttgcatgtagcaggcattgcttgattaaactttatgttggatgacttaaccttttcataatgactcaatgtcatcattacaaaaattaattattactctgggttataatacagtattgttctcaggagtttttgaggtttggaaagatatttatctcactaaaagctctagagtgctatgattcttcttattagaaggatgagggtaaagaaggggtctaaactgaatactcagttcccatggctctgattttagaggtcattatataattctcagacacctaagttttgaggctatccctggaagaaactaccctaaagtgggagagaacagaaagatctctttgagcacagaggacgtctactgaagctcaaataattttatactatcagctttccagcctagcttattggcytaagccatcaaagcaggaacatacgagcttcaaggtgcaagatagtaaaatggtagaatttcttaggtcctgtgctattgaagctcaacttaaagaactgaaag

SEQ ID NO: 666627 - DNA, 562 bp, Homo sapiens
ggaagactatctccttagctctttcttagctcctgtccccatgcttattttcccctgcttctccacacttccctttacaccagagaaacttgcagactcctgtttccaaaacatcctgcccttctcaatgactgttcccttccagggaggcttcccacatcaccatatccaccttcaaggtccagtgcccttcccattttccccttgacttaggggttggaggagggcaggagaagaaaaacaaagacaagagagatcagagaactccccattccattattgcttttccagaattgattggattcacataacaggcaatgttcatttgggctctccttaattattttggtttagttattcttcaaggcagtacaagaggyacattttctcccagaaatgcaatgctttttgtcatatggctaactcaggagggaggagataatttctatagaaaaacttgcttaagcaaatgcatgaaggatctcctctctaccctattcagagtcttctgtcttaaaaatcagaaaaattttaaacttaaaatgagccttctagttcaatt

SEQ ID NO: 666628 - DNA, 441 bp, Homo sapiens
gcttcccctgatttcgaaatatacctaagatagctcctcctgccattttttcagcatctgccaaatttagccaatgactagttctgtatccttatactcgatgaagctatgaagtcactttccttcctcacacagtgttgaaggcctaggataacactgtcaaggaccggcaactgcttatgtttgatgtagcacagcactgtcattaagaacatgggcttgagctgtcccgwgtcatgtgatctcaggaagtgcagtgacttctttgtgtgcatgtcattatctgtgaatgggtgatcataagcacgcctatttcactggattgtcagaacattaaatgagataatgaagtaaacattgtccttaatgataccatcatcatcacagactccaattggtcttaaagttaactaacatttttaaactcaaacatccttatga

SEQ ID NO: 666629 - DNA, 603 bp, Homo sapiens
agaaaagaaaataaaaggagcacaccaaagataagagcttcccctgatttcgaaatatacctaagatagctcctcctgccattttttcagcatctgccaaatttagccaatgactagttctgtatccttatactcgatgaagctatgaagtcactttccttcctcacacagtgttgaaggcctaggataacactgtcaaggaccggcaactgcttatgtttgatgtagcacagcactgtcattaagaacatgggcttgagctgtcccgagtcatgtgatctcaggaagtgcagtgacttctttgtgtgcatgtcattatctgtgaatgggtgatcataagcacgcctatttcactggattgtcagaacattaaatgagataatgaagtaaacattgtccttaatgataccatcatcatcacagactccaattggtcttaaagttaactaacatttttaaactcaaacatccttatgagatgcagttctatttttatttactttttataracaagcatcattttgtcagtcttctctgtaaagtagtggttagaaatgagccccctactctacatgtgatctaactactatagcacacagatga

SEQ ID NO: 666630 - DNA, 430 bp, Homo sapiens
ggcttcaatcctttccagagcccccagatatcatagcactgaaagtgtcagacttctaatcctagattgctttctttacgctaacatgggacaataatctttggaaaccagatttttaagttttctctctgcccaagttctgcctgtacgactccctcakaaaatactgctcatgatatattttcatttacatttaaggcaagaaaaccattcactcaccatgatagattagacacagacattgcagcaacttgttgaggagtcttctctcgattccagaacaggaaattagcaggtcaagtcgacaacaccgctaaaaattttagctttgcttctggaatgatgcacaaaccacttagttactcacagtttgagaggacctataaagaaaagaaataaatgaatatctctagtacctggtctatgtggt

SEQ ID NO: 666631 - DNA, 542 bp, Homo sapiens
tatagtttatggtaccatgctgaggcagaagcttttcctgacttatttggcgtacccctgcccctccatgcctgttatagctgcaaccccatctctgcccaaggagaatagatttaagcgacttttgggctgattaaaggttataggttacgagggatcccggggactaaacaccgtacgaggccctagttctatccagagcccaccatccaataaatacgacaggatgttgacataggtgggataatttggaaaagactttcagctctggtaggttttgtatgtatgttttttcccctcccttaaaaaaaaaaaatcaccrtctctgtagcgccaaggcacagatgatgactctggtcagagggcctgggatgcatagttccatccaagcctgccctctgctggtcagatggagccatatcataatctgtgaaaacgatttggggaaaaaaagatcatttgaatcttttctcttccaggccaggcggagtcattcactggttgttcattttttccctttactcagtgttgaaagagagagt

SEQ ID NO: 666632 - DNA, 588 bp, Homo sapiens
ttggtgatgtgtgcattcatctcacagagttaaaccctttttggattctgcagtttggatgcactgtttttgtgcattctgtgaatcaacatttcgaagttcactgagacctatggcaaaaaagtgaaaatcccaggataaaaactaagtggaagctatctgagtaaatgctttgtgatgtgtgccttcatctgacagagctaaacctctctcagaaatcagcagtttgtaaactatgcttttgtaacatctgcatgggggtattttgtagcacactccgaccaatggtgaaaaaggaattatcttcagataaaaactagaaagaatctttctgagaaactgctttgtgatatgtacattcatctgacagagttcaacctctctttgaattcagaagtttgaaaaccctgtttttatagcatctccaaaggaatatttgggagctcattgaggcgaaagtcgaaaaagcaaatattcctggataaaarctagaaggaatctatctgagaaactgctttgtgatgtgtgcattcatctcacagagttaaacctttcctttcatccagcagtttgggaacactctttttt

SEQ ID NO: 666633 - DNA, 534 bp, Homo sapiens
atagctggagacctcaacatcccactttcagcattggatagatcttccagacagaaaatcaacaaagaaacattgggcttaatcttcaccatagaccaaatgaacctaacagatatttacagaacatttcatccaatggctacagaatacatattcttctcctcagcacatggatcattgtcagagacagaccacatgttaggccacaaaacaaggcttaaaacattaaaaaaaaaaaaacaaacaaacttaaatagcccaggagtggtggctcaagcctgtaatcccagcacttkgggaggctgaggtgggcggatcacttgttcctgggcggtcaggagtttgagaccagcctggccaatatggtgaaactccatctatactaaaaatacaaaaattagctaagcatggtggcacatgcctgcagtcccagctatttgggaggctgaggcagaagaattgcttgagtccaggagatggaggctgcagtgggccaagatcgtgccactgcactccagcctggatgacagagct

SEQ ID NO: 666634 - DNA, 594 bp, Homo sapiens
ctcactctgtcacccaggctggagtgcagtggtgcaatgtctgctcagtgcaacctctgcctcccgggttctcaygcctcagtcatctgaatagctaaaattacaggtgtgtgccaccatgcctggctgatttttatatgtttagcagagatggtttttgccatgttggccaggctggtcttgaattcctgggctcagatgatacctatgcttcagcgtcccaaagtgctgagattataggcatgagccaccgtgcctgaccgagtatttcttgatgaccggaaaattcaaaatatactcttcagaaaaattgtaaagaaaaattctgttttttggcatgcagaaaaggggcaattctatgacagaatagttcactgcactgctttggaatttagaatattctattaaataagtgaaccttaaagaggcataccactttcaattcaacatccctaatgtgagaccttttttctcccaagcagctctattttcaaagtttagttggctctttagagcagcattatcttttaaaatactggatatgtacttaatagaggcagagtgcatcatttgagaggatgtctccagacattg

SEQ ID NO: 666635 - DNA, 594 bp, Homo sapiens
ctcactctgtcacccaggctggagtgcagtggtgcaatgtctgctcagtgcaacctctgcctcccgggttctcatgcctcagtcatctgaatagctraaattacaggtgtgtgccaccatgcctggctgatttttatatgtttagcagagatggtttttgccatgttggccaggctggtcttgaattcctgggctcagatgatacctatgcttcagcgtcccaaagtgctgagattataggcatgagccaccgtgcctgaccgagtatttcttgatgaccggaaaattcaaaatatactcttcagaaaaattgtaaagaaaaattctgttttttggcatgcagaaaaggggcaattctatgacagaatagttcactgcactgctttggaatttagaatattctattaaataagtgaaccttaaagaggcataccactttcaattcaacatccctaatgtgagaccttttttctcccaagcagctctattttcaaagtttagttggctctttagagcagcattatcttttaaaatactggatatgtacttaatagaggcagagtgcatcatttgagaggatgtctccagacattg

SEQ ID NO: 666636 - DNA, 579 bp, Homo sapiens
ccctatactgaaggacttattttattaagcaccgcaatcccatagcatcatgttatccatatcatacatacattgtacatataagtcgtcctgaaatgtgttaaccactttttaagattgtctgcttaattactttaaataaaatcccaaaatttaaaaactaggaaaaaatctgtatttccattgaaaaaccaatatacttcatatttgacaataatgtaaattatatagcagctaaccatttttccctttttaagtatgattagattaaactataccagatttctattttttgcattttatttaaacatatatgatgaaataatgcttactggaataaatttgttagtcgtgtcattgaatatgccttttttatccttaggtttttggtgcgttagcatctgarccactgaaagtgagtgatggcttttatggtactggagagacctttgtttttacattctgtccggagtttgaggtaagaaccactatttcaatattttatttataaagaggtgacataacatactgcccaaagcaatttatagattcagtgctattcccattaaactaccactg

SEQ ID NO: 666637 - DNA, 579 bp, Homo sapiens
ccctatactgaaggacttattttattaagcaccgcaatcccatagcatcatgttatccatatcatacatacattgtacatataagtcgtcctgaaatgtgttaaccactttttaagattgtctgcttaattactttaaataaaatcccaaaatttaaaaactaggaaaaaatctgtatttccattgaaaaaccaatatacttcatatttgacaataatgtaaattatatagcagctaaccatttttccctttttaagtatgattagattaaactataccagatttctattttttgcattttatttaaacatatatgatgaaataatgcttactggaataaatttgttagtcgtgtcattgaatatgccttttttatccttaggtttttggtgcgttagcatctgaaccactgaaagtgagtgatggcttttatggtactggagagacctttgtttttacattctgtccggagtttgaggtaagaaccactatttcaatattttatttataaagagktgacataacatactgcccaaagcaatttatagattcagtgctattcccattaaactaccactg

SEQ ID NO: 666638 - DNA, 634 bp, Homo sapiens
gtctcaaaaataaataaataaataaataaataaataaataaatgaaagatttttcccatgattgctaatagttgacagataaagttagaataaaaccyagttctcttgcttttgtgtcactcattatgatgccaaatagctctttactatggcaagtatttatctgcttatgtaattaatctaaacagacatcatcattaccaccttttttctattttcatcatcatcttttcatgtttttatatatctgcttttccataatttagaataaaacaaggtgagaggtcagcacactgaggccctctgactaaatgtggccagcagtctgctgttgtacagggcatgagctaagaatgtattttacatttttacaaggttgcaattctttgtttaaagaataatattttgtgatacatgaaaattatatgaaattcaatttccagtgcctataaataaaatgttgtcacaacagcatgaagttgagtagttgcagaagggaatatatggacctcacatgctaaattatttactatctggccctttctacatgttttacagaaaaaatgataataccacattaaggtaaaaaacagttaattctaagggtttccaatctcagttggaaagacaaaat

SEQ ID NO: 666639 - DNA, 634 bp, Homo sapiens
gtctcaaaaataaataaataaataaataaataaataaataaatgaaagatttttcccatgattgctaatagttgacagataaagttagaataaaacccagttctcttgcttttgtgtcactcattatgatgccaaatagctctttactatggcaagtatttatctgcttatgtaattaatctaaacagacatcatcattaccaccttttttctattttcatcatcatcttttcatgtttttatatatctgcttttccataatttagaataaaacaagrtgagaggtcagcacactgaggccctctgactaaatgtggccagcagtctgctgttgtacagggcatgagctaagaatgtattttacatttttacaaggttgcaattctttgtttaaagaataatattttgtgatacatgaaaattatatgaaattcaatttccagtgcctataaataaaatgttgtcacaacagcatgaagttgagtagttgcagaagggaatatatggacctcacatgctaaattatttactatctggccctttctacatgttttacagaaaaaatgataataccacattaaggtaaaaaacagttaattctaagggtttccaatctcagttggaaagacaaaat

SEQ ID NO: 666640 - DNA, 613 bp, Homo sapiens
aaaaaccacatgagcaaatatctttctaaactcacttttcttaagagtaggacactgttgtacagtacacacacaggaataagggggcatacttgttaaacataaattatttctcagattttttggcattaaattaattcttttcatgtttgtcagtcctgagcagattgataatttaaaaacgtatacacaacaacacagaatgttttttccctttttttttttaataaatccaaggaacatggttttccttttttacaaagtcaagggaatgacaaacagaaaaggagaggtctgtgtcaaagtggcattttctttatcttgtggaataatcttttatgttattcttctgtctcaaaaattgaatgttctttagwgataaatgcattatagagaagaatatcccaaaacagaataatggcaagaaacagttttcacgttgtaatctcaagcctctctttcaattgaggttttgcttattttgagacattttgttgttcatatgaacacaaaagcagcttgattcttcttgatctttatgtttaggtgaaaatcagttcatcctggataataattttaagaatttgagaagatctgattgtctgacatgtgt

SEQ ID NO: 666641 - DNA, 560 bp, Homo sapiens
ctcccaggttcaagcaatttttctacctcagcctcctaagtagctgggattacaggtgcccgccaccatgcctatctaattcctttttgtatttttagtagagatggggtttcaccatgttggccagattggtctcaaactcctgaccttaagtaatctcccctccttggcctctcaaagtgctgggattataggcgtgagccactgcgcccagccaggaataattcttaaaatccacggattcaaacaaaataagcagaagaattttattcttaagtatccaagtgagaataaaaataagaacaaatgtggaaggtactagagaataactataactgctaatgactaataatcagataagaataatttgacctgattaaccagctgtctctcagagaagatggagaaggagacagaaggtggcttcagtggctctgtggttttgaggtcaggtatctgggagactcatgaggggctgttattcagaaggagagtcacggartagacccggcttcaggataataatatagagtttggtttggggccttcacgggaggctt

SEQ ID NO: 666642 - DNA, 530 bp, Homo sapiens
gagccgagatcacgccactgcactccagcctgggtgacagattgagactctgtctcaaaaaaaaaaaaaaaaaagtaaaatcaattgaggtgaatacaaggtagagccctaatttctagtctaaaatgattatattttttaaaaattcaatgccacagttatatagatacatgtatcctctgaatacctacctgcagtgataatttgctcagattctaaaaacccatctttcaatagccttctggtaattgcagtaaaactcaaacccattgggaaatctcagttccctagactacctctgatctgagaggaaaacaacatgtgaaaaagacagcatcttcagggtcttcagatgaacagagccccttccatagctcgtgctcactgtgattaagtgtgagtgggaagaaatgtggtgttgtaaggacccccttatctgagatgtgraaagatgtgttaattaaaggagaacagtttggccatgaatccatgtaagttaggcagacagaattttcctggctcattttata

SEQ ID NO: 666643 - DNA, 520 bp, Homo sapiens
catcaatgaatatgtcttcaatatgtccttttgtgttggcatattatgaaatgaatgttatcttagtcaatgttagtatatcatgtcaaatcaggaaaacatttaaatctttttttcaatgtggccctatgattatttctcttagttaattagcaaatacttgaatggcctgttcattgctacaygcagttcattattagtagataaatgtagcaatttagtcactggaatatagcacttgcttctgcaggcattttgttaggatgtggcaatttgtgtactattttcatctggagcccagatttctttggtttgagatgtttccgatacagtaagacatgatctagtacattagggtgtataaatcacgcaacttcataactgccatattcactgtagtatttatttctacaggtttctgcacttcaagtgtggaaataccggtaaattctctctcaagtggtttccattaaaataaacaaaaagcgtacatgattcatttgtgtttatgcacaaggcc

SEQ ID NO: 666644 - DNA, 520 bp, Homo sapiens
catcaatgaatatgtcttcaatatgtccttttgtgttggcatattatgaaatgaatgttatcttagtcaatgttagtatatcatgtcaaatcaggaaaacatttaaatctttttttcaatgtggccctatgattatttctcttagttaattagcaaatacttgaatggcctgttcattgctacacgcagttcattattagtagataaatgtagcaatttagtcactggaatatagcayttgcttctgcaggcattttgttaggatgtggcaatttgtgtactattttcatctggagcccagatttctttggtttgagatgtttccgatacagtaagacatgatctagtacattagggtgtataaatcacgcaacttcataactgccatattcactgtagtatttatttctacaggtttctgcacttcaagtgtggaaataccggtaaattctctctcaagtggtttccattaaaataaacaaaaagcgtacatgattcatttgtgtttatgcacaaggcc

SEQ ID NO: 666645 - DNA, 517 bp, Homo sapiens
gtacatgcatatatatatagcttatatattttacatataacacgtataaacatttatacatacatctacacataaacagatgtataagcacttgcagacatcaacatatgtactcaaatttatacatatgtatgcctgtctataaatataagtgcatagatacatagaatattactcttagaaaaatgagatctacagaagtgttcagcaatttgggtatttccccatcttttgcaacgcgctttttacatttaataaaacatcatggacagccttttaaccaaggacccctatggacatacttgatttatcacaacggctgcagagtatacattccattgtactgtaatttatttagctttgctctattagtagacatkgagatcgcttactttttttccttctccaaatgttgggattaacagcagtgtacatgtatctttacagccttgccagtatttctaaagaacagatttccaggagtagattttccaagccataaaaataactgaattct

SEQ ID NO: 666646 - DNA, 605 bp, Homo sapiens
gacagtgtgcgccaagccagataagttccctgttttcttggagggtaagtcaagtgagggagatgacctcagtctaataaccacaacagacagatgaaactgaatctgcgactcccgctacaaagraatcatcactcagctacaggaatatataatagggaaattcgcccaggtcttgacctgcgtatttaggtatataagtatgagtctcttttaggactaccgaatagatcatagcatgtctccctcaccgactgcctttctacaggtcaagaacgaagtggcagttccttgtcattctaagtgttcaccactcccatttacttagaggtagactctccgtaactttcaaacagaacagttcgttttgaaaagttcctaaaatagattacagaacttacttcagcttctactgcaccgtttactagctgagtggtttagagaaagctatttgacctctctcagctccaatgttcttaattttaaattgggaataataaatacaaaccttaaatgagtctcgtggggaggagacgagacatataaagagttcagcacagtgtctggcatgtggtaagtgcctagtaaagcatagtagctgccct

SEQ ID NO: 666647 - DNA, 605 bp, Homo sapiens
gacagtgtgcgccaagccagataagttccctgttttcttggagggtaagtcaagtgagggagatgacctcagtctaataaccacaacagacagatgaaactgaatctgcgactcccgctacaaaggaatcatcactcagctacaggaatatataatagggaaattcgcccaggtcttgacctgcgtatttaggtatataagtatgagtctcttttaggactaccgaatagatcatagcatgtctccctcaccgactgcctttctacaggtcaagaacgaagtggcagttccttgtcattmtaagtgttcaccactcccatttacttagaggtagactctccgtaactttcaaacagaacagttcgttttgaaaagttcctaaaatagattacagaacttacttcagcttctactgcaccgtttactagctgagtggtttagagaaagctatttgacctctctcagctccaatgttcttaattttaaattgggaataataaatacaaaccttaaatgagtctcgtggggaggagacgagacatataaagagttcagcacagtgtctggcatgtggtaagtgcctagtaaagcatagtagctgccct

SEQ ID NO: 666648 - DNA, 568 bp, Homo sapiens
agcagtttactgttcgtggtgactttacagactacaactatagcctatagaaaataacaagaatcaactattttttgttttaaatatctttacacatcatctcaaaatatatctttgcaacaaaaacatgtataagaattaaagtttatgatatatttttaaattctcttgtaccataagccttagtattaatttctagtgaatcatgatgtgtcatgctatttttagtatacaaatcacttaaaaatataaatatatatttgggtgaatggtttcttggtatttttgacaaataattactaagcataaaaatattagaaataaatcccttaattagatgaatgggcttatttttatgcatggtaacctgtctgtggatgaatcttacttattgctggaatgaaatggattcagcatcattttgttcttccttttcattgttatgggtgtaagcccrtgttctaactaataagtttattggaatagaagagattttattatagcaacttcattcttttaatgtcttcaaaattgtaacaaaaatttattagtaatatttgtcataatt

SEQ ID NO: 666649 - DNA, 446 bp, Homo sapiens
agtgtattcctttgttttgtgaagtgggagaatgttgatttcgaagggaagctgggacaaaatgatccatcatgaaacagccataaatgtgtttccagacatatctgtttgaaggaacggtgtgtgaggaataggagaactttccattggcacgtcccatataccctcagggtaacatacagtccagtgtgaaagccactgacacagaggagggagtttaggacccaagattctttttcctgcttctttccttgtgaagtttgggcaagccacttttattctttgtgcatctgtttctttattttaaaaataggaatagtaaatggtctcccaattatctttyagtgctattgtgaagattaactgagataatgtctgtaaaagcactttgaaaattgagagctctatttaaacagaagatatcactatcagtatactaacgacac

SEQ ID NO: 666650 - DNA, 574 bp, Homo sapiens
catgtgcttgcttatagttttggaaaatgtgatgagtttaatgatgtatttttcatttgtgaaatgagtgtagatagaaatcaaaatgatgaatagaagatgtgagtgatagtgacaattctgattgaaatgacagtgagaatgcaaaaatgaaatcaattttctatttaaattattacagcagcattcattaaggccctttcttaaatagagctggatattgcaaactggaaaaaaatattaatcatggatttgccctagatttttctgcattagtctggcatgaatgtttatatttaagctgcaaatagtagttttctaggtattcagaagttaagaacaatttagattaaggatgtttaaagctcatttgtaaaatgctcatactatttgagctgttttaaaaagatttgcttagcgaaagtcattggatcagaataattctgacactcttaatctttttttttttaaactaagrgccttagacattttctttccatttaaaaatttgaatgacaaaaccaagtaagtaattacttgaaatagtgaagtaaataccaaatttgtgcccagg

SEQ ID NO: 666651 - DNA, 557 bp, Homo sapiens
tgtgcatgctcataattttgatttttgtaataacattgttgccacttatgcatgacaaaattagtaacacctatgacggacactaggtataacaataactgcaaagaacattgtgactcccaggtattctgatgcttaaataaggctgagaacctattcataatataaggggaattctcccttgttgttatttcagttattgatttagctgaaaatgtgagttgcatgctggtaattgagactagcattaattatttctagaatatgcagttagcagtgcaacataagcaccaagcaatcttcatgctaaaatgttttccccccttttgtgagtaaaggtatactttgtgctaaattccatagttaatgcttgatttccacccctcccatgaccatattagcagatccccatcaagaaaatcttttgttgtrataagaaatgacacaacccatttttagtaaggagaagctgtaaggaaagtgatgatagtaacattttcattcttccactttaatttgttacatattgctgtgctagatagattcgtctaagaatc

SEQ ID NO: 666652 - DNA, 598 bp, Homo sapiens
agttcacgcaagcaggaacagcagggccatccagtcctcagctagcttccagcaggagtgggaattgcctttcaaattcagaataatttaatgatttacaccatttttattaaaaataaataaacagaacgatgtaataaaacaactaatgacttttttatacagcagtgtctgcgtaaaatactgctctggggatagcaaaggtacatcctttgtaatgtaagacatttgctatctctgtaacttttctatcccaggatggtatttgactattgtcactttcaaactmatttattttttaatgatttgagatgcatggatgtgtatataatgttttgggaaaaatctatgaattatgcatgatttacctgagagaatgttctaagataggcttgtttttaagatcagctaaatttagcatattgacattttttcaaatcctctttttgttgaggcttttcatttaaatattcagggaatatggcaacataaaatatacaaatttggtcatatatactggattgcctgtaagaaatgttcttatagtaaaatcttaatcagtatgtatagaatgggctgtctgtgccaaaccaaacaa

SEQ ID NO: 666653 - DNA, 501 bp, Homo sapiens
tgtctcttctcctcggccccttaagtccactgtgatgcgcttaagggcatgaaggcacctgtgatgtgctcttgcctccaagctggtgctggatggarctatttgctccttgaactttcctaaactcatctcgtcatctcttcccactgtattgatatctcctccttacctcttctcccgaagcaagaattcctcatctttcccaaagctgaccctttcacccgggatcatgattccatttttatcccacctcttcctaaactttaatcaccagttactgcccctgtgtttatgttttgtctcagaacatcttagaaggtaagtccatatttgctgttgccaattccatatcgcacatttaatctttcaaataatgaaatagactttctccaagatctcttataaaataagcatttcagggggctggagggaggactgtaataatcaaattctcttcctagtatcacatgtctcttctcagtctttagcttgctagacatt

SEQ ID NO: 666654 - DNA, 501 bp, Homo sapiens
tgtctcttctcctcggccccttaagtccactgtgatgcgcttaagggcatgaaggcacctgtgatgtgctcttgcctccaagctggtgctggatggagctatttgctccttgaactttcctaaactcatctcgtcatctcttcccactgtrttgatatctcctccttacctcttctcccgaagcaagaattcctcatctttcccaaagctgaccctttcacccgggatcatgattccatttttatcccacctcttcctaaactttaatcaccagttactgcccctgtgtttatgttttgtctcagaacatcttagaaggtaagtccatatttgctgttgccaattccatatcgcacatttaatctttcaaataatgaaatagactttctccaagatctcttataaaataagcatttcagggggctggagggaggactgtaataatcaaattctcttcctagtatcacatgtctcttctcagtctttagcttgctagacatt

SEQ ID NO: 666655 - DNA, 501 bp, Homo sapiens
tgtctcttctcctcggccccttaagtccactgtgatgcgcttaagggcatgaaggcacctgtgatgtgctcttgcctccaagctggtgctggatggagctatttgctccttgaactttcctaaactcatctcgtcatctcttcccactgtattgatatctccyccttacctcttctcccgaagcaagaattcctcatctttcccaaagctgaccctttcacccgggatcatgattccatttttatcccacctcttcctaaactttaatcaccagttactgcccctgtgtttatgttttgtctcagaacatcttagaaggtaagtccatatttgctgttgccaattccatatcgcacatttaatctttcaaataatgaaatagactttctccaagatctcttataaaataagcatttcagggggctggagggaggactgtaataatcaaattctcttcctagtatcacatgtctcttctcagtctttagcttgctagacatt

SEQ ID NO: 666656 - DNA, 601 bp, Homo sapiens
ttaggtatcacactgagatctggctttgaagtgtgtgtgtgccaggtggctcacacggcacactggaggtgagacagtcagtgggctgtgggtgtcrgcttggacatcagaatagagtgggaaacaatggttccccaagctcttggcattcaggtctcacctccctcccccagccactggcccactgtgtcatttggacacaacttaataccatttcaaaatatttgagactgaaataaaaagaccaaaaagtgctgtacagatcagaaagcctgaggtttcttgatggacttaaatttaattctctgatgagaaaaactctaattttgtatacttagatctttttggaacacgatatgtattaagtagtttaaaaaagtaagaagtatggttttgatatttaagtccatctcaaatacttctttgaataacttttttcattagtaagagctgaaagaggaaaatttatgtattaggctttcagttcaccaagtactctacccaaatagctctattgtatgatgtctctcgattaactgtcttttaatgtggatatcaaactccaccattaaaatgatgttttccttcagtgacagtgaaa

SEQ ID NO: 666657 - DNA, 598 bp, Homo sapiens
ttgcttgctttcttttctctgctttcatttatccattttacatagtrtacttggttcatgtatttttctttcgttgtttttaatatgaaggctttaaaaaattatggataaccaatcaacattagatgtcacaaatagttacttttgattccaatattgtgaatatttctgttgccattattgctggttttgtttgtttacgtagcttaacccctgatgcactctcagtcacacagttttatgaagatgtagactcatgtgttttgacatatacataactcgtcagaataggtttcctgggtaaccttggaggttcttgtatgccttcaactggaatttcttcaagtgcacttgcttgtgtaaaagatgtatttatgtgatgatgtattggttggaatactgcacaaagttagttttttgagtagcagctgaacataaaataaaaagttgtgaaagtatgaaaagccacagtgttttaaatatttttgtagtaaagtcagtgccctgtatcaagcatggagatcattgaaaaggatctttaaggagcctggctttttggacataacctaattatcccaggagataaggttatcacacc

SEQ ID NO: 666658 - DNA, 559 bp, Homo sapiens
gtgcttcataaagttgaaggggtagtaataaacatagggataatattattgtcttacagttcagtgtggagaaaaagaaataatatggaactccttacatagaggaattacattatcattagaacaaattgcatgctgaaaaggaacttcacatttcagcatttcttttatttttttaaaaaatgaaactatgaaagaaactatataaaggaatctgagaatgtcatctgccttcgttatattgtaggattgacagttgagggcttttagagatgctttcttcaaggagcttcaatcattcattggcgttcaatgctttagggccatagttttatgcagaaaaatttttgtatttcctgttattcaaccataattggaaatgaatgcatgaaaatcagtatcaacaaagtaaatttaggaataagtaatttgaaatagtgacttttaaagaagttctgaaactaaatggtraaaagcaagtttctcattcatctaatgatccaaatttacaaggatttggtaaaattattgttttaattaagatataattttaatttaa

SEQ ID NO: 666659 - DNA, 470 bp, Homo sapiens
tgtgactcccaggtattctgatgcttaamtaaggctgagaacctattcataatataaggggaattctcccttgttgttatttcagttattgatttagctgaaaatgtgagttgcatgctggtaattgagactagcattaattatttctagaatatgcagttagcagtgcaacataagcaccaagcaatcttcatgctaaaatgttttccccccttttgtgagtaaaggtatactttgtgctaaattccatagttaatgcttgatttccacccctcccatgaccatattagcagatccccatcaagaaaatcttttgttgtaataagaaatgacacaacccatttttagtaaggagaagctgtaaggaaagtgatgatagtaacattttcattcttccactttaatttgttacatattgctgtgctagatagattcgtctaagaatcctaatccatttacacacttcctgt

SEQ ID NO: 666660 - DNA, 608 bp, Homo sapiens
ctggatgcctttcaccctatataaaaaaactaaaaatggaccaaagattaaatgtaaaacctcaaactatcataattctgaaagacaacttaggaaatactctagtcaacattggctctgggaaaaattttttggctaagtccccaaaagcaattgcaacaagaacaaaaataaacaagtgggactgaattaaactactgagcttgcacagcaaaagaaattatcaacagactaaagagacaacctacagaatggcagaggatatttacaaactatgcattygacaaaggcctaatatccagaatttatagggaatctaacaaatcaagaagcaaaacacaataaaaaaaatttaaaaatgggcaaaggacatgaacaggcacttcacaaaagaatacatgcaagctaccaacaaacctatgaaaaaatgctcagcatcactaaaaatcaattcttaaagcacccttcttataaggaattccaggcagaacgcagagttagtattgcagtttttagttggaaaagctggttaatataacagaagtaataaaccagtcctctatttgtgtttattgacagttgcaatttaattttgacattgaatttat

SEQ ID NO: 666661 - DNA, 601 bp, Homo sapiens
tcttcatctccgaggttatttctgtcttactttgcctcacaattatagcttctatcattgatttcttaactggatccatctttaggtcatacagttatgtttaagttccctttaccttaattttcaactctaccttaccctcaaccaactgtccttgtttcctctgcgtcttcatcatcaaaactttcagaaacgaccttttttctctgccttatttcccattcctgatttcatgacagtctggcttctaaccccacaaactctcaaattttcctccaatgacttccttattgctacctctaaagactgttatagtccttatrtattttcttctgtcgacctcatgacattgtgtcctactccctgtagcccatgttcattggctctatcactcgagtgataccgagtggtttgatgtctccctttcctctgcttaggtctcttgttttcctgttctttcttttactgctatatcctatacagtggcatcttagactcttgacctggcctcaactacaacctgtcctgtgatgactcttgacatctctcctagtattcaaaactgcccactgatcatctctagttgctccattgttattgg

SEQ ID NO: 666662 - DNA, 275 bp, Homo sapiens
aaagagtgtgtgagtgaatgaacaaaactttttacccacatgtcccctgacaagtagggttttgcaagtcgttcttcgtccctctcttctatcctgtcctgattttacaytgtatttttcagttcctgtaaagcagatctcaatgctggcacatttgataattaattaatggtggaataagaggaggtgttagctattaatactgtcctttacagatggcacatgcaattaaacatcagttttagggaaacaaaactctaacccgaagaagagtt

SEQ ID NO: 666663 - DNA, 615 bp, Homo sapiens
atccctgaataatttctaagatagaacattataagaactaacattaagcaaatgttaattttttaatatttttggttcttattttatggatcatatcattaaacgtgttcattttttgtcactttaagaatgtgcaaaaaggatgaatgtggctttaggaaggtatgtgttgtgtatttttgagctttgctagtctgctaaaatgctgtctatgacagttctcagttatctcccacccagctttgtctatgaaatagaagttgtaatatctgctaaaaattaggactactgttatcacaaggaggaattatgacaaggaacacaactgtgtaagtgcatttgtgtaagaaaacaaaaacaaataaaaaacaagactagtcccaaagaaaagtattagtgtrttccagcatatgaagagaataatgagtgtggagagctagctatagagtgtttgaggaaacaaattgtatttgccttgtttttataatatctgaatctgtaaagaaataatgaaacgtgttaattttttggtaaattctgttcagttttgatagaattattcacaagatataaaaaaataaaaggagctcatgaaaactttactgccaaacttca

SEQ ID NO: 666664 - DNA, 592 bp, Homo sapiens
cagaaatattggcctgtagttttctttttttgatgtgtctgtggttttggtatcagagtaatactggccttgtagaacaagtttggaagtattccctcctcctctgtcttttggaatagtttgagtagggttggtattagttcttctttaaatgtttggtagaattcagcagtgaagccatcaggtcctgggcttttctttactggaagattttttattatggctttaatcttgttacttgttattggtctgtttgggttttggatttttttgcctggttcaataatggtaggttgtatktatctaggaatttgtccacttcttctagactttccaatatattgacatatagttgctcatagtagccactaatgatcctttgaacttttgcagtatcagttgcaatgtttcgtttttcatttatggttttatttggatcttctctctttttttctttgttagcctggctaaagatttgtctattttgtttgacttttcaagaaaccaactttttgttttattgatcttttgtatttttttcatttcaatttatttatttctgctctgatctttattattattttcttctact

SEQ ID NO: 666665 - DNA, 511 bp, Homo sapiens
tttttacttagggtaagagtagtttacacaccacagttacactgttataatattctaggttttcctgtgtacttactattaccagtgagttttgtaccttcaggtgattatttattgctcattaatttttttttttttttttctgattgaagtactccttttagcatttcctgtaggacaggtctgctattggtgaaattctccagcttttgtttgtctgggaaagtctttatttctccttcatgtttaaaggatagttttgccagatacactattataagataaaagatttttccttcagcactttaaatatgtcatgccattctctcctagcctgtaaggtttccactgaaaagtctgctgccagatgttttggagctccattgtatgttatttatttctttccttttgctgcctttaggatcctttctttatccttgacctttgggagtttgattattaaatgccttgakgtagttttctttgcattaaatctccttggtgttctgta

SEQ ID NO: 666666 - DNA, 557 bp, Homo sapiens
agatgatttaaaaattatagtttattkccctgttggacattatcccattttattaatatatctaaccaggtgatcttaccataaaattactttgtaaaattgcctttaaacacctacctcttcaaattttaatttcaactggttttaacatcttactggcttcctcattaattactaagtgtataagatctttgacacacattcattttttatttacataagagacatgatttttattacataggaatcatgattttgctttgttgaaactcgtactttaacaggcctgagcaactggggaaatggcgccattgactgtggagaatcctaaggaataagcatacttgttagggataagcatgcggtgaatcaggaagctagtgaaatactttgctttggaaatgtttaattcaaaacagagctttgtttacttaagaatgtttatagcaatgtgaagtagcaagacacaggaagactggcaaacttgacctagctcgtatagtggccaaagtcacagaagcatagagatatgtatgaaaggcgggtgggtggatcgc

SEQ ID NO: 666667 - DNA, 557 bp, Homo sapiens
agatgatttaaaaattatagtttattgccctgttggacattawcccattttattaatatatctaaccaggtgatcttaccataaaattactttgtaaaattgcctttaaacacctacctcttcaaattttaatttcaactggttttaacatcttactggcttcctcattaattactaagtgtataagatctttgacacacattcattttttatttacataagagacatgatttttattacataggaatcatgattttgctttgttgaaactcgtactttaacaggcctgagcaactggggaaatggcgccattgactgtggagaatcctaaggaataagcatacttgttagggataagcatgcggtgaatcaggaagctagtgaaatactttgctttggaaatgtttaattcaaaacagagctttgtttacttaagaatgtttatagcaatgtgaagtagcaagacacaggaagactggcaaacttgacctagctcgtatagtggccaaagtcacagaagcatagagatatgtatgaaaggcgggtgggtggatcgc

SEQ ID NO: 666668 - DNA, 491 bp, Homo sapiens
ttgatccaggcaacacttagaagatgcatttggcctctgcatgtctttgaccttctggacattgattatgacctgactttgattactctgtttctaatttgtaattgttatgtgttgacagttataaacttataggtaattgatgtctgctcttttgaactaatcatgaatatattgttaggctgatttttaacctaagcataaagcatgtgtattatttctacttatgaagctaacatagtcaaatagaaacttctaasgtttttattgcacttatatgcaaatagttgtatctgaatgaaatcaccttaatgaaatgctgtctttgaaacctaattataacctctttattaacgaatgtagtaggggaaagaagtcatattaatgtcgttgataagttatgtttatccccttctgtcatcatattaactgagaatgaaatacatataaatagaaaaagtttaataataatggtatcagatgttaattga

SEQ ID NO: 666669 - DNA, 615 bp, Homo sapiens
tgatttttggtgggtctatcaaaatcaattaaccctaccattgttgcattttgtgctcacttaaaaaaaattattgaagaggatgaattttgcagcaaaggggcaaatactcctaaatactgaaaactctttgaattctagaagaatagaaacctgagaattgttcttcaatggaagaaatatttagaaaggcaattttcatcactttgtatttttccgtgaaagtggaataattaaaaacatagtgatttaagctgactcagagtatgatgaaagaaacattaaatttcttctgagtggggtatttaaaaatcatattgaaatctgaggatgctatgcaagctgttaaaagtttatgtactggaatatgcacaacatatatgttgcacaggaaaaatatattttttgatataaygacatttatgatataaaataggacacaacttcaacttggatgtttaagaggaattaaatgagatcatggctgtaaagttctcagcacagtgcctggcgcggcaccagtgcagatggcagctggtgttacaagcctctctcttctctaaagcactcttcactagagcaatgctgttgacatgtctgcaagtcatgagaact

SEQ ID NO: 666670 - DNA, 618 bp, Homo sapiens
tatacaccatggaatactatgcagccatacaaaagaatgagatcatgtcctttgcagggtcaaggatgaagctggaagccattatcctcagcagactaatgcaggaacagaaaaacaaacaatacatgttctcacttataagtgggagctgaacaatgagaacacatggacacagggaagggarcaacaaacaacggggtcagagaagaggatgggagctgggggagaccattagggaaaagagctaatgaatgcctggcttaataaataggtgatggttgatctgtgcagcagcaaaccaccatggcacacgtttacctatgtaacaaacctgcacatcctgcacttgtattccagaacttaaaaaataataattcataaaatggcagtatgatgatcatcattgaaggatttcaagaggtcagaaattcacattcacttttattgagtttaggattagaaaaggctcatgattgcaattcaacttgtagttcttccagttcttcaaaatctttacatcactgagtgactgatttaaacccaaactattttctcctgcacaatgcaggtgcataattttgcattcaatgcactgtagtgtttcttcagagtctcatg

SEQ ID NO: 666671 - DNA, 618 bp, Homo sapiens
tatacaccatggaatactatgcagccatacaaaagaatgagatcatgtcctttgcagggtcaaggatgaagctggaagccattatcctcagcagactaatgcaggaacagaaaaacaaacaatacatgttctcacttataagtgggagctgaacaatgagaacacatggacacagggaagggagcaacamacaacggggtcagagaagaggatgggagctgggggagaccattagggaaaagagctaatgaatgcctggcttaataaataggtgatggttgatctgtgcagcagcaaaccaccatggcacacgtttacctatgtaacaaacctgcacatcctgcacttgtattccagaacttaaaaaataataattcataaaatggcagtatgatgatcatcattgaaggatttcaagaggtcagaaattcacattcacttttattgagtttaggattagaaaaggctcatgattgcaattcaacttgtagttcttccagttcttcaaaatctttacatcactgagtgactgatttaaacccaaactattttctcctgcacaatgcaggtgcataattttgcattcaatgcactgtagtgtttcttcagagtctcatg

SEQ ID NO: 666672 - DNA, 618 bp, Homo sapiens
tatacaccatggaatactatgcagccatacaaaagaatgagatcatgtcctttgcagggtcaaggatgaagctggaagccattatcctcagcagactaatgcaggaacagaaaaacaaacaatacatgttctcacttataagtgggagctgaacaatgagaacacatggacacagggaagggagcaacaaacamcggggtcagagaagaggatgggagctgggggagaccattagggaaaagagctaatgaatgcctggcttaataaataggtgatggttgatctgtgcagcagcaaaccaccatggcacacgtttacctatgtaacaaacctgcacatcctgcacttgtattccagaacttaaaaaataataattcataaaatggcagtatgatgatcatcattgaaggatttcaagaggtcagaaattcacattcacttttattgagtttaggattagaaaaggctcatgattgcaattcaacttgtagttcttccagttcttcaaaatctttacatcactgagtgactgatttaaacccaaactattttctcctgcacaatgcaggtgcataattttgcattcaatgcactgtagtgtttcttcagagtctcatg

SEQ ID NO: 666673 - DNA, 601 bp, Homo sapiens
ggcactcttatcaatgacattctttaagcagtatctcccagaggtttttcttttacttataatatagtcaaacactaggaaatagtctaaatataatttaaatgtgcctaaactgaaaaatttgctttatggtaacaattctagcataagaaagtaaataaaatataaaataagagaaaacataaaactgctaaggaggaaaacagcaccatggaatttgtgaaataggaataattattttcataatttacatagatagcatagacagaaggccaatttgcggatcctatgccaagaagaagacatacctttggacaaaggataatggattagaaaattcatgcagatgctcacattggaaaactgaagggactcagcccttgaccacttacttgtgtcacaggctaattcttatcatcattaacactgattgtgacatgtgacatagcaccctcatgtgagtgtaccacaatcataataactagtgggcaatctagtgggaaatggcattatggcagwcctggtaattgcaacttgagttctaccagtgactgagcaagtcagttaataatcctaagaatcagtttgcttattttgaaga

SEQ ID NO: 666674 - DNA, 566 bp, Homo sapiens
gggcggcaaaccacccaggtgccaaggcaagagaccgaggacacgagctgttccaatataataaaatataaaataagaatagttataccagatatagatcttagatatgattatatatgaatatcattaatcattagtttgtagcaattactctttattccaatatcataataatcctcactctataatcataacctaggaaaaaccaggccatacagagataggagctgaggggacatagtgagaagtgaccagaagacaagagtgcgagccttctgttatgcccagacagggccaccaaagggctccttggtctagtggtaacgccagcgtctgggaagacgcccgttgccaggcggaccgaggtctagcrgtagcgtaagtgtcaaaggaaaacacccactatttagcagaccgggaaagggagtctgcttttcccctggggagtttagagaagactgctcctccacctcttgtggagggcctgacatcagtcaggcttgcctgcaattatccagaggcctaaccgtctccctatggtgctgtgcttcagtggtcacgctcct

SEQ ID NO: 666675 - DNA, 486 bp, Homo sapiens
gccaccgtgcccagctaatttttgtatttttactagacttggggttttgccatgttggccaggctggtctggaacttctgacctcaagtgatccgcccacctcggcctcccaaagtcttgaaattacaggcgtgagccactgcgccctgccagattttgtatagtaatatatatataaaatgacctgtcayaggttggctttcatagttttacctttcctttttgggtggtgcccttgggtctctactactgtctttcatcactcccaagaaattgagtagtgcagccaggatcaggaccagggattggcaaatgttttttgtaaagggccagataggaaatattttgggctttgaggactgtgttatctctgaaatgatcttgttccagtgttaccatgtcaagacaaccatagatagtatgtatacaaatgaacaggtatggctgtgttccagtaaaactatggataaaaacaaccacattgca

SEQ ID NO: 666676 - DNA, 500 bp, Homo sapiens
aataaccatcttgatttatcaccaaggaggtatcagttttatgggaggagaaaggggtttaatttagaacacactaaaatctagtgggtagccacattgacmaatggaatagaatagagaacacagaaataaagcaacatatttatagccaactgatctttgacaaagctgacaagaacttacactgggaaaggtcaccctcttaaattaatggtgctgagaaaattggatagccacatgcagaagagtgaaactggaccccctatctctcaacatatacaaaaataaactaaaaatggattaaaaacttaaaggtaagacaccaaattacaaaaatactagaagaaaattagggaaaactctcctagacattggtctaggtaaagaatttataactaagacctcaataacacagacaacagaaacaaaaatagacaaatgtaatttaattaagctaaaaaatttctgcacagcaaaagaaataacaaaatgaaaagaca

SEQ ID NO: 666677 - DNA, 500 bp, Homo sapiens
aataaccatcttgatttatcaccaaggaggtatcagttttatgggaggagaaaggggtttaatttagaacacactaaaatctagtgggtagccacattgaccaatggaatagaatagagaacacagaaataaagcaacatatttatagccaactgatctttgamaaagctgacaagaacttacactgggaaaggtcaccctcttaaattaatggtgctgagaaaattggatagccacatgcagaagagtgaaactggaccccctatctctcaacatatacaaaaataaactaaaaatggattaaaaacttaaaggtaagacaccaaattacaaaaatactagaagaaaattagggaaaactctcctagacattggtctaggtaaagaatttataactaagacctcaataacacagacaacagaaacaaaaatagacaaatgtaatttaattaagctaaaaaatttctgcacagcaaaagaaataacaaaatgaaaagaca

SEQ ID NO: 666678 - DNA, 588 bp, Homo sapiens
aattaaaacattgcaataaaaaatatttacttagtacaaaaaaaatcaataaatgaagaatagaacaaagaagatatraggcatttagaaaacaaaaagtattatagcgtgcttaaattcaattagattattaataaaaaattgtgaatgaaatacataatctaattaaggcagagattgtcacactagctaaaaatcaagatgtaattatatgtcgcctaaagagacacattttagattcggaagtacaaatattataaagcagaagtaaaaatagggaaatatatatatcatgcaaataaccattagaaatttgcagtgtctatattaatatcagccaatttgattgtataaagaaaaatgtaaatggaaattcaaaagggtatataatttcacaatagggtcaacttattgggaagttataacattgataaacttacatcaaacacctgagtcccaaaagatgccaagcaaaggcagatgcaattaagggcagaaatagataattcaacaatagtatctggagacttcagtatctgccattaagtaatggatagaagaactcattaaaagatcaacaagggaatt

SEQ ID NO: 666679 - DNA, 588 bp, Homo sapiens
aattaaaacattgcaataaaaaatatttacttagtacaaaaaaaatcaataaatgaagaatagaacaaagaagatatgaggcatttagaaaacaaaaagtattatagcgtgcttaaattcaattagattattaataaaaaattgtgaatgaaatacataatctaattaaggcagagattgtcacactagctaaaaatcaagatgtaattatatgtcgcctaaagagacamattttagattcggaagtacaaatattataaagcagaagtaaaaatagggaaatatatatatcatgcaaataaccattagaaatttgcagtgtctatattaatatcagccaatttgattgtataaagaaaaatgtaaatggaaattcaaaagggtatataatttcacaatagggtcaacttattgggaagttataacattgataaacttacatcaaacacctgagtcccaaaagatgccaagcaaaggcagatgcaattaagggcagaaatagataattcaacaatagtatctggagacttcagtatctgccattaagtaatggatagaagaactcattaaaagatcaacaagggaatt

SEQ ID NO: 666680 - DNA, 588 bp, Homo sapiens
aattaaaacattgcaataaaaaatatttacttagtacaaaaaaaatcaataaatgaagaatagaacaaagaagatatgaggcatttagaaaacaaaaagtattatagcgtgcttaaattcaattagattattaataaaaaattgtgaatgaaatacataatctaattaaggcagagattgtcacactagctaaaaatcaagatgtaattatatgtcgcctaaagagacacattttagattcggaagtacaaatattatamagcagaagtaaaaatagggaaatatatatatcatgcaaataaccattagaaatttgcagtgtctatattaatatcagccaatttgattgtataaagaaaaatgtaaatggaaattcaaaagggtatataatttcacaatagggtcaacttattgggaagttataacattgataaacttacatcaaacacctgagtcccaaaagatgccaagcaaaggcagatgcaattaagggcagaaatagataattcaacaatagtatctggagacttcagtatctgccattaagtaatggatagaagaactcattaaaagatcaacaagggaatt

SEQ ID NO: 666681 - DNA, 608 bp, Homo sapiens
tgtcaaccaaaatgagtgtaattagacaaaaatttttttttaaagaaagaatgaagaggctgttttgtttttgttttgtttttgtttttgtttgtagccttgtcagtaaatccttaaacctgtttccatttgaattgctaaatcattatgtacaatgagcttgggtgtgtttaaytgagctcaacaaactttctttggatcattgaatgcctactgtgccagattctcagcatgtgtggtgtgtacgtgtgtgcatgtgcacatttggactggttgttgtagtctgcactttcaacaaacaaggaaatatctggaaaagtttattaccctatggatggagtggagaacagagaaggagtacatgggaatagctggggtcaggttagaagtgcttttctcctttctgaaagccactgctctttaaaaaaaaaaaaggtggatatcggggtgaatattgtactatttttaactcacttcatatacagaagtcttcagactttgggaatcatttaaaacaactgaagcttgtgaatgcagatagctggcccttatatccatattttgattcagtaaatccaagtggagcctgggaatctaatttttaacaa

SEQ ID NO: 666682 - DNA, 609 bp, Homo sapiens
ctttcaacaaacaaggaaatatctggaaaagtttattaccctatggatggagtggagaacagagaaggagtacatgggaatagctggggtcaggttagaagtgcttttctcctttctgaaagccactgctctttaaaaaaaaaaaaggtggatatcggggtgaatattgtactatttttaactcacttcatatacagaagtcttcagactttgggaatcatttaaaacaactgaagcttgtgaatgcagatagctggcccttatatccatattttgattcagtaaatccaagtggagcctgggaatctaatttttaacaaataccttctgggtgattcttatgcaggttgtcctgaattttgcaattgaaaacttgcttaagggcccacttctgacccctaagtgtagaaattgaatgcaatttaaagcatttaatagaactcttatgggcatcctgatactgtactcaggtccagggatataaagttaagtaaatatctagtaggcggagaggagtataaacayacacacacacattaacatgatacatactgtgagagtgatagaaatttgtccatcaggtatggttgtaagaaagttacagatacc

SEQ ID NO: 666683 - DNA, 615 bp, Homo sapiens
aaaacctaccgaacatcatagcttaacctggcctaccttaaacgtgctgagaacacttacattagcctacagttgggaaaagttatctaacataaagcctattttatagtaaagtgttgaatagctcatgtaatttattgtgtacagtatactgtaaaatacagtattggttgtttaccttggtgattgtgtggctgaytgggagcttgttgaaaaattagctttttattgcataaatcagatgacatcactccttttccctgccattatggtattcccagtgcttaatgcagtgactggtacttagttggttgttaataatatttgaatgtataatgaatgagtgaataattaataaatatctatgtagtagtgcacttagaataaatatctatagagcattctttaaagtaaacataaaaaagcacagctaatgagaaaattccttctgtgttcttttctaagagtgaagagaagacatttatgtggccaagaaacatatgaaaaaaagttcatcatcactggtcattagagaaatgcaaatcaaaaccacaatgagataccatctcactccagttaaaatggtgatcattaaaaagtctggaaacaacagat

SEQ ID NO: 666684 - DNA, 615 bp, Homo sapiens
aaaacctaccgaacatcatagcttaacctggcctaccttaaacgtgctgagaacacttacattagcctacagttgggaaaagttatctaacataaagcctattttatagtaaagtgttgaatagctcatgtaatttattgtgtacagtatactgtaaaatacagtattggttgtttaccttggtgattgtgtggctgattgggagcttgttgaaaaattagctttttattgcataaatcagatgacatcactccttttccctgccattatggtattcccagtgcttaatgcagtgactggtacttagttggttgttaataatatttgaatgtataatgaatgagtgaataattaataaatatctatgtagtagtgcacttagaataaatatctatagagcattctttaaagtaaacataaaaaagcacagctaatgagaaaattccttctgtgttcttttctaagagtgaagagaagacatttatgtggccaagaaacatatgaaaaaaagttcatcatcactggtcattagagaaatgcaaatcaaaaccacaatgagataccatctcacwccagttaaaatggtgatcattaaaaagtctggaaacaacagat

SEQ ID NO: 666685 - DNA, 518 bp, Homo sapiens
ccaggcaccactggggtataaaaagaaagtcctgcagctagctctgtttctgcccaaacggctgcccagttttgtgcttcaaacccagggccctggtggcataggcattggagggaatctcctggtctgtgggttgcaaagaccatgggaaaagcatagtgtctggggctggagtgcacctttcctcaaggcacagtccctcagggattcccttggctagccgagggagttccccaaatcctcgcacttcccaagtgaggcgatgccccaccctgcttcggctcgccctttctgggctgcacttactgtctaaccagtcccartgagatgagcttggtacctcagttggaaatgcagaaatcacctgcattctgcattgatctcgctgggagctgcagaccagagctgttcctatttggccatctggctagccaccttactgtatgtatctatttttatactggtaccatgctgttttggttactatagccttgtagcgtaatttgaagtcaggtaat

SEQ ID NO: 666686 - DNA, 615 bp, Homo sapiens
aactcctttaatagccacttacattcaatttcctgtggcctagacattagctacctgaatgagaagggatcagttttagccaattaaagctcatgaagggaaaacagacaccacccgtaagcaaaacaagaactgtggattaaaaatagaaaatgaatggtgtacctgcaaatcagtaagtgttgtgctttccataaacatttaattatatgtttaaaaagtacattttactaaataagttactaattttaaatttyaaaatagttaataactgtaactattttatatcactctcttttgttaaacagcttagagttaaatttatactccacatttgaccagcgtgcagtgtttggggcattcatttttatgtttgaatctcagtgctatttaataaccaaatatttttccttcctttgcctggcagtcctcacctatttcaaatttaaagaaaatctgtttaccagcatatctttgtagtccaaattatatatttcaaaataagcagggagggtaattagatggataaatagaaggtgagtgcatttctgaggagtttgtgaagccgaaaagggtacaggtagggaatgaaatgagcattccagggaatagtag

SEQ ID NO: 666687 - DNA, 541 bp, Homo sapiens
gagcttatatgacaaatataagtttatttatactgctttttttaggcataatctttgatgagacattccccaacatttcatacatgatcatgaatattgatcttttcttttgtaattgaaatcaattggctcaagtctcataaaaatatgagtgaagctaatgtcttgtagcttttagtccaatagtggtttcaaaatgtgtctcatcaattttaattttgtgaagtttttctcatatctaggatttagtattagcatttgcacggtagagtttcaaagatgaaataatacattaaaataatcaggtaattttgtaattctgctgcccaaaagttgcaacagaccaggcacagtggcatatgactgtaatcccaaatctttgggaggccaaggtgggaggaccacttgaggtcaggagttctagaccagcctggacatcataacaagacccccatctctaaagaaaaataatagtctggtcaacttatatggcagcactttcacttgartatataaaaatatctaaatgaaatttttgcta

SEQ ID NO: 666688 - DNA, 561 bp, Homo sapiens
tgtggccccaacatgggtgagtaggagcagttaacttcttttggttaatttatgaatggaggtggcatgtcacttctgagctggagcattgactagctggtgccaggcccttcagagtttccctctggaacagtgaccaacaacactgaagatggtggctgcttcctgagggactgcaatgatcagagccccctgctgacgatggacatgcattggagttcagccacttacatgtcacagcacaacctagcctgctataactaatgtaattgtttatattaatcagaactcttatatttgtaagtgtagaaacccaattctaacataagccaaaaaaaagaacaagggtgggggttattggaaaaggtactggagtctcatasaatccaagagtaaggcagcagctgaagaacagaaccagagtgtgaagctctttaggaacttaggtagtcttttccctcccactctctgtcatgctttgtggcatgtgtttgcttcattttgtctcgcttcagtccagctttctctatttcccaggccacctggtagaaaatggctgct

SEQ ID NO: 666689 - DNA, 574 bp, Homo sapiens
cttctatcctaggcagatgtgtggtatctaaaggtcatggcattgtcactgcacaattcttgcagaaagcaaggctgtgctgtgtgaagcaaaatgtcgcaacaaagtctgccatcattccaaatccttcatgtgataatttctgaattaaagtgttattataatgaggaaaaatgaggaaatggcaaattttcttaataaggaaaatagtagaaccatgagcctgtgaaattaataagactttataaatgcaatatatttacaatgaaaatctcatgcaagggaaatatttaaattacatgaaatccttgcacagaacagcaatgataaatatatttggatttaatggcatgtactcatcaaatactcatatctgtgcatcatataaaacatttatatacaattacatttgtcaccaatgcaggcggttgatagctcagtaactcattctatgtcattgattcagaacaatgatctttaaatattacctacatggtagctctgcaggggttttaaatgartaacgttattataacttctaagtgtttatggggaacatgcaatgtaattcaac

SEQ ID NO: 666690 - DNA, 561 bp, Homo sapiens
aatcatgcaactcactgcgctgccactgctgctggcacatgaaaacaatcatgaattctgctgccattgcccaaagaaacacttcggttgccaccccccggcrgaatgttctggccagcagtcaaggaacatctcagcccctccagccagcagatttctaaccttgaggagccagagaacaaatttaggggccagtactaagcccccagagtaagaatatgcagcccaggacttgcccctttaaaattttccagaaacaaagccagtcaactaaatctgccttacactacaatcaaactcctgaagacgtcaaagaagataaaagcaaaaagcaaaataaaaaaaatgaaaaggacagtaacttcaaagatggaaggaacatcagcctgcaaagatgaaaaagaactaatgtaagaactctggcaacacaaaaagccagagtgtctgcttaactccaaatgatcacactagttctccagcaatggttcttaaccaggctgaaatgtctgaaatgacagcaacagaattgagcatatgtataagagaacaaagatcatcagc

SEQ ID NO: 666691 - DNA, 616 bp, Homo sapiens
atagcatgtagctctttgtgtttgacttcttttgctcagtggtatgtttttgacattcatcaatgttttggggatgtcagtagattgttactttctattgacaagcagtatgtcattatatggaaaagcrtattttgtttattcatcgatgggcatttatgttgttgccagtgtttggctattgtgaataactactatgaaaatttgtgggcataagttttgtgtgggcacatgttttcatttcttttgggtagatacttacagtgaaattgctgggtcatatgataagtgtaagcttcgatttgtaagaaactgccaaagtgttctccaaagaggttctatcattttatattcctatcagcaatgcacgagcagtccagcagctctgtgtcctctctaatatttagtatggtcagtcttctttattatagccattctacttgctataatttaagtagcatctcattgtggttttaatttttgcatttcttttaggactaattatgtggagcatcttttcttatgcttattggccatatgcatatcttattttgtgaaatgtctgtttaaatctttgcccattttaaaattattttgctgattttcttactgactt

SEQ ID NO: 666692 - DNA, 591 bp, Homo sapiens
tgagttacttcccttctcaagccccctactctctccttcagatctacatgttactgtctcaggccaggttccctgaccatcttgtttgcagtgacaactgttgccccccacctctaagtactccctaccccacttcccgttttatatctgatcattagcatttgtgatggttaattttatgtttcatcttgactgggtcatggggttcccagatacttggcaaaacgtcatttccaattctgtctatgagtggatcaccctcctcaatgggctgttgagggctttaaggcagaggaagggagaatttggccttttttttttggagacagagtctcactctgtcacccgggctggagtgcagtggtgcgatcttaactcactgcaacctctgcctcccaggttcaagcgattctcccgcctcagcctcccaaatagctgggattacaggcacatgccaccatgcccagctaatttttgtatttttagtagagatgrggtttcaccatattggccaggctggtctcaaactcctgagctcaagtgatccacttgcctcggccccctaaagtgctgggattacaggcgtgagcc

SEQ ID NO: 666693 - DNA, 551 bp, Homo sapiens
aatttaaaattttctagatgctacattaagaaacactaaaaagaaacagatgaaattaactttgaatatattttatttaacctgatatatgtaaaatactgtcatttcaaaatataatcaatataaaacatgattaataagatatttttacattctttttttgatagtaggtgtccaaaatccaatgtgtatttcttttttttttttttttttttagatggagtctcattcttgttgcccaggccggagtatagtggcttgatctcagctcacttttacctcggcctcccaggttcaagtgattctcctgtctcagcctcccaagtagttgggattacaggcgtccgccaccatgcccagctaatttttttttgtccatatttttagtagagatgggatttcaccatattgkccaggctggtctcaaactcctgacctcaggtgatccacctgcttcagtctcccaaagtgctgggattacaggcgtgagccaccatacccaggcttccagtgtgtttttcatatgcttacagtgcttattatttagacta

SEQ ID NO: 666694 - DNA, 577 bp, Homo sapiens
ccctccctgccatcttcctgtccctcacctgttgctggagggttcaagagggtctaccgatgcctgtgggatgccagccacagctggtgtccaggtttttggcaccacagtgagaaagaattcagggccgagtccgtgaagtgraaagccaggagctttgattgcaaagcgaaagctcacacttaggacagaggtcatgcacaaaggagtttgggtttctaactttatgtgctcttctaattagggggtggaataatcatgtggttttctagggaaaaggcggagatttcctagaatgggggtgccatccattttcatactaaatatgggcatgctcagagctgccatacacccagcctcattttaaaaattggttcttcttactctgcaaaattaatggctgagtaatcattcttggcaatctcaataccagatttgttggtgacaatgaaagccttgagggacacggccttttctacatgagtttggactctataagcaactcttcagtggcttttttgtttttagcattttactcacatccttacttggtgaactgaactgtggattgtgccat

SEQ ID NO: 666695 - DNA, 575 bp, Homo sapiens
ctggagggtgagccaaaaggtggactttggtgggcgtgttgtttcagccccacccaaatccttgctctttggaagaaatgtggccagaggcacagactcctttaagtaaatctgagcatagtagagtgggcacacccattttattcgctactgaagtttcatttcactacttgccttagagacatgaattttgtacggggccaccatggttgcaatagtggcagatcctgaacaaacctcttatttcctcagccaccttgtgttcccccagcacttggctgagatgaatgtgatattttcacaaggaaacaaaaaaggaacaacaaaactaacaaacagattgcaaaagcatagaaatrgatgttgatctatctcagataatgttttatggctaacgtgtagaaatatattagtgaaacagtcaaaacctaaataacaagaggaaaagaacacatactcccacaagcaggcacacacacacacccctaccaaaattatatacagttgaattagaaatgcttcagaaaacatttattcataatggttaaatttataaaacactatatccagtagtc

SEQ ID NO: 666696 - DNA, 626 bp, Homo sapiens
gtaccaagaggtggcctgtcatctttttccttttgttgtactgggagaaaaaaaaagcaaatgagtctccttgagagcagttctcatttctgtttcaagttcccccaacaagtcattaaacattctctgggttttgtcaacagcctggtaaacatccagagaaagaatcaaaataagattgtttatttaacattcttcagctccaactgctgattagggtaaatagtttggataaaactcctatatgatccaaaaatcacaaaaagaaaacattagctattgggcaagtttagaatgagttagaaattctttaaacagcacagacatttttrcacactttgatattttcttcatcttctactcatcttgtgaaggcaatgtcagagctaaacatgaatgttgaacaaccactgagaaagctccttggaatctaagtgaaaatgcagagagtgatttccagaacaagctataggctggaacacctaaaactcagtgctgctctttaagtaactgaaagaagttgagtcaaaatagcactttccaagggctgccttttcagactttgggcaaaatttgtactgattctacttatctccagagaacccaataatttagccaaaagagaa

SEQ ID NO: 666697 - DNA, 551 bp, Homo sapiens
ttgtcaatcgtcaaaggggacgatccatcaggaagagaacaaacaccttaaaaatagartagtgactggaagtgctgcggtacaaggagtatcccactttagaatcttgaaggtggactttcaaggcaaaatcatgaatgagctgtgtgaccttgggcaagacaacctctctgagccacagttaatctctgaaattgagacttagatcatctttaaggtcccctgaagtttgaatcataaaatgggatggcaaaggagtctgaaggtctcccaccatagttccaagtctgtcggcccccactcctgagctcatttcagacactaagaggaaagttaagggtttgcaaaaagaagcaggggagtgggattttaaaagaccccccccccccaaatttctgttttctggattcttcccccaaacattgattctaaatcttagaggaggttgagtgggaacctcttggacttgtattttcttagaaaggggagtttgctatgcatgcaagctttcccagtgattgtatcactgccagaattccttcttatgtgga

SEQ ID NO: 666698 - DNA, 551 bp, Homo sapiens
ttgtcaatcgtcaaaggggacgatccatcaggaagagaacaaacaccttaaaaatagaatagtgactggaagtgctgcggtacaaggagtatcccactttagaatcttgaaggtggactttcaaggcaaaatcatgaatgagctgtgtgaccttgggcaagacaacctctctgagccacagttaatctctgaaattgagacttrgatcatctttaaggtcccctgaagtttgaatcataaaatgggatggcaaaggagtctgaaggtctcccaccatagttccaagtctgtcggcccccactcctgagctcatttcagacactaagaggaaagttaagggtttgcaaaaagaagcaggggagtgggattttaaaagaccccccccccccaaatttctgttttctggattcttcccccaaacattgattctaaatcttagaggaggttgagtgggaacctcttggacttgtattttcttagaaaggggagtttgctatgcatgcaagctttcccagtgattgtatcactgccagaattccttcttatgtgga

SEQ ID NO: 666699 - DNA, 551 bp, Homo sapiens
ttgtcaatcgtcaaaggggacgatccatcaggaagagaacaaacaccttaaaaatagaatagtgactggaagtgctgcggtacaaggagtatcccactttagaatcttgaaggtggactttcaaggcaaaatcatgaatgagctgtgtgaccttgggcaagacaacctctctgagccacagttaatctctgaaattgagacttagatcatctttaaggtcccctgaagtttgaatcataaaatgggatggcaaaggagtctgaaggtctcccaccatagttccaagtctgtcggcccccactcctgagctcatttcagacactaagaggaaagttaagggtttgcaaaaagaagcaggggagtgggattttaaaagaccccccccccccaaatttctgttttctggattcttcccccaaacattgattctaaatcttagaggaggttgagtgggaacctcttggacttgtattttcttagaaaggggagtttgctatgcatgcaagctttcccagtgatkgtatcactgccagaattccttcttatgtgga

SEQ ID NO: 666700 - DNA, 567 bp, Homo sapiens
aatcttcatttaatcgtttattttatgccaagatagaaacaaaaagttttgagcataagacattgtaatacaatttaaagttattattttgatcattgtttttcttttgaaagcagtattttcaggttatattccttctgaaagaaatacagaggttacgtatactttattttcctctagcatttaaaattattcatgtttgtatttgtyttggcttgttctgctttctttccattcacgtcatctgtaatgcaaagcctgtcatagtggcatgaaatgcattccttagaacataaaccattttagaaatatcttttgtagccaaagataaagcaaaaaacaaaacaaaacaaaacaaaacaaaaagcgtaaattaacattttaaataagaacactttaaaatcctgaatctacttttgggtatgctttagacttagaagattcaagaagtaaaataaaataccattgtttaatttattcttcacctttcaaataaatttttggaaaatgtgatttttttcccattttgaattaaaaatctcaaataggatatctttttagaagtaa

SEQ ID NO: 666701 - DNA, 567 bp, Homo sapiens
aatcttcatttaatcgtttattttatgccaagatagaaacaaaaagttttgagcataagacattgtaatacaatttaaagttattattttgatcattgtttttcttttgaaagcagtattttcaggttatattccttctgaaagaaatacagaggttacgtatactttattttcctctagcatttaaaattattcatgtttgtatttgtcttggcttgttctgctttctttccattcacgtcatctgtaatgcaaagcctgtcatagtggcatgaaatgcattccttagaacataaaccattttagaaatatcttttgtagccaaagataaagcaaaaaacaaaacaaaacaaaacaaaacaaaaarcgtaaattaacattttaaataagaacactttaaaatcctgaatctacttttgggtatgctttagacttagaagattcaagaagtaaaataaaataccattgtttaatttattcttcacctttcaaataaatttttggaaaatgtgatttttttcccattttgaattaaaaatctcaaataggatatctttttagaagtaa

SEQ ID NO: 666702 - DNA, 632 bp, Homo sapiens
gtgattataaatttaaaaatgtgtgatatcccattcaacacagatgttggtcagattttgcttaaataatcaaatttcctttttggtagtctctgtatcttgtatatgccttggaagatagacagagagagaggcagacagacatatatagacagatagatagataacctgtcaacactgttagactgtgacttccgtgacaacgaggatgataccgtactaaagactctatcatgaaggcctrttacagtgtctggaacattaatgttctgtactcatatgtttgcagactgtttgttggaggaagtaggggagaaagagagagaaactgtttcttgattggatatctataacaacaaattcttagccagaattgaataacacaaaacaaatctggttaattttcttatgactcacactcgtcacattttttaaaaacaggtatcacacatccttttagtgatttcccaagctaagtaacatttctttacataacatagtttctaaaacctttaacatccaaattttggcattctggatgtcccctggacttattgaaattttgttaaaatataataacttaaattaactcacacaatacacccctgttacgatcagtatagaattaaact

SEQ ID NO: 666703 - DNA, 636 bp, Homo sapiens
tactctattttcacctgaagtccctgacatcattttctcctggctgtctgcttagtctgatttctctttaaggtgggcttcttccttttgcccaccctagtcctctggaaaaagtcctaggtcattttattttcctatccaacaccctttccctgaatttcctgtcccttccatctggtaagtgaccgcaggtagtctgatctgtcccagatttacacatctggtccacatctcttagctgagccttggattcaaatgttctattgccaataagatgtatcaattatgtatctatcaaagtaaygaatgaatcacaaaattaactggtttcttacccccaacattttcattttattatgtctacattgcatcaaaaactcattagcccattcaccaaagctggaaacccagcagccatcttttctcttgatctctaaatcccacacctagtcatttcatgcagtcctaccactgctctctctgaaatccatctactactatgtgccactgctttatcaaattatgagaaaaacacagtttacgaagttttaatatgcagatttacattttggggtaagacccctggtccctatgttagccttccatatgtccatccatcatacatgagtttttcat

SEQ ID NO: 666704 - DNA, 574 bp, Homo sapiens
tcacttaaaaatttctaatatgtacaaaagcagacacaataacagattccatacatttttattaaaaawcaaaactagaaatttctgctccaagatggccaactagatacagccaggaggaacatctcccactgagggactgggacaccaggaagactggcacactcctagcagatcttcagagggagggcatcgagagcagatggagggaaaacacagagctggggctgaagggggaggaagctggggaccctgctcggggctaccaagcaccacaacttgttcctggcccccaacaactcctgcagagggggaagttgaaaaggcaaggaacaaaattcgctctccccacaggccgctggaatcctggtaggaaggaacccctggaccaccatggacatttgagttgtcagggaaagctgcttagggaagcagtggaagcagaactccagctggggcagagcccagagagtttggtatgggagtgtctatagcggagcatggccaaggatgcccatccccttaggctagacttgctcccataggagactttatccctaggggaactgtggga

SEQ ID NO: 666705 - DNA, 597 bp, Homo sapiens
atacccagtagtgggattgctggatcaaatggtagctgtacttttagttctttaaggaatgtccacactgttttccatagtggttgtactagtttacattcccaccagcagtgtagaagtgttccctcttcactgcatccacaccataatctactatgtgttttttttttatttttttattatggccattcttgcaggagtaaggtggtatcgcattttggttttgatttgcatttccctaatcatcagtaatgttgagcatttttacatatgtttgttggccatttgtatatcttcttttgataattgtctattcatgtccttagcctactttttgatgrgattgtttgtttttttcttgttgatttgtctgagttcattgtagattctggatattagacctttgtcagatgtatacattgtgaattttttttttcccactctgtgggctgcctgcttactgttccttttgccatgcaaaagctctttagtttaattaagtcccacctacttatctttgtttttattgcatttgcttttgggtccttggtcgtgaaattcttgcctaagacaatgtctggaagggtttttttgatg

SEQ ID NO: 666706 - DNA, 597 bp, Homo sapiens
atacccagtagtgggattgctggatcaaatggtagctgtacttttagttctttaaggaatgtccacactgttttccatagtggttgtactagtttacattcccaccagcagtgtagaagtgttccctcttcactgcatccacaccataatctactatgtgttttttttttatttttttattatggccattcttgcaggagtaaggtggtatcgcattttggttttgatttgcatttccctaatcatcagtaatgttgagcatttttacatatgtttgttggccatttgtatatcttcttttgataattgtctattcatgtccttagcctactttttgatgagattgtttgtttttttcttgttgatttgtctgagttcattgtagattctggatattagacctttgtcagatgtatacattgtgaattttttttttcccactctgtgggctgyctgcttactgttccttttgccatgcaaaagctctttagtttaattaagtcccacctacttatctttgtttttattgcatttgcttttgggtccttggtcgtgaaattcttgcctaagacaatgtctggaagggtttttttgatg

SEQ ID NO: 666707 - DNA, 606 bp, Homo sapiens
cacagtggctcatgcctgtaatgccagaactttgggaggtttaagcaggcacatcacttgagcccaggagttctcaaccagtctaggccatatagtgagaccctatctccacaaacacacacaaaaaataaaaaataaataaaattagcccaggtgtggtggtgtgcaccttttttttattccagctactcaggaggctgaggtgggaggattgcatgagcctagggaagtcaaggctgcagtgagctgagatcgcaccactgcartccagccagggtgacagagcaagaccctgtctcaaaaaaaaaaaaaaaaaaagaataaaaaaaatgtttttgcattaagtaagggtttttggaagctatagttttacttaagaatggaatactttatctcccatttttgcagttcttttttgtatggactaaagtgattcctaaaggggacattcggctaatttcatatagtggaaggacaattcattataaatataattttgtgttgtctttaaaggttatattgcttaagaatcaaagtgtctagaaattggattagtaatctagtttaatactttgaatagtaattttttatcatgagccttagaat

SEQ ID NO: 666708 - DNA, 423 bp, Homo sapiens
ttattgctcaaatttaataatgtccattaattttggaagaaaagtaagcatggttcagtggagaagtgtaatatgttttaaggttgtaccaagtggatgcagcaaaggaccttgagtatggctgtggaccttaggtagattttagagggcttactaaaacacaatggtaaattttgtataatgttcatgcatgagtttttatagttttcaacagaatctcaaggagggtcatgaccagataaggttaagaactaacatgactagagacagaaaagagaaataaaataaattgatgcttgataaaggtgattcttgcttaatggctgctttggctttatagggacaaagttaattataagactcttcaaggaaactattagaaattggatgattttatatrtatattttataaatttataaatt

SEQ ID NO: 666709 - DNA, 583 bp, Homo sapiens
tagcttaatttgggaagtttggtcatctccatgatattacctcctgcaatccatgagcatgggatattttccatttgttgatgtcatctatgatatcttttatcagtgttttgtagttctcctcgtagagatctttcaccttctttgttaagtgtattcctaggtattttattttgttgtggctattgtaaatgggattgagttctttatttgggtctcagcttgaggtgataatttgtgtatagaaaagctactgattttgtgtaggttgattttgcatcctgaaactttactgaagttatttattaagtctaggaatcttttgagttttctatgtgtaaaatcatgtcatcagtgatcagagataatttgacttccccttttcctatttggatgtgttttatttatttatctttttcttgcctgattgctctggctgagagttccagtactgtattgaatataaatggtgatagtggacatccttatcttgttctgcttcttagggagaatgcyttcaacttttccccattcactatgatattggctgtgggtttgtcataaatagctcttattattttga

SEQ ID NO: 666710 - DNA, 595 bp, Homo sapiens
gtactcaagtcaaagtttgttatctgatcacgatagaaataaattagaaatcaataacagaaaatctctggacaagcttgaaatatttataaatgaaataacacttctaaatagccatgaatcaaaggagaagttaaacaggaaattaaaaattattttgaactgaatgaaatgaacacctaatgtatygatattcatgggatacaactaaagcagaacagtagggaaatgtatagcattaaagacttatattattaataccaaaaaaattctcaaatcagtgacatgttttcaccttaacaaacgtcaaaaagaagaacaaaatagactcaaattaagtagaagaaagggaataaaagtcaaaatagaaataagtgaaataaagacagaaagtcaattgagaaagtaaatcgaaccaaaggttggatctatgaaattatcaatataattgataagcctttaggcaaaatgatcagcaaagaaagaagacaaattatcaatatctggaaaaaggtgatatcagtacacattctacaaatattaaaaagacagtaagggaaaattgtgaacaacttgatgcaaatacatttgacaa

SEQ ID NO: 666711 - DNA, 595 bp, Homo sapiens
gtactcaagtcaaagtttgttatctgatcacgatagaaataaattagaaatcaataacagaaaatctctggacaagcttgaaatatttataaatgaaataacacttctaaatagccatgaatcaaaggagaagttaaacaggaaattaaaaattattttgaactgaatgaaatgaacacctaatgtatcgawattcatgggatacaactaaagcagaacagtagggaaatgtatagcattaaagacttatattattaataccaaaaaaattctcaaatcagtgacatgttttcaccttaacaaacgtcaaaaagaagaacaaaatagactcaaattaagtagaagaaagggaataaaagtcaaaatagaaataagtgaaataaagacagaaagtcaattgagaaagtaaatcgaaccaaaggttggatctatgaaattatcaatataattgataagcctttaggcaaaatgatcagcaaagaaagaagacaaattatcaatatctggaaaaaggtgatatcagtacacattctacaaatattaaaaagacagtaagggaaaattgtgaacaacttgatgcaaatacatttgacaa

SEQ ID NO: 666712 - DNA, 595 bp, Homo sapiens
gtactcaagtcaaagtttgttatctgatcacgatagaaataaattagaaatcaataacagaaaatctctggacaagcttgaaatatttataaatgaaataacacttctaaatagccatgaatcaaaggagaagttaaacaggaaattaaaaattattttgaactgaatgaaatgaacacctaatgtatcgatattcatgggatacaactaaagcagaacagtagggaaatgtatagcattaaagacktatattattaataccaaaaaaattctcaaatcagtgacatgttttcaccttaacaaacgtcaaaaagaagaacaaaatagactcaaattaagtagaagaaagggaataaaagtcaaaatagaaataagtgaaataaagacagaaagtcaattgagaaagtaaatcgaaccaaaggttggatctatgaaattatcaatataattgataagcctttaggcaaaatgatcagcaaagaaagaagacaaattatcaatatctggaaaaaggtgatatcagtacacattctacaaatattaaaaagacagtaagggaaaattgtgaacaacttgatgcaaatacatttgacaa

SEQ ID NO: 666713 - DNA, 613 bp, Homo sapiens
tgacacatgcatgtgaatgttctttgtagcactattcgcaatagcaaagacatggaattaacctagatgcccatcaatgacagattggataaagaaaatgtggtacatatacaccatagaatactatgacgccataaaaaagaacaacatcatgtctttagcaggaacatggatggaactgtaaggccattatacttagcaaactaatgcaggaacagaagaccaaataccacatgttctcacttgaaagtgggagctaaataaagaaaactcatgaacacaaggaaaggaacaacagaccctggggtctacttgagggtggagggtgggaggatagaaaggagcagaaaacataactgttagatactgagcttaatacctgggtgatgaaatattctgtaaaacaaactctsgggacacgagttgacctatgtaacaaaccttcacatataccttcaaacctaaaataaaagtttaaaaaagaataaatgagcttgaaaaaatgctattcataaagaaaagaaaatagaacttgatctttttcttgcaccatgtacaaaaaactaaactctaggtggattaatgactgaaatataatttaagcctcagtgag

SEQ ID NO: 666714 - DNA, 551 bp, Homo sapiens
cacaatctactttagtcctcaaagctctggttgattcaatttgatgctatttttgccacagtaagattcacatttaaaaattttgctatagatttgttatgtgaggaaaaacacaaacatggtgctcttgaattrtaataactatgagtgcctttcctagtctatttcttagaaaacataacaaaactcacaattttgatgtattagtattgtggatgacttttttcttattgtcttttcaaagcaatagacaaatagctaaactacatagtttttttaaaaaggatatttaagatgtcttaagtgagtttgcttttctgaattatactttctctccatgagcatgaaaaataaggaactgactatattcaatgtattggtgatgcatattagaaaaagacacattcatgcatttgaatataacacattgtgttttgaaatttatctggtcttaagtgtctttgtccataagcatctaaaattaacttgacttatctattttctaatagattttatcagtgttggataacttacacatattatttagtatt

SEQ ID NO: 666715 - DNA, 551 bp, Homo sapiens
cacaatctactttagtcctcaaagctctggttgattcaatttgatgctatttttgccacagtaagattcacatttaaaaattttgctatagatttgttatgtgaggaaaaacacaaacatggtgctcttgaattgtaataactatgagtgcctttcctagtctatttcttagaaaacataacaaaactcacaattttgatgtattagtattgtggatgacttttttcttattgtcttttcaaagcaatagacaaatagctmaactacatagtttttttaaaaaggatatttaagatgtcttaagtgagtttgcttttctgaattatactttctctccatgagcatgaaaaataaggaactgactatattcaatgtattggtgatgcatattagaaaaagacacattcatgcatttgaatataacacattgtgttttgaaatttatctggtcttaagtgtctttgtccataagcatctaaaattaacttgacttatctattttctaatagattttatcagtgttggataacttacacatattatttagtatt

SEQ ID NO: 666716 - DNA, 543 bp, Homo sapiens
gacagggcaaatatgcctttgatataccgatttcccttcttttgggtatatacccaccagtgggatagwggatcatatggtagctctatttttagttttttgaggaacctccaaactgttctccatagagggtgtactaatttacattccaaccaatagtgtacaagggttcccttttctccacatatttaccagcatttgttattgttttaggatataagccattttgactggagtgagataacatgtcattgtagttttgatttgcatttctctgatgatcaatgatgttgagaatcttctgatatgcccggttgctatttgtatgtcttcttttgagaaatctctattaaaatcttttacctattttttaactggcttattggatttttttcctatacagttgtttgagttcctaatacattctggctattaatcccttctgagatggatagtttctttgcaaatatttcctcccattctgtgggttgtatcttcattatttcctttgctgtgcagaagctttttaacttgatatgatcc

SEQ ID NO: 666717 - DNA, 437 bp, Homo sapiens
ggtacactaattttagacaaagctgacaccacagcaaaaaaaagttatcagggataaagaaggacattctataaagaaaaaggagccaagtcttcaagaagagataacaattcttaatgtgtatgcatctaacaagagagtatcaaaatatgtcaggcaaaaactaatagaagtgcatagagaaatagatgaatccaccattatagttggagattaccgtaccactctatcagaaatgaacagatctgcttgagcytgagatgcagaggttgcagtgagccaagattgcaccactgcattccagcctgggtgacagagccagaccctgtctcaaaaaacaaaacaaacaggctgggcatggtggttcatgcccataatcccagcactgtgggaggccgaggctggtggattacgtggggtcaggagtttgagaccag

SEQ ID NO: 666718 - DNA, 573 bp, Homo sapiens
gttcatttgttggggaatactggcatcttttacagcttaaatgtcagtgtccatgtagttctctggttttgttatgttttgtcccacatatcatttcttcctgtattttagtttaccatattaataggttctctctctctctctgtctctctctctctctctctmtatatatatatatataggctctctcttttgcgctctctatatatgggcttattacagaattaaatataattaaataggatctgatcaacttacatattctgatcaagggcggggacgaacatgtttttttcatggctagagcacccaaatgccatttttatctgcttcaacataattggttgaaggaatggaagactttatttttgagggatttgttatgtctttacagacaatacttacaaaattttgtcgttttcacattttaaggttttctgatgcttcactgttatgcaaatcagcttccggatgtatctaacacatgcttgctgattttctagtagccttagattacttacagctggataaaataattacctggatatgctttgctagcaatgtcatcattga

SEQ ID NO: 666719 - DNA, 580 bp, Homo sapiens
ggtttcattttgtcgggggggtgtgtgtgtgtgtgtgtgtgtatgtatgtatgtgagtgtgtgtgtgtgtgtgtatgtatgtgaatgtgtgtgtgtgttcctattggaaatgagtttttgaagttatacttttgctaatactgaaagattagtgatgatgacataattgacatgttgaatgttgagtctagttgtacactgaygtcaaaaaaaaaagagagtgaagaaagctccaatcttggaagcttgttgacccttagctttacaggttgtcttactacattgtctcaagccctaggtattttgattggtgaacaggtgtgctggacttgtatttttttaatcacatttaaaatgattaatagttcatgtaaattactgttgttatagggttaattccagtgctgacccatgagccaattttttttttttgcaatgcatctcaaattttaaaaactactttttaactattgaaacatcttacttgtgattctaccacggttctgataaaagttcatttccattttaatagtggaattgattatcttaattaatttaattttaattcttatcttcttgt

SEQ ID NO: 666720 - DNA, 537 bp, Homo sapiens
tttccagtgaactgtatatgcttttcatgtttcacagcttaccagatgttatctattcagagcttcagcatatctaggaggagtggattcagttaatctagtcttagccttgtatattttgtcataatttggtagaygtttttggcttgccttttccccatatttcagcatttgattatatattgatttggattaattttttcttgttagtctttttttcttttcaataagattatagaaaggcaagagtgatttcatattcttcaatagcttccccacactttgctcatcaccataaggttaggcaccaaatagtcaatatgtatctgcttaattactttacctgaaatgatctaaagcatattgacatgtaagacacccatagacttgtttctgtttctgtagctatataaagccagtaccagctatcacctaatccatgagtcacacatggcagtaatttaacaatattttttaaatgattaacaaaacccttttaatggaaatgaagagctcttcagaaaatgttgaaggact

SEQ ID NO: 666721 - DNA, 576 bp, Homo sapiens
tgtgaaagaagttgggaagtgtagtggttaaaatctaggcacattgccaccctcagtaatgccaasgttctgttagcaaggaggaaaggaaaagcaatattgatagactaggcaaccagcaggatctgccagtggacacgtatgcctttgtatgctgatcctcttccagaacctgctgtcacatctgctgagatcttcaggcaggaggagatccatcctttgtacattagcataggcttttagttaacatatgtaggagtaaatatgttaagtccccaaggagtctcctctaattgctgtttgtaagggaaacaggcaaggcagcttagtgtggtgtatattctgtcatttctgtattctccatacctcctgaggtctagataggacttcacttcttcaactcagtactccttattcattgcttatccaattgaatatgttaagaagtagacctaggaatatttactttttttactaatgaagtagacctaggtatatttacttttaataaatactcctgctctaaaaaatggtattttcaaattattgataatgtaaaaatggttagatatgcaa

SEQ ID NO: 666722 - DNA, 522 bp, Homo sapiens
tgcaacatggcaagaccccatctctacaaaagattwaaaaaaattagctgggcatggtggcacacacctgtagtccctgctgcttgggaggatggcttgagcctgggagtgcagtgagccaagattgcaccactgcactccagcctgggtgacagagtaagaccctatctcaaaaaaaagaaaaaaaaaaaaaagtttttcctgacacaaatcatttgaacaaacaatgtagtgaatccagtatcgaatccagtatctaatttcctcacaaacaaatacatgcttttccagtagactttctgtctctagtccttgaagccaagtcaaggggacaggaacacacctacctcctctaaacagaagttttaagagaaaacccacaagcaaagaaggactggaattccttcccttcctcctttcttgagcgtggcactttctcaggcagggggaagcacatcattcttaggatttcgaattgaacatcctggtctcaaaaacggattttagtgatatagcattcta

SEQ ID NO: 666723 - DNA, 522 bp, Homo sapiens
tgcaacatggcaagaccccatctctacaaaagatttaaaaaaattagctgggcatggtggcacacacctgtagtccctgctgcttgggaggatggcttgagcctgggagtgcagtgagccaagattgcaccactgcactccagcctgggtgacagagtaagaccctatctcaaaaaaaaraaaaaaaaaaaaaagtttttcctgacacaaatcatttgaacaaacaatgtagtgaatccagtatcgaatccagtatctaatttcctcacaaacaaatacatgcttttccagtagactttctgtctctagtccttgaagccaagtcaaggggacaggaacacacctacctcctctaaacagaagttttaagagaaaacccacaagcaaagaaggactggaattccttcccttcctcctttcttgagcgtggcactttctcaggcagggggaagcacatcattcttaggatttcgaattgaacatcctggtctcaaaaacggattttagtgatatagcattcta

SEQ ID NO: 666724 - DNA, 540 bp, Homo sapiens
gacatagaacagagtcagggagagaccaggaatgagtttctggttgtcctgtcctggtggatttgtgtggacagttcctaattctcccagcaatgatgtgtgatagcacacatggagtattgtcaacccggagggtcactgagccttggtggtcaaggattttgttggggggggtctgtcttgtaggtgtggaacacctacgtgggtaactttagttactcagtctgcagcccctcctgtagtcaaacttctgatacagtgtgacctagggcccygggtgaactagaacgggtgtttgccataaatcacattgttagcataaaactgtctagtgtggcccaaggccccaggtagaaaagcaaactcttactaggcaggatactccaagcacttagaggttatatcccaggagcttgtcaagagccaatcttttcttttctttagaatgtgtgtggtttgaaaacctcaagactgctaagttaaccctttactgcacaagtctcttgatacacagggaaatgaaatcccagttcaactgtc

SEQ ID NO: 666725 - DNA, 558 bp, Homo sapiens
cattatagactttatccagtgatcactaaaatgtaaatagtatgtatctgggattttctgttaaaggtaagagtgcttctcaaagcttgctcctttcaggcctatgctttctctaactattacactcaccttgttgcgggattcgggagtatgagggagacctcaggttgaagcaggagaatctttattgagtgtactcaggcccagctgactcacatccraaagactgggcccagaataaagacagtacttgacttttatacacacttcacaaacggaggtgggctagcttgaagcaagcttacagtggcgtgaaagcagggatacagaggcaggacaaagacaggattgcagatgaccattgccaagcaacccagatgttcgttttctaggtttgcctgggcacaggcttatcctataaccttctctgtggtgcccaggcagctgtagttcaggcctactcaggctttttatgaccttcgttgtactacttagataaaacagaatacttgaaatcactagttacagagaacaagagtctataaactcattctgtaa

SEQ ID NO: 666726 - DNA, 424 bp, Homo sapiens
ttgtctcaagccaaagcaaaacaaacccccaccccacaaaagaaaaacaaaacaaaacaaaaacttctcctccaaaatcagccgttacaccacccacctctggtgtggacatgacttccttgttcttcctcaggagttatcatttattaaatgtccagtgtttccactgcactggattattctcagaatgttcagccagctgggcaccatagggtcagctggaagaatctgaccctttaagttttcagctgtggytaaatcatgacatttatggtgaagttttacttaaaatatagtttttcatttgattgatcacttcctatattttagagaaaaatcatgtcaccattttgtattatgtttaatattttaaaattaacttttttttatgttgctgtagccaccacatccctaacccagacag

SEQ ID NO: 666727 - DNA, 581 bp, Homo sapiens
atttacagaatgtggcttttatgatggacttcaaaagtggctccttagaattggatgaaggcaagtttttctgggcattgagattaatagtcaacattttaattctttgagaccattctgttctgttcttttccgcttgatggactttactatgaatgttctgagatcacttttataaaactatgatattatgcttgctgtctctgacgctgaaattcagtgttagttctgtctgtatctatgatattctgcttgctgtctctgatgttgaaattcagtagtagttctgtctgtattcctggtagtctcatagtgctgcttaaaaagaaaattcaactacaatcccaaattctctgatgagagtagatagggattttgatgtaataaacttgtattagacgaatcaggattaatttgcccttgacttacttgattatttaaattagttttcacttgattagctttttgtaattaaaatagcaatatggcaaaatatcagatatgtgctgactragaactgtgtagatgcagaagaaagtattaagagaatggtaagccactgccagggattaaccaaatgc

SEQ ID NO: 666728 - DNA, 553 bp, Homo sapiens
ataattaggtcaggcacagaattttaggttgaaattgaaggtattgctgcaagttaaacattctattttgatttttgtttccaagtagatggtctgaactttctgtttagaagatttgaggatctggaaatttgctgctcctgatcccctgtgccctctcccctatctgccttttgcttttgattttttgtttctttatttgtttgttttttgagatggagtcttgctatgtcacccagactggagtgcagtggcacaatctcggctcactgccacctctgcctcctgcattcaagcgattctcctaccttggcctcctgagtagttgtgattacargcgcgtgccaccacacccagctaatttttgtatttttagtacagacagggtttcgccatgttagtcagactggtcttgaactcctgacctcaggtgatccgcccccttcaacctcccaaagtgctgggattataggaatgagccaccgtgcacagcccgatttcttaaaatttagtcaaaaagttatgaaccagttgaatgcttgtgatgcttttt

SEQ ID NO: 666729 - DNA, 509 bp, Homo sapiens
ttaaataacaaattatctaccttgtatttcatataacaattattttagactgtctaaatttaatggtagtgactagtaccaaggcaaatgcagttcagcagaactaacagatgctgaggataataaccagacctgggcaagtgccatttaaacacacttcatctcatttcttttccttttttttttttttctccttttgtactagtgtcactagagtgtaggccattcagtattttcttgatctactaacattttttattgtaacacatctacttcacaaatggtcccctgagaaacctatattagatttggggactgaattgaaatgaattttccattccttataacatgaaaccaaattttcaggcattttcttattatttttttctcccagatgttytcagtgtttttcttgcttactgagcactcccctgtaatctagaatgggctttgctgtgcagggcggtcatatgtcagaggggaaatcagacaggaaatgcagaggcgat

SEQ ID NO: 666730 - DNA, 613 bp, Homo sapiens
ggaaaatgggacaacttaagtagtgcacacaaaaatggcacaagtaaaacctcatgtaacagaaatgaaaagaaatggaaatgcactaactgaaatgtgaaagacaatgactcttagactgggttaaaggaacagaatctggctttatgcaggttacaaaagacatacctaaaacatgtgagcagaaaaacatcgaaagtaaaagaatggaaagtaataatccaggcaagtattaactcaagaatgctgttgataccattttaattgcacataaartagattttcaggagagggtggaaacattactaaaaaaggagacatgcgaggttttgaggaaaaatatgttcagcatcccaggaaaaggagacttttgaggttttgaggattagaaaggtttagtaacgcaggaagataaagcagtttaaaatggtatgatcttagtaacacggattcaaaatgtactaaggaaacattgtcagaattaacaaaatatgtggataaatttaacaccatggtgggagagagagtaacacagctctctgtggagttgagggctcctgcagtacaagcttaggaaggacgcgtccgattcgtaccaccagtgagcccacga

SEQ ID NO: 666731 - DNA, 613 bp, Homo sapiens
ggaaaatgggacaacttaagtagtgcacacaaaaatggcacaagtaaaacctcatgtaacagaaatgaaaagaaatggaaatgcactaactgaaatgtgaaagacaatgactcttagactgggttaaaggaacagaatctggctttatgcaggttacaaaagacatacctaaaacatgtgagcagaaaaacatcgaaagtaaaagaatggaaagtaataatccaggcaagtattaactcaagaatgctgttgataccattttaattgcacataaaatagattttcaggagagggtggaaacattactaaaaaaggagacatgcgaggttttgaggaaaaatatgttcagcatcccaggaaaaggagacttttgaggttttgaggattagaaaggtttagtaacgcaggaagataaagcagtttaaaatggtatgatcttagtaacacggattcaaaatgtactaaggaaacattgtcagaattaacaaaatatgtggataaatttaacaccatggtgggagagagagtaacacagctctctgtggagytgagggctcctgcagtacaagcttaggaaggacgcgtccgattcgtaccaccagtgagcccacga

SEQ ID NO: 666732 - DNA, 613 bp, Homo sapiens
ggaaaatgggacaacttaagtagtgcacacaaaaatggcacaagtaaaacctcatgtaacagaaatgaaaagaaatggaaatgcactaactgaaatgtgaaagacaatgactcttagactgggttaaaggaacagaatctggctttatgcaggttacaaaagacatacctaaaacatgtgagcagaaaaacatcgaaagtaaaagaatggaaagtaataatccaggcaagtattaactcaagaatgctgttgataccattttaattgcacataaaatagattttcaggagagggtggaaacattactaaaaaaggagacatgcgaggttttgaggaaaaatatgttcagcatcccaggaaaaggagacttttgaggttttgaggattagaaaggtttagtaacgcaggaagataaagcagtttaaaatggtatgatcttagtaacacggattcaaaatgtactaaggaaacattgtcagaattaacaaaatatgtggataaatttaacaccatggtgggagagagagtaacacagctctctgtggagttgagggctcctgcagtacaagcttaggaaggacgcgtccgattcrtaccaccagtgagcccacga

SEQ ID NO: 666733 - DNA, 523 bp, Homo sapiens
ggcaagacgtgaatcagccagtgttcattggttatggtccrtggtagatttttttctggaagactgtgtgtttggaaaaggaaaattttcttgtaattctgaaaatagtctcaggcatcaaaatatcacattataaatcgtcactaactcagttttcttgtggctgctcagtttcctcatgagagatttctataggctagataagaagaggaaaagatgactattcaactaaacattttagcttcaaccacaagctattttaagaaagggactgggaggtgaagaattgcgaagctgcaaatatgtagaaagagactggcatatgtttaaatcatatgtttctaaagtttgactgagcatgaaatttcattttctaagaaggtgcccttgggaatggtggagggaaatgctggtgcacctgtttgtctgatggagccaaaccttgagacaaactctcggccagccagcttgcccatccatgcagtgggaacaccctctgacccacttacgagtgtggagagca

SEQ ID NO: 666734 - DNA, 523 bp, Homo sapiens
ggcaagacgtgaatcagccagtgttcattggttatggtccatggtagatttttttctggaagactgtgtgtttggaaaaggaaaattttcttgtaattctgaaaatagtctcaggcatcaaaatatcacattataaatygtcactaactcagttttcttgtggctgctcagtttcctcatgagagatttctataggctagataagaagaggaaaagatgactattcaactaaacattttagcttcaaccacaagctattttaagaaagggactgggaggtgaagaattgcgaagctgcaaatatgtagaaagagactggcatatgtttaaatcatatgtttctaaagtttgactgagcatgaaatttcattttctaagaaggtgcccttgggaatggtggagggaaatgctggtgcacctgtttgtctgatggagccaaaccttgagacaaactctcggccagccagcttgcccatccatgcagtgggaacaccctctgacccacttacgagtgtggagagca

SEQ ID NO: 666735 - DNA, 633 bp, Homo sapiens
agcagtatcaagacaaaaaaggatttctgaggtgagaggcatttgtgggcattcgaaaggtgtttgtggggcagtggggcagaagagaagtgaggacaggctgcagagtggtagattcctgtatttgggggccagaaagatcattcttcgtttggtagggtctgtacaataagatggagccttgtkttggagagctgttttgttctttattatttttccaaagctaattgagaagcaagcttcattctctactcctcaattctaaagcctctgagactgtaaggctcatttttttcttactttaattagtacatattatttcctattttcgtatatttttaacttctataatctagctgttttttcctcagtgtaaacactctacaggggaaaatttgtttctcagatgttgtaaaaatagttttggacttactgtatatatttactctataatttaagaagtaggccattatatatcatttcaaataatatttataaaacattataaataaccttatgcagttctgtgaatcagtcctcacatcaggaaaagtattttatagtaaagtgttaaatatttgaaaatgaaattagtatatttaactttattttataaaattagaatgctccacc

SEQ ID NO: 666736 - DNA, 642 bp, Homo sapiens
ttgcaaccatgtatcatatatggagttgatctgttagacatcataatctacagaagccctgcttctgtggctgctaatttttaggtgaagctgtttctggcaatgaaacatcatccatatctaatagatctgacgatcttcgtagcaggtaatatctctgacagttctctacccgttttaaatacagcaattcaccctccaactgtaacrgagtcacaaacctagacaagacatgtcttagccatcaaacagccatttacaccttcattcaacaaatacttattgagtacctgccatgtatcatctttaaatgtgagttgtgcctctgtttgaaaattgccaccagctctaccaggttcaataattgacccttttatgactttggccatggtacgttaccagaaatagaagatgtgttgcacagtgactatttgtttgtgtataagtgacgggttgtgagtagttgggtgggtaaagacaagaaaataggtatgggatcttttccctagatttccacaggggtaatcgtgttctaaccctttcttctaatcctccctagaattcctgaaactgaaacagtgttttatgtctttcagctcaagtcttttgtagggaaaaaaatattgtccctaataaaggaag

SEQ ID NO: 666737 - DNA, 617 bp, Homo sapiens
ctccaactgtaacggagtcacaaacctagacaagacatgtcttagccatcaaacagccatttacaccttcattcaacaaatacttattgagtacctgccatgtatcatctttaaatgtgagttgtgcctctgtttgaaaattgccaccagctctaccaggttcaataattgacccttttatgactttggccatggtacgttaccagaaatagaagatgtgttgcacagtgactatttgtttgtgtataagtgacgggttgtgagtagttgggtgggtaaagacaagaaaataggtatgggatcttttccctagatttccacaggggtaatcgtgttctaaccctttcttctaatcctccctagaattcctgaaactgaaacagtgttttatgtctttcagctcaagtcttttgtagggaaaaaaatattgtccctaataaaggaagayatgatgataatatttacatgttgcaatcaaatagaacaaagttctgcgccagtgaagaactcaaaggaaaataaaagatcaaaagcagcgcctccttgagaatgtaaggggggctgtgtttctccctctgaggtgtggtgccgcccgtggactcacatgcagttattcg

SEQ ID NO: 666738 - DNA, 519 bp, Homo sapiens
acccgcttgccactggctccttagaggggcaagataaactgttcttggaagtggcaaaagaagccagaggaggggaaaaaacagctgcttctgggacagcgcgccactgctggggaacttgagctcatgtgattttgctgacacaaaccgcaagcagacaggaataaggaagttcccttgcctcttctcctgcattgtgaattcctgcctcctgttgacagctcaccaaatccagctggcaaaacattttgggaaaagtagttggcacagttgtgtctatagcatccagagcagagtgtggaagagtttggaggtgagagaaaatgtctgagtacctgacagccctgcccagccttcaaggcaaaacacaggttggcagcttattcacagtcctttccctgatcatccmgaggccccttgatttaaagccctgtagactttgtgccaattgcaggattaccgagcacttcctgcagtgctttggaacaaagtctgtcatattttctcataactaataag

SEQ ID NO: 666739 - DNA, 581 bp, Homo sapiens
ataggcttctgatattgttctgtaactcactagcctttctgctatacttcattrtaataaatatttcaatataaatacaattactggattccaaatggtagcagttcttagaagtttcttttgttatataggaaaattccacagtaacatatagattagggcattcccatttgtaacagtcacactctacacacaaaaagtccacagattaggccaggcatggtggctcacacctgtaatcttagcactttgggaggccaaggtgggaggtttgcctgaggtcggcagttcgagaccaacctgggcaacatggtgaaacacaccgtcactactaaaatacaaaaaaattagccgggcatggtagcgcagacctgtagtcccagctactcaggaggctgaggcaggagatggagatgggggttgcagagccgagatagtgccactgccctccagaggacagagcaagaccgtctccaaacaaaagcaaacaaataaacaaatacacaggttgaccactcaaaacctttttttgctaaatactaattagcgagttccttttcggccattgttaaataacatta

SEQ ID NO: 666740 - DNA, 501 bp, Homo sapiens
agagtgccttttatgtgcagaagcattttctaagctctggtcttgcagtaccagttgcatttttgtcagtacttttagagaccatctttyagctggagcagctttttggcaaatttatatttctagaaaatgtaaattgtgcttgctacaaatgaggcatgaacagaacacttagtaaccttgatgaggaagtgagccattctcggtgggggtaatcaggagagttagagagcaagaggagaagggcatgaaggcactacatgtgaaaatgaaacaaagccaggagctagcatggaagggcaaagtgccatcctgtcttttctgtgcaggaagggttcttggagctggagcacagggtacaggggtgtggtggggaagaggcagaggagaagagaatagactaaaaagagtaggaaggtaatccgagattaggaaaaacaaaatactggcaaaatgtggcttgccagtagtttttttttaattaaccagattaaaatgtat

SEQ ID NO: 666741 - DNA, 501 bp, Homo sapiens
agagtgccttttatgtgcagaagcattttctaagctctggtcttgcagtaccagttgcatttttgtcagtacttttagagaccatctttcagctggagcagctttttggcaaatttatatttctagaaaatgtaaattgtgcttgctacaaatgaggcatgaacagaacacttagtaaccttgatgaggaagtgagccattctcggtgggggtaatcaggagagttagagagcaagaggagaagggcatgaaggcaytacatgtgaaaatgaaacaaagccaggagctagcatggaagggcaaagtgccatcctgtcttttctgtgcaggaagggttcttggagctggagcacagggtacaggggtgtggtggggaagaggcagaggagaagagaatagactaaaaagagtaggaaggtaatccgagattaggaaaaacaaaatactggcaaaatgtggcttgccagtagtttttttttaattaaccagattaaaatgtat

SEQ ID NO: 666742 - DNA, 513 bp, Homo sapiens
tgactcaatttctgcaatctcataataaaatatgaayggatgaggagttgcttcttatggaagaacaaagtggtttcttaagatgaaacctactcctgatgaaagtgctgtgaacattgttgaaatgataacacaggatttcagacatgaaataaacttagatgatcaagcagccacagggtttgagaggactgactccagttttgaaggttctgctgctgtcagacagaatgacatgctacagagaaatcttttatgaaatgaagagtccatcagtgcggcaaacttcattgttgtcttattttaagacattgccacatccaccccagctttcagcagccatcaccctgaacagtctgcagccatcagcatcgacgcaagacctgccactagcaaaaaaggttatgacttgaaggttcagatgagagttaacattttttagcaatgaagtattttttaattaagacatgtccattctcgttttagacataagactattgcatacttaacaaa

SEQ ID NO: 666743 - DNA, 597 bp, Homo sapiens
gattcaagacttcagtggagcaggtaactgaagatgaggtgaaaatagcaagaacagtagaattagaagtggaggctgaagacatgactcaatttctgcaatctcataataaaatatgaacggatgaggagttgcttcttatggaagaacaaagtggtttcttaagatgaaacctactcctgatgaaagtgctgtgaacattgttgaaatgataacacaggatttcagacatgaaataaacttagatgatcaagcagccacagggtttgagaggactgactccagttttgaargttctgctgctgtcagacagaatgacatgctacagagaaatcttttatgaaatgaagagtccatcagtgcggcaaacttcattgttgtcttattttaagacattgccacatccaccccagctttcagcagccatcaccctgaacagtctgcagccatcagcatcgacgcaagacctgccactagcaaaaaaggttatgacttgaaggttcagatgagagttaacattttttagcaatgaagtattttttaattaagacatgtccattctcgttttagacataagactattgcatacttaacaaa

SEQ ID NO: 666744 - DNA, 648 bp, Homo sapiens
attttgaaagaatactcagctaataatcacaagcaatttataagagacctcctccaggtccctctattttacttgcactaatttttctccatcaacaaaataaacagccataaagtggcaaacgtgcatggggcagtagaagtgcagtcaygcattgctgaactgtggtgggataggttctaacaatgtgttgttaggtgattttgtcattgtgcgaacatcatagcatgtgtttagacacagctagatgctgtagcctaccagacacctaggctttcagagcaagagaataggtcagcctattgctctgaggctgtaaacatggacaacatgttactatattgaatgctgtaggtaacagtaatacagtggtaattatttgtgcatttgaacaattttcaatgaactgtatccttccatcttttgaaccaagagggaaatggatgttgggtcaccagcctccatgtctgccacgttcctggtgaaggtagtctggggaatctgagcacgggtttgcagtcccaacagcctgcccactctcttccctctgactgaagtgacacactcatcatgcagagagtgtgtggacggcgttgtggatgagtgagtgaagaagatgggagttgcagttctctgagcaatgacagg

SEQ ID NO: 666745 - DNA, 573 bp, Homo sapiens
tttctacttcctctctcttagggtagtcacctttagaaagcacctactgtgccctagggcagcggtgcccaagccctgggccagcaggggtggcctgttaggaaccaggccactcagcaggagataagcagtaggcgagcragcattacagcccgagctccacctcctgtcaaatcagtggcagcatgagattctcctaggagcaagaactctattgtgaactgtgcatgtgggggatctaggttgcacgctccttatgagaatctaatgcttgatgatgtgaggtggaacagttttatcctgaaaccatcccactgggtccctggaaaaactgtcttccgtcaaacctgtgcatgttgacaatgacagacaactaaaaagattgggggccactgctctagggcacccccttgttaagaagaactaagaacaccagcccactgacctcagcttatattcagcatccactcggccatgcaaaagagccacgttgaaaagaaaccattcagtcccactgaaccatccgagctgaccccacatagagcagagtcaaacttacccagctaactctgc

SEQ ID NO: 666746 - DNA, 573 bp, Homo sapiens
tttctacttcctctctcttagggtagtcacctttagaaagcacctactgtgccctagggcagcggtgcccaagccctgggccagcaggggtggcctgttaggaaccaggccactcagcaggagataagcagtaggcgagcgagcattacagcccgagctccacctcctgtcaaatcagtggcagcatgagattctcctaggagcaagaactctattgtgaactgtgcatgygggggatctaggttgcacgctccttatgagaatctaatgcttgatgatgtgaggtggaacagttttatcctgaaaccatcccactgggtccctggaaaaactgtcttccgtcaaacctgtgcatgttgacaatgacagacaactaaaaagattgggggccactgctctagggcacccccttgttaagaagaactaagaacaccagcccactgacctcagcttatattcagcatccactcggccatgcaaaagagccacgttgaaaagaaaccattcagtcccactgaaccatccgagctgaccccacatagagcagagtcaaacttacccagctaactctgc

SEQ ID NO: 666747 - DNA, 573 bp, Homo sapiens
tttctacttcctctctcttagggtagtcacctttagaaagcacctactgtgccctagggcagcggtgcccaagccctgggccagcaggggtggcctgttaggaaccaggccactcagcaggagataagcagtaggcgagcgagcattacagcccgagctccacctcctgtcaaatcagtggcagcatgagattctcctaggagcaagaactctattgtgaactgtgcatgtgggggatctaggttgcacgctccttatgagaatctaatgcttgatgatgtgaggtggaacagttttatcctgaaacyatcccactgggtccctggaaaaactgtcttccgtcaaacctgtgcatgttgacaatgacagacaactaaaaagattgggggccactgctctagggcacccccttgttaagaagaactaagaacaccagcccactgacctcagcttatattcagcatccactcggccatgcaaaagagccacgttgaaaagaaaccattcagtcccactgaaccatccgagctgaccccacatagagcagagtcaaacttacccagctaactctgc

SEQ ID NO: 666748 - DNA, 573 bp, Homo sapiens
tttctacttcctctctcttagggtagtcacctttagaaagcacctactgtgccctagggcagcggtgcccaagccctgggccagcaggggtggcctgttaggaaccaggccactcagcaggagataagcagtaggcgagcgagcattacagcccgagctccacctcctgtcaaatcagtggcagcatgagattctcctaggagcaagaactctattgtgaactgtgcatgtgggggatctaggttgcacgctccttatgagaatctaatgcttgatgatgtgaggtggaacagttttatcctgaaaccatcccactgggtccctggaaaaactgtcttccgtcaaacctgtgcatgttgacaatgacagacaactaaaaagrttgggggccactgctctagggcacccccttgttaagaagaactaagaacaccagcccactgacctcagcttatattcagcatccactcggccatgcaaaagagccacgttgaaaagaaaccattcagtcccactgaaccatccgagctgaccccacatagagcagagtcaaacttacccagctaactctgc

SEQ ID NO: 666749 - DNA, 539 bp, Homo sapiens
gtcactagggatgaggtgtacatatggtattaactatggcttctggcaagtggcatatattcgttacaccattgctctttttagaaagctaagtcatcatgtgcatgtcgcgtgtaatctgctgaaataaggatggactatagaacacatttggtaaagattttcatcaaaatgatcaatgcttttttaaaagtttgggttttatggtcaacttctgtaattgtaaaaactcatgaactyataaataaggtcttattccctgatgtattataagtaatattttacttttgtcttccaaaagacttatttatcttcctatgtcaacatcctcatgtatgtaaaagaaaattcttgttggtttcttagatcatagaatattgctactgttttgtgtgctccattgatttttctatcaaaacaaagttaatttaattgtaataataatgaccattggatttgacagtgaatatcttaaaaattcaaagtaacagtgacttatgtaatgtgagagttcagtttttctctcatgtaaaagttta

SEQ ID NO: 666750 - DNA, 539 bp, Homo sapiens
gtcactagggatgaggtgtacatatggtattaactatggcttctggcaagtggcatatattcgttacaccattgctctttttagaaagctaagtcatcatgtgcatgtcgcgtgtaatctgctgaaataaggatggactatagaacacatttggtaaagattttcatcaaaatgatcaatgcttttttaaaagtttgggttttatggtcaacttctgtaattgtaaaaactcatgaactcataaataaggtcttattccctgawgtattataagtaatattttacttttgtcttccaaaagacttatttatcttcctatgtcaacatcctcatgtatgtaaaagaaaattcttgttggtttcttagatcatagaatattgctactgttttgtgtgctccattgatttttctatcaaaacaaagttaatttaattgtaataataatgaccattggatttgacagtgaatatcttaaaaattcaaagtaacagtgacttatgtaatgtgagagttcagtttttctctcatgtaaaagttta

SEQ ID NO: 666751 - DNA, 539 bp, Homo sapiens
gtcactagggatgaggtgtacatatggtattaactatggcttctggcaagtggcatatattcgttacaccattgctctttttagaaagctaagtcatcatgtgcatgtcgcgtgtaatctgctgaaataaggatggactatagaacacatttggtaaagattttcatcaaaatgatcaatgcttttttaaaagtttgggttttatggtcaacttctgtaattgtaaaaactcatgaactcataaataaggtcttattccctgatgtattataagtaatattttactkttgtcttccaaaagacttatttatcttcctatgtcaacatcctcatgtatgtaaaagaaaattcttgttggtttcttagatcatagaatattgctactgttttgtgtgctccattgatttttctatcaaaacaaagttaatttaattgtaataataatgaccattggatttgacagtgaatatcttaaaaattcaaagtaacagtgacttatgtaatgtgagagttcagtttttctctcatgtaaaagttta

SEQ ID NO: 666752 - DNA, 518 bp, Homo sapiens
tttccctaaaaatctagaacacttgaagtactcagagtttgctttattttctgtgaattttgccggtattccatttgtatatgtcattatttatttttcttcaacaaccaaaatctattttttgtggttctggaggccaaatgtccaagatcaaggtgttgtaggtttgctttctttctaggcatgtctctttggtgtacagatggccgtcttctccgtttcctctcacggggtttcctctacataccctcttgtctggtgtgtaaatttcctcttccyataaggacagtagtcagattgcatgagggctcacccgaaagacctcattataattaatcaaatacagttggattaggaggtgctgggggttagagcttcaacataggaattttgacgtaattcagcctgcaacaagcagggaaacatttcacacaacggaggcaacagcttttgtgaattacagatatgtagacgcaaagccatgtagagaatttatagcttcagtcctacaacttcag

SEQ ID NO: 666753 - DNA, 575 bp, Homo sapiens
gatcaacctgtgttaaaaccaagttttaatacgtttatacttgaagcatttttgtgtgtgtgatgttaagcttggaacaatattcccctttttctcttttgttaactaggagagcatgctgaagagctgtcattgataagtccttgaatgtamtttgatggcttcttattaacccttggagtctgtgactgctatacaacttcttagttctaaatgcaaaaatttatatcccctcatgaccttccagcaacagcagaatgtgattttgtaagacattagcataatggaaccttttcaataaaatgataaattgagcccatctcaagaaaacagaacacacactggtaatttattgcggtcattgccatgtggaggaccccattcatagcatatgcttttagctctgatgagaacagtgctgttcttcagatcctacaagtctgcaagattggctgataaatgtttttttttttttaaggaaccaacagctctttgggtaataggcatcattacatgacataattatctcacaaacatgtctaattattctattgttttcaaggctctttcatgta

SEQ ID NO: 666754 - DNA, 589 bp, Homo sapiens
tagaacttttaaaagcaatctggacagtaggatttagtggtaagttttggttcttcatattttaaatttcaaaaaaacctcacataataaaagacaaatatcccttaagcctctcattcagctagtttcctttgtataagaaaaataacatactaatccttttataccatttttttcataaagttatattttattcacctaacactggtaaaaatgtcactgccataagagaatctctgaatactattcccaaagcactaaactgcacttggaactggaagggrcattaatatcacttaccacccactgccagttgtttttccagatgaaaaaactggaggcacattgtgccgatgtgctgaagtccacatagcctgtttgtcatgctgtcatttctcccacaggacagctcttcaagtgataacacagacggtgtctgtcaccacagtctgccctctattcttggttctgcatctgcagattcaaccaatccataaaaaatacttggtggaaaagcagtaaaaaataacaataaatataaaacataatgcaaattttaaaataaatatgaaaagtattagcacagctc

SEQ ID NO: 666755 - DNA, 589 bp, Homo sapiens
tagaacttttaaaagcaatctggacagtaggatttagtggtaagttttggttcttcatattttaaatttcaaaaaaacctcacataataaaagacaaatatcccttaagcctctcattcagctagtttcctttgtataagaaaaataacatactaatccttttataccatttttttcataaagttatattttattcacctaacactggtaaaaatgtcactgccataagagaatctctgaatactattcccaaagcactaaactgcacttggaactggaagggacattaatatcacttaccacccactgccagttgtttttccagatgaaaaaactggaggcacattgtgccgatgtgctgaagtccacatagcctgtttgtcatgctgtcatttctcccacaggacagctcttcaartgataacacagacggtgtctgtcaccacagtctgccctctattcttggttctgcatctgcagattcaaccaatccataaaaaatacttggtggaaaagcagtaaaaaataacaataaatataaaacataatgcaaattttaaaataaatatgaaaagtattagcacagctc

SEQ ID NO: 666756 - DNA, 529 bp, Homo sapiens
ctcaccaatttcttaattacttgatcattcacagggtttaatgtcttcctgggacaacattctttttggttgaaggtgggggtggggaatagaagtgagaccactgacatgaaacttgcccttgagaagcttcaaatctcgggggattgctgacttaaacaggtgaagtcactgcagaagatgggatagctcagcctgctacagacattcaacttgaagggaacttacagcaaggagtgtttagggtaggagagaggcggcccctgagtgaggtcttagatggattcctggaaaccttttgactgagatactcatgatatagaaagactttcrtggtcccacagtaccagtgaagagtgtttcagctggagttattccagtgcagacttttagaacaatatgtaattcatagtcttatcagtcttgattaaaggaaaaaaataatctatgttttccccccagcatgatgacatcaccatgtgtttctaacttatcagtatgttactagagaaaaatatgtcttctcctc

SEQ ID NO: 666757 - DNA, 422 bp, Homo sapiens
tcccacagtaccagtgaagagtgtttcagctggagttattccagtgcagacttttagaacaatatgtaattcatagtcttatcagtcttgattaaaggaaaaaaataatctatgttttccccccagcatgatgacatcaccatgtgtttctaacttatcagtatgttactagagaaaaatatgtcttctcctcttttaagaggtagtagagattttatgaatctcmatcaccaccaaaagcttttggaaatcaatactagaaatgatccaaattttttaacattgaatgttttgtcttatttgttacaggtgaaataagatgcttaaagcatcgaaatttgtaagaggtttattttatgttagcagtgaagataggaaatattatatgtaaataaaatatttatacaaaactaattatattg

SEQ ID NO: 666758 - DNA, 582 bp, Homo sapiens
tttctaacacttagaatgtttttttaaaaaattttaaattattttttaaatagcaagaaaagtactacttctgtaaaaataaaaaagaaattgtattgattctcaggtcattccatggattccatttcttgggataacattcaatttgtagaacatgtgctaatctttgaaaatgagacttaattttcctcattggtaattgctgtacctgcacattcttactgaatgccagtgctttaaaacattaatgggaatttccatgaaactgttagcactgattgcatgagggatgtgggggtagtgagccagcacctgcagtggtgtttgtgactgctggcctgggtccataattgccgatctgtgtgtaagtgccactttgcaagagccatggaatcagtcccctacagtattttgtraagtccaccgtctgactcaaggttattatcatgtggttaaaaggaaagcttgtgctttctaatgaggaaggcttacctgtaaatctctgatgaccccgagtgctgtcttggggacaccattcaacccattagcttgtgttttctttgttatgaaatgctgacaatc

SEQ ID NO: 666759 - DNA, 581 bp, Homo sapiens
ttatattatggagtttattcaacttttggaaagctgtgactttcctggcaccaccttaactgtgcccatttcctggcccgtatccatttctgaaagaaaaagcaactacatttactctttttggctttgtactttgttatttatttaaacctaattcttaaattttgcttcactctacagttttgtcttggtatgggaaatttcattattattttcaaaatgaaaaatgaaaaaataaattggcaacaacaaccaaaaaatcagaaaaaggtattagatttaatcagcagtttttgcctcagtaggtcaaattattgtgcagatacgttaatttaaaaccccagcaaaaatttgagaattaagttataacttttaagtgtagagtctccttagagattgctaagcatgttttagaagtattttttagaagtacattcactggatggatggttatgtaattggaagctgtttacaatatagcataaccttggttactccacaggagttaagtttatggctcgttmaaagcatggaacaggcagtttgattcagttgggtgtaataacctattggacaaggtt

SEQ ID NO: 666760 - DNA, 616 bp, Homo sapiens
ttaagaacgttttcttctttaatatacttgtacgtctattgttataaatataacctaaacttcaaaattccatatgggaactcttggcttataccgatttctttctaatctctattttagttgtttttctgttactccagatttaaaaaacattttccaaatcattttctttgtttgttggtttaccaaaaatatgtttcttttaatcagcttttaggatcttctgtattttatattgaatttcmaggacttttcaggttataggtgaacacctcttctcttcctaggagcattttagggatgttcattgtttatgcccctgctcccttctgcaacagctccaggcagttgtacactgaggggccaggaggggacctgaagagctcaggacaccaaagaccacactgtgcagttcataaataatcaaattttagaacttttgagtaaacgattaggtaagttggccagccagtgaatcagcctttggtgaatggattttcagcagccttcctagaaccaactcctacaaatggccataggacacacatgtataggtcacaaaagcttcatttgttcaaagacactaatttttaggaaaacatcagatcatttgaat

SEQ ID NO: 666761 - DNA, 644 bp, Homo sapiens
tcctttttattgctgaatattatttcattgcataaatatatactacagtttgtttatctgttctgacatttgggtttaaataggttttgacgagtacatgtaaagctggacatttgtatacagttctttgtgtagtcatgtgcttttttttgcctcttgtgcaaatacttccctgcgaaatgtcctggtcccaaagaaaatggcaatctcttctccaaagtagttgtaccattttccatttagaccagaaacatagatgaattctagttgttttatattcttgacaacacttggtttggtctaccttttaattaaaaggtattcaatttgacaggtgtgtagtagtatctcattgtggtcttaatttgcattttcctaatagaaartaatgctgggcatcttctcaggtacttatttgccatctatatgtcttctttgctgcagtgtccattcaaatcttttgcccatttttttattgggttgttttcttcattttccactttttattgggttgttttattttttatttttatttttggaaacgtagactcgctctgtggcccaggccggagtacagtggcaggatcatggatcactgcagactcaacctccttaggctcaagtgatcctcccatctcagcctc

SEQ ID NO: 666762 - DNA, 577 bp, Homo sapiens
agcccactgttccctgttgtataacgcacttgcttgtttgccccataaagccaacttgaaagctaattaggctatgtatatattggttaactcagttcccctgccatgaaattttgaaaactacctgattggaacaaaaggaaccgacaacatatcattcagtcaatgtggggaagggagaaatatgaaaaaggaggagaaaagattcgtttgggattgtcacattatcacagtggacagctcttaagcttgtcctgtgagccgacaattctttttggtgagatttaaataaggttcttggtatatgtttgaagagactgtaaacacatatgtttatagtatattcgagacctgatgactttcttttttcatttgtaatttttgtgggtacataggaggtgtwcatatttctgtggtacatgatgtgttttgattcaggcatgcaatgtgaaataagcacaggatgcagaatgaggtatccatcccctcaagcattttttctttgagttacacacaatgcaattacgctctttaagtttaaatgtacgattaagttattattgactgtagtctctgg

SEQ ID NO: 666763 - DNA, 521 bp, Homo sapiens
atacttatttccttaatttcaggctgtaataattcacacttttgctttcattttatgaaaggactccttttcccaaaaaaaaaaaaaaggaatttcaytgtgttcagagtctgattagccaaaacaaaatattcttgtaacttaaattttgtttcatctgtttattgagcatttctctctgctcccatacattaggtagggttttcaaatcacagtgtaagccgtatttatggcagatagtaaccttttctctactgtgggagtcgcatgtatattgttctagtctatcagtttccactgtctgctgttttttatttatggtatcatcatatacaaatattttcatgtagtcacctgtcgattatcaaggtctccgagcctctagatgtcagatgtatctgctatttttttagtttactacatttaaaacttttaattggcctgaaatttcctttcatatgtggtgtgatgaaggggcccaaattcatttctttgaatagatggccttctgtgacattacc

SEQ ID NO: 666764 - DNA, 521 bp, Homo sapiens
atacttatttccttaatttcaggctgtaataattcacacttttgctttcattttatgaaaggactccttttcccaaaaaaaaaaaaaaggaatttcattgtgttcagagtctgattagccaaaacaaaatattcttgtaacttaaattttgtttcatctgtttattgagcatttctctctgctcccatacattaggtagggttttcaaatcacagtgtaagccgtatttatggcagatagtaaccttttctctactgtgggagtcgcatgtatattgttctagtctatcagtttccrctgtctgctgttttttatttatggtatcatcatatacaaatattttcatgtagtcacctgtcgattatcaaggtctccgagcctctagatgtcagatgtatctgctatttttttagtttactacatttaaaacttttaattggcctgaaatttcctttcatatgtggtgtgatgaaggggcccaaattcatttctttgaatagatggccttctgtgacattacc

SEQ ID NO: 666765 - DNA, 547 bp, Homo sapiens
cagctaagagaactaggccaatattayaagtagcctaagggagcagcagagacacaggtttggctctctgtaattgtgaaaaaacacttggttgttggcatcacaaattatgctatatcaattagagaaaatatttgaaggacgttgaagagttgagagcaggtgactagctagctgccactagttagttgtctgcattgaggtattgctttggcctaaatcctttgcctttctttcctagatgttctatacattcagtgagaagtcagcctgtgtttgcataagcatttctgtcactgccaacccagctctgatgacagagtgtgagcttctgtgctgctggtacctttgggattcgtgctgactcgtgacaagcctaggagggccacagaaagaaggatgtaaggatgtaagaaggatgaccttccatgtcttcaagaatagttgcgttttaagaaacaatgagacttccatgtcctgatggcagtcgatgtagaaattcctggcatttggcaacagcatggaatcacattctgtagtaatacaa

SEQ ID NO: 666766 - DNA, 577 bp, Homo sapiens
tagggccactccatcagccaaatcatcagaaaagcagcgtttcaaccactcaggctgtccctcagctcatcactcacactcttacatcttacagaattgctagtctagtttagttttagcagtgaaatttttcccactggaataccatctcccaacttggggtggataaatcttagcctgtttcacctatttcttctatcctcctccttccagtttctccatgaccctacgtttttttctgtgtgcaccatcctcataaggacctttggaggtatttctgttgcaatgcgtagttcctgcctgtgtatttaccagcctcagaccaccaagaggcaatggtgtctattcaaccgcagtatcccagtggttctgacatcctcaactcttgcaggaaacatacttagtatatcatgaaaatctccagtatctaggacagaatcactcatagtrtatgttcaataatttattagtttgttaatagaatgaatggatagttattttcatatgtaattcttactgtgattgtttttatttacctttcttattaaatttattgaatatgaactttgtggtaaat

SEQ ID NO: 666767 - DNA, 604 bp, Homo sapiens
taaaaatgcttcagaatgaccacggaagtagaggcccagctaatttctcagaggttccaatagtctgtcttcacaaattccttcatctaatatttcaaggatgtgtgacctgttatacttttaatgctttccaagaatgcagtagaatttattaggggaaaataatatcttttctaaattgttaatgttatactctgccttcctttactgtattttgtttggtttttgtttttgtatttttttggacagagagggataatgttcaaattaaagtaaaaagtagcatgtctattacaaaggaaaataaacggaagaaaaatgctgctcaagtgaacttcctgctttttaattagtgcctgtgggaagaagcttttccggagcaatcccatttgtacacgggatcttaaaacrttgatgtgtgaattgctctcacattttccacaatcttctttcccagagcagatataaataaataactaatgaaagagttaggcaacagaccctcatccctcagaagggtatggagacagagagtaagaaaggtaaaagtggaaacaaaatatctggtagattcatgggaacagctgttataggaaacccaggg

SEQ ID NO: 666768 - DNA, 563 bp, Homo sapiens
tgaggtagtgaaatagaatatttgcacatttatggtttgtctaagtatttcrgaagtcttatttttttacataacatgtgataaatttttaagaaaattaatatgtgcccttgtaaagtggtagtaacttgaattgtttgacaaacgcaaacttactggtgatttatttatgatttataactgtagaatcttgaaacaaaatgagaaccttgaaatcaattggtctaattctttcattaaatatctgaagaaactgaaggaaagaaatgctaaatgatttacctgaagtccctcagctaataaaacacgttagaactgggctttggttcttgatttctgactttgaagccagtgttctttctagtccaaaaccaaaatccaaacaagggaatgtgacaaatagcttttctgcctcaatcctgttatcacagagcatcatcttcctgatgacctctcatcttacgggaaggagagcctgaagtcttcagcacagctcagtttggacacttgagtgtttggaatcctcttacatatctcactagtgcagcaggatataaaattta

SEQ ID NO: 666769 - DNA, 540 bp, Homo sapiens
tcactgcaacccttgccacctgggttcaagcagttctcctgtttcagcctcctgagtagctgagactacaggtgcccrccaccacacccggctaatttttgtattttagtagagaaggggtttcaccatgttggccaggctggtcttgaacccctgacctaaggggatccgcctgcctcggcctcccaaagtgctgagattacaggcatgagccaccacactcggcctcacttctcttgagtaaatgtcctgcagtggaattgctgggctgacagatagttgtgcattaacatttataacaacattgatagcaaaaggtcaaacctctgactcttcatgagcattacggtggctccgccgcctcggatgctgtcaggctttcattctggtgcctgtgcactggcattccattcagactcactgacaatgttatgtgctttcttacgtgctggttagtgattcatatttttcttttcgtgatgtctcttcttgtattttgttcactttcaaattaggttcattaggaaatgtatatattgt

SEQ ID NO: 666770 - DNA, 540 bp, Homo sapiens
tcactgcaacccttgccacctgggttcaagcagttctcctgtttcagcctcctgagtagctgagactacaggtgcccaccaccacacccggctaatttttgtattttagtagagaaggggtttcaccatgttgsccaggctggtcttgaacccctgacctaaggggatccgcctgcctcggcctcccaaagtgctgagattacaggcatgagccaccacactcggcctcacttctcttgagtaaatgtcctgcagtggaattgctgggctgacagatagttgtgcattaacatttataacaacattgatagcaaaaggtcaaacctctgactcttcatgagcattacggtggctccgccgcctcggatgctgtcaggctttcattctggtgcctgtgcactggcattccattcagactcactgacaatgttatgtgctttcttacgtgctggttagtgattcatatttttcttttcgtgatgtctcttcttgtattttgttcactttcaaattaggttcattaggaaatgtatatattgt

SEQ ID NO: 666771 - DNA, 540 bp, Homo sapiens
tcactgcaacccttgccacctgggttcaagcagttctcctgtttcagcctcctgagtagctgagactacaggtgcccaccaccacacccggctaatttttgtattttagtagagaaggggtttcaccatgttggccaggctggtcttgaacycctgacctaaggggatccgcctgcctcggcctcccaaagtgctgagattacaggcatgagccaccacactcggcctcacttctcttgagtaaatgtcctgcagtggaattgctgggctgacagatagttgtgcattaacatttataacaacattgatagcaaaaggtcaaacctctgactcttcatgagcattacggtggctccgccgcctcggatgctgtcaggctttcattctggtgcctgtgcactggcattccattcagactcactgacaatgttatgtgctttcttacgtgctggttagtgattcatatttttcttttcgtgatgtctcttcttgtattttgttcactttcaaattaggttcattaggaaatgtatatattgt

SEQ ID NO: 666772 - DNA, 540 bp, Homo sapiens
ttcaagcagttctcctgtttcagcctcctgagtagctgagactacaggtgcccaccaccacacccggctaatttttgtattttagtagagaaggggtttcaccatgttggccaggctggtcttgaacccctgacctaaggggatccgcctgcctcggcctcccaaagtgctgagattacaggcatgagccaccacactcggcctcacttctcttgagtaaatgtcctgcagtggaattgctgggctgacagatagttgtgcattaacatttataacaacattgatagcaaaaggtcaaacctctgactcttcatgagcattmcggtggctccgccgcctcggatgctgtcaggctttcattctggtgcctgtgcactggcattccattcagactcactgacaatgttatgtgctttcttacgtgctggttagtgattcatatttttcttttcgtgatgtctcttcttgtattttgttcactttcaaattaggttcattaggaaatgtatatattgttctggaagctttgatctatttatt

SEQ ID NO: 666773 - DNA, 588 bp, Homo sapiens
agcatttgttgcttcacctcgcatttttacatgatggagacagtttctttccttaatcctcatgaaccaacctctgctagcttcaaccttgtcttttacagcttcctgacctctctcagccttcgtagaattgaagggagttggggccttgctttagattaggctttggctttagggaatgttgtggctgtttcgatcttgtatccagataactcagactttctccatatcagcaatatggctgtttgctttcgtttcgtttgtgtgttcactggagtagcacttttcattgccttcatgaagttttcttagcattcacaacttgactaacttgttggtrcagccaacctggtgcaaagcctgtcttggctttcaacgtgccttcctcactgagctttatcatttctagctttgatttaaagtgagagacatgcaactctgcctttcgcttgaacatttagatgccgtcgtagcattattaattggtctaatacagtatagttgcgtctcaggctatcgggaggcacacctgaggagaaagacagagacagtgtctaacaggcagttggcgtatcagtcggaacacat

SEQ ID NO: 666774 - DNA, 588 bp, Homo sapiens
agcatttgttgcttcacctcgcatttttacatgatggagacagtttctttccttaatcctcatgaaccaacctctgctagcttcaaccttgtcttttacagcttcctgacctctctcagccttcgtagaattgaagggagttggggccttgctttagattaggctttggctttagggaatgttgtggctgtttcgatcttgtatccagataactcagactttctccatatcagcaatatggctgtttgctttcgtttcgtttgtgtgttcactggagtagcacttttcattgccttcatgaagttttcttagcattcacaacttgactaacttgttggtacagccaacctggtgcaaagcctgtcttggctttcaacgtgccttcctcactgagctttatcatttctagctttgatttaaagtgagagacatgcaactctgcctttcgcttgaacatttagatgccgtcgtagcattattaattggtctaatacagtatagttgcgtctcaggctatmgggaggcacacctgaggagaaagacagagacagtgtctaacaggcagttggcgtatcagtcggaacacat

SEQ ID NO: 666775 - DNA, 614 bp, Homo sapiens
caaacctttaaaaaattttttaaaaaaatctatttatagcaaatatctgtacaacctttctccagagtccccaactgttaacactttgccacatttgctttatctttctttgtctccctcactcacaccttcccctccttcctttcctctgtctctcaagaagctaaacataattgcagatagactgacattttgktcctaaacacttcagcctatatctacaaaggcaaagggcaatcttctgtgtagccgctgtaatgtgtgatgtaaatttcaaggaatttaacatcgatacaatgatatttcttttgtagtccatattcaaagatcctcccaattgttcccaaattgtcctttatagcttttttaagcctttatttatttattttttagcagttttaggttcacatcatagagaggaaggtatttcccatctactccctgcccaaatgtgcccataccctctccattatcaacatcccccaccagagcggtacattttttgcagctgataaacctaaattgacacattgtaatcacttcacatttatagcttacatgagggtacactcttggtgtacactctgtgggtctggacaaatgtataatgatat

SEQ ID NO: 666776 - DNA, 510 bp, Homo sapiens
gaactacaatatattagttatgtcttaataaaaaaacattgaacgccaggcacagtagctcaggcctgtaatcccaacactttggaaggctgaggcaggcagatcacttgagccyagaagtttgagaccagcctggtcaacatggcaaaaccctgtctgtatggcatatacaaaaaattagctggatgtagtggcacattccagttgtcccagctactggggaggctgaggttaggaatcccctgagccctggaagccgagactgcaatgagccctgatcatgcctgcactccagcctgagtgacagagggagacctggtctcacaaaataaataaataaataaatacattaataaattaataaattaattaattaaattacaagaagatataatatacattccttccagtcccaaaatatggacttgtttggatctcgattcaaacagatttggaaaaaattaaaattatggacacataaatatttgatgccattaaatgcttatttgt

SEQ ID NO: 666777 - DNA, 510 bp, Homo sapiens
gaactacaatatattagttatgtcttaataaaaaaacattgaacgccaggcacagtagctcaggcctgtaatcccaacactttggaaggctgaggcaggcagatcacttgagcctagaagtttgagaccagcctggtcaacatggcaaaaccctgtctgtatggcatatacaaaaaattagctggatgtagtggcacattccagttgtcccagctactggggaggctgaggttaggaatcccctgagccctggaagccgagactgcaatgagccctgatcatgcctgcactccagcctgagtgacagagggagacctggtctcacaaaataaataaatwaataaatacattaataaattaataaattaattaattaaattacaagaagatataatatacattccttccagtcccaaaatatggacttgtttggatctcgattcaaacagatttggaaaaaattaaaattatggacacataaatatttgatgccattaaatgcttatttgt

SEQ ID NO: 666778 - DNA, 449 bp, Homo sapiens
aacaaagcatcagataacaggattagcaagtcaagctctcataacaactagttttgtgatcttagggacagccacattaccactatgggccattattttaaattataattwtaattttttttttgcagagacagggtctatgttgcccaggctgttctcaaactcctgggttcaagtaattgtcatcttggcctcccaaagtgctgggatggcaggcatgagccaatgggccatttttttaacatcactaatatatgaaaagtaagattatatttgccctattttactggtttgtcatggtgacttattgacattaatgcatagtggtgctttcttgagaatggaactttaatcatggaaagtccttggcttttgaactttggcttccctgaaactccagaaaagcaagcaaacattgctgccccattccaggggcctgcacacaaatg

SEQ ID NO: 666779 - DNA, 612 bp, Homo sapiens
ttttttggcagcctaaagattggtcagcagtgtgggtgtgagaatatcctgtgatcctctgctgcaaccatgcactccccatgtgtaattcttcagcagcctgtagccccagcctggaccagtcatcacctttccacagacctacctgaattctatttattcccctctgaatggagttctgaccaccagaagcaggacttggaatcaggacgtaagaaacacgcaggtttgcagttgggaatcataataaaggatgtgacaccaaagtggcaaggtataaggagagaaccaaaggtggagatcggtccagagcattatagctgaggagtgagtgaagactgctcaggcaatgaagtcctgctcacatgacaaatggcaagtctacccttttataagacatcagggcaagcaggggctgtttctcaatgggaytgcatctgacccatcttctactgatgtttattgaacaggtatttggaacaagaaattacactaagtacatcaggggttctatgatgataaggaaataagccagggaatatcttgaaatgatgtccagtcataagttttataattctattctgcatccataataattaaaatgaggttaag

SEQ ID NO: 666780 - DNA, 615 bp, Homo sapiens
gctttagcagatgggctaaaatgatattaaaatctaagtggtggtgatgagaggccctgcagccaatggtagcatctgtgaaccatgactaggcaaaaatgtttggcaaggttaagggcaggttcaaagtaaaacaacatgcatcaagcagttcattcagaactgttagttatctatttaattttgtttcctgttgttcttttaagaacattgaatgccagaacttcagtggttggtgtagtactactcccttaactcaaaatgtagagatgctggtatctctaccttggatgctctcattttactattctggaatgccccctctctgctctttatgattcaaatccttctcactttcactacttaagtaaatgtctaccccagacaataaatatgtgtcaatcaaggatccatctcatttactgggcactacatatggggatatattaaaaggctaaaaaaaaattaggggtaaggaggccaatcagggtgcatgttttccaagaaagtctctagaagaagggtgacataaattgcaaggacgtgggttrgtgtgaggttttcatgacttcatctgccacccaaattatttattttccattaatataaatttta

SEQ ID NO: 666781 - DNA, 545 bp, Homo sapiens
ttcttttaccatatacaaaaatgaactcaagatggaataaagatttaaatgtacaacctaacactatgaaaacactggwaggtaatctaggaaataccattgtggacataggggctggtaaaaatttcatgacaaagatggcaaaaacaatcataacaaaaacaagaattcacaaatgggacctatttacactaaagaactttcacacagcaaaagaaactatcaacagagtaaacagataaactacagaatgggagaaaataattgcaaactgcacgtctgacaaaggtttaatatccagaatctatagggaacttaaacaaatcaacaagaaaaaatctcattaaaaagtggccaatgaacatgaatagacacttttcaaacaaagatatacacacagccaacaagcatatgaaagaatgctcaacatcactaattattaaagaaatgcaaatccaaacgacattgagataccatttcagcagtcagaatggccataattaaaaagtcaaaagataacagatgctagcaaggttgcagagaaa

SEQ ID NO: 666782 - DNA, 621 bp, Homo sapiens
ctaggctggtttctccaaaatgcaagtcacaagccattgctggctcataatatcaatttagaaagtcacaatctttatttttctttaaaggagtagaatggaatacaaattacaaagtacattccaagtaatagagtatgatttcctcaaaaagctgtttcaggtgtgtgtgtatgtgtgtgtgtgtgtgtgtgaaaataaatgtgataatagatgtcagctgcctggaattgtgtgaatcgtgtcataatgtaaaacatttactgtgggtcatgcttagagaagtttgaaagtcattgttttagccaggggtggtggacatgcacttgtggtccctgctactcaggaggctgaggcaggaggatctcttgagctctggagatggaggctgcagtgagctgtgattgtatcattgcactccagcctgggtgacagagcragaccttgtctttaaaagaaaaaaaaagaaagaaagtcactgttgtagatgtggcttcttgtttgagcaaaggaaggtggggtgcaggggaaggggaaaggagaagggagcagaaagaggaatcttgagggaccctctgctgcagattagtgaagtatgtctgccccagccttaccctggcc

SEQ ID NO: 666783 - DNA, 552 bp, Homo sapiens
ggtttggaaattgtattccttggaacttcagggctctgtagagatgtctgagggtcactagtcacagcagagaagggaagtatagtatgagaagggaagagatgatggtgataagcaggtaaggtgatcagatccttctttctgaagttcagtcagagcaaaaccattttatctattgtgtacactggtgctctagatatgagaaaagggttttctggcaaatacattacagacatatagatagattataaatagacatatagaaggccactatctgagtataatcccatcggttcccagctgaagaagaggctagagttcaggtagtagagaaagaagataatattgcttaagcatatattctacatgctggccattttwaacatactatttctcttaaactcacaaccctgggaaatataagctattcattttaatttttttttacttcataagttaggtgatttattcatgttcacattgtcacaggagatagaaccagaattgctcacttttttttcctaatattgctactacaaccaaaagtaggga

SEQ ID NO: 666784 - DNA, 569 bp, Homo sapiens
gtttataaacaacagtaatttattactcacagttctgggggcttggaaactcaaggtcaaagcactagcatattcattgtatggtgagggctcactctctgcttcatagatggagccttctcactgtgtttgcacatgatgagaggggcaaacaaactctcttgggcttcttttataatggcactaatccactcatgccctaatcatcttctaaaggtccacctcttaatactattacattgggcattagatttgaacctgtgratattggaaagacacaaacattcagaccattccacagtgttttttatctttagcatttctttttgattctctccatttctgtgtttacataattaatatgttcttgcatgtctttttttccattaaagacctcagcacattaattagtttttaaaaagtggtataattccaaccttcctgccatatctgttattctgcttctcattcagtcccttcaaactgtgttttccttttagtgtattttatatatattttttcctgatggccagacgttatgtactgggtaataggaacagctgtaaata

SEQ ID NO: 666785 - DNA, 537 bp, Homo sapiens
ctcattttttaaaaataaatgtacattttttattttgtatataccagggattgtttatctttttgctatggtactaagttcccttgtgttcccctagagagacttctcagggcaaaagaagcatctgataaacttacatttatctgtcaggaatagatttcctctctgatgtatttgcatgccccaaaagtggtgaaaggtagaatttgaagcacagtggatagataaggtgtatttgggtatgtttacatttttagtgttttgaaaatttgattgctgacccacagtaggaaatgcattttatgtcataactgaattcacatatgaatacatatatgtgcaaatataaytgaaaatatattttgatgcaataatgcttacattataaggtacaaatctactttctataatttttcagttaacaaaatgcaatttgagagcaattacattgagttcacagaaataaattagaattaagaatttgaaaatcacttgttgttttctctatgtactttgtgatgaccattatgtgagatc

SEQ ID NO: 666786 - DNA, 623 bp, Homo sapiens
tgtttggttactatagcctggaaatatattttgaagtcaggtagtgtgatacctccacttttgttctttttgctcagaattgctttggctatctgggctctttttggatccatataaattttaggattatttttcctatttctgttaaaaatgtcattggcattttgatagggattgcatttaatctatagattgctttgggtagtatggtcattttaacaataatgattcttccaatccatgagcataggctgtcttttgatttgtttgtgtcctatgtatgtatgtatgtatgtatktatttatttatttatttatttatttatttatttatttatctatcagagttttgtaggttttcttgtagaggtcttctacctctttggttaaatttattcctaggcatttttttggtagttattttaaatgagattgccttcctaacacctttttcagatagtttgttatttgtatttagaaccctactgatttttgtatgttgagtatgctgattttatatcctgcaactttactgaatttattgattagatcaaagagtttttggtggattatataagattttctaaatataataaaattatgtaatctacaaagatgaacaa

SEQ ID NO: 666787 - DNA, 591 bp, Homo sapiens
tgctctgttcactggtaccgaaggctctgagtaaggtggaatcagaccctactctactttccctgaacagtgagagcagcaagagctaacagctgagcatctactttgtgccggaccctatgacatgcactttccatgcattcatgcagtcttcacaataattgaatgtggaaggtgccattgttccctgtattgtaccgctggccagtgagagccaggagcctgtgctcatcacaataccatagttttcagccccccaggctaacatctaycctctctcgtggtgcctgggacccttctggacctgatcaaggtgtagcagctaatggactcggaacaagtctctgtagatttgagtggaggcgccacttgggctggagaggcttgcggggagctttgcaggggaaatgaagcttgactcttgggtcctcagggtttaaggtttgccttttttctcaaaaaagacttaaagggaaccaggtcccttgtacctgctgtgtgcacctggcaaagagtgcatcgggtggaatgcagtcctctctcaccaagctcttgcactccattgccccctagcctagaatacttgctccc

SEQ ID NO: 666788 - DNA, 315 bp, Homo sapiens
cattgtgtctctgccaggttttggtagcaggatgatgctggcctcatagaatgagttagggaggagtctcttcttgaaatcttggaataattccagtagaattgtgctagttgtgttttatatgtctggtagaattcagctgtgaattcttctccagggctatttctggttggtaggattgtattactgattcagttctgaaactcattattggtctgttcaggatttcattttattcctggttcactcttgggaggwtgtatgtttccaagaatttatccatttcctttagattttctagtttttgttcatgga

SEQ ID NO: 666789 - DNA, 629 bp, Homo sapiens
atttaattgcttggctaactactatacattatttggctacttaccatacattattcaatggggctcaacaaaatataccctcttttttgctaaaatatattatttgatatatgtatgtatttcatatatattaagattatacaagttctagaagacataagcctcaaatacttaaacacacatatatattctcctttaatttttgaagtatgcctcttctggaacttgtattttttattttattactttaattgacacacaatgattgtacatatttatggagtacagtgtgatatttcaatacatgtataccgtatgtaatattttaactatgaaacttcattctgtgttatggctatgttaaatttcagttacaattacatgtacttataaacaggacaattagcacatattttattataacagtgcctgaaatatgttcatctgaagtataacagaactaaatgtattatttatgttaagatgaataataaatgttccagctttgttattcartgttaattacaggagtgaaagactgctatatgtgctgtttagttagtcagctgaagatgttacaggacctattacaatttacgatttgttcttcacacatacagatgtttcag

SEQ ID NO: 666790 - DNA, 586 bp, Homo sapiens
gtggtccgtgtttgaattctgcagctggaaaatcaagtctccagcttttgcaaaagtgttgtaatagggaaacttggacactaattttatataccaacctcttcttggtaaagagacatagctcatgagcaccaaggcctttccagcattgcacatctatgatacttatactcaagtgcatttttttcttcgagagctcaaggctagagttgggtgtttttgcctcactgggtttgtaggagactcagctacaaagtcattaattgctttggtgaatcaacaagtaaagaaagacagtccagctattgtccccacactgcaaaatcataagaggcttctggacttctccacaaaatcctcattaaagatgagtcctcatggctcttacagaattctttattatgtcctttgtgctgagactgcaaggtaaagaaagaaaaaagggaaataactaaatttgttatcatggaaaatttcaaacatacaaaagatgaaagaattgtataatatacmcccatgaacttgtcatttagctttgaaagttaccaactcatggccaatcatttttcatctgtaccctactcac

SEQ ID NO: 666791 - DNA, 555 bp, Homo sapiens
gttttaacatacctctctcagtaattgatagaccaaggagggaaaagacatgaaccagaatagggaagctctgaaaattaaaatcaacagtcttgatgtaattaacacacgtggtaccctacacctgaagaacatatattaactttaagcacacacagaatacctatggaaaataaatgtccattaggaactaaaggaattgtcaacaaatttcaaagaactactgtcataccatgtatctgattgattgattacagtgcaattgtgtaaaaataaacttttaaatgacaaccaaaaatatgtgtttagaataaaatagtattgaaacataacacaaaatacaaaataaatatccatagcmcgcactgttgactgaaaaacataagggagaagagacaaatcaatcatgcagaagaattccaaataattcagagagatacttccccataaagaaggagaacataagtcattgctccttaagtgggtgttgctcatagcgactgaaagggcaacaaaagagtaacttgtggagaacctgtggagaaacttgacaac

SEQ ID NO: 666792 - DNA, 583 bp, Homo sapiens
atttcttatcatggattatggtaaaaaaaaaattgaagccactggtctagggaaaagtccagggctatttctctccccacctacaaaacatgaggcccacctggcagaggtgaagggcactgttagtccactttgtggggtcccctttagatcccttttctttgctcctgctttcaaagaagccagatcagtgagacagcccttcccacatctccccatcttgaaagtcaggtaggaacctgttggagctraaagtgaggagggcacatggcaggcctcactttcatccaggaggacagatggggccctgcatatcttatgggaccctctggctttaccaggatgggagaattgagaggcacttgagccacagttccagccagtaaggttgtgtttaacctggagggccctctggtattctcaggaatctgtggcaatggtaatacctggtcttggatttgggacatcaagagcttacctaggtaagacttctcatcagtacacagcttttaaaagtatggttttcattgtctgggagtttgttttctcccagctttggaaattgtacttaccacctgtttcc

SEQ ID NO: 666793 - DNA, 566 bp, Homo sapiens
agcaaccacatctcccgagaacttattcactatcaaaagaacagcaagggggaaatctgtccccatgatctgatcaactcctactaagcctcacctccaaattggggattacaatttgacatgayatttggatggggacataaatccaaaccatatcagaccttgcaaaaaagaaaaaaaagaaaaagaaaaacctgaagatggcagataggtggcagaactagcttgcagctcctgctcagatggacagagcagcatgtgaaaactcacatggtgaacttgtgctccaagaactaccaaaggaacataccaggaaagccaagagaatccacagtccctttgaaggaactggatcaccactgaaagctccttgagatgctaaaaaactgagtcggcttggtttttcaacgaggaggcatgcagtctgggataagttctcagtcttgatcactggctgcccggaaataaactcagtgctattggaggggggcgtggtgggagtgagaccagcctttaggactgcaggctgtgtaagagcaggttgaggcttgttactgctgggtttt

SEQ ID NO: 666794 - DNA, 534 bp, Homo sapiens
  misc_feature 1, 2, 3, 4, 5, 6, 7, 8, 9, 10, 11, 12, 13, 14, 15, 16, 17,18, 19, 20, 21, 22, 23, 24, 25, 26, 27, 28, 29, 30, 31,32, 33, 34, 35, 36: n = A,T,C or G
nnnnnnnnnnnnnnnnnnnnnnnnnnnnnnnnnnnnagagttgggtgcttctccattttttcgctctgccttacattgagtagctttattctcagatattatctggtggcccctaaccgttctgggctcatgtatttacaggttaaagtttacagatttgagaacatgcttcttytccaatagtctcagaaaaagccgtatgcagccaattgttcgtgactgaatcaaacaccaatccctaaacctatctatatagatgggtgaatcctctgtcctgataggtgggccatgggtcacatgtccaccgtaacactaaagattggaaatggcataggtgtaataagaaaaataaagagaaatggatgctgggaactgcccacctccccaagtgaaaatttaaaaaaccccataaatattcaatacaaaataataaaactctcccaaatataaagtataacatgatttaagatcatttttgctacctgtgattaggagggaagtctattttataatggaacttgggaaagattttta

SEQ ID NO: 666795 - DNA, 573 bp, Homo sapiens
gttcagaggggacatatacacagaggcccagggcagtcaaagagggtctcagaaatgaggggagaagtgagaccatgttatcaaggaagactgcccaggacttaaacaagtagaaagtagagggctacagagggytccaggcagagccctgacacagaaagcagtaaagactatttgtttgaagggcatgaggttaagcttgttcagggctagggtgaggtgggtggggaatgtgaaacagttttcttcacctttgcccaagaagccagatctctgtagaagatctagagcccagccaagctaattctgttgcattatctcatagagcaccatttttgatcagttagaaacagatgaatccctcccatttatcgctgttttctgtggaaggttgggacagttcattgaaccatagctgtgacctttgagaaagctgccataggaaggctggctgggaatcgctccacgtgtgatggttgatgtggtgttgggtttctctaagctgaatttctctctgctgaatttctcaattctgttggttatagcatgatgggtaaacccacaaaagtcaca

SEQ ID NO: 666796 - DNA, 573 bp, Homo sapiens
gttcagaggggacatatacacagaggcccagggcagtcaaagagggtctcagaaatgaggggagaagtgagaccatgttatcaaggaagactgcccaggacttaaacaagtagaaagtagagggctacagagggctccaggcagagccctgacacagaaagcagtaaagactatttgtttgaagggcatgaggttaagcttgttcagggctagggtgaggtgggtggggaatgtgaaacagttttcttcacctttgcccaagaagccagatctctrtagaagatctagagcccagccaagctaattctgttgcattatctcatagagcaccatttttgatcagttagaaacagatgaatccctcccatttatcgctgttttctgtggaaggttgggacagttcattgaaccatagctgtgacctttgagaaagctgccataggaaggctggctgggaatcgctccacgtgtgatggttgatgtggtgttgggtttctctaagctgaatttctctctgctgaatttctcaattctgttggttatagcatgatgggtaaacccacaaaagtcaca

SEQ ID NO: 666797 - DNA, 563 bp, Homo sapiens
atttagccctcctggaaaagtacacagttttaccttaaattgacattaggaatctttgaactgatgaatttgatatagagaccccagaatcagtaagctctgtctccacaacgtgacagaagaaaggcttcatttccatgcattatttctgagggaggaatgaatgaattctccagaagtttgagttccaacagctcagtgccatctaagttgctatggagactttgtaaaccactaagaaycctgggctggggaactgtctagcccagtgctgttgaatagggatacaatgtgagccacaaatgcaagttatttgtataattttggattttcaaaagtggccatcttaaaaatgtatttaaaaaggtgaaattaattttaacaatatattttattgtcatttcaaaatttaatatagacaattattgagatattttttccttttttgttataagtgttgggaacccagtgtgcaatttacatgtagaacacatctcaatttggaccagctgcactgcaagtgctgcaccatggatagtggctactgtattcaatagtacaga

SEQ ID NO: 666798 - DNA, 563 bp, Homo sapiens
atttagccctcctggaaaagtacacagttttaccttaaattgacattaggaatctttgaactgatgaatttgatatagagaccccagaatcagtaagctctgtctccacaacgtgacagaagaaaggcttcatttccatgcattatttctgagggaggaatgaatgaattctccagaagtttgagttccaacagctcagtgccatctaagttgctatggagactttgtaaaccactaagaatcctgggctggggaactgtctagcccagtgctgttgaatagggatacaatgtgagccacaaatgcaagttatttgtataattttggattttcaaaagtggccatcttaaaaatgtatttaaaaaggtgarattaattttaacaatatattttattgtcatttcaaaatttaatatagacaattattgagatattttttccttttttgttataagtgttgggaacccagtgtgcaatttacatgtagaacacatctcaatttggaccagctgcactgcaagtgctgcaccatggatagtggctactgtattcaatagtacaga

SEQ ID NO: 666799 - DNA, 543 bp, Homo sapiens
tcaaaaggggtacattttaacctatttggagtgcgtgtctgatgttgactttcctgggaatttcggagagaaaaacctgcagctggttggcccaggttttgtttcactttcccagtaggtacagtctctctgagctgcggtattcacacatgcccagcgtgttgccagcagggatcaaagacagagtcaaaagaggcagaaatagcaaaaatcctgttccgacgcctttgcagcttgcagacattcagcatttcatctccatgaatttcccagagtgcattcaggagttgtgtgcgtttaaattttgacccttagccgcccatcgtctcattcccttttggagtattcagaaattcacactattagccaaaggggacacgtggggtaaaaggaaggaagacaatcaactctctaacctggccaarttgttttgaataatttctgactcaaaatttccttatctttgcccttttgctcttccccatcttccccaatccctttagcaattcctgcttccattctggcctgatggggtcaaaatat

SEQ ID NO: 666800 - DNA, 614 bp, Homo sapiens
cttgcaaagcaccaatagctgcactctggaagcccagacctattttgaagtcttgagaaatttttcacaccagatgctagaaagaagtttttgaatcagaagttcaatgggcttttcataatatctaatttcatgaagcactacagyataaggcttgcggtgaggtttcttcacccctccagtagagggtgcacttgcaagcggcatttgtagcattcggtgaggtttctttacccctccggtagagggtgcactcgcaagaggcatttgtagctagttatttttagctagttgcttcctgggcagtttactatgggtcatttgcaagcagtccactttgtaggagccatggaatagagatttccttacttacaccccttgtcctttggctgcagctcagtgaactagaggctgcactggtgttagagcaagaaatttttcttcattacataaatcctggcacatagtaagtgctcaaaatatatttaatgaacaaatgaataaataaattaatgtctaacatgtgaaaccagtttaggttattttcaaaatgaaaactcagcattcaccaaatattctaattgccaacagtgtggcaaaggttttaggttaga

SEQ ID NO: 666801 - DNA, 598 bp, Homo sapiens
gtctgttgtgagacaaggggcttcaacgacccacaaatatttaccaggacacaactgagaacctaagctgtgccaagaaggtgtggccgctgcacctgagggcccactgtccagctgggaaacatgacacgcacacagcaaacaggtaaactggacgaagctaatcttagatgcattccagctcttggggaagttatttagtctctctttacctcaacatcctcttcaaaacaatggggacaggaatgccagaaccttagagggcagtgtgggatcgaatgaattaatccatgtaaagtgcttagaacgcacctgaaagatactgaggctcactaaggctagtgctattgctgttgrggtttttgtgttcttgctgctcgggagggagggaccctcctgcctagagcagtttggagagtgtttctataggagggtggccttttaagaatgaatacaattgagaagggaggccactatctaggaggaagccagaaaatgagaagtcccggagttggaatgtggacattaatttactgtcagggagccatgaagtgcaaggcccagccccagcccccacccacctagaattcctgctgct

SEQ ID NO: 666802 - DNA, 619 bp, Homo sapiens
tgcagagcctacacataggataattacagggaagaagaaggaaaaactatttttatctattcactcaaaaagtatttattaacaccatccatatggtaggcactagtttaagttggaggtactagcatgatcaagacagagaagcaccctgccttcgtcgagtttatgttcaagttgaagaaacagacaataaataagcaaacaatatgattgcacagtgtgatgtgtgaatcacacccaagtgaaaaatgaacagggtgatgttttacagtgtaattggaaataggaaggcaagacagaatggaaggactattttagataaagcggtcagggaggattcttaatagaggtgaaacctccagttttgataagccacattggaagctgagagtggtaagatctgagactggaaattatgcattagagggagctctgattttgttataaagcacagcagaatgtcattgaagaatgttaaacaaggagtcgtgatcttatttacattttaaaaaagtcrtttatgtggagacaaaagtagaagtaagaaaaaaagcatgcatgggaatgataaagaccaaaatcagaatgtagtcatctgtatggttggagaaagatgatt

SEQ ID NO: 666803 - DNA, 530 bp, Homo sapiens
ccaagtaattctcttggcgatcagctgtatgcagaacttcaaatataagagacttggaagatatcttgcataatattacatatgtaattcattctagacaggaattattgttcaatctatttaaaaaaaaamcaaatctgtatttatgttagaggccatggataaatatatagaatatagttaggaatgaaaacatttatctggataaatcaggaaaaatgaacaaaccacccccaccctgcaaagagggcctacttacacacattaaatttgcttatataacttcatagacttgttatttattttgttgtttagaagccaaaaacaaataatgaatcctgacttcctttttactacatattgaaataacaaaaactaataggccagtaataattcagctctacggtgttaatcaagcttgatcacaaggagccttagaaggaaaacagtcagccaccctgttgtttgccttgccaatgccattctactcttctgccttgcaaacaccaccacaattttgtttgggtagt

SEQ ID NO: 666804 - DNA, 616 bp, Homo sapiens
acatttaagaatttagtatggtctgtggagaaaaacctgattagtcaataaatagtattgggacaactggctagccatttggaaaataattaagtgagatttctacctcactcattatactaaaataaattccagatggataaataaatttaaactaaaaccatagaagtagttttttaaaaaaagaactaagaagactgtttttaatagactttttaaaaagtgatataagatctagaattcaaaagagacaggctgataattttgactacatagaaaagaaagttttctgcatatttaaaacaccaataaacctgaaaaaaaatgaacctgacaaatgtggtaaagggctaatttccttaatacatctttttaaaactcttaaagattcatttttaaaaaactaatgaaaastcagtagcagaatggacaaaatactgaactcaaagtggctgggctcaaaaaaaaaggccaactaacatataaacctataaaaagtcactcaaccccactcataactttacaaatgcaaaataaaagagagcagtatacaattccattaacacataatatgcaaagattgacatttgataaaattaagcattagaatatacac

SEQ ID NO: 666805 - DNA, 616 bp, Homo sapiens
acatttaagaatttagtatggtctgtggagaaaaacctgattagtcaataaatagtattgggacaactggctagccatttggaaaataattaagtgagatttctacctcactcattatactaaaataaattccagatggataaataaatttaaactaaaaccatagaagtagttttttaaaaaaagaactaagaagactgtttttaatagactttttaaaaagtgatataagatctagaattcaaaagagacaggctgataattttgactacatagaaaagaaagttttctgcatatttaaaacaccaataaacctgaaaaaaaatgaacctgacaaatgtggtaaagggctaatttccttaatacatctttttaaaactcttaaagattcatttttaaaaaactaatgaaaactcagtagcagaatggacaaaatactgaactcaaagtggctgggctcaaaaaaaaaggccaactaacatataaacctataaaaagtcactcaaccccactcataamtttacaaatgcaaaataaaagagagcagtatacaattccattaacacataatatgcaaagattgacatttgataaaattaagcattagaatatacac

SEQ ID NO: 666806 - DNA, 607 bp, Homo sapiens
ttaaaaatctatttttaattaacatgaaaatgcttactgaatcactgattgtgttagtctatttttacattactataaaggaatacctgtgactggatagtttataaataaaagaggtttaattggctcgctgttcttcaggctgtacaggaagccaggtrccagcatctgcttctagtgagggcctgaggaagcctataatcatggcgggggaagtgggagtaggcatttcacatggtgagacagatgcaagagagaaaagagcgaggtcccagactcttttaaacaaccaggtttcatgtgaactgttaataactgagcaagaactcactcatcacccatgggatggtgctaagccatttatgaggaatgagcccccatgatccaatactttccactaggccccacttccaacgttggggattacatttcaacatgagatttgaaggactcaaacatccaaatcatatcactgatattttgagtccccttaattaggggtcttaaaactttgttccatgaacattcctgcaatctatgaaacatttctcacaatcatgttttaaaatgcctaaaataaaataaataagaatacaagtgaaaccaa

SEQ ID NO: 666807 - DNA, 607 bp, Homo sapiens
ttaaaaatctatttttaattaacatgaaaatgcttactgaatcactgattgtgttagtctatttttacattactataaaggaatacctgtgactggatagtttataaataaaagaggtttaattggctcgctgttcttcaggctgtacaggaagccaggtgccagcatctgcttctagtgagggcctgaggaagcctataatcatggcgggggaagtgggagtaggcatttcacatggtgagacagatgcaagagagaaaagagcgaggtcccagactcttttaaacaaccaggtttcatgtgaactgttaataactgagcaagaactcactcatcacccatgggatggtgctaagccatttatgaggaatgagcccccatgatccaatactttccactaggccccacttccaacgttggggattacatttcaacatgagatttgraggactcaaacatccaaatcatatcactgatattttgagtccccttaattaggggtcttaaaactttgttccatgaacattcctgcaatctatgaaacatttctcacaatcatgttttaaaatgcctaaaataaaataaataagaatacaagtgaaaccaa

SEQ ID NO: 666808 - DNA, 598 bp, Homo sapiens
attatacattaattatgattgtgattatagttccttttcataagtccagccttttaaaattccatatcaacggaattaccacaattctttaaggaaaaattgtgatgttggtraagtaacacacagtaccaaatactgtaacctttagttatatatacttttgtaaggaagagaagaaaactttatttagttctagtactgactctaatattgtaataacaattgttattctgttttaagtagattcaaattatttttacttctctattcttagtcttgttgagtcactgtgtgtaatgaattaacttctctatgcacctagaatagtactggctatgtattatccctgacaagactgaggaaatagtcactttctgcgtggcctaacaatggcctagaaaagctggactagaccatctgttgagctccttctagctctaattttatttaattctatattttatccacaaaattagtttgatactgtactttataaaattgggggaaggagtccttttctcatatgtgatgctaattgatttttgagaaaatatcttggtattcattttaccctaagagctgctactacctgcccatt

SEQ ID NO: 666809 - DNA, 560 bp, Homo sapiens
acttgtgtaaacaatcatttctctcttctataggatcaaattcagtaactctactatatcacttggtcaatacccaccattttttcctgtaataactttacttttagcatgattttaccctyattctacttaaaagtatcatgtcagtcttttacattttacagtcccttctcttgtgggaatagctgggttttctgtgctttagtgtgaaacactttctgtaccaactgccaagtgacctgaatgctctgtcattcttgaaatgtcttcatactggggctaatgctttcagcagtttctctttggactctgagcaaccttttctaaaatgtcatgagataccggctttccagagaggaacataaagaccagggtcaccaaggactcactcgactttctgagccattatgtctgatgttcctcattatttgccatcagtatatgctcatttgtagtccaatgagacacaacattcttttatctctgtgacctctgtcttagagcactggggaaatgaataagtatctcagattgtgtaataacccttcagaataacactt

SEQ ID NO: 666810 - DNA, 560 bp, Homo sapiens
acttgtgtaaacaatcatttctctcttctataggatcaaattcagtaactctactatatcacttggtcaatacccaccattttttcctgtaataactttacttttagcatgattttacccttattctacttaaaagtatcatgtcagtcttttacattttacagtcccttctcttgtgggaatagctgggttttctgtgctttagtgtgaaacactttctgtaccaactgccaagtgacctgaatgctctgtcattcttgaaatgtcttcatactggggctaatgctttcagcagtttctctttggactctgagcaaccttttctaaaatgycatgagataccggctttccagagaggaacataaagaccagggtcaccaaggactcactcgactttctgagccattatgtctgatgttcctcattatttgccatcagtatatgctcatttgtagtccaatgagacacaacattcttttatctctgtgacctctgtcttagagcactggggaaatgaataagtatctcagattgtgtaataacccttcagaataacactt

SEQ ID NO: 666811 - DNA, 560 bp, Homo sapiens
acttgtgtaaacaatcatttctctcttctataggatcaaattcagtaactctactatatcacttggtcaatacccaccattttttcctgtaataactttacttttagcatgattttacccttattctacttaaaagtatcatgtcagtcttttacattttacagtcccttctcttgtgggaatagctgggttttctgtgctttagtgtgaaacactttctgtaccaactgccaagtgacctgaatgctctgtcattcttgaaatgtcttcatactggggctaatgctttcagcagtttctctttggactctgagcaaccttttctaaaatgtcatgagataccggctttccagagaggaacataaagaccagggtcaccaaggactcactcgactttctgagccattatgtcygatgttcctcattatttgccatcagtatatgctcatttgtagtccaatgagacacaacattcttttatctctgtgacctctgtcttagagcactggggaaatgaataagtatctcagattgtgtaataacccttcagaataacactt

SEQ ID NO: 666812 - DNA, 528 bp, Homo sapiens
ttttaattcatgccaccttcctttgggaaccatccttcagctagtgttagccccagcagcatttatcctgatcttgcttctctgtttccccckgtcagcctctgaaagaataacacagcttttgccaaacttctttaggttttaactggaaataagaaaggaaatgtatattttacttcaggctttattttattgctctgatttttcttatttcttttaatttttaacttccttctccactttctaaagaagtctttttccacatttccattaaattcatgtctctgaagctttacttccattatattacgcatgtgaaatttcttgtctactgttacctaaatgttcctagtctgataaacagattctaactacaatttgatcataacttaatatccctcagtcaggcaggtatatttcttccaacccagcccatctcaaagccttttctcgtttcattgcccttaccatgaataccctctcttaatctctctcctgtcatccacctatcatttaagggcccagttt

SEQ ID NO: 666813 - DNA, 577 bp, Homo sapiens
gttttttctttatttttatgtgactgagttattttggagaactagtcctcaaactctgaaattctttcctcagcttggtctattctgcttctgaaattcttgaagtgaatttttcatctctctcagatcagtttggttctttcttaaaatggcgattttatctttcatctcctgtatcattttattgtattccttagattcctcagattgagtatttgattttcacctgaatctctatcttcattcctatccatattctgaattctatttctgtcatttcagccattttaccctagttaagaaccattgcagggaaactagtgcaattgtttggaggtaagaagacactctggctttttgagktgccagagttcaagctcatgaaaacagctaaaattcaaacagacgagaatgtagacctactcatacattgctaatggtaatatacattgttaaaaattattgtatggtttttatttctccttcacaactaataagcagttgggagaaacactttataagaatgtaaacatgctgcttcttataaaaatttctgcctcgattaaacatttaactg

SEQ ID NO: 666814 - DNA, 592 bp, Homo sapiens
tgtaaactactcaaaggccccagctagcattttatagtctactcactctaagaaaggtgtaggttattgcttctgcctcttaaaacccataattccagccaatgctctgaggaaaatcagctgttaagctaactcacagcctttccaccacgtttaaagtattagaagctggctgtgggtctctaggagaaagacactgacaatagctgtaattgaggttgctccagaagtaatcaaggcagaagtgcaaagtactggcctgccatttgygtgagtttaccaaaaaacccacgtggccaaaatgctaatagactcctgagagtgttgaccttcaaaagatacaaagcactttgttaattaacataaatctagcttagaaagcacatttggtataattgcccttccaattaaaatgagatttgtttacttgcacattttatttttcaattgttcctaccctattttaggaaaagaccccattatgaaagaaaacaaattctcaagaattctcagcttctctttcatgatggctggcaaagagaaaggcatctggattcagacaaacagtgatgatttctcctggctttacaat

SEQ ID NO: 666815 - DNA, 602 bp, Homo sapiens
tgatgagtttgttcccattctcctctcctctctgtcttgtgagctctgttgcccagagatagaggagaaaaaagaacaattttatkattgaatgagtgttaaaccagaatatgatgtgaatcacagacacttcactaagagattacaaagatagaaagacaatattatatagctgagcaattacaactcattacatacatgttctcaagacagatgatatgtgaccatttgtcatacatgttcatcctaaattcaccttgtatttggggtgattctgtgtgttagcctttatcacagaaggtaattttggaaagggattcctactgaagtgagcttcttactctcccacagaaactgggaggtagggtttttatcatccttgatgattacatttcaaagaggtggttcccaaatccttgagaaggacattcttggatcttaaagaaacttatttggcttttagaaatatttacatacatttcaaaaacatagagaaagaacatacaaattttctaaagtaaatgctctaagaaaagagaattgaaggaaatctctttgttttcaacaggaagaattagacctcttattttaaatgagtattt

SEQ ID NO: 666816 - DNA, 550 bp, Homo sapiens
tttttattttgaattgtggatctatcatttaagtgtaagaataccacattttacaacacactcaataagtggccacaagtaagaaaaagtgataaatgtatttgggagaatttgagtttgtcatggacaaaatattaacttcatttttttctgtagaacaactggagcaacaatagtataatctttgttatgcccatgaaactgacattacaaagcaaattatgtagttaagactcaggattcagccttgtgtatgttaacctcaagctcattcatgcattcacaattaagaggcaasagcaatatctgatactttccatcagaaaccttctcactatatattttaagtagcatttgaaacatcaattttcttctttatattcatttctgatctcacatttttctaccatgaacacattaaaaattttaaggaaaaaaaagttattatacaagatgctcatctgtttgtgatccacccttcaacatactcattactttgtttttttttttttttggttgataacattgcattaatttctaagatttagca

SEQ ID NO: 666817 - DNA, 542 bp, Homo sapiens
attgaggtatgtcaatatggaacattcttcaactttttgcacctaaagtgaactagttttaaagtcttcatttcatagaaattaaaccattaaccttattaaatcaaggcaacctttggtttaaattcaagtatatataggttactctttcttcttatggttaaattctcagtctttaatatttttctttccttttccctcaagagacatctagatttgtgggggaagagtagtggtatgtgtctaaaccaggaggtgtaaaagttttctctaaagggtcagataggatagtaaatgatatagtttggatgtcccctccaaatctcatgttgagatgtaatctccagtgttggaggtggggcctggtgggaggtgtttgatcctgggggtggattcctcattaatgactcrgatcatccccctggcaataagtgagctcgtactctgagttcacaggagatctgatcctttaaacgtatgtggcccctccctgctaactctctcccttgcttctgatttcacaatgtgatgtggctgcttcc

SEQ ID NO: 666818 - DNA, 524 bp, Homo sapiens
atattttctcctgccacttcagaaccaccaaatcttttgggctgtctcaggctgtcactctagagttgttctacaccactattcaaactctatcctagccctatcagcagtacagtttctcagcttttggtgtatatcctggaagtggtaataaggtgtaggtggtccacagtgctatctaagctatcttytcatttgtctttttttcccccagcttctatttctccacttagtaagattttttttcaattttccatttcaatagatatttgcatttatttcatctcatcatgtatcatttgtctgagttatggatttcttttcattacctctgtgcgtggaatcattttaagctctcagcctttttaacaaaaatgatgataatattaataatatgttttgcactaaaaccatgattcttgaatatcagaagatcacttatttttaaaaccaaggtatatttcagtctcaaaactagaaatatgacccgtttagaagatggttctttggaaacctaatgctgc

SEQ ID NO: 666819 - DNA, 514 bp, Homo sapiens
tagaagatggttctttggaaacctaatgctgctgccaggattgtgaagaaaaaattctggatacaatgaaaggcaggaaaaataaacttctattatatatcaacctgttttccagctacttacattctaagtacttatggaatgcctataatctcataaagagtttaagcttttagggtagaggcagtatctgccttgaccacttctgatatggtgcctagaatatagcaagtggtcaataatatacaattatttgtaaattgtcagtcaatatccaaataagatcattaattagtcattaattaatttatgatctagtggttgacatatttagttgttaattatctactgytttacattcattctttttcagtgggacttaatatctgattatcatttcctgaaatcatttgcacagggcatctgtatagcatgctttattctagttacttgtgtatgtgatctcatttctgacaagtaagtcttaccaggtaaatgagaaaccagccataac

SEQ ID NO: 666820 - DNA, 628 bp, Homo sapiens
ggttgtctgtttactctgttgattacttgttttactgtgcagaagcttttagtttagttaggtcccatttatttatttttgtttttgttgggtttggttttggggtcttagtcatgaattttttgcctaggccaatgttcagaagggtgttgctaatgttatcttctagcattttcatggtttcaggcrttagacttaagtctttgatccatcttgagttgatttttgtataagatgagagatggggctccggtttcatttttctacatgcggcgtgccagttttcccagcaccatttattgaataaggcctttttccccaattaatgtttttgtatgctttgtcaaatatcagttggctataagtattttgcttcatttctgggttctttattctgttccgtttgtctaagtgcctctttttataccagtaccatcctgttttggtagctgcagccttgcagttaccaaatttaaagtctggtaatgtgatgccccagagttgttctttttgcttagtattgctttggctatgtgggctcttttttgttttcatataaattttaggattttttttctaattctgtgaaaaatgatgatggtattttgatgggaattgtattgaaatc

SEQ ID NO: 666821 - DNA, 628 bp, Homo sapiens
ggttgtctgtttactctgttgattacttgttttactgtgcagaagcttttagtttagttaggtcccatttatttatttttgtttttgttgggtttggttttggggtcttagtcatgaattttttgcctaggccaatgttcagaagggtgttgctaatgttatcttctagcattttcatggtttcaggcattagacttaagtctttgatccatcttgagttgatttttgtataagatgagagatggggctccggtttcatttttctacatgcggcgtgccagttttcccagcaccatttattgaataaggcctttttccccaattaatgtttttgtatgctttgtcaaatatcagttggctrtaagtattttgcttcatttctgggttctttattctgttccgtttgtctaagtgcctctttttataccagtaccatcctgttttggtagctgcagccttgcagttaccaaatttaaagtctggtaatgtgatgccccagagttgttctttttgcttagtattgctttggctatgtgggctcttttttgttttcatataaattttaggattttttttctaattctgtgaaaaatgatgatggtattttgatgggaattgtattgaaatc

SEQ ID NO: 666822 - DNA, 435 bp, Homo sapiens
aagaaggccccatgaatgattttactgataaaaagaaagaagaggtttttaaaacaccagccaagccaatttctctccctcactataatacagarctgaactttaaaacttgaatagaatcattgttatctttttattttaacatttggtaggacaatttctgaaaccaggaaagctagtttccaaattatacacaggcctgcattaattgctatatcacaagaaactccaaaaatccttcaggaatgtcatttacacatatgtccaataataatgtgtatttcctgatggctttcagaatgaatattaggattctatggaaaatagttaacataaaattgattagtgaactagaactttcaaataaattttaatataaatataacaagaaaagtgaacaaactataagtacacatcttcataattttcataaaa

SEQ ID NO: 666823 - DNA, 606 bp, Homo sapiens
aagttggtaagtcgtcaggcaacttggtgatakaaaatatttcaaaaagactttaagtcatcaggcttttctgattcatttaaaaaccttatcctcctgatattcaaaaggtagtatggaaggatttgatggagtactgatgagaaaggtaagcgactagaatatctgctcagatgtgagaaaccatctttacacaagggctcaaggggacattaggaaagagagaccctaagacatccaaccttgaggccatgaagagaccaaaagatgtatctaagaagcattctgtctgttggttttacaggctggggcagaactagccagtggagttgggaggaggaagaaatgtggtatgataaggtgatggtctctattctttttcaaggcagtggtttctgtaagtcaccaaaaaagcaaacaaaaaccacccagctttgtgtgtagtagatgaaatgactctatcctttctttgccaaggatctaaaaataatttattctgtctgaagttatttttgatacttttaaagtattaaagcaaaaatattaaaagtattatttttaatacttttaaagtattaagagcaattaaacatagtttaaaaagca

SEQ ID NO: 666824 - DNA, 545 bp, Homo sapiens
tctctttcatacctgtcgtagccctcctactataccaacacattcccacaaaggagaaaattattattgcagctttatcaccagtacctatggcataatatgcaccaggtgcccaaatacacacacacacacacacacacacacacacaacacacatttccttctctccctgcatcattatcagtcccataaaggtagccattaactgtcacatttctatttcattggttcccaggacagtgctttttcatacagcaggtactcaataagcatttgttgaataaactgagaacatcgagagagagagagagaatcttcaaggataaattcaaaaatgttggcaatgttgggcaatgaggtgtagagtatgatgtgaaaagaccaaagctcaacatgttgtttttccaatcarctgtccattttctatgtggtagtgacactgatttctgtgaccaatgcccaagtttcttgagtgactcaggcttgtggcctgaatatgctgccaagagctaattgcctttcatgctgctctaacagtaatgaca

SEQ ID NO: 666825 - DNA, 574 bp, Homo sapiens
ttttttaaatgtttgccattgaaagggcattatgatatgaaacagattccttaacactagatggcacagagatgagtttttgtgaaatgatgaaatgtaggacactgggagagacaagactttactttgaaatttgtacagagcaattagcaggcttatctgatgaactctgtattagtctgttttcatgctgctgataaagacatacccgagactgggcaatttacaaaagaaagagttttaactggactcacagttccacatggctggggaagmctcacaatcatggcataaggcaaggaggagcaagtcacattttacatagatggcagcaggcaaagagagaatgaggaagaggcaaaagaggaaacccctgataaaaccatcagctctcatgagacttattcactaccatgagaaaagtatgggggaaactgcccccattattcaattatcctccactggatccctctcacaatatgtgagaattatgggagtacaattcaagatgagatttgggtggggcacacagccaaaccatatgtaactttatttagaaatcacccaaattgta

SEQ ID NO: 666826 - DNA, 603 bp, Homo sapiens
ttaaataatgtctcagttttgtggaggatacatgcatgtttctcttaaatcaaragtatgtacctgacataacttatgatgtagtaccatgtgacaataaagtcacattttgatgatttaatgcaggtggaaatgtttattgtttattattagttgaaacaaaagtgtaaatagtataaattgaattctaccttaaggactgaatttgtatatttactgtttattatttcaatatatattatgcatatgcatgaaggaaagacaaagacagtatagctaaacggtaactgcttagctgggaagttacaaggtttttttccaaatactttctcaatttttaaagattttccacatgcactagttataattcaaaatatatggtacgtattaagaacataagattaacctaacttagatgattgttgactacccctgcacccaaggggaacagtgtttactcaaacccttctcaatttggggatagggaaagaagaacatggaggaagattcagaaatcaatcccgtgagtctatattgtctggacaattcatggaagtctactaggaaagaatgacgaactgtgagactgaagtaagggctatg

SEQ ID NO: 666827 - DNA, 603 bp, Homo sapiens
ttaaataatgtctcagttttgtggaggatacatgcatgtttctcttaaatcaagagtatgtacctgacataacttatgatgtagtaccatgtgacaataaagtcacattttgatgatttaatgcaggtggaaatgtttattgtttattattagttgaaacaaaagtgtaaatagtataaattgaattctaccttaaggactgaatttgtatatttactgtttattatttcaatatatattatgcatatgcatgaaggaaagacaaagacagtatagctaaacggtaactgcttagctgggaagttacaaggtttttttccaaatactttctcaatttttaaagattttccacatgcactagttataattcaaaatatatggtacgtattaagaacataagattaacctaacttagatgattgttgactacccctgcacccaaggggaacagtgtttactcaaacccttctcaatttggggatagggaaagaagaacatggaggaagattcagaaatcaatcycgtgagtctatattgtctggacaattcatggaagtctactaggaaagaatgacgaactgtgagactgaagtaagggctatg

SEQ ID NO: 666828 - DNA, 566 bp, Homo sapiens
tttttaagtttgatgtagtcctatttgtctatttttgctttgttgcctgtgcttttggtgtcatattcaagaaatctttactaaattcaacrccacagaacttcccctctatgttttcttctaggagttttgtagtttcaggtcttacgttgaggtctttaatccattttgagttaatcttcgcatactgtgcaatgtaagagttcaacttcatccttttgcatgtggagatctagtttttccagcaccatttgttgaagagactattctttcacccttgtgtagtcttggtatgattgatcatttgaccacatatgtgacaattggtttctgggatcttcattttgtttcattggtctatatgtctgtctttatgccactaccaggctgtttgattactgtagctttgtaatatgatttgaaatccggaaatttgatacctcagttatgctagttcttttaaaattgttttggctatttagggacctttaaaattccatataaattttaggatttttttttttctagtctgcaaaaactgctattgggattgcatcaaatcttca

SEQ ID NO: 666829 - DNA, 566 bp, Homo sapiens
tttttaagtttgatgtagtcctatttgtctatttttgctttgttgcctgtgcttttggtgtcatattcaagaaatctttactaaattcaacgccacagaacttcccctctatgttttcttctaggagttttgtagtttcaggtcttacgttgaggtctttaatccattttgagttaatcttcgcatactgtgcaatgtaagagttcaacttcatccttttgcatgtgragatctagtttttccagcaccatttgttgaagagactattctttcacccttgtgtagtcttggtatgattgatcatttgaccacatatgtgacaattggtttctgggatcttcattttgtttcattggtctatatgtctgtctttatgccactaccaggctgtttgattactgtagctttgtaatatgatttgaaatccggaaatttgatacctcagttatgctagttcttttaaaattgttttggctatttagggacctttaaaattccatataaattttaggatttttttttttctagtctgcaaaaactgctattgggattgcatcaaatcttca

SEQ ID NO: 666830 - DNA, 577 bp, Homo sapiens
tttttgtagctctcatttttttctgatttaagtttattttcatttaaaggtttgctgcattaacttgatcagctacattttgctgagatactgatatttctatgttagttccttcagtgcgacataatatttaagcttgggtttgtctatgaaagctggcatgtatgatgacaatacctattaccatgacaaaactgaagtcagtttaagttcagaggttgtgtagacattgacttcatttatacttgggggaaataaaaataatgaagaattgatgatttttgcacctgaatgtctgcttacctcctcctacaatatagctgaatggtaattgatcttaacacatttggtcttattccattggtcttataaaatagtytttgtggacttcctgtcttttcattcttatatttttctggaagagattgtttcttctctttccagccagagtgactcctctctttgaaagcacatacctaggtttataatttttttcagatttaatatttccagtcttaactgttatttttgtcatcatagccaacatttgaagaatggcagcttatttagagttgat

SEQ ID NO: 666831 - DNA, 593 bp, Homo sapiens
cagtaactagtttgtgaaagtggcaggggaatcttgattacttagtgagttggttagggctaagatcaacccacctacttgtgataggtatgagagtatctkgaaccattgtttctgtatctagatggggatcattcatcagaacaagattgaagtcctctctgcagaacaatgggagtttggggcttgggtgaaagaatatgtaaatcatgtgtaactttccaggacagagatactgtgtagtggattagtagaatactgcagaatagcaaggagatttcttttgcttgttgttgttgtttttgttgttgtttctgtagaacaagatgtttaaggcagaaaataaagaccagtaaacattcatctgtattgaatcaagtaaatataacttggcagtgggaatgacccagaaattctttgaagttttgttatcccttggggcctggaacagaactacagggattataatgaatttgtgcattgagatgctcaatgttgggaacactgaagacatacatttttaaaattccttgggactagtgtccccagcatttctgataaaggagcttcttggtgcttcggagataatataa

SEQ ID NO: 666832 - DNA, 593 bp, Homo sapiens
cagtaactagtttgtgaaagtggcaggggaatcttgattacttagtgagttggttagggctaagatcaacccacctacttgtgataggtatgagagtatcttgaaccattgtttctgtatctagatggggatcattcatcagaacaagattgaagtcctctctgcagaacaatgggagtttggggcttgggtgaaagaatatgtaaatcatgtgtaactttccaggacagagatactgtgtagtggattagtagaatactgcagaatagcaaggagatttcttttgcttgttgttgttgtttttgttgttgtttctgtagaacaagatgtttaaggcagaaaataaagaccagtaaacattcatctgtattgaatcaagtaaatataacttggcagtgggaatgacccagaaattctttgaagttttgttatcccttggggcctggracagaactacagggattataatgaatttgtgcattgagatgctcaatgttgggaacactgaagacatacatttttaaaattccttgggactagtgtccccagcatttctgataaaggagcttcttggtgcttcggagataatataa

SEQ ID NO: 666833 - DNA, 478 bp, Homo sapiens
gaaaagtacaaaagaagacgattaggatgggaccttgacatcctggaattagagaataaaggtgtttatgaaagctatgttgggaatggtagcaggagaagactctttattcaaagagagagaggaagcagcacattggtttggtatctattagtttttgcacttagtgtaaatcacacttaggattcattctgtttaaacaccctatgtattgcagagtcataccacatcacacggcctgagacctttctcctatattattttgggacttatagaagtcttaaaggcaaggcagcagagaataaatggctcaggacttgaaggcagttttatgatatgctacctgaacagggcagcagttgagtttacttttttttttttttttttggagayggattttctctcttgttgcccaggctggagtacaatggcacaatcttggctcaccacaaacctctgccctctgggttcaagcaat

SEQ ID NO: 666834 - DNA, 594 bp, Homo sapiens
tgacttttaaatagcttatccaaggtcttgtgttgcatttgctattcattcagagaagcaaagtgttttcccaaagttcacccaggaattgtagagtatatgaatgggtaatgatttaaacagaggtgaaaaaacaaactaacatattcaatgcagaaagagcaattaagaggaacaacataatatctcatgtatacatctgtgcgctgcctgaagcataacaatcaggtaaaccttgtaacttttaaagtttaataaaaactattataggaatgtgaatacataaatctgggaaatctaacttaagttctctaaatggttttaattctgcyatattatttgcagaggtaggattttctgggacagattattatccttttccataatttctttaatgtaagacatacaaaacagaccaacagaccaataaaccaacaaaaaccagtctgtaaggtcacccatcatcttaaacatattagaaaaagaagacattaatacaaatgactaaaattaaacacaaaatggaaataaattcactagtaatccaagtccctttaaagtgagtcaggatccttttctctaaacatagtttca

SEQ ID NO: 666835 - DNA, 608 bp, Homo sapiens
cacttctgttttcttttccctctagtacttctgcatttctgccctcaattagcattataaaagaggctaaaagccatggctgttgtattagtctgttttcatgttgctaataaagacatactggagactgggcaatttacaaaggaaagaagtttaatggagaactcagagttccacrtggctggggaagcctcacaatcatggtggaaggcaaggaggagcaagtcacagcttacatggatggtggcaggcaaaaagagagagctcgtgcaggcaaactcctgttttgtgaaaaccatcagatctcgtgagactcattcactatcacgagaacagtgcaggaaaaaccatcccccataattcaatcacctcccaccaagttctttccatgacacagtgggaattgtgggaattacaattcaagatgagatttgggtggggacacagagccaaaccatatcaggtgcacagccagatatatcctgatttaaatccaggcttaccatgtactatgtgatgttggaaaggtcacttaatttctctgaccctcattttctacatcagtaaaaagatattctctatatcactatgttgtttcaggacagtgg

SEQ ID NO: 666836 - DNA, 179 bp, Homo sapiens
ccttttctctaaacatagtttcaaaaatgcaagttcatgttgyatctttaggtgttttaatttgaatgtttcttatagatgataatgaataacctgtggtattagtcacatctgattcacactcattaatgagtaatttcctttggtgcaatagaaacactcattccttatatttttgt

SEQ ID NO: 666837 - DNA, 618 bp, Homo sapiens
ttttcaggtatatttcctcaattagaacaggaaaataatcttaattaattggaagggctcaatgtaggaaatgttttattaaccacaattagagcaaacacaaagggagaaaggaatttgagtttgtatattatgtgtgagaagaaaaagaaagaattagattcatataagagtttggggaaaaaagaaaactgcaggtgagtatttgttcaaactgcgtaaatgtcttcaaggttacaaaattaatgagggaagggaattgctcagtcttggatgatgagagcaagaagccacggctcaaagctatgggaggaaagctcagactagctgttaggaaacacagtgagttagaaagaacatttagtggtgaaacatatacacagaaaagtgactgtgaagcaacaccagcagaatcattacataatcagtgaggaaagattatgtaaaacagasttggcattagctggtcatcttgcataacaaggggcttctgatcagcttttgctggagtgagttttcaattccttttttgccttttgattcttaaggacatatgacttcctactaagctcatctttctgtgcatgatctcatttaattagaacaatttgtgaatta

SEQ ID NO: 666838 - DNA, 554 bp, Homo sapiens
aacagtactcaactcaatagtctatagragggataatataacaccatccagataaagtattcagcatgatacacactggcacatataaatactcaactttttttaaccactccctctatcttgaaacattctactttcatagattccctgacataattctccaaatattccctttttcactattccttgaataagcctctttttcttttctttttttaagagacaggctctcactgtgtctcctaggctggagggcagctgttatagctcactgcagcctctgaactcctaggcttaagggatcttcccacctcagcctcccaaggacctgggactacaggggcacaccactgtgcccaacttttttttttttctggaagacacagggtctcattatgttgcccagcttggtcttgaattcctgagctcaagcaatccttccatctcagcctcctaacttgttgggattagaggcataaaccaccacacctgacccaagtcctcattttctattcgacctctaaatattttgtaattttgattcaatccctaag

SEQ ID NO: 666839 - DNA, 587 bp, Homo sapiens
aagcatttttaaacatcaagcaaatgggttgttctctgactttaaagaactgaatggctttccactgtggttggatgaatttctaagcatctttcaatggtccatagtgccctgatagtcttgggccacttttcttgcccatgtcctagttgccttgatatccttcaagattcccaaatatgtgaatctctttctgtccagagggcctttgcatatgctcttacctccacctggaatgctctttgaattgctgattgcttcttattttttaagtctcctctgaaagaccatccctacaattttaagtaggttgtctctcatcctcyttccctagctcccacttcaccccaggttactctttagcactgcattctgctcatttgcttctcatggtgtttatcataaagtctaccaacagatttgttcatgtccactttgttctgtctctctcatttcattagacactctgatggggagtgtcttttagaagtcacttcaaaaggaagtagatttcttttatgtatccaatacagtgctttgcaattatatgcacaccaaaaacatatactatatgaattaataaatga

SEQ ID NO: 666840 - DNA, 637 bp, Homo sapiens
ttccttagaagccatgcaatgatatactgagaactatgggttagtctgatttcaccgcattttcttcccagtgatcacaactggagtacctcctgcaaattctgtcacagatacgacaggtggacctcaaaaaacaaagcaaagctaaactaaaccacagtaacaacctaaaccctttgaaatggtgagaaccaatctctgtttagaaagagagagaggtgggggaatgggtggggcctggaggcatttggagctttaagaggagctgaagaaatggaatgtctttactctctccatcaaatagtgctttgtggctaaagacatgttgaagagaatggccaccaagtggtaagaattgccatgagtccaaatgtttacaggttcaggaactaaattttagcaactcagttcttaaagagacgaactcatgagctatctaatacacagtagactatgaaccatgatgttcatttattggtttatactctgggaacagctccaattccayggtattcatttttattttttatttttttgagacagagtctcactctgtcacctaggctggagggcagtggtgcgatctcagctggtcgcaacccctgcctcctaggttcaagtgattctcctgcctcag

SEQ ID NO: 666841 - DNA, 528 bp, Homo sapiens
gtgcagactgggccaactcacgttggtcttgtagaccatggcaagaaatctggattgtgttttccaagtggaatggaacactagaggatagtcagtaggggaagaatatgatctggtttacagtgttgaatgtggaatctggtttacaatgtggaatgttaaattgagtgcacaatgttgaatgtggaatctggttgacattgttgaaagactcattttgctgtgggaagaatatggggcaaaagcatcaattagtggtgtgagaatttttccattcagtgtttaaattgaatggaaattgaattggaactcttttaaagtcccaggaattgtcagtcgtttaatcaacaaacgccaagcaactgctgggtgctaggaacagtgctgagtgatgggaaacaaagatggaacaaacaagtcattagacaaaataaaatcacacacatawataacttcattttaaatgtttcaaagctctcgtgtactttatagtaattctaagaaatgcagatttacttaatattgttc

SEQ ID NO: 666842 - DNA, 585 bp, Homo sapiens
tatggtaggttgacccccaggctcccagttgatggtatatccacgcactggtgggaacagcagcaggaaggcagacctgtcctcaggccccctgatgtgcatgggcaccagctgtaacgggtaaggctgtttgatccccaggccctggatggtatatatatatttccaggcactatgaaagtaagaaaggagtaagtgtttatttcaaagtgtcaggatatcataatcttcacatatccatcaatttaattcatgctatctaaagcttaaaagagatgtgtgtgattatgtccatagtgaatccaaatcacttgatcaaacttagaagctrtttgtactaaagctcattgtatgtctcctaatgctatacctaatgttaaatgatgagttaatgggtgcagcacaccaacatggcacatgtatacatatgtaactaacctgcacgttgtgcgcttgtaccctaaaacttaaagtataaaaaaaaaataaagctcattgtaaatatttttttaaaaatcagctaaattaaacatgataaaggcagctaccataaatttgattaagtaacttaccaaacatgttata

SEQ ID NO: 666843 - DNA, 585 bp, Homo sapiens
tatggtaggttgacccccaggctcccagttgatggtatatccacgcactggtgggaacagcagcaggaaggcagacctgtcctcaggccccctgatgtgcatgggcaccagctgtaacgggtaaggctgtttgatccccaggccctggatggtatatatatatttccaggcactatgaaagtaagaaaggagtaagtgtttatttcaaagtgtcaggatatcataatcttcacatatccatcaatttaattcatgctatctaaagcttaaaagagatgtgtgtgattatgtccatagtgaatccaaatcacttgatcaaacttagaagctatttgtactaaagctcattgtatgtctcctaatgctatacctaatgttaaatgatgagttaatgggtgcagcacaccaacatggcacatgtatacatatgtaactaacctgcacgttgtgcgcttgtaccctaaaacttaaagtataaaaaaaarataaagctcattgtaaatatttttttaaaaatcagctaaattaaacatgataaaggcagctaccataaatttgattaagtaacttaccaaacatgttata

SEQ ID NO: 666844 - DNA, 585 bp, Homo sapiens
tatggtaggttgacccccaggctcccagttgatggtatatccacgcactggtgggaacagcagcaggaaggcagacctgtcctcaggccccctgatgtgcatgggcaccagctgtaacgggtaaggctgtttgatccccaggccctggatggtatatatatatttccaggcactatgaaagtaagaaaggagtaagtgtttatttcaaagtgtcaggatatcataatcttcacatatccatcaatttaattcatgctatctaaagcttaaaagagatgtgtgtgattatgtccatagtgaatccaaatcacttgatcaaacttagaagctatttgtactaaagctcattgtatgtctcctaatgctatacctaatgttaaatgatgagttaatgggtgcagcacaccaacatggcacatgtatacatatgtaactaacctgcacgttgtgcgcttgtaccctaaaacttaaagtataaaaaaaaaataaagctcattgtaaatatttttttaaaaatcagctaaattaaacatgataaagrcagctaccataaatttgattaagtaacttaccaaacatgttata

SEQ ID NO: 666845 - DNA, 609 bp, Homo sapiens
tatgaaaaccatataccatagacccaagaagaacaataagcctcaaaccaattaactagacaaaaaaatacactaaggtatataataatcaacttggtggaaaccagataaagagatcatcttaaaatgagcaggtgtggggaagattacgtacaaatgaacaccagcatgaatgatctcagagtatctttaaagcactgaaagaaaaaaaaaaacaccctgtcaacccagaattatatatccagtgaaaatcttgccacagtgaaataaaaatattgatttttcagcctaagaagggtgaaataatttgtcgatkgcaaaattactttacaagaaatactaaagaaaatcttgcagacaaaaggaaaactaaaccagaagaaaatctgcatctatagaaagcaatgaaaagcactggaaaaggtatccggctcttttttttccttttccttagtttcaaaatcctctaaaaaacaacttagcaaatataaaataaataacaagtaaagaaaatatacattttactagataaaatggtatattacttgataaaagattgtgataacttaaagatgtatactctaaactccaaagcaataaataacaaaa

SEQ ID NO: 666846 - DNA, 257 bp, Homo sapiens
gagttgaaaaattctcagtgaatgctcatagcagcattattcataatagcaaaaaagctgaaataacccaaatrcccatcagctgataaatatataaacacaatgtgttatatttatataatacagtattatttattgatagaaggaatgaaatagctatatatcctacaacttggatgaccttgaaaaattatgctaagttatggaaggcagacacaaatgggtatataatttataattccagttatgtaatgtcc

SEQ ID NO: 666847 - DNA, 257 bp, Homo sapiens
gagttgaaaaattctcagtgaatgctcatagcagcattattcataatagcaaaaaagctgaaataacccaaatacccatcagctgataaatatataaacacaatgtgktatatttatataatacagtattatttattgatagaaggaatgaaatagctatatatcctacaacttggatgaccttgaaaaattatgctaagttatggaaggcagacacaaatgggtatataatttataattccagttatgtaatgtcc

SEQ ID NO: 666848 - DNA, 257 bp, Homo sapiens
gagttgaaaaattctcagtgaatgctcatagcagcattattcataatagcaaaaaagctgaaataacccaaatacccatcagctgataaatatataaacacaatgtgttatatttatataatacagtattatttattgatagaaggaatgaaatagctatatatcctacaacttggatgaccttgaaaaattatgctaagttatggaaggcagacacaaatgggtatatawtttataattccagttatgtaatgtcc

SEQ ID NO: 666849 - DNA, 531 bp, Homo sapiens
gtaactgacataaaaatcctctgtgctcaagacttggaaccaacccaaatgcccatcaatgatagactggataaagaaactgtggcacatatacaccatggaatactaagcagccataaaaaagcatgagttcatgtccttttcagggacatggatgaaactggaagccatcattctgagcaaactaacagaggaacagaaaaccaaacaccacatgttctcactcgtaagtgagagttcaacaatgagaaaacaggaacccaaggaggggaacatcacacactggggcctttcaggccatgggtggcaagggaagggagagcattaggacaaatacctaatgcatatggggcttaaaacctagatgacggtttgatgggtgcagcaaaacaccatagcacgtrtatacctatgtaacaaacctgcatgttctgcacatgtatcccagaacttaaagtaaaactaaaaataaaaagcctctgtgctccacttatttatccctccttcttccataaaccctaatgtccactg

SEQ ID NO: 666850 - DNA, 593 bp, Homo sapiens
tgctgggtgtggtggcacgcatctataatcccagctactcaggaggctgagacaggagaatagcttgatccagaaggcggagattgcagtgagccaagatcccatcactgcactccagcctggaatagcaagactccatctcaaaataaataaataaataaataaataaaatgtgacctctgtggatagtaaactcctggcaatagatagcacaattattctctcatgccagtgattattctctctagatgcactcagacctctaactttcacagtcttaaccaaagttcttcagtgttaaactacaacttcattttgtgcctgaaacatctcaacattattctgagaagtacttaggaagatttagctatatacctcttctgtgtatctggtcattgattgaaaacttgatcactttaacaawtttcttcagttaacaaatattttgtcagcacctaccatgtgctaaatactgttataagtactggggctgggctggggcaattcagtcaatggccctttaattaaaattgtattaccatggagaaggaataatggatgtgaggagaaaccagcaattttctccacagctt

SEQ ID NO: 666851 - DNA, 600 bp, Homo sapiens
ggttggggatattttcatggacaatattctgaaatatattttccaagttgttttcttccttcccctccctttcagtgatgycaattacttgtagatttggcctgtttacataacccatacttcttggaggctttgtttatttctttttttttctttatttgtgtctgactgtcttatttcagagaaccagcatcaagttctgagattgtttcctcagcttggtttattctgctcttaatacttttgattgcattgtggaattcttgtattgcgctattcagctctgtcagacccactaagtgcttttttatactggctatttttctttcagcttctgtgtcactttattgtgattcttatttttcttggattggattttgccatcctcctgaatttccatgatctttttttttctatccatattctgaattctatttctgtcattctagccagtttggcctggttaaggacctttgctggagaactggtgtgatcatttggaggacatatgatattttggccatttgagttaccagagttcttacattgttttttttttctcatctctgcatgtgggtgtttctttaactgcagagtagt

SEQ ID NO: 666852 - DNA, 644 bp, Homo sapiens
tttgggcttctgcacaaggggagattgcatgttgctcaacccagaagatagaagaaggaatgacagggcccagaaagcctggaggagctgtgcaaaaggaatccatgcctgctttcttgtgagaacctggagaagcagtaagagcttgtccaccagttccttccagttacataggtccaagactattgcatttttatygcacattctgaagtccttcacccaacaagatgcagattcttcagaacaattcttacatgtctgagagaagctccaaacttcctccagttgggtctaatcatgggcttctaaaagaagattacccaagaatgaatcagattttagatcctcacttacgtagaccaagagagagcactgcagagatcaacaacaggaacgacagtgccctggttctccctcccaacaccttccacctcctcatcatgcagagcctcctaaagttaaacccaatccttaagggaggagaaaccctgaattgactgagagatgtttctgctaaccagcaaaataggggatttgtaataaaactgttaaaaaataaaaaggtcttgtcataaccaagttaaattacttttcttacacatctaagtttggagtttaagatttaagccaactatacggtagaa

SEQ ID NO: 666853 - DNA, 644 bp, Homo sapiens
tttgggcttctgcacaaggggagattgcatgttgctcaacccagaagatagaagaaggaatgacagggcccagaaagcctggaggagctgtgcaaaaggaatccatgcctgctttcttgtgagaacctggagaagcagtaagagcttgtccaccagttccttccagttacataggtccaagactattgcatttttattgcacattctgaagtccttcacccaacaagatgcagattcttcagaacaattcttacatgtctgagagaagctccaaacttcctccagttgggtctaatcatgggcttctaaaagaagattacccaagaatgaatcagattttagatcctcacttacrtagaccaagagagagcactgcagagatcaacaacaggaacgacagtgccctggttctccctcccaacaccttccacctcctcatcatgcagagcctcctaaagttaaacccaatccttaagggaggagaaaccctgaattgactgagagatgtttctgctaaccagcaaaataggggatttgtaataaaactgttaaaaaataaaaaggtcttgtcataaccaagttaaattacttttcttacacatctaagtttggagtttaagatttaagccaactatacggtagaa

SEQ ID NO: 666854 - DNA, 611 bp, Homo sapiens
accacaacaggatgccaaaaagttactgttttccaatcttcagggggcttaaagaacattgttttcttcttaatagatgatttctgttgactgatttttgcttctattatatattttgaattttgactacatatgatattatttttaaaagtcatttttatataaacctcatcacttcacctggacaaaaatttgcttggggtcagttcaacaaccataacattgatacctccacaaaaagctgtttgaaaatatttgtygagtaaaatgaaatacaactataatttttataatttctaaaggtacttttgacacatagtttcggaatctcctaccattggtattatgaaaattaaaaaaaagagagagaaaaaataattaggttgagtttcatctaaaatcctctccttctggagacattctcataatattgcaagcaagtagagctgaaaaaatagtagagtaactggattctataatgtgagaattggatatattactgagagtatccctaatagctaggaaaccttacattaaatatacatacagcaatgacctgctgtttgtatgtccttagtaaacatttgctgaggtcctgtgtggtggcagta

SEQ ID NO: 666855 - DNA, 661 bp, Homo sapiens
ttcttcctcccaaagaaaagtacaaaagttaactcttttcttttctaatttaccacaattcaaatttaaaaactgaacattagagaagttagttagacatatatgaaatacctagaccatggggaatacacagaaggagataagtgagcacaggaagagataaataacacagagtaaataacttcttaattcaattattttggcatttagggaaactgggacaagacttggcttaaaaagggaaagcaacatttttaaaatttctaccaactgccaggcagcgtgcattagttatcttattcacacaacaatctctcaagaaaagcattttctcatcattcttacagaaaaggaatctgagatttctgagaggttacaaaacactscaagtacatctaaccagcaagtggccaggtgggaattgcactgaggtatgattccaaagtgcgttttatttctaggacacaatttgtttcttttcttagacacaaacggtgtgcaatttaaaagtgtaaatatgtttgtgaaagaaatattttaaatgataaagaaacagaggataagtcaaattttaaagtgccctcaagaaaatttgttctatattatcatgcagttaatctaattttaggcaattcttttctatgcatgaaagcaaatttcc

SEQ ID NO: 666856 - DNA, 611 bp, Homo sapiens
ttctgtcactatggattagcttgtgttttctagaattttatacagatggaattgtgcagtgtttactctttttcrtcaggttttattcactccatgttcttgcatgcaccaatagttcattccttttcattgctgggtattattccactgtatgatgtacaacagttcattcatttgcctgatgacaggcacttgagttgttttcagtttttgaatattacccaataaagctgctatgaacattcgtatctaaaaataatgatggcttggattttgacaggaagaaaaggctggattctttttagctccatgaatccatttccgtctcactctggatcttagcggacaccattctttatgtttgtaaccctctcctttgaacgcttcatctgtgctcccattttcactgtcacctgaaaatctccatctcactcttctgtctcagcatagacctcgcttccttccagaatcacttctctgaccatcagtgggtcaggtacccccatgtatgtcctagcacagcaccctgcactttgcccaggacaggatttatcaccctgtattgtaattgcttctttaatgtgtgcctctctcaggatctcattgagagc

SEQ ID NO: 666857 - DNA, 611 bp, Homo sapiens
ttctgtcactatggattagcttgtgttttctagaattttatacagatggaattgtgcagtgtttactctttttcgtcaggttttattcactccatgttcttgcatgcaccaatagttcattccttttcattgctgggtattattccactgtatgatgtacaacagttcattcatttgcctgatgacaggcacttgagttgttttcagtttttgaatattacccaataaagctgctatgaacattcgtatctaaaaataatgatggcttggattttgacaggaagaaaaggctggattctttttagctccatgaatccatttccgtctcactctggatcttagcggacrccattctttatgtttgtaaccctctcctttgaacgcttcatctgtgctcccattttcactgtcacctgaaaatctccatctcactcttctgtctcagcatagacctcgcttccttccagaatcacttctctgaccatcagtgggtcaggtacccccatgtatgtcctagcacagcaccctgcactttgcccaggacaggatttatcaccctgtattgtaattgcttctttaatgtgtgcctctctcaggatctcattgagagc

SEQ ID NO: 666858 - DNA, 533 bp, Homo sapiens
catctgaactacatggactgaaactaggaatgagggtgatgttctcacattgaggtggtatttccagaagaagagtaaatggatgctgggaagatacaaacaacaaaaccacatctgctcattattcaggttgagcaaagagtggttactattrttgtaaaagtgttggagccctgttgtattctggaagctattgttcttacagtcaagagaatttatcttgccaacttgagaatagcatctaaacactaaatacaagtctgaactctgaacaagattcagagtttcttatccacacacatttactgagtactgatctgcacatttgggttctaaaatgattttcaaatacagaatatctcattaaataagatgaagatatgttttctattattttaattttgtaaattatggccaaagagaccacatttgaaaagagaaaatcttgtttgttattatgttgtaactgggtgagtagaggctaaaatacttgcatttctatagcacaaatattccttatgggaaattcaaat

SEQ ID NO: 666859 - DNA, 655 bp, Homo sapiens
gacatcatctgtgctctctggtagctcatagaggacaagaaagaacagacacacaaacaagtaagattgaaaaattaaagtcagatgaacccagtaatcctaacatttatctttttcagtctcagcatgtgcatatatgtgtgtgtcactatcattatttgmtagtgatgttgcatattttgcaatgattctctctctctctctctctaatgttatttcaatgtggcatcagttaaaatgtgttaaaatttcaggttgaattgtcactaacaaaggactttgaagaataaaatcattttctcttaaaagggcatgttcctgtgaatatgagtcctggctatgaaaatgaaaacaccatgggatcttataattaaagcaaatcttgataaaaataaaaattcatctcacaactacccacacttgagcataaatcaagatgcagtgaatttagggactgtagccaagaagttagcgatgaaaatatgagaatattgattattctaggtacactgaaaattgacttaagaaattaattaaacatcctagaaaggggaaaaaaattagcaaaccttagtctttcccagaaatcatcttatctcaatcactgtctttcaagaagaggctctttcaggtaagtgctaagatttaccctgtg

SEQ ID NO: 666860 - DNA, 555 bp, Homo sapiens
gcatattttgcaatgattctctctctctctctctctaatgttatttcaatgtggcatcagttaaaatgtgttaaaatttcaggttgaattgtcactaacaaaggactttgaagaataaaatcattttctcttaaaagggcatgttcctgtgaatatgagtcctggctatgaaaatgaaaacaccatgggatcttataattaaagcaaatcttgataaaaataaaaattcatctcacaactacccacacttgagcataaatcaagatgcagtgaatttagggactgtagccaagaagttagcgatraaaatatgagaatattgattattctaggtacactgaaaattgacttaagaaattaattaaacatcctagaaaggggaaaaaaattagcaaaccttagtctttcccagaaatcatcttatctcaatcactgtctttcaagaagaggctctttcaggtaagtgctaagatttaccctgtgtttcccttgttgtctgaccacctccagatccactttgaagactttttcttttaaggtcaagtaagttctagt

SEQ ID NO: 666861 - DNA, 498 bp, Homo sapiens
aacgctgccttttacttcatcctaaagttgcarccattgaatttgatgtcccttaactgtcctgccaaaattcatctatatccacttctgccctctaatccatttctttcatttcagaggctatgggaaggggccaccacattgggactttttttgctgcttataagagagtctaggaaaaaaaaatggcttaaacaaatagagagttcttttcctacatatcactaagattaggaagagatattcttcttaggtagagctggtgcagaagctctgtagtaacaacagtggcccaggtgcctatgattcttctgtttctccttacttaacccttaactttcatccaaagacttgcctcatggtattaaaaaaaaaatgtgactgtagctctagccatcatgtccacatgcctggaggtaaggaggaggaaaggagaaaaaaagtccaaaagatatcttcccacttagtcatcttttaaaggagatttcctggacccaa

SEQ ID NO: 666862 - DNA, 406 bp, Homo sapiens
gagtatgcaaaaaagctaaaacgaagacaccactcaaaggtgagcacaacaatgtgaaaaaaccaattagggaagtgtagatatgtgtaaaataggtgaaggctgaggatcaatcagaagaaagcaygacaaacaggaagagatattctaaatctggtctgtggatttgacttgtagcttggctttcaggctttgaactgtcttttgcttgaaggtggagtttcacccgggacctgtccctacctacctggacatttgactgcctcttgctgctatcaaaatgatatgccccccagaaactcagaatgtgactttatgtggaataagggtccttgtagatggaattgaggtaatgttctcgagatgagatcatcctggattagggtgtgacctaaattcaattaca

SEQ ID NO: 666863 - DNA, 586 bp, Homo sapiens
caaactttgtatctgattaattctctcatctagcctttttctccaaagtcatttgctactttctgggttcaagctattgtcatcttttctggacttgtagaagaacttctcaatatgcctccctactcctagtattatcccactcaaatatagcatctgcacatttgccagagagatctagccaaaatgcaaaacgaaccatgagcctgacttgcttaaaactctgtgatggggctttgttctcttctggatgaagcccaagattgtgccatggtcaccctgcacagtccaacttacctatgtccctttgtacatgccattcctgctcctggcatattctcctgttcaggagaatgtaccaaccttaccatttaatgtcatttactrtacattatgacttaccttgtgcatcactttgtctaagaagtctaactgatccctttctcaggtaggcacattcctctgagcactgatagtaccctagatgtttaccttgatctgcatgctttgcatgaggtattaaatttaaacagattaattatggtgataaataaaataaagagttgaaccaccctgctagtttgaa

SEQ ID NO: 666864 - DNA, 583 bp, Homo sapiens
cactcaattagcaacattgatgtcatctcaaatctttttccttactgtccattgcagccaattcatcccaagtccctaatttcttctttaatcagagaaggtctctacagagacctgaaagactagtagtttaatgtacaggctccagagtcacagagtcttgatcaaattctggctttgccacttcctaagtctatgatcctgaacaaattatttaaactccccaggattcctccatgcatctgtaaaatggggatgatcatagtacctacctcacacgatcactaccatttactggtcactaagaaaaaggaatgagataaaggtaggggagtatatcagatgaattgagaattatactgctcttttcctgacttcagttttctatataaccttagtaactctgtgacatatagtctttgaggtatatgttagtttattaattattgttttccaatggwgcaataatcttgtgcccattcctccatgtgatctgcaaggcttgttcaggccagaaccacttatatttttccagaatgattttatgagactctcagttattctactacttcttactatgttt

SEQ ID NO: 666865 - DNA, 600 bp, Homo sapiens
atatttggctatatgacaaacaagaaccttgatgtagtcaaagaagccacacgtgaagttaaaatgtaaatgactacttggggaaaaagatttgccacctacccataaagaaggtaatgatgcttaaagaaatcctgtaaaycaatggggaaaaaaaaaacaagccaaagaggtaagaaataaatcaggagaaggcaaatcacagaagacaaaacacaatggccacacacccatacaaaaagatgcttaatagcgctaacaatatcactaataatcagagcaaatgaaagctttgaaatactttcatctttttaatttgcaaacattcagaagtttgatagcagaattacattaggatgtgaatacacgttcttgtttgactcgagataggaaagcctcaatcggattctcaggaattaaacagtatgcaatgatttggaaatgccagtaataattattgaaagagccatattaatttttctctatctgttgaaattaattgattttttcattgataaaactcataacaaactaaataagaaaactaaatcaaaacacaaaaatctaacatacttataatggttattccatactctcctg

SEQ ID NO: 666866 - DNA, 591 bp, Homo sapiens
cttgtactctaggtcccatcccctgtagactttgcagggaatatacatctgaaattttacacctttctctctgcattctcagtgtattcctatctcctggatcatttctatcagtatagaagcctgttgtaacatcacctgtatttgcttttaggtgtccaccygagagttacacatttcgttggcagtttccttcgattcctctaagtgttggttttccaaatgctagatggtacaatctctaacttctgatcccccagccttttcaaaggttttcaaagcctctaattccctgtattaaatccctttctgcttgaaatgtctggaatgatttctactttcctgtccaaaccctgactaacacatatgtcaaattttatgctttgtacctttctttcatctcatctttcttcttgtaatgttatgtctgttccctgatgttttagataacagactgcttccttttgtcattaccatcacattatcttattttaatttgggatattatttacaattctatttgttttcttgtttattcagtagaatataagtgatcttgttcatctgtgtattcccagtgctagtacagag

SEQ ID NO: 666867 - DNA, 521 bp, Homo sapiens
ccagcccttctatgtacatctggtagaatttggctgtgaatccatgtggtctagggcttttattcattgatatgttttttattgctgattcaatttcagaactcaatattggtcttttcagtgtttcaatttmttcctgattcagtcctggaatatggtgtgtttccaggaatttctccatttcctcttgatttctagtttgtttgcttagaggtgttcctaactgtctctgaggaacttttgtatttctgtgggatcgattataaatgccacctttgtggtttctgattgtgcttatttggatcttctctctttttctttgctaatgctagtggtccttcaatcttgtttatcctttcaagtaatcaacttttagttttattgatcctttatatagattttggggcctcaattttattcagttcttctcagatttttgttactttcttctgctacctttggggttagttggttcttatttttctagttcctctaggtatgatgttagattgttaatttga

SEQ ID NO: 666868 - DNA, 521 bp, Homo sapiens
ccagcccttctatgtacatctggtagaatttggctgtgaatccatgtggtctagggcttttattcattgatatgttttttattgctgattcaatttcagaactcaatattggtcttttcagtgtttcaatttcttcctgattcagtcctggaatatggtgtgtttccaggaatttmtccatttcctcttgatttctagtttgtttgcttagaggtgttcctaactgtctctgaggaacttttgtatttctgtgggatcgattataaatgccacctttgtggtttctgattgtgcttatttggatcttctctctttttctttgctaatgctagtggtccttcaatcttgtttatcctttcaagtaatcaacttttagttttattgatcctttatatagattttggggcctcaattttattcagttcttctcagatttttgttactttcttctgctacctttggggttagttggttcttatttttctagttcctctaggtatgatgttagattgttaatttga

SEQ ID NO: 666869 - DNA, 521 bp, Homo sapiens
ccagcccttctatgtacatctggtagaatttggctgtgaatccatgtggtctagggcttttattcattgatatgttttttattgctgattcaatttcagaactcaatattggtcttttcagtgtttcaatttcttcctgattcagtcctggaatatggtgtgtttccaggaatttctccatttcctcttgatttytagtttgtttgcttagaggtgttcctaactgtctctgaggaacttttgtatttctgtgggatcgattataaatgccacctttgtggtttctgattgtgcttatttggatcttctctctttttctttgctaatgctagtggtccttcaatcttgtttatcctttcaagtaatcaacttttagttttattgatcctttatatagattttggggcctcaattttattcagttcttctcagatttttgttactttcttctgctacctttggggttagttggttcttatttttctagttcctctaggtatgatgttagattgttaatttga

SEQ ID NO: 666870 - DNA, 609 bp, Homo sapiens
ttttttttaattattaagacttgttttatggctgagcatgtggttgatttggagtatgttccatgtgaaaaggagagaaatgtatattctgtgattgatgggtggagtattctgtagacatctgttatgtgtaattggtcaagcaatcagatttatttttataagacagagacagaaagacttttcagacagaaagggagaggtgagggtgaccacagaggcagagattagagtgatatgaccacaaatcarcagctgcctgtagccaccagaagctggaagagtcaagaagctaattttcgtctagagaggagggagcatgaccctgccaatgcttggatttcatacttcttcatttctgttgttttaagccaccaagtttgtggtaatttgttacagtaccacaagaaactaatataactctcatccattctaaagtatagtaaaattttgatttctaaattggacaagggcagtatgagaaaagagaaaattaggcaaaacttcatatgtgaatgactataatgcaaaaatcccaaagaaataccatgttactagattcaaccatatgtttgtgtgtgtatgtgtataaaatatatatgtacatac

SEQ ID NO: 666871 - DNA, 588 bp, Homo sapiens
ttcaacaatctgttttgggcctttaaatgtgtctcataaatattttctagcccaacatttttagggtcccaaaaatgagaactctatgaataaattatttgttttagtgactagcttagrtttagataacaaagcctggtgcaatagtgcacctttgaagaggtactgcgttaccacacacctgaacgactgcaaaaacctcccgagatctgggttcccttcacttcatcaatgtagcccatcaatgtcagattatcttcttgaagtgtctagaataaaattttcattaagtttcttacctttttatgcatacaacattgaaatgagagagaactgtcatatgtcctgataggtagggattatccgttgacgaagactcagtgggaaaaattaaaaagtgaatttcattcttagtaatttgctgtcttttttgcttccttgaaaaatctgttgaaaaaacctaaagaaagattggatagaaaagtggtttggggtttgtaaattcatatgcaagtgtaaggtggggatagtgtccctgaaagacatttcttcctcgggtgaattggtcaagcacattgcaaaagcatt

SEQ ID NO: 666872 - DNA, 588 bp, Homo sapiens
ttcaacaatctgttttgggcctttaaatgtgtctcataaatattttctagcccaacatttttagggtcccaaaaatgagaactctatgaataaattatttgttttagtgactagcttagatttagataacaaagcctggtgcaatagtgcacctttgaagaggtactgcgttaccacayacctgaacgactgcaaaaacctcccgagatctgggttcccttcacttcatcaatgtagcccatcaatgtcagattatcttcttgaagtgtctagaataaaattttcattaagtttcttacctttttatgcatacaacattgaaatgagagagaactgtcatatgtcctgataggtagggattatccgttgacgaagactcagtgggaaaaattaaaaagtgaatttcattcttagtaatttgctgtcttttttgcttccttgaaaaatctgttgaaaaaacctaaagaaagattggatagaaaagtggtttggggtttgtaaattcatatgcaagtgtaaggtggggatagtgtccctgaaagacatttcttcctcgggtgaattggtcaagcacattgcaaaagcatt

SEQ ID NO: 666873 - DNA, 588 bp, Homo sapiens
ttcaacaatctgttttgggcctttaaatgtgtctcataaatattttctagcccaacatttttagggtcccaaaaatgagaactctatgaataaattatttgttttagtgactagcttagatttagataacaaagcctggtgcaatagtgcacctttgaagaggtactgcgttaccacacacctgaacgactgcaaaaacctcccgagatctgggttcccttcacttcatcaatgtagcccatcaatgtcagattatcttcttgaagtgtctagaataaaattttcattaagtttcttacctttttatgcatacaacattgaaatgagagagaactgtcatatgtcytgataggtagggattatccgttgacgaagactcagtgggaaaaattaaaaagtgaatttcattcttagtaatttgctgtcttttttgcttccttgaaaaatctgttgaaaaaacctaaagaaagattggatagaaaagtggtttggggtttgtaaattcatatgcaagtgtaaggtggggatagtgtccctgaaagacatttcttcctcgggtgaattggtcaagcacattgcaaaagcatt

SEQ ID NO: 666874 - DNA, 588 bp, Homo sapiens
ttcaacaatctgttttgggcctttaaatgtgtctcataaatattttctagcccaacatttttagggtcccaaaaatgagaactctatgaataaattatttgttttagtgactagcttagatttagataacaaagcctggtgcaatagtgcacctttgaagaggtactgcgttaccacacacctgaacgactgcaaaaacctcccgagatctgggttcccttcacttcatcaatgtagcccatcaatgtcagattatcttcttgaagtgtctagaataaaattttcattaagtttcttacctttttatgcatacaacattgaaatgagagagaactgtcatatgtcctgataggtagggattatccgttgacgaagactcagtgggaaaaattaaaaagtgaatttcattcttagtaatttgctgtcttttttgcttccttgaaaaatctgttgraaaaacctaaagaaagattggatagaaaagtggtttggggtttgtaaattcatatgcaagtgtaaggtggggatagtgtccctgaaagacatttcttcctcgggtgaattggtcaagcacattgcaaaagcatt

SEQ ID NO: 666875 - DNA, 586 bp, Homo sapiens
ccacacaggccacctaaatgtcaggtttttactgggagaaggagaagggaagaattaatgaagtaaatatgagaagcagtctctgcaacatctcagtcacaggtggtttctctaacaggagtttgcagcacataactcggctgtaaagaggatccaggcagttcttaagctacctgggctcccggtacctatttaaattattaattttagccaaatgagaatcttccccgcaggaaagtcgggtgagctactaagtttcacaatttgctcttagagaaaactgtaattaattctccaaaaagtcactgggatgtaaaacttgcaatatagggagcaaatgttattaaagcttcaagcttttcccatttattcatgatgctgctaccccattctattaygcagttcttgggtccaggccatgggcttaggttataggtggcacagttataatgaggtcctacaggctagcctgatggctgaatctcccagcttggagaggaaaaagacctcaagtatgtccttaaacccatctaaacgttgcagaagaggtgagacacagtggtatatatgcctgtttacatgctcc

SEQ ID NO: 666876 - DNA, 584 bp, Homo sapiens
agaaagttgtcttaacaaacgacagttaaaatgcctactttgcaaattttataaaaaaatgcagactatatgaatacattgcaagcagtgttttccattgaaaggsgctagtaccattgaaaagcccagaagctaaagttttgttaatgatacggtgttgctgtatccacatccaaatctcattttgaattttagctccaataattcccacttgtcatcctgggaggaacccagtgggaggtaactgaatcattgggtggggggtctttctcatggtagtgaataagtcatataagacctgatggttttacaaataggagctcccctacacacgctctctctcttacctgccaccatgtaagacgtgactttgctcctcctttggcttctgccatgattgtgaggccttcctagccatgtggaactgagtgtctattaaacctctttttctttataaattacccagtcttgggtatatctttattagcagcatgagaacagactaatacagttagctttatggtaaacaactttctgagatgatgtttgttaaaggttgtcatgagttgtgaactatagtactg

SEQ ID NO: 666877 - DNA, 572 bp, Homo sapiens
tatgcaagtactgaacttatgaattactttttaattattcaagttgataggacatacaatacttataattaataggagcctggagttgggagcaaatttccattttttcctttagttaacagtcttggtataaacaataatacagctaagtttggcacataggaaaatgtgatcatattttaaaattgagcatgttaaccaaccatgttctctttttgaatattaagggtgattaaggggctttgtttatctcaaattatttgggacatatttgctgagagtttgagggaaagggtgagtagaaagtgtttaatgcatttagaatatgtataaggtttctgtaattcatcagctccactttttcatgccttcgtatgtatttccagagactgcatacattatacagtgataaatagggtgcttattaataaratttgttgctcttgcccagaatatatatattttcacattaatttaagaaattctaaatggtatccttaaaaaatgactgtttataccagacttgaactccagggtaaaccagagttattaggagttcaacaaacagaaag

SEQ ID NO: 666878 - DNA, 592 bp, Homo sapiens
aatgtaggaggccccataatggccttctcaagcccagttccatattgatcagtgcagctgtgagaggctgggaagagcagcagcagccgtctttcctaggctaatttcctttgaacaaacatatgaacaaggaggctttttaggtggtatcatggttaaaacagagacaaccagactaaagatgtctttatctatggcatacaatgcatgaataatcataattgtgataataaccttttattatactaaatgtattatagcatttagtattrtagcatatagtatattagcatttaatatactaaatgttgtgtatacattgcatcagcagtattttttaagtgttttctagttgccacacattcttctagatactagggattcagtatgaatagctaaaacaaacatggcattttcttctggtataaaaacaaatatatttggctacatatgaaagcaatgttaacagtgatcccattttcagttgtgaagagcagagatataccagccatcagtttaaagcatttatctcctccttgaggacaaagtgttgtccccaagcagatggcttagctgagcctttaataggtct

SEQ ID NO: 666879 - DNA, 549 bp, Homo sapiens
attccactctccttagagcttctatttccttaattttttcccaatggctgataccttgcagcaattagtgcattcccattaaacaatacaccatcccagattgccccagtgaaagtgtttcactgctactttatgcttgattaaccatcagtaatggggttctcattgccggccagctagctggtaagtgatccagctccaaaattcaattttagcatctgcaagaccacttctggtcaaccatcactggttacattctctaggaagtaaactatgagatgcagattagcatgctaggtgtatattagtagatactctttgatgaacacctgtagaaggaaggtaaaggaagtgggataaggaagaaagtgaaattgtgcagtgatgcaaacacaataaaggcctcagcgaaacccgtagaaatctctgaagctaagatggcctctcagagttatcctsagttagagtaaaaaggggagctgggcttttatacttttctctcaatcagtgaaggaggacttgggtggtatttcacagcatctatcggtc

SEQ ID NO: 666880 - DNA, 566 bp, Homo sapiens
gctttgcctatgccaaatactttcccttgatccttttaaattatttcctttttgttatttttattctctgccctgtttttattttcttgactattcaattgtccctactaaatttcaatccaatgttttctcattcaggcaatttgtaatgtcttcacttctaggatgaatttgattttttctactatttctttcctgtgttcagtcattttacatcttcctaatttttgttcatatttgctatgagttttacctttctgatttgagatacttattttacatatacaaattcttgttttcagatatttaattcagatggagctcttatgttgcagttttgttctacttcatggttgacattttggggagtatttttaacagctggtacattttaattcttaatttgtttcttttttgtctaactttgtatggatattatctacttttcatacttattttgaatgtctaattttctggaccagcaatagcagttgtatgcacacaaaagtgaaagttttgacaggcttatcaagctccctakttcaagactaccctcttcatttagt

SEQ ID NO: 666881 - DNA, 573 bp, Homo sapiens
aaaataaagctgtgacagagctcagaaatgtgtttgactactcactttcactcctcaggtaaagaaagaaaagggtgagatgctttctgccttgttcaggtgcaagcaatcctccagggcacccaatcttactcaccacatccatcctaaccacaccctggctcacagagggtgaggcagagaatgaatcattgggagggttttcgtgactaacagtccttccactgtcctcgggcctggctatgcagattctcacctgtacacttttcttcttcctggggtaatattgcccccagtttctcaggtcttttcaatagctawtttttactcactttaagattttctttaaatatcagctatttcaggaagccttctgatgacctactgcaaactggatggtgaatattctctttgtgcaactacaggaaaccatatacctccctatccctgcacttgacatgttattctgcttgtgaaaatgcctccacctataaaatgtggatacttcatgattcctttttcctttatgcatttcagtagcgtctctcacagagcgtgatatttaacaaatac

SEQ ID NO: 666882 - DNA, 872 bp, Homo sapiens
cacctagcctgggcactctggcagcccagagggagcttgaccactgatcaagctcaggaggcgccagccagccgtgcggagtgcaggcccgctgagcccgcgcccacctggaacccgcgctggcccgccagcgccttgcgcagccccggctcccgcccgcgcctcccgctccacacctccctgagcagaaggagcagagggagccggctccggcctaggccagccccagagagagggcccccacagcgcagcggcgggctgaagggctcctcgagcgcggacagagcggacgctgaggccgaggaggctccgagagcgagggagggctgctggcaygttgtcacctctcattacctctttcatcttttcccattcctgagctactgctttctcgttaactcagtctgactttctaacacttacaatgacataataactatattaaaaacttcaaaagaggtgaaatttacagtaaagggtaaagaaattcaagtctctgaaaagcaggcccttttctaacaagcctcaatgtttatattgtattcttccactgccgctgctaagcttatctagagtggtctacattttcccatctcccattcgcaactcagcactgtggcaagacttctgtgttcccaagttgtgtgtaattactgccggcaagctaccaatgactgcttaaattgtcaaactcaatcagtgtttttaagttaacacgtttggcctctctgtagtatttaacagcgtcctgtttctcaacactttctcttagctgtttttttatctgactcctttgtgggactctcatgcctggccctagtcttggtcaccatttcttctcacttggtaccaaatccacaccaaacgcttga

SEQ ID NO: 666883 - DNA, 872 bp, Homo sapiens
cacctagcctgggcactctggcagcccagagggagcttgaccactgatcaagctcaggaggcgccagccagccgtgcggagtgcaggcccgctgagcccgcgcccacctggaacccgcgctggcccgccagcgccttgcgcagccccggctcccgcccgcgcctcccgctccacacctccctgagcagaaggagcagagggagccggctccggcctaggccagccccagagagagggcccccacagcgcagcggcgggctgaagggctcctcgagcgcggacagagcggacgctgaggccgaggaggctccgagagcgagggagggctgctggcatgttgtcacctctcattacctctttcatcttttcccattcctgagctactgctttctcgttaactcagtctgactttctaacacttacaatgacataataactatattaaaaacttcaaaagaggtgaaatttacagtaaagggtaaagaaattcaagtctctgaaaagcaggcccttttctaacaagcctcaatgtttatattgtattcttccactgccgctgctaagcttatctagagtggtctacattttcccatctcccattcgcaactcagcactgtggcaagrcttctgtgttcccaagttgtgtgtaattactgccggcaagctaccaatgactgcttaaattgtcaaactcaatcagtgtttttaagttaacacgtttggcctctctgtagtatttaacagcgtcctgtttctcaacactttctcttagctgtttttttatctgactcctttgtgggactctcatgcctggccctagtcttggtcaccatttcttctcacttggtaccaaatccacaccaaacgcttga

SEQ ID NO: 666884 - DNA, 872 bp, Homo sapiens
cacctagcctgggcactctggcagcccagagggagcttgaccactgatcaagctcaggaggcgccagccagccgtgcggagtgcaggcccgctgagcccgcgcccacctggaacccgcgctggcccgccagcgccttgcgcagccccggctcccgcccgcgcctcccgctccacacctccctgagcagaaggagcagagggagccggctccggcctaggccagccccagagagagggcccccacagcgcagcggcgggctgaagggctcctcgagcgcggacagagcggacgctgaggccgaggaggctccgagagcgagggagggctgctggcatgttgtcacctctcattacctctttcatcttttcccattcctgagctactgctttctcgttaactcagtctgactttctaacacttacaatgacataataactatattaaaaacttcaaaagaggtgaaatttacagtaaagggtaaagaaattcaagtctctgaaaagcaggcccttttctaacaagcctcaatgtttatattgtattcttccactgccgctgctaagcttatctagagtggtctacattttcccatctcccattcgcaactcagcactgtggcaagacttctgtgttcccaagttgtgtgtaattactgccggcaagctaccaatgactgcttaaattgtcaaactcaatcagtgtttttaagttaacacgtttggcckctctgtagtatttaacagcgtcctgtttctcaacactttctcttagctgtttttttatctgactcctttgtgggactctcatgcctggccctagtcttggtcaccatttcttctcacttggtaccaaatccacaccaaacgcttga

SEQ ID NO: 666885 - DNA, 1111 bp, Homo sapiens
ccacaatgtgaactcatgtgccgcactgctccctgctcccaccccggtccaagccaccatcctctctcatttatagatttgcagtagcctcttaacaggtttctttttgttgggtttttttttttggtgttttgttatgtttttttttttttttttggcctcctcttgtgtattttcaacacagtagccaaagtgatcctttcaaaagacaaggcaaatctctcacytttttgatgtctttatacaaatggtaccttatcattgaggctgtctgtgatgactcaacatagaatagcaaccccactaccctcggctttccctgcaccttaccttcctggatttttctccataacatttaccatcatggcaacacactgcatatttatttgttgaatacttttgaaaatacaccatcgttagaatgtaggttccataagggcgtgaaatgtatctttgttcactgcttcatcaccagtgcctaaagcagtgtctgacctatagaaggtactcaagagatactttttaagtgactaaaagtagggaagaagttattcatacacatgcaggtttatttttatggccttggcaggaagttgaagtgacttctaacttctctctaaaattatatatgacaccattggctaacagtgaagacctaagtgggttaattaagggttgggagagtagagaaggtttgaaatagtggattggacagagtggcaaaaggatatgaaacacacggaagaaagaacacagcattgaaggagcagtcaaatcgatgacagtgacattataacggtatcaggcttcattgtgtgatttttctacaaaagacgtaccttagtcatacaactgtttgagatagatactattttttactattttacagatggagccactggctttgaacatgaaacaattaaggtatctagtgctactgtgtgggagagctaaggttcaaccaaaagtcctttcaacccttaaggacactttcttttcactacaccatgctctagtatggagagcaagcacaatgggtgggagtgcccaggacttcaattgaagcatgggggaaaaatagcaaaaatttttttacgtattattcatttaa

SEQ ID NO: 666886 - DNA, 1111 bp, Homo sapiens
ccacaatgtgaactcatgtgccgcactgctccctgctcccaccccggtccaagccaccatcctctctcatttatagatttgcagtagcctcttaacaggtttctttttgttgggtttttttttttggtgttttgttatgtttttttttttttttttggcctcctcttgtgtattttcaacacagtagccaaagtgatcctttcaaaagacaaggcaaatctctcacttttttgatgtctttatacaaatggtaccttatcattgaggctgtctgtgatgactcaacatagaatagcaaccccactaccctcggctttccctgcaccttaccttcctggatttttctccataacatttaccatcatggcaacacactgcatatttatttgttgaatacttttgaaaatacaccatcgttagaatgtaggttccataagggcgtgaaatgtatctttgttcactgcttcatcaccagtgcctaaagcagtgtctgacctatagaaggtactcaagagatactttttaagtgactaaaagtagggaagaagttattcatacacatgcaggtttatttttatggccttggcaggaagttgaagtgacttctaacttctctctaaaattatatatgacaycattggctaacagtgaagacctaagtgggttaattaagggttgggagagtagagaaggtttgaaatagtggattggacagagtggcaaaaggatatgaaacacacggaagaaagaacacagcattgaaggagcagtcaaatcgatgacagtgacattataacggtatcaggcttcattgtgtgatttttctacaaaagacgtaccttagtcatacaactgtttgagatagatactattttttactattttacagatggagccactggctttgaacatgaaacaattaaggtatctagtgctactgtgtgggagagctaaggttcaaccaaaagtcctttcaacccttaaggacactttcttttcactacaccatgctctagtatggagagcaagcacaatgggtgggagtgcccaggacttcaattgaagcatgggggaaaaatagcaaaaatttttttacgtattattcatttaa

SEQ ID NO: 666887 - DNA, 3059 bp, Homo sapiens
ctcactcttgmccaggctggagtgcagtggtgtgatctcggctcactgcaagctctgcctctcaggttcacaccattctcctgccttagcctcccaaatagctgggctatttgttggtttgcaattttatttgctcttaatttatgatgtaggtaggttttacagttttctaacagatataaacagaagagctaataattagttttatgtttataaggtattttttaaatgcaatgaataaaattcaaatacaatttttttaaattgattaaaaatagcaggtaatgacactgttccatgtatatctccctggctcttacagttttagtagtgcatgcagtactcacttccaactaccaatgcctgcaactgaggcctttttttctttgccaccacgcacatagcaggccagataagctgaaaagaattaaccctcctggcagcagccctcaatctatgactgaagggaattggagtataaatacctcagctcttcctccccgtgactgaaataattctgaggcacacatttacgctgttgcctacattttctcagcagaatgcagctccagttgttggatgcaggacacttatgcagtggacctaaggcaacctcagggcccctttttaaagagggggtacacagcagctagaggaaaaatgaagtctgaagtcctgacccaagttcatctcacagtagatccagcagatctctggaactgccaagtagaaatttctctgttgcccaaatacataatcaaaatggctgtatttatagctgtgaaccatcacactagtccctggtctgtatagtttgaaaggccaaatggaagccacctaaaaatgccctccacaataacaaaagtaatatcacatcttgggcaggatggtcagaagcaagggctatggtccccttcgtaccccatcttgatttaatttaacaagttagcccaccacagtgtccgtgttgtaaaggcatgggtcaaggaaccacttggagaacttgtgcttctcatttccacaacttttcgccatgccgggccagaggttctggttcctggtagggagagggatccttctagaaggaggtagaataaagtttccactaaatttaaagttatatcttctcccttggcattttcagcttcttattccagttgaccaagatgcaataaagaagccctcattaatgaggatacatggttgctatgatattataagggcagggaagactatgtcctgtgaccctttgctaggggtttctctggctactaaagcatgcttgtccatgttctggagaagttaacacctcccaggagaagctctgttccaaagctgatggaatttgttgtataaacatctcatttttctcacccttacttaactccaagacacatgatctacactgttttccaaagttcctgagaagggttaagctacagtagtccttgcagtacttttcttgaaaacacactcttctacttgtgagtgagcttctctcccttctctgtcttcattccctactcccttacgccttccaaataaagttcttgcactctaatccttgtttcagtgtctctaggagtactccaaataaggcagggtccttgaaattttgttttctctttaaaaagcatgttaccattttaaaaacactgttgtagtgcccagccagcatacacgcttcaataattgctgggataacatcctacaaagcaatgatctaattgcttacatgctcatagtcatgaatgaaagatgcaagaaaatgttctttgagagggctcaaattatacactaaattttaaaatgcatgcaaaaaacatttgcatatatatatatatacacacacacacacacagccattttaaatttggatacttagaaggacaaatttcttttctttgagaaacttccctacgtggaacagctcatctaagtcttagatcctcgatgaggctgcttataaggctgtctaagttgtattctgcataactcaagggtgacttgcaacctgtagcccacatcttctggaaccttctggaattctggcacaactggatttacagcatgcctttgcaaatggttatctatctccttagatattatcaccacaatgcaaaatgaatggttatctatctccttagatattaccaccacaatacaatacaaaatgaagtgagccagcccatcaaagtcaagcgctcccctgcccgaaaagaaatgttagactgtggatattgaagctaattttattcaacgcagttttcattgccctgaggcactttatctactgctggaatgtactcactgaatcatattttaaaccagtattctctccgattctatatgcgcctcaaagtctaagctcattggaactggataaagggctactgtcaagttcaatttagtcaagattacctcctcaacaatacttcaaacattttattcacataaatcatacaggaggattagaatatgcactcagttaaaaaagattactttgccattctgatgatcatgcacagtcttattgctaataaactcctttgtatagtttcccacacaaacaagtagagtttctcatgggaaataagcttttgcagttttttttgaaagaaatatacactaagctttctatttgttttaaaaatcaacaaaacagtaccttaaagggaatacactactggaatattacagaaaattaaatctctacgaagcctgttgcaaatgagtaagtcaccttttgaggttttaaaaatcattttcataagtgatttccattgaccacatgatgatatgagtaaactttagagaacatgttaaacattttcagcctgcattgcatattacctgtctgcctggtttttttcaaggtttgcatttcaaatgctttcccagttccgtagccactctctcagtacctcgctattgtctggtactcaactaaattcaaactttggtgttacctgccaggtcgtgcagggaggctgagatttttacctctgcattaaaacaagggatccagtggatttttctaagacccatacttagatgca

SEQ ID NO: 666888 - DNA, 667 bp, Homo sapiens
tttgtgcaaaaattcaagatctttttccaaggaaggaattgtttcaagtaaagtaacaaagaggaaaatttggacttctaattgattttagaagtgactgattaaataaattgtcaaaatttcaaaatgagtcttaaagattatggatatttcttagttaataaaaaaatgtggctgggcacggtggctcatgcctataatcctaacactttgggaggctgaggtgggcagatcacctgaggtcaggagttcgagaccagcctggccaacgtggtgaaaccccatctctactaaaaaagctacaaaaattagccaggtgtggtggcggtgcctgtaatcccagctacttgggaggctgaggcaggagaatcacttgaacccgggaggcggaggttggagtgagctgagattgcgccactacactccagcctgggcaacagggcaagactctwtctcaaaaaaaaaaaaaaaaaaaaaaaaaaacccagcaattctagggaggaataatggctgaagaatcagattatcagattagtcatggctttccccaggaaagcttccctgctgcctcctgaccccaatcccagtgtgagcatggagtcccctcctgtgtgtgccagtagtaccctggacttcccttacccacagacatcaagctttatggtaa

SEQ ID NO: 666889 - DNA, 1391 bp, Homo sapiens
atcatgatatggcagaacaaaaggcatcacaagaagagagagaataattttgcctgtggtcattagttttgaagtagtagaaaatgtctaaatattaggtggagcaaactagtaaaattggctcaagttttcattacacaacttcctttctctaacctctgcagctttggtgcaattcccatcgaccagagttggtccgaccagccttggaaaggtcactgaaaaatcttcaattggattatgttgacctctaccttattcattttccagtgtctgtaaaggtaggcagcttgtgtgatcaaattaatttcacttttgttctcagcataaatattgtttttatggatatttgaactaagcattttcttaggaggacatagggattataacatagaagaagaatcctaaacctaactcctaattcctttctatgggatacattttgaatccatacttccgtgattgcatgtctataagaaaagaaagtgcagaactctcaaagcctctgcctcaaaaacttgaggaaatgatagtcatctccttgaaggcacaaggtcttagttatgattcctgatttcacctcttgggatgttcacagacacagagtttcatgaagctgtggtgtccagaaaacctgctgcacatagggtgcacaatgagtttccatcttcttgcctctttttaaggggcgagaactcagtccgggagtgtcttaaactacagaccttcatgggaaaccttgttgcttctgcttcctctcttttcacactggaggttttatttttgcttagccatgaattcttgtgtcattcataacttttgtcttaaggtactgaaaactagtcaggctagttaatgcaaaagggtatattagatatgataatgggaaatcaaagccagggctacattaagaatttgataaaarctctaaaaatatatcctttctccacccttatctctgctttattacaaaaggctttttaagtatttgttccaacctttttcgttggtggcatttatggctttggagcactgtcaggcccatgttcattaccgtgagctcctgtgcatctcctaatttccaaactagccttgaaaacacctccattgaccatgattggttcatggtcctgtgcatggaacatcatatgttcagggagataaagaactctgatagtggcacctgggtaaaaagtacaatccattatatctggatatcaagatcttttgcagttgaagagaggtattgccacagagaaaattataggagcagaagaaagtcaatgaaagtcaatgatgacactccattaggaaccagaaagaggtatttatttatacatgtaatagttgtaagagattagagggagcctgtcacctgaagacattcctta

SEQ ID NO: 666890 - DNA, 3673 bp, Homo sapiens
caacatacaaatccatcatacaaaaaggaaaagtaatgaaagactgtgaaaattatcagtatttatgtgtgtatgtatattttctagttcatctatatagatatatatcatagatggcatatatgatatatatattatatgtcagatcaattagaaaacatacatatacatgtatgcatttttggtattaattaggaaactagttcttttgtctttcagacctgccctcatgagtctttgaccaaattcttgatttctggcacgatttgatgcccaaggctcaaagaatcttacctcatcccagctctgaaattggccgtgtctcrttctagtggtcggagttattgagaaaccaggatagggttcatggaattgcttgtgctcagaaatagcatttctattttcttaggagagaggggcataaaatttatttttatgaaaaagatcatttttgacaataatattctcagttcaaatttaatgctctacattattcagcttcttttactttggtgattttaatattagtgtaacttttggattatctgatgcttttccatcttgctcgtctgcaggtggaatgtcatccttacttcaaccagagaaaactgctggatttctgcaagtcaaaagacattgttctggttgcctatagtgctctgggatcccaccgagaagaaccatggtaataagagatacaggaagtttacctaaaacaccggtttgataaaaaaaaatttaatcagatcatgctgtttcctggagttcactcacagctgacttggggtgagggaagaatttgcatttctgacgagatcccaggtgatgttgaggctgctgttcgggggcctcgcttgagaagctccggtgcagagtggacgccttagtctgtttagggagccgcctaacaaactgtatccccagcctcagggcctcagcctttctgcctttccttccagggtggacccgaactccccggtgctcttggaggacccagtcctttgtgccttggcaaaaaagcacaagcgaaccccagccctgattgccctgcgctaccagctacagcgtggggttgtggtcctggccaagagctacaatgagcagcgcatcagacagaacgtgcaggtgaggagcggggctgtgggcctcaggtctcctgcacagtgtccttcacacgtgtgcttcttgtaaggctctcaggacagccttgggccagctccatttccctgtatttcctatgcatgaactctttgtgtacgtcataagggtttcttctactctagcacaggagaggcaacagaggtggagagaaataggatgggatcaaaactacagatttgggttagcgttaagtcagtgatatccatatccctctgctggggccatgtccttttctttattttttataatgaagcattgattagatgttctttagtctccaactcatggcggatttttcttcttgtatgtttatgtagtataaattccttatatttattctcttagaattttatctttgcgaagtgcttgtttaactctgcctttttttttttggcgaggtggttgtgtgtctttatttttatgtgtaggagaccatatttataccaataccttaggatataagacaaacccacttaatatagaggcttaatgcaaaagcatttattgagctcaaggttccatggttagaagattagcctgggctcagcctaaactcagtccattccttctgttcctggctgggctctcatgtgtgttcagggcagtgaggcagctctgcttcaggatgtccctggggcatctgtgtgagcgcccccctctcccatgcagttctttatcctccagccatccagcccagggttcacctcagcacagggcatgaccccaaggcagtgagtggacatgtgcaaagccttttcaggtctaggctcagagctgccaaccattgcttctgggaaattctatcacctaatgcaagttacaggacaggtcagactcaaggggtggggaaaaagacaccacctcttgttggaaggagctggaaattcatataaccaagcaagtggatacagggacatgtgattgttagagggcatgttcctaattaatctatcatttatacgatatgtgtgaaataacatattaatagttatatgtatgaatatgaatatatataaattgatatactatttcatatattcttaagaatacatccaagtctctaaagaattaatatccagaatacatgcatatatatgttttctaattagttatatacagatatatgaaatatacatcatatatgatatatattataaaacctatgtcatatatatgacatatatcatgtatatgtatatgtgtcactatttgctaaaacattaagtaaaatcagtgtagaaatccataggatactctgaaataatgatacagagaatgagaaagaaagtaaaaaatgacaatgaaacaattgatgaatctaggtaatggcatttactatattattttaaaaatatttttagacattagaaaacccacaaaactaaaaggaaatattatgaaataactgtggaaattatcagtatttatacatatgtgtatgttctctaattcatctagtatatatagatatatgacatatgtgttatataatatatatgttagattaactagaaaccatacatatatatgtatttattctggatattaattctttagagacttaaatgtattcttgaaataacatctcccaaattttacctgtgttgtcatattctctgtggttatgttttcacaaacaaaagtttctatccttcatgtagactaatttttcatgcctctttcttgtggttggtgagtgttgtgtcttatcctatattgggaatatcacaatatattactgtgttatcttacaaaattgttaatattctttccttataaatttggttaattctaatgggattgactttttaaatactgtatgagataaggatccaaatatgcatatctaatttttgaatttttagcaaaatttcccaccaacatttattgaaaagttcatatttgctcacataacttgatttttttacctgtaacatatatgaaatgtccatgagcaattatctggcctctcttccatcttcagttaacttatttacttttctgtactatgatgttaaaaagtaagtttcacttccagtatggtacaaatatttttctaacttcttcatttatttaataatatcttagctattcttgactaatgtgttatttaaaactttgaatcatcttattaacttccacaagcaaataaatgtttagtctcttgttgacattgtaataagcctccagatcaatgtggagagaactaaatgtttgacaatattgagatttccaatgcatgatcataatatgaatttcccacttattaatagccttttaataaatatataattaatttcataactttctctgttactgatgattttaatagtttttgatgacttttcatttttgttttatggattttctaatatatagaaatattaaaagaataatgcaacaaatcttcttacctacattcatcaagtgttacattgctgtcattttttactctctttctctcattttctgtattactccttcagtttccctatggatttatacacttatt

SEQ ID NO: 666891 - DNA, 3673 bp, Homo sapiens
caacatacaaatccatcatacaaaaaggaaaagtaatgaaagactgtgaaaattatcagtatttatgtgtgtatgtatattttctagttcatctatatagatatatatcatagatggcatatatgatatatatattatatgtcagatcaattagaaaacatacatatacatgtatgcatttttggtattaattaggaaactagttcttttgtctttcagacctgccctcatgagtctttgaccaaattcttgatttctggcacgatttgatgcccaaggctcaaagaatcttacctcatcccagctctgaaattggccgtgtctcattctagtggtcggagttattgagaaaccaggatagggttcatggarttgcttgtgctcagaaatagcatttctattttcttaggagagaggggcataaaatttatttttatgaaaaagatcatttttgacaataatattctcagttcaaatttaatgctctacattattcagcttcttttactttggtgattttaatattagtgtaacttttggattatctgatgcttttccatcttgctcgtctgcaggtggaatgtcatccttacttcaaccagagaaaactgctggatttctgcaagtcaaaagacattgttctggttgcctatagtgctctgggatcccaccgagaagaaccatggtaataagagatacaggaagtttacctaaaacaccggtttgataaaaaaaaatttaatcagatcatgctgtttcctggagttcactcacagctgacttggggtgagggaagaatttgcatttctgacgagatcccaggtgatgttgaggctgctgttcgggggcctcgcttgagaagctccggtgcagagtggacgccttagtctgtttagggagccgcctaacaaactgtatccccagcctcagggcctcagcctttctgcctttccttccagggtggacccgaactccccggtgctcttggaggacccagtcctttgtgccttggcaaaaaagcacaagcgaaccccagccctgattgccctgcgctaccagctacagcgtggggttgtggtcctggccaagagctacaatgagcagcgcatcagacagaacgtgcaggtgaggagcggggctgtgggcctcaggtctcctgcacagtgtccttcacacgtgtgcttcttgtaaggctctcaggacagccttgggccagctccatttccctgtatttcctatgcatgaactctttgtgtacgtcataagggtttcttctactctagcacaggagaggcaacagaggtggagagaaataggatgggatcaaaactacagatttgggttagcgttaagtcagtgatatccatatccctctgctggggccatgtccttttctttattttttataatgaagcattgattagatgttctttagtctccaactcatggcggatttttcttcttgtatgtttatgtagtataaattccttatatttattctcttagaattttatctttgcgaagtgcttgtttaactctgcctttttttttttggcgaggtggttgtgtgtctttatttttatgtgtaggagaccatatttataccaataccttaggatataagacaaacccacttaatatagaggcttaatgcaaaagcatttattgagctcaaggttccatggttagaagattagcctgggctcagcctaaactcagtccattccttctgttcctggctgggctctcatgtgtgttcagggcagtgaggcagctctgcttcaggatgtccctggggcatctgtgtgagcgcccccctctcccatgcagttctttatcctccagccatccagcccagggttcacctcagcacagggcatgaccccaaggcagtgagtggacatgtgcaaagccttttcaggtctaggctcagagctgccaaccattgcttctgggaaattctatcacctaatgcaagttacaggacaggtcagactcaaggggtggggaaaaagacaccacctcttgttggaaggagctggaaattcatataaccaagcaagtggatacagggacatgtgattgttagagggcatgttcctaattaatctatcatttatacgatatgtgtgaaataacatattaatagttatatgtatgaatatgaatatatataaattgatatactatttcatatattcttaagaatacatccaagtctctaaagaattaatatccagaatacatgcatatatatgttttctaattagttatatacagatatatgaaatatacatcatatatgatatatattataaaacctatgtcatatatatgacatatatcatgtatatgtatatgtgtcactatttgctaaaacattaagtaaaatcagtgtagaaatccataggatactctgaaataatgatacagagaatgagaaagaaagtaaaaaatgacaatgaaacaattgatgaatctaggtaatggcatttactatattattttaaaaatatttttagacattagaaaacccacaaaactaaaaggaaatattatgaaataactgtggaaattatcagtatttatacatatgtgtatgttctctaattcatctagtatatatagatatatgacatatgtgttatataatatatatgttagattaactagaaaccatacatatatatgtatttattctggatattaattctttagagacttaaatgtattcttgaaataacatctcccaaattttacctgtgttgtcatattctctgtggttatgttttcacaaacaaaagtttctatccttcatgtagactaatttttcatgcctctttcttgtggttggtgagtgttgtgtcttatcctatattgggaatatcacaatatattactgtgttatcttacaaaattgttaatattctttccttataaatttggttaattctaatgggattgactttttaaatactgtatgagataaggatccaaatatgcatatctaatttttgaatttttagcaaaatttcccaccaacatttattgaaaagttcatatttgctcacataacttgatttttttacctgtaacatatatgaaatgtccatgagcaattatctggcctctcttccatcttcagttaacttatttacttttctgtactatgatgttaaaaagtaagtttcacttccagtatggtacaaatatttttctaacttcttcatttatttaataatatcttagctattcttgactaatgtgttatttaaaactttgaatcatcttattaacttccacaagcaaataaatgtttagtctcttgttgacattgtaataagcctccagatcaatgtggagagaactaaatgtttgacaatattgagatttccaatgcatgatcataatatgaatttcccacttattaatagccttttaataaatatataattaatttcataactttctctgttactgatgattttaatagtttttgatgacttttcatttttgttttatggattttctaatatatagaaatattaaaagaataatgcaacaaatcttcttacctacattcatcaagtgttacattgctgtcattttttactctctttctctcattttctgtattactccttcagtttccctatggatttatacacttatt

SEQ ID NO: 666892 - DNA, 1439 bp, Homo sapiens
ggcgaggtggttgtgtgtctttatttttatgtgtaggagaccatatttataccaataccttaggatataagacaaacccacttaatatagaggcttaatgcaaaagcatttattgagctcaaggttccatggttagaaaattagcctgggctcagcctaaactcagtccattccttctgttcctggctgggctctcatgtgtgttcagggcagtgaggcagctctgcttcaggatgtccctggggcatctgtgtgagygcccccctctcccatgcagttctttatcctccagccatccagcccagggttcacctcagcacagggcatgaccccagcatagtgaatggacatgtgcaaagcctttttaggtctaggctcagagacaccaaccattgcttctgggaaattctatcacctaatgcaagttacaggacaggtcagactcaaggggtggggaaacacacaccacctcttactggaaggaactggaaattcatatagccaagcaagtggacacagggacatatgattgttagagggcatgttcctaattaatctatcatttatatgatatgtgtgaaataatatatcaatagttatatgtatgaatatgaatatatataaattgatatattatttcatatattctcaagaattcatacaagtctctaaagaattaacatccagaatacatacatatgtgtatgttttctaattagttagatacataaaatatacatcatgtatgatatatattataaaacctatgtcatatatatgacatatatcatgtatatgtatatacgtcactatttactaaaacattaagtaaaataagtgaagaaatccataggacactctgaaatagtgatacagagaacgagagaataaaaaatgacaataatgaaacaattgatgaatctaggtaatggcattcattaaattattttaaaaatatttttggacattagagaattcacaaaacaaaaatgaaaagttatgaaagactgtggaaattatcagtatttatacatatgtgtatgttctctaattcatctagtatatatagatatatatgatatatgacatatgtgttatataatatatatgttagattaactagaaaccatacatatatatgtatttattctggatattaattctttagagacttgaatgtattcttgaaataacatctcccaaattttatctgcgttgccatattctctgtggttatgttttcacaaacaaaagtttctatccttcatgtagactaatttttcatgcctctttcttgtggttggtgtgtgttgtgtcttatcctatattgggaatatcacaatattttactgtgttatcttacaaaattgttaatattctttccttataaatttggttaattctaatgggtatgacttttaaaatattatgtgaaataa

SEQ ID NO: 666893 - DNA, 659 bp, Homo sapiens
tcagctatacacagaaatctgtgaactttccaaagctactacttgaatttgctttttgctcatgagtctrtggcatggagttggtttgctttgctttgcggtgtagctctttctttaagagctgagaatggatgttctttttttgccaaaaccatcctcggaagtgcctgctccactttttttttttttttcttcaattatttatttatttatttattttagatggcatcttgctctgtcgcccaggctggaatgcagtggcgtggtctcggctcactgcaacctccacctcctgggttcaagtgattctcctgcctcagcctcccaagtagctgggattacaggcgcacgctaccacactcagctaatttttgtatttttggtagagatgaggtttcaccatgttggccaggctggtctcgaactcctgacctcgtgatccacccacctcagcctcccatagtgctgggattacaggcctgagccaccacacccagcctcgacatttattataggttcgagggatacatgtttaagtttgtcacaaaggtatatcgtgtgatgctgaggtttggagcacaaatgaatccgtctcccagatagtgagcatagtacccaataggtagtttttcagcccttgtccccattcctccctcccc

SEQ ID NO: 666894 - DNA, 660 bp, Homo sapiens
ggattttttgctctgcattcagagaataatatcagagagatttttcatcccaaaatgttgaagcagagtgtaatattacaggctaggttgatattaaggtaacaagttttgaaaatccctggaatcaaatatcatctacttgagagttttgaaatgatttagaaaataaagtgatatcattggtcatttatttttttaacaggctttgaagcacttagtatatattgggcatcattgtgtgtttttgagatgcagtttctgttatytggtaagttataatttgtagagtcaaagacattcttataataatagtttgtggcaaagcaggtaagattctagtgattactcaggaaatccagaaaaaatggtgcagcatgattaggaagctgtaggaaggattctatgagtaaagtcattttaaatgaaaagtaaaaggagaccacaaaatcagaagcagaaaaacaataagtataaagcagagactatttacagatatagaaagtagtatgaaaaatgacttggttgtgtaaaaattctcactgctaaagtacatatgaaggaatctataatggcagttatgagtgaaaaggtgaaactgggaaaagtgtgaaaaacctagaatattttataggtaacagagtcagttgttgtggtaatatg

SEQ ID NO: 666895 - DNA, 1088 bp, Homo sapiens
ttattgaaataaaatgatcatatatctttatgggtcttattttccttctaacgaattatttaatacatagcttatggcaatgtttctggaattttctctgtcctcatcaccatcttaggtgwgtttgtcctcaacattaggtcacgcatctgcccctcagctgtagacaagctggttggctgcagcatcaaacataactaactttgtctctctgcttctacacataacattacattttctttcctacttttgttatccctcagaattaatatttgtctttcctacaaaacctcaactcattattcatctcctgagaggcttccctatgtagctctcaatgactgaatcctgtttgaattcacttccctgtcagtttgctctgagatcatttgttagaatggcagcatagtgaggctggatggactgaggctctggagtcagactgcctaggttgagaccatggctctgccaatgtacaatgttggggaaatcactttgggtctcatgatttaatctctaaaatggcaataataatagcataagccaaaaagtttgtgtgagcaccaaatgcccacaatgaatttcctgatgcataagtggtcaatacaggcaggctgttaaatatctagccaagccccctcatgttataaatgaagaaacagaggcccagagaagtaaaatatcaagatgtaggttgcataagctatgaggcaggaactgtatcccaaataccttaagtctcccatctagggttttgtcttttgaattacctgggttctagttttaatatttcctttgcactgcgtgcttatacaccagtgacttaggaaatagatcaatgtcttctttactctgtatgatccccacaaggctttctgttccactctttcattcactcctatctcttattcttccaccttaacccatcatatataggtacacattaggcagtttctccctatttcctagtttaggtctattttaggaatattttgctgtttacactcttagttattctcttcatttactatatctcccatgctcacatggtcaggttttgttcagctgcatctttgccctctccatat

SEQ ID NO: 666896 - DNA, 658 bp, Homo sapiens
atcattattcccagatcttttccttactgactgctcttctatttgccccagctccatgtattttcctgggattctgacctgaaatggccactgtcactgtcattactcctggcccttcccaggacactcacaccctctgtggaatttgcctttagtatggttaggacacttctgaggaagtttggaaacgggaatttctcatctgaggaaattcagaaatttgtaaagaacagcctctctgggtggaggaaccaaagggaaaagaatcagctaaagtccaatgggagaagttagagttaggaaatggtgtatttcttgtcctaacttacctaaaagttgggcagttttcaaaataaccaaagcccttcatcctcttcttgtggaatcgacctaggccsaattattttcctaacttcagtgttatttaatcatatcttagacccattactcaaactttaacctgaggtaggtttagggtgcatcactattcatttggcagactcaatccacaggccgacaatccggactctagccgcagtgctgccgcttactagctgtgctcctttggccaaagcatttcatctttctgtggctcctgcttactttgctgagttattgtgaggataaataaaacaatgcatgtgaaagaactttgtaa

SEQ ID NO: 666897 - DNA, 576 bp, Homo sapiens
taatccaagataccattaatcataatttttggaactagaagactctgaaactctgtgataatatgttaagtgaaagaactagactaaaatgcataatctttgattctggtgtctgggtttcacttgtgatgactttaatctctttgcttgcgttatggaactaaattcctctgattcagagctaggataccttttctcttcaggagaccaaacaacgaagggattcctagccagatatgcacctgacctgaatttttccaagaggtgggtaccattccaggcactagctgctgcagagaaattgtagctggtgcctggggtccctctagtggtcagaagctgtcacttcaattcgcttctctggcccaggtttggccagagaattagagggatgcaggagtcccgcaaaaagcaggcaaagaaacctaaatacatgtatatttcagaaggttcttctttataattaacactaaaaatagaggtgacataactcamgaatttctttccaaatttttcctgaccctttttaccttgtcttggctaatttaaatttagagaaagaagggagttgagaga

SEQ ID NO: 666898 - DNA, 610 bp, Homo sapiens
aaaaattgaccttgtaggccaggcacagtggctcacacctgcaatcccagtgctttgggaggctgaggtgaggggatggcctgaggccagctgttcaagaccagcctgggcaatatagcaagagtcygtctctgcaaaacaaaaaacaaaacaaaaaaaagtagtctggccaggctgggtgtggtggctcacacctgtaatcccagctctttgaaaggccgaggcgggcggatcacctgaggtcgggagtttgagaccagcctgaccaacatggagaaaccccatctctcctaaaaatacaaaattagctaggcgtggtgacgcatgcctgtaattccagctactcaggaggctgaggcaggagaatcgcttgaacccgggaggcggaggttgtggtgagccgagatcatgccattgcactccagcttgggcgacaaattagcctggccttggctccttgtcacagtctctcttgtgcttcttcagtccctactttcctctccctcccatttccactacagatggtgccttcctaccctacgccatagcaatctggtcactggggaaatggggttatggagaggggtatactgtaattcccttcatctta

SEQ ID NO: 666899 - DNA, 610 bp, Homo sapiens
aaaaattgaccttgtaggccaggcacagtggctcacacctgcaatcccagtgctttgggaggctgaggtgaggggatggcctgaggccagctgttcaagaccagcctgggcaatatagcaagagtctgtctctgcaaaacaaaaaacaaaacaaaaaaaagtagtctggccaggctgggtgtggtggctcacacctgtaatcccagctctttgaaaggccgaggcgggcggatcacctgaggtcgggagtttgagaccagcctgaccaacatggagaaaccccatctctcctaaaaatacaaaattagctaggcgtggtgacgcatgcctgtaattccagctactcaggaggctgaggcaggagaatcgcttgaacccgggaggcggaggttgtggtgagccgagatcatgccattgcactccagcttgggcgacaaattagcctggccttggctccttgtcacagtctctcttgygcttcttcagtccctactttcctctccctcccatttccactacagatggtgccttcctaccctacgccatagcaatctggtcactggggaaatggggttatggagaggggtatactgtaattcccttcatctta

SEQ ID NO: 666900 - DNA, 653 bp, Homo sapiens
agccacttgctcccggaaacctcgagggctgagaatgaggtgaggtggttccacagtagaaaaatcagggtgcttctttcagaagccggggtacgtatggcctgctgggcaggcccacacagcatacagatgctacgagagcctgctgtgctttgtaggtcacagacccccacggtgtgcttggaaatgccagatcatgctgtgaggcttttcctctgccccagcctctggcacgagactcccacgtgtgaaaagcagactcacagtccctgcgtgtygtggagcccgggaaatgaaaacgtcaatctgggaggccccagaaggtgtaggggattgagtgagagagccaagaagctgcagcagccgccgctgctgggacttcgtgtttacaaatcacattatcggagcatctttgaacttctgttggcacgtgtgtgactaatgttcgagctggtgagggccatgttgggaaatggaaaagggaagtggggacgagcgctcgtgctaaaatggtgctctctttggcaatggcctttggaggaggtgactcactaggggcattgaggcaacaaagaaactgctgtggctggatgaaaaaaagatgcttcctctgcccccctcaccacccgtgcaaggggaagcccatgacctga

SEQ ID NO: 666901 - DNA, 669 bp, Homo sapiens
tgtccaagacaaatgtgctattgtattacatgtgaaatgtcatctttgaagtctggtaagggtgtgctgtgaggtgagccatctggaaaacacagtgtagattgaaaaataattataagccagtttattacttttttccagttaagcctaccatgacagctgctaaaaaaaacactatgtagtataaagggtaaaaagactctgaagtcgcaaaagttatacccacctccaacaatgattagctagtatacaagtcactcaaattcyctgatccttttggcttgtctgtaaaattgaaatatggacacatgccacagaggagttttatgagtattaaatgaaacaacagctgtaaagcacttcgtacagagtacacaataagtttgatttctcttctcgtcttctaaatatagactatataatattctttatacagagaatattagataaaatccaatcatatttgaaaaccaggttgagcaggttggtttttcaaagaaattcattgagcttccataatgtcctttctatttgacgggagaaaaggggctttggaagatcaagtgtgaagctttagaattctgtctggagctggttaggaccacccaggcctgagtataagcaaagcgctgtccgtggtgctagtaagcgcgaatgcccccggcaacg

SEQ ID NO: 666902 - DNA, 636 bp, Homo sapiens
ttgatacattaaccaccaggggaaattttgagggaaggagtgcttaattccatatgtcttggacttggatttcttcagctgagtccacaaaccctctttatgcaaggttgtgtgttctgtagctgtgtgcatttcttaaaaaccagagtctccaggggccgacctgggagcctaagaagtgaagcctgctggtgcagaggggccagcaagccctacctgctcggcacacctgcctgcatgtgcagtggaactgagcgagtggagcagagtgtgagcactcacaatgctcaccaaacctgggacgtggcaggcagtttcccaaggactaggaaagacattcacagtggcacaacygtttagctacctcattatgacccacctgtgtgtccacacaggtcagggctacccttcagtttacctgagaagcctagacctcaggaccgccatctcctatgctaccatgcccagcctgacctggctgctcacaagtacctgccataatgcttggcctcctggaagctctaaagcggtgcaattgtcctgcagaacatcgcagtgtcagggtatcctgcatgcaggtgaggggtgggcaagtagggctagcaatgtcctgctccatgttcctgtgagcaagag

SEQ ID NO: 666903 - DNA, 596 bp, Homo sapiens
ccttggcgattcttccatattagcgcacagagatggagatcattttttttctcacaagctactgtgaaaaactactgaataggtcataataatttgaggaatttttaaatatcttctcctggacctcagggctcaatggctctggttgacctcgtgagtctggggcatattcacctgctgagagtgagcctgggggtgctgggtggagaggagagaagagtctgagagagcagctgtggggagctgcagggaggagtgtgttagggagaagggaggaagacggggaagaaatacatgtcctgggtatcctggaagggtgggaagagtccagaggacagaccacccgcctgagtggtgccacaagtgccacttaacccatcagcttctcttgrctactgtctcccaatacagacacaagtcagtgtatcacaacatgggtgacctttgctgtcagcccttggtaggtatcaggtgctatgtgagcctctttacacagataacttaatctgtctacatgtctgtctttgttcaagctctattgcctcaaataaaatattttgatcgtgtttaaaaagctatcagaaatgtagtacaga

SEQ ID NO: 666904 - DNA, 678 bp, Homo sapiens
ggtgtgatcttgactcactgcaacctccacctcccgggttcaagcaattcccctgccgcagcctcccaagtagctgggattacaggcgcccgccaccacgcccagctaattttttgtatttttagtagagatggggttttaccatgttggccaggatggtctcgaactcctgacctcaggtgatccacccgcctcagcctcccaaagtggtgggattacaggcgtgagccaccgtgtctgccctggtttctgtcttgggtgtggtccccaaactcttaagcacagcctcacacctccacccagtcattcacatagaccctggggtgcgcagaggcagagggtcacccgcagaggagctgtccgcatgtccatggcggcctcagtgtggcttctctgctcagcccagggtgtggtgattccgtcactgctttaaatgtggggttcaggaggaattctgatataacagggacgtctccacatgtcttccctgccttrgcgtcttgaggtgtacgtggaaaaacctctggcagggctcactctgacagagtcccggcctctgacattgaatcacccacagtctctctagtttatgtggtagggttcgggatttatgaaaatcaagtactaaaaaatgacttccttgtctctttgaattcaactctgattaatgtttgatcc

SEQ ID NO: 666905 - DNA, 636 bp, Homo sapiens
gcgatcctcccacctcagcccagctacttggagggctgaagcagggggatgacttgagccaggaagttgaggctgctgtgagccattatcacgccactgcactcctgcctggacaacagagcaagaccctgtctccaaaaaaaaaaattacttcccctttgattatagaactttgtcacrtatcaagttgattaaatgaagataattcaagcattaagtaattatttaatgctttttgtgttcttctagtttgagttctatgattctatgatcttaagatatttaccttaatatatagagagacatatatattaattattatataacacaaatcaattatttcaattaataatttgaagtttttttccatttacttggtacttagaatgcagggggaaatatgatataggatggttagtcatacataaggaaaattctttttgtacacttgacagtcttggctacatacccaattctctgcttttttatttcctatggacacttctttgatgatatatatgtatggcttgggggaggcggttggcttttgtttcctgtgagacagatatctaagttccatagatatctgttccttccctttagaagcaaagaggatactggttcttttatttcaag

SEQ ID NO: 666906 - DNA, 636 bp, Homo sapiens
gcgatcctcccacctcagcccagctacttggagggctgaagcagggggatgacttgagccaggaagttgaggctgctgtgagccattatcacgccactgcactcctgcctggacaacagagcaagaccctgtctccaaaaaaaaaaattacttcccctttgattatagaactttgtcacatatcaagttgattaaatgaagataattcaagcattaagtaattatttaatgctttttgtgttcttctagtttgagttctatgattctatgatcttaagatatttaccttaatatatagagagacatatatattaattattatataacacaaatcaattatttcaattaataatttgamgtttttttccatttacttggtacttagaatgcagggggaaatatgatataggatggttagtcatacataaggaaaattctttttgtacacttgacagtcttggctacatacccaattctctgcttttttatttcctatggacacttctttgatgatatatatgtatggcttgggggaggcggttggcttttgtttcctgtgagacagatatctaagttccatagatatctgttccttccctttagaagcaaagaggatactggttcttttatttcaag

SEQ ID NO: 666907 - DNA, 654 bp, Homo sapiens
tgtggttatgaggcccaagtcatacaacaggcagctgtaacctaggcagctgtaacctttgttcctctaattatggattagctttttctttacctacattgttttataaaatgttgtaaaagactaaaggatgccagagaagaccctttctctcttaactgttgatcttcattatagattagcttccttctttcttctcttacacaatgacctcacaactatcacattgtctaaaataaaaygttaaatattctcttatactcctttaaattgggaaagaaaacaagctataactaataaagttgcagtaactcataaactacccttgtatgaaaaatgtaattctgttaaatttctttgtttgctgcctatataagtaagaccataacctttcagcttgggatcactgaccccattcctttggggtctgtatttccggatattcatcctcaactttgtgcttgcataaactcttaaactggattctgatgctttaaattatttcaggttgacatactagtgacccagatgggacctgaagttagcttctgccactgactcctgctgttttgctaacagataggtggtaccagtacagactgttgctggagtttatgggagccctaagtgagacccctcttgcattttgaatct

SEQ ID NO: 666908 - DNA, 610 bp, Homo sapiens
actgaggtcttgtaggagtgccagagattatcacttgtgatgagaaatggtcacacaggggatccccaaagaagaacatacagggaaatttgcttaaattcagtaaatatatataaggtactgatgtcccagtgccttaagctcccagaatttctgggtttcactgagacacataagaggaaagaactgatccaagggtaacacacgggggagctattcccataaataatacatttgatccaaaacatctttccctttcacttaagaggagaatacaaattataggcgatcagctatctaaaatagagtcctccttgtggagaggtccatctttagagactccagctggatacctgtacartacttacggttttacttcttgtcattatttagaaaaattgtctcttgaagaactcacgaagaaccaaaattgcaatggccaaagtagggtactttgaaatgcctaaactaaattatttgtgtgctcaattagaaaaatccggttctggccgggcaccgtggctcacgcctgtaatcccagcactttgggaggccgaggcgggcggatcacctgaggtcaggagttcgggaccagcataaccaacatgca

SEQ ID NO: 666909 - DNA, 604 bp, Homo sapiens
tggacaaggaccatgctggcgatttgtgcagcacacatgggcatgctcacagacacgctcatctcaaatgaggctgtgacacgaggcttttcaggtaaatgtgtgaaaagaccactgatcacagcaaatgcaaacagagtcagatcatgtgtaactcagcagatagtcaaagattaaaaaaacagtctgggtgccgtagctcacacctgtaatcccagcactttgaggggccagggtgatcacttgagcccaggagttcaagactagcctgggccacatagcgagtccttgccctaaaaaaaataatcattagctgggcgtggtggcgagcgcctgkaatcccagctactcaggaggctgaggcaggagaattgcttgaatccaggagatcaaggctgcagcgagccatgatcgcaccactgcactccagcctgggcgacagagcaagaccctgtctcaaagataaaaaaacagataacccagaaattatggcataacaggaaaaagtgattggtgtgacaacagaaaaacttaaaatttctgcatgaaatactatcaccaagtccaaagacaaaccacgatcagtgggtccaatggaaggcag

SEQ ID NO: 666910 - DNA, 1663 bp, Homo sapiens
gggcttcctgccgaccccagatctgggtgagtgtcctggtcaccgccccctcgaccaccaccccatgcagcaggaaacacgtagctggggggttgtggggcttcaggactgggattggagaggctgacagcagggctcagggctctcggcggaagtggggcctcagcccactcagaggtccaggaagtgggggtctcggaagcttcctctcggccagacgagccggagggtcagaggcctggccgcagctgccccttcctcttcggccagccagctgctgggtggcccgtgctgcagcaggcctcaggttggggagctggttgtccttcagcccccgcaggtggccagcatcaggaccggaaggctctgaatcagcctggtctggaggtatgggcagctgtgggggccggtggacaggtgtagcagagctcagggcgcacagcaggggccatctcagcctgggcctgtgttcccttcagtcagacctctctccagcctcggcttgcccatctctccagtgaggtgacaatcccgggcctgaccagacaggctgaccaggacagagaaccctggggccttctaaggccactgccatgtgggccgggtcctgtcagacacccccagccctcagcccctgacccatttctgttcatgccctggccctcctgcatgcccacccaaccccactggagctcagagaccctgcccctccaaggccttttctccacagccaggaccaggcccccagatctggtgccccatcagtcctgccggtacacctctccacagaagaagcccagacccaacccagcctgcgtgagccctgctggggggcctgggccatggaggtccccagccccatgcttcaggggaccgcagcccagtcaacccaggctgcagaggtgtgaggagggggctcttgcccttggcaactggcaggagctgaggaggtgcccgggagaccccatcctcacagatgctgtcatcctggcacatccctacctgcagtggggacctggacaactcatggaaccagtgggagctggaggctccaggcattgatgtgctgggcctcagtccctatgggtccccactgtgggagtgtctcagagtgggatgaggagtctgtgtccgtgcctgggccgaggcctggacaggccccacccccggcccacacatgatgggcggtcgtccatcagcacagccagcccctctggccatccatcaccagccagcggccacaggaggaatggcctgtttgttttgccagctccgtgtcactccctggggcgggggctggaggaaatggccattttctgcctgggcrggcgggtggacagcaggggtgggcagggcaccggggacagggatgtggcaggaccctggctcatcccggccctgcatagatgcccacagccttgccctgttctgtgcctcagtctcccctctggcatcagggtgagtgacactgggattttctgactgttcccatggcagctctctccagctgggtcactcacccctgccccttgccactgggtagggtgggctcaggtgtcagctgccaccaggtggggggtccccctatctgaaatccaagatgcttgatgctggctgttcttataaaccatggggggaggctctggagctaggtccaggccat

SEQ ID NO: 666911 - DNA, 999 bp, Homo sapiens
ggctggtgagtaccgtctcccactccttcccttcccggttgcacttcaggcggctcagcttcacgccccccaccactgtcacttcattctccacctcaatgtacatggaaggatcggagctgacctggatgaagtaaacacacgggtctgctcagacaagggccgcagcccaggtgacatgctccaaggctctgtagcctggggccccaaggcagcagcaggatacagaggcagactggctggccaagagaggagagggagggcaggtagggcaaaggggctgagcgggaggcccagagggccagacatgtggcccccaaggcagggagaatgctgggagctggtttctaccctgtcatttgtgtagttgaacagccagagaagagaagcagtgccagggttaaagaccccaaagtctcccaaccctgccacttcatctcacaagggagtaacgtgcccaaaagcacactgcaaaggaccgagctgggagtgagacttgggtttctagcctcctacttgaagaatcttcaaagatggcagtgtttggcaagattagagaccatgtcagtgcttggagggaatgtttagaaaacccccaaaggggctctccagttcctgtggtggtgagacttggtctgctcaactgagactaaactggcaggggtgtttatggcacagcatgtatgaaaagcacctaattcagtgtctggcaccaaatgggctcagccacacgcgtgtgtggggagctgaccaacagattttccctgtggtaaaataggcagaaccaccaaacagtctgtgcttgtgtggccactcaagtgggtgagctgggccgagggctgactgyccccttcacagacccagaaatgacagtcccaagcagtgcttggagggcaagatgcctaggggaagggctggaggagtttgggagagttctgtgctgagaagcagggcacccaggagggaacctaagtcagaacacctctgagtgcaagagca

SEQ ID NO: 666912 - DNA, 1443 bp, Homo sapiens
tgataccgtggccatgcaactctgaaacagacagcaacccccaaacccccggccctgccaccaagcacatctcaggagacctccactggtataatttcccttgtccctaagaatctccttccccaatccctttcctttgcagttagaaaaaggcaagcaggactgagtttagtggttttaaaattaggggtgtggccaggcacagtgtctcatgcctgtaattctagcactttgggaggcctaagcaggcggatcacttgagcttagcagttcaagaccaccatgggcaacatggcaaaatcctgtctctacaaaaaaatacaaaagttagctggtcatagtggtgtgcctgtggtcccagctactcaggaggctaagggggaggatggcttgagtctgggaggctgggaggtggaggttgcagtgagccgagataacaccaccacactccagcctaggtgacagagccagaccctctcaaaataatagtaataaataataataaagttaggggtgatcaggccctgaacagggaaatgttctgtccaaggtcacagagcaaagagaacccaggtgtccacaactcagccaagagtcttgacccctgtgtcgtcagctgcacacacgctgcacactccaccagctcctaggcttctctccacatctgacttatcgaggcctgggctgtgggtagctttttggacagaaagaagcagaaagcagcaggagctgctctccgaggaccgcacctcaaagagcaagatcccccaggtgggatcgctctgaggcttcaggcaggggaggctggtttgaaagccgatctccaagagggcgtggctccaaaatgctggcaaataaaagcctggagagccagcaccaagctggagaccagcaggaggcacaggaaaactgcaagccgctctgttcctgggcctcggaagtggtgagctcgctgaggcaggaggagctctggggagggtctgggaatgtggacgagggccctgcaggccaagatggggcagatggagggaggaagatgtttgcgctccagatggcgaagaaaattccagggaagggagaatcactgcacagagggctgacacacaggtcctttccagagacagctgctcacactcacacccatacacacacacacacacacacaaaggcagatacagggaaaaggcagcaccattcaggcacacctcacctgtcagaccagccagccctggctcactcacctggaatgcagtatttaaagaactcgccatcccacctgcacacccacgtagagacatctccccactgtgtttcagatgcctatggcgtcccctcaaaccctggtcctctatctgctggtcctggcagtcactgaagcctggggccaggaggcagtcatcccaggctgccacttgcaccgtgagtacctctggraccggaggg

SEQ ID NO: 666913 - DNA, 1417 bp, Homo sapiens
ttgatggaaggtggaacccatctttccctaaaattctacgttggagagaaacaattccaattcctccccctagcaaaggcaaagagctgcaaactctttacccctttctttcagggccattattttccccagataatctcagaaatatttatatataaaattaatacaaattgctggttggcatggtagatacagtacttgttttcatttatgctaatgagttgccatttttgtttaattacccctcacctttttaaaactagagaatacattcatcactcatgactgtaggagagatttttatcttaatatggggggtaaaaatataagggtttctagtctgttttatgctctacttctttaaaaattttaattcttccataagaaaacatgttaccccttagggaaaaatccttgattcttcccatcactctgctttactttatattaataacttgtttcattaatttttactattaacttttgacttctagcaatgttttatcactagtggattgtttcagaccaccatagggtaatgtggtaaggattaacaccttaataaaagataataaatttttcgcattttttgaaagttcaggccaagacaattttcatgtaatcatagttagagaaagctttttcacctggcttttataaagatgccaagtgaaactctatattaaaatatgttatcaagtatctccttaacttaaactgatacacatagctgttacttaagaactccaacagaattataggactcagaagtcagagatgccccaatctagaagtcattgtaacagagctcctgttaaaactcctaacttccagtagttattgcagattaacaatgttcagagcattgccaagcttctacattgccataaaacactgtatttatacctaaaagagtcaatttaccagatcctcttaaaattataataggcacccagatcctgaaaatcayccacactacttgtcaggattaattgtttctttggctttcatacgaaagtgtaaaaacaatgaaacaaagaaagacaagcaagcagaggaaagtcagacttaagaggtacagtctctaccagttgctccatttttatctttctggcagaggctttaaataggtatttgattatatgatacaaagagtatagggttctttctagaatttctcatgtagacccaaatatccagccagggttgaacactatcttttcaacattaacatgataggtagaattttaaccataaccctcatgttgcaccacttagcaactgactgattcaaataatgagcttccttttagaaaatcttagaaacacttggatataagaatatgaaagaagaagaaaacatgccaaatgtcaaccatctatattttaaagtaaattcatgcttataaatactatt

SEQ ID NO: 666914 - DNA, 2038 bp, Homo sapiens
tcaacacagtaagtacagattgcatcttaaagctctcatctagtgctggagtttccaaacacaatggctttaacaaggaaatgactttggaaaggaaaataaaagaatgtgatttctttggggctgagcatgggagagaagcacacttcctgtcatgacttgggaggcatgcagagaccagctggcaaggctctgatcacagaagctaatccctcaggagaaaatgggtaatcccagggccaaaattcacccaaagaaccagaacaaatatgggcttgggtcagacagaacttcattaatcagggctcaatccggcagccatgactggggagatgccatgtaaagaggaaagcagagattgaagtgatgcttctacttgccaaggaatgccaaatatcaccagcaaaccacaagaagcaaggacagaggctggaagagattcctcctcacagcctcaagaggatccaagcctgctgacaccttgatctcaggtttctggctcccaaactgtggaggccaattctgttattcaagccacccagtttatgggactttgttacagcagccctagcaaactaatacagttggcaataggagttaggtagcaggaaaataataaataactgaaaacagggaccacacagttcatgtgaagctcctggcccttttcaagcatttgtacgggaatctctgggaaagagattcaaactatcacttgaggctaaattcctttatacttgggaattcacatttattcatttgtatgacactaaaagaacatgagaaatataaagacaacaagctagagggggtcagggccccatacaatagccaggattctgctcaatggcttcatgcatagtcaaaccttaccagctgtgtgagaataaaggcagaagaggagacccttcaacccagtcaggtaaagttgacaaggaataggtagtatgtcatggtccaaaaccaggaggccagaatacagggatgggtccatctccaaggatctgaagtgtaagtcaaatgtctggtgggacatcactgtgagtttgcagtgacagagaggggctcagggttcaccccaggacaaccatacacagggtccatcatgacaaaaccattccaaaccctggcaacttgtgggttgatgctgggtggaagctgttggccctggctaagacccaggaactgaacaaaattaaaattgctgccaagggcatgggtgatgctgggtaggggtgatcatggaaagcagggactaatagtgtcaggtaaasccacacactgattgcatgtaagagaatacatgacagtaatcatcaatagaggaagaaataagaaccgtcaaacactagatattttacacatattaaacatttctcatatattacattacaaagttggcataatattctacattcaactttttgcattctttatttccttaggaaactgtgtttctactcaagttgtctgaattaatttaactcatatgccactgtgtacttcctttgagtttggggtccatagctgtcctgctccactgtctcatgccaggtcttttcattacatgaactgcaggatgctctctctcaggcacagtgttttgggggcaatgcctctaaatgatgcctccattgaggcaaagatcacatgaatttgtaattgtttgcatctccacctcctctgaaacacagtgacctgctggaaagcaaagaccatgatttgtctctgtatcctcaaagcccagcacaagtatcacctgacacatgcactataaatgctcactgaattgattcattcttaagaagattcaaaatgaaaaaggaagcaagcagatttggtgagccatttctgactggtatttcatgaattcatgtatttaactatgggccagcactatgtcaggtaatacattagtcatgtgaagaaacaataagattgatcactgctaaggtatagagcaagtttcaggaatgcaagaatgggctgcccttaattgagcacttagcctctctgctgccttttgctcattgagcaa

SEQ ID NO: 666915 - DNA, 620 bp, Homo sapiens
taaactgtattaaaataatagaagtgtcatgggggttaaaaatgcaacactaacaatcatagttaatgtgttacaaatccctggtattgttcaataaaagggcaacctattaactctagatgttgattaataagtatgctgtattagtccgttctcatgctgctataatgaactgcccaagactgggtaatttayaaaggaaagaggtttaattgactcacagttccacatgacagaggaggcctcaagaaacttagaatcatgccagaaggagaagcaaacacgtccttcttcatatgaaggagaagtgcttccttcataggaaggagaagtgctgagcagaaggcaggaaagctccctataaaccgtcagatttcaggagaacttactatcataagaatagaagcatgaaagtaactggcaccatggttcaattacctcccaccaggtccctcccacaacacatggggattatggaaactataattcaagatgacatttgggtggggacacggtcataccaaatcattctgcctctggcccctcccaaacatcatgtcttcacatttcaaagcacaatcatgccttccctacagtccctgaaagtcttaactcattcc

SEQ ID NO: 666916 - DNA, 620 bp, Homo sapiens
taaactgtattaaaataatagaagtgtcatgggggttaaaaatgcaacactaacaatcatagttaatgtgttacaaatccctggtattgttcaataaaagggcaacctattaactctagatgttgattaataagtatgctgtattagtccgttctcatgctgctataatgaactgcccaagactgggtaatttacaaaggaaagaggtttaattgactcacagttccacatgacagaggaggcctcaagaaacttagaatcatgccagaaggagaagcaaacacgtccttcttcatatgaaggagaagtgcttccttcataggaaggagaagtgctgagcagaaggcaggaaagctccctataaaccgtcagatttcaggagaacttactatcataagaatagaagcatgaaagtaactggcaccatggttcaattacctcccaccaggtccctcccacaacacatggggattatggaaactataattcaagatgacatttgggtggggacacggtcataccawatcattctgcctctggcccctcccaaacatcatgtcttcacatttcaaagcacaatcatgccttccctacagtccctgaaagtcttaactcattcc

SEQ ID NO: 666917 - DNA, 433 bp, Homo sapiens
gtcgctgtggcaggttccagagctggctaggattcccaatcactgccgctcttgggccccaggtgaggtacttatctgggagtctcagtttccctgcccgagatcggcaggctacaagtgccccccaggtgtttgggcaggaccctgggacccttctctgggctggcaattgggtgtgatcgcgggaagaggcttcttgggcctgctccgtgtctactgtcacctaggctgtaaagatgacagagggccggagtggctctccaggctggggcctggcatttcacagcgctagcgccgtgacttatggaccacaagaagctgtgatttatacaacgtgaggcagagctcctgggctcgtgasttcccttctgtgatgaagtgaagtgccttgcagaagcagcagccgcttagctgatgcgaggggactccgagg

SEQ ID NO: 666918 - DNA, 584 bp, Homo sapiens
tcctttggagaactgtaaaggggtggcctgccttcagagtgtgggcttgtrtgtgttttcaccaatacccagcaaatttgcccttcacagaagtcaggccaatatttctaccactgcctttaccttgttcataccgaatgggtgagattaagtcatgacatatactcaatagctttattttctgatttatactttgacatctgtattagttataggtgtggcagggccactttgaagctgaaaagggatcttgttggtttgatggatctgaattttattagagccatgtttttatattttaaatcaccaaatagattgacattttgaatatcctactcagcttctgaagtaatgcaattatagggatttagactctttccattattgagtcccaacccctagtgtgcatcagaatcatatagggagctttcagacagtcgtgaagctcaggcctctccctagcaattaaaccagaatccctgggaagggccctgggcatcagtgtgtcttctgcaggtgattctgatgctcagaggagatagacaaccagtgaacaggtctttggttgaaacaggtgttaagca

SEQ ID NO: 666919 - DNA, 651 bp, Homo sapiens
ctagctgctttaaaactgtataytgcttcgtggttcatagagggaagctgaaatcattaggaccctagcaatattctttgcttagttaaagtagcctgtgtgacatagaatgagatcattttagtgaagcttttgtttttctttttccaaacagatttaaagacttgtattgcaagtactactcagactattgaacagatgtactgcgatcctctccttcgtcaggtagaatgaaaattgatgggaaagtagtcaaggcatgtgctaatggtagatacaaaaatcaaatttgatagttttcttttaaacccaatgggaatccccctaagataaaagaataaacttaagatataaattgatgttgttctgtttctttattttaggctaaagaaagcaatataccttttaccaaaaacaggacctaacacatacttgtttgaattctgccacatggaattttttcatattgtagaaaggtttgctgtcagatactaataaaaattacttacaaaatggtactttaagtagtgcagtgggaaaaactgaactagagaacagttatcctttctttcccaaagttccatgattcttcaagatctttaatttaacaacatgctttcaagctttatttctgtaataataaattccaaa

SEQ ID NO: 666920 - DNA, 651 bp, Homo sapiens
ctagctgctttaaaactgtatactgcttcgtggttcatagagggaagctgaaatcattaggaccctagcaatattctttgcttagttaaagtagcctgtgtgacatagaatgagatcattttagtgaagcttttgtttttctttttccaaacagatttaaagacttgtattgcaagtactactcagactattgaacagatgtactgcgatcctctccttcgtcaggtagaatgaaaattgatgggaaagtagtcaaggcatgtgctaatggtagatacaaaaatcaaatttgatagttttcttttaaacccaatgggaatccccctaagataaaagaataaacttaagatataaattgatgttgttctgtttctttattttaggctaaagaaagcaatataccttttaccaaaaacaggacctaacacatacttgtttgaattctgccacatggaattttttcatattgtagaaaggtttgctgtcagatactaataaaaattacttacaaaatggtactttaagtagtgcagtgggaaaaactgaactagagaacagttatcctttctttcccaaagttccatgattcttcaagatctttaatttaacaacatgckttcaagctttatttctgtaataataaattccaaa

SEQ ID NO: 666921 - DNA, 646 bp, Homo sapiens
tcgcacagtctggattcaacggtagatgacataggttctaccttttgatgaatcaaaaaattctgggatcatggtttgaaactaccaaaaagtagcggctgtattgtttgttattattacaaagtaggccgtgtgcagtggctcacacctgtaatcctagcactttgggaggccagcctgggcaacataatgagaccmggtctctaaaaaaaaaaaaaaaaaaaaaaaggagagagattagccaagtgtggtggtgtgtgcctgtagtcccagctacttgggaggctgaggtgggaggatcacttaagcccaggagatcgaggtggcagtgaactatgatcacactaggctgggagacagagtgagaccttatctcaaaaaaaagttaatgataattactacaaagcaaggccaatagtacaaaaacagtgatctttcacagtctatgatatagcaggacagtgctagatgttccccatctgctatgccatttattcctccccaaaatttgggaagctcagggaggcatataaactgcctaaacagggccgtgaagctaggaagtgctaaagccaggatttaaacccagaagtcaaatgctaaagactctgctagactgactacctgattctagaggctggggtgt

SEQ ID NO: 666922 - DNA, 1057 bp, Homo sapiens
agctggtctagggcttggctcatgggactgtcccttcgcagaggcagcgtggacattccgctggtatccactggtgtggctgtgcctgtttggtcaccgtgtctgttctgattggtcggtgctcctgcatgtcaagagttcaatgttatgaaaatcatccctgcctagagatgaattcccccttcccctgaggtctagactggtatagctgcttttggagcctcacctgctgagagctcacagctgtccttctctagagaatcaccctcagatgggagccacrttgcctgggatgggatgccatgcccagtaatggcccagtgactaactgatacagcaacgtgaatggctggtccctgccccacggtggggacgatcctgtggcgtgctctctgctgctcgtgggataggtcaaggcgggactttaagggaccacattctcactctgctctgtccccttctgcatcctgtagtcctcacctcccttctcctgaaagcccctttcaaaacaaaaacaaaaaccacatccacccaagtccctgtctccagctctgcctccaggaaagccggcggaaggccgccagtctcagctgtgacagatacagatatttctgcatttccaggactgaggtcaatccctggggacccagtgaggcggtatctgaagggccatggagctggcttgatggggtctacaggtaggcagggacctggtggggatgtgactcaaggatttttatcaaatatctttatcccctgacagatgcaaaaaaaaaaaaatgagatcagactccagggtttcctccatgccacactgtggccccattgtttgttgtgctatcagcagaagttgattttgcaaggaatgtacacgtgtatgtgatgtttgaatgcacctatctgtgtgtgcgtgcatttgtgtgtgtgtgtgtgcattcgcttgtgtgtgtgtgtgtgtgtgtgtgtgtgtgtgtgctgaggatgtgagccccacttccggcccagtgcccctgcccaggctggctctgccctcctgctgctctgggcccctcaggca

SEQ ID NO: 666923 - DNA, 681 bp, Homo sapiens
ttttaaaaaggaggaagggctctcccttctctgatttctctcttctgcctcaggactcagactagcccttttagcagaggggagcctatagagaggaggtcatatactagttgattttggactaaaggcatcccaaagatgtactattttttgctccctgcactattttttttttaatggaaccaaygtttaaaaataggatttctgccttctcttaaaacatcagatgatctggtaacgctgagctcctgttctcacatgggaacaactggctggagctgagtggcagccacctctttagaaagatgttaatttgaagtctgctatagtccccatcattccttatatttcccccaacactgagacccaagtcacttgaaagtcaatatgatgattcaaacaccaggattcttcactcatttgtgggtttgtgacctgtgatatttgtggattcgtgacctttggtttagaggtcaagtataggggttgtaaataaaacttgggtttgaatcagataagaactgtaccaatctcaaagacggtgaattaaagattaaagaaaatattgcatgcttggcataatgtgtggaacacaacagctattgtaaacacccagtaggaatgtaagctgcaagagggcaggtagaaaccgtgctaatttaatccgctggggatatgaca

SEQ ID NO: 666924 - DNA, 604 bp, Homo sapiens
cacccctgattcaaaaatacatggaccacatatcaaggccactcaactcatagagcgttggtgatgggcctgacttaaagtctgaaaattgcatatgtaaaaccatgttctctataaaaatacacacatttgccaaagtcaggaaaggaaaaaaattccattaaatctaggttcaataagtgtattagaaaatatttaattaactatctctgttaaaacacatcttgtgactgctgttccctctctcattggtgtttatttgctggtaaagtgctcactcattttttttttttttttttttcgagacagagtctcgctctttcgcccaggcctgagtacagtgcagtggcactatctcggctcgctgcaagctccgcctcccgggttcacgccattctcctgcggcagcctccytcctgcggtagctgggactacaggcgcccgccactgcgcctggctaattttttgtatttttaacagagacggggtttcaccattgttggccaggatggtctggatctcctgacctcgtgatccgccctcctcggcctcccaaagtgctgggattacaggcgtgagccaccgcgcccggcctgtgctcacg

SEQ ID NO: 666925 - DNA, 604 bp, Homo sapiens
cacccctgattcaaaaatacatggaccacatatcaaggccactcaactcatagagcgttggtgatgggcctgacttaaagtctgaaaattgcatatgtaaaaccatgttctctataaaaatacacacatttgccaaagtcaggaaaggaaaaaaattccattaaatctaggttcaataagtgtattagaaaatatttaattaactatctctgttaaaacacatcttgtgactgctgttccctctctcattggtgtttatttgctggtaaagtgctcactcattttttttttttttttttttcgagacagagtctcgctctttcgcccaggcctgagtacagtgcagtggcactatctcggctcgctgcaagctccgcctcccgggttcacgccattctcctgcggcagcctccctcctgmggtagctgggactacaggcgcccgccactgcgcctggctaattttttgtatttttaacagagacggggtttcaccattgttggccaggatggtctggatctcctgacctcgtgatccgccctcctcggcctcccaaagtgctgggattacaggcgtgagccaccgcgcccggcctgtgctcacg

SEQ ID NO: 666926 - DNA, 1923 bp, Homo sapiens
cccagctaccatatgagagagttcaacttatgttcaatgtgaatgccatggcaatattaaaaggtacgaattcgctacatacgtgcttgaggtaaataggagaaacctagaatttatgtaaacagtgagaagattggatgcgttttatgtcacatattttaatactagcagcttattatatatgtcaatccatcaggcattcagaagtacatgcttatgaaaattttttgcaccatcagacaaaagacaagggtagaagacatttgtaaccctataaacactagtaaattaaaaacagaaggacctttatgtcctaacrtatctgtgttgtgaaaggctgccctgtgaaatacgggattccttaaacatattttgaaaatcataggtgtcaatattttttagaaatccatttaaattttctcttgttattttacaatgcctatttatttatatagtggctctgctgattttgatgtatatcctaaacttaatattttctttaaaggatgttttatacaactttatgtaaaatgtttcagtatcttcacattatttccctgtccttttgttttgctcttatatggtgttcttgagtcttttctctggcttttcaaacctggtaagactaagacactaaaggaactttgcccgtggttttgtaatgccttccaaagcacatcttaagctctggtgcatacaggggtctcctttgagctctgtgcttttgagatcccatatacctaaattccagtactccaaatcagtactgctcagttttagtgactaagtttaaaaaggtattttaatagcaagttagtttagtgcactcttgcttctttcttgactgcttgtatacatgtatattcctttaaatgaatcttggaatttatttaaaaattttaaattatactaatgaaactgtacattgttgtgaattcataagtgaatttggaaagaatttgtctttatgatactaaatcttttttacccaagaatcatatgtgtctttatatttattccagtctatatttatatcactgagtaaatatatagaaatgtagatacatacagctgtagttatagatacaaatatagatataacatgttaaatctatatctatcccatataacatatatacatgttatatgtgtgtgtgtatatatacatattattatgttattaaagagctcccttaaaatttttcttttatttcccatataattttaggtcgagcttgaattttccttgtataaacaagcaaatgttatactagttttaatactgatgtttagacattgtatcttattttagcattgaatattttcacaattagtataaatattatctaataataatgtacctgttaaaaatatttaaaattttacctttgaattattttattgttgaattaaaattcctttaatatgatagtaaatttctatgttatgctctctctatgcatatgctaattaatctatccacttctctatctctttgtagtgacatatgaaaatcaggcctctcttctaatggacatacacatgtttgcatatagaatatcagactctttatagcatttaaaatctttaaagacatgaatattgccttttaacaaatatactttagcatgtactgagaatcccctatttatttttaatttgggctaatcaatatgattattaatattattggattaccaaatttggaaacacactttcatccccaaggtgcatattagttttattttttttttttgccagtttcttgtcttactgtttcaaatattgttggatattatttttattttatttggcattttagtatcaacatttgtaattgaggaactctacatattttttcttcaatatctggtgggttgtataattattgttatattggatttgtagtagacattgacaaaa

SEQ ID NO: 666927 - DNA, 1923 bp, Homo sapiens
cccagctaccatatgagagagttcaacttatgttcaatgtgaatgccatggcaatattaaaaggtacgaattcgctacatacgtgcttgaggtaaataggagaaacctagaatttatgtaaacagtgagaagattggatgcgttttatgtcacatattttaatactagcagcttattatatatgtcaatccatcaggcattcagaagtacatgcttatgaaaattttttgcaccatcagacaaaagacaagggtagaagacatttgtaaccctataaacactagtaaattaaaaacagaaggacctttatgtcctaacgtatctgtgttgtgaaaggctgccctgtgaaatacgggattccttaaacatattttraaaatcataggtgtcaatattttttagaaatccatttaaattttctcttgttattttacaatgcctatttatttatatagtggctctgctgattttgatgtatatcctaaacttaatattttctttaaaggatgttttatacaactttatgtaaaatgtttcagtatcttcacattatttccctgtccttttgttttgctcttatatggtgttcttgagtcttttctctggcttttcaaacctggtaagactaagacactaaaggaactttgcccgtggttttgtaatgccttccaaagcacatcttaagctctggtgcatacaggggtctcctttgagctctgtgcttttgagatcccatatacctaaattccagtactccaaatcagtactgctcagttttagtgactaagtttaaaaaggtattttaatagcaagttagtttagtgcactcttgcttctttcttgactgcttgtatacatgtatattcctttaaatgaatcttggaatttatttaaaaattttaaattatactaatgaaactgtacattgttgtgaattcataagtgaatttggaaagaatttgtctttatgatactaaatcttttttacccaagaatcatatgtgtctttatatttattccagtctatatttatatcactgagtaaatatatagaaatgtagatacatacagctgtagttatagatacaaatatagatataacatgttaaatctatatctatcccatataacatatatacatgttatatgtgtgtgtgtatatatacatattattatgttattaaagagctcccttaaaatttttcttttatttcccatataattttaggtcgagcttgaattttccttgtataaacaagcaaatgttatactagttttaatactgatgtttagacattgtatcttattttagcattgaatattttcacaattagtataaatattatctaataataatgtacctgttaaaaatatttaaaattttacctttgaattattttattgttgaattaaaattcctttaatatgatagtaaatttctatgttatgctctctctatgcatatgctaattaatctatccacttctctatctctttgtagtgacatatgaaaatcaggcctctcttctaatggacatacacatgtttgcatatagaatatcagactctttatagcatttaaaatctttaaagacatgaatattgccttttaacaaatatactttagcatgtactgagaatcccctatttatttttaatttgggctaatcaatatgattattaatattattggattaccaaatttggaaacacactttcatccccaaggtgcatattagttttattttttttttttgccagtttcttgtcttactgtttcaaatattgttggatattatttttattttatttggcattttagtatcaacatttgtaattgaggaactctacatattttttcttcaatatctggtgggttgtataattattgttatattggatttgtagtagacattgacaaaa

SEQ ID NO: 666928 - DNA, 1923 bp, Homo sapiens
cccagctaccatatgagagagttcaacttatgttcaatgtgaatgccatggcaatattaaaaggtacgaattcgctacatacgtgcttgaggtaaataggagaaacctagaatttatgtaaacagtgagaagattggatgcgttttatgtcacatattttaatactagcagcttattatatatgtcaatccatcaggcattcagaagtacatgcttatgaaaattttttgcaccatcagacaaaagacaagggtagaagacatttgtaaccctataaacactagtaaattaaaaacagaaggacctttatgtcctaacgtatctgtgttgtgaaaggctgccctgtgaaatacgggattccttaaacatattttgaaaatcataggtgtcaatattttttagaaatccatttaaattttctcttgttattttacaatgcctatttatttatatagtggctctgctgattttgatgtatatcctaaacttwatattttctttaaaggatgttttatacaactttatgtaaaatgtttcagtatcttcacattatttccctgtccttttgttttgctcttatatggtgttcttgagtcttttctctggcttttcaaacctggtaagactaagacactaaaggaactttgcccgtggttttgtaatgccttccaaagcacatcttaagctctggtgcatacaggggtctcctttgagctctgtgcttttgagatcccatatacctaaattccagtactccaaatcagtactgctcagttttagtgactaagtttaaaaaggtattttaatagcaagttagtttagtgcactcttgcttctttcttgactgcttgtatacatgtatattcctttaaatgaatcttggaatttatttaaaaattttaaattatactaatgaaactgtacattgttgtgaattcataagtgaatttggaaagaatttgtctttatgatactaaatcttttttacccaagaatcatatgtgtctttatatttattccagtctatatttatatcactgagtaaatatatagaaatgtagatacatacagctgtagttatagatacaaatatagatataacatgttaaatctatatctatcccatataacatatatacatgttatatgtgtgtgtgtatatatacatattattatgttattaaagagctcccttaaaatttttcttttatttcccatataattttaggtcgagcttgaattttccttgtataaacaagcaaatgttatactagttttaatactgatgtttagacattgtatcttattttagcattgaatattttcacaattagtataaatattatctaataataatgtacctgttaaaaatatttaaaattttacctttgaattattttattgttgaattaaaattcctttaatatgatagtaaatttctatgttatgctctctctatgcatatgctaattaatctatccacttctctatctctttgtagtgacatatgaaaatcaggcctctcttctaatggacatacacatgtttgcatatagaatatcagactctttatagcatttaaaatctttaaagacatgaatattgccttttaacaaatatactttagcatgtactgagaatcccctatttatttttaatttgggctaatcaatatgattattaatattattggattaccaaatttggaaacacactttcatccccaaggtgcatattagttttattttttttttttgccagtttcttgtcttactgtttcaaatattgttggatattatttttattttatttggcattttagtatcaacatttgtaattgaggaactctacatattttttcttcaatatctggtgggttgtataattattgttatattggatttgtagtagacattgacaaaa

SEQ ID NO: 666929 - DNA, 632 bp, Homo sapiens
attctcaaacatagaaccttcttttatgtttttcaaagattttttccattactgtagaaaattcagagggtgtttatggatagtgcagtactctgctcaaatatagggaatgaaagttacattaaaatattttttttgctgaaaagtattaygatatttaatgtaagcaaattactcagatgatagtgttttgttttaactttttaaatgtcttatttcaatagcttttggaacacaagtggtttaggtaacgtggataatttgtatagtggtgaagtctgagattttattgcacctgtcacctgagtagtgtacattgtaccaaacatgtagcttttttaatccctcacccgcctgccaacttcccccttacgaatctccagagcccattataccactcagtggagagtcttcaacattcacggtggaatcttcaggatgtgaccctctatccattgctttccaccgtttgtactctctgctttgtaaatagaggtccgttctccctgtctgccttgttcacgtacctttgccgttttccttgctaggatgacatcgtttgccctgaagttctcattaaccataccatagatgtcctcttcttacctcaatacatccaaggctacctcaag

SEQ ID NO: 666930 - DNA, 632 bp, Homo sapiens
attctcaaacatagaaccttcttttatgtttttcaaagattttttccattactgtagaaaattcagagggtgtttatggatagtgcagtactctgctcaaatatagggaatgaaagttacattaaaatattttttttgctgaaaagtattacgatatttaatgtaagcaaattactcagatgatagtgttttgttttaactttttaaatgtcttatttcaatagcttttggaacacaagtggtttaggtaacgtggataatttgtatagtggtgaagtctgagattttattgcacctgtcacctgagtagtgtacattgtaccaaacatgtagcttttttaatccctcacccgcctgccaacttcccccttacgaatctccagagcccattataccactcagtggagagtcttcaacattcacggtggaatcttcaggatgtgrccctctatccattgctttccaccgtttgtactctctgctttgtaaatagaggtccgttctccctgtctgccttgttcacgtacctttgccgttttccttgctaggatgacatcgtttgccctgaagttctcattaaccataccatagatgtcctcttcttacctcaatacatccaaggctacctcaag

SEQ ID NO: 666931 - DNA, 658 bp, Homo sapiens
atctcaagtgatctgcctgccttggcctcccagaatgctggggttacaggtgtgagccacagcacccagccctgattttttttaatgtaaatactgtatgaacccagacaaatgttctgccaggccagtgctgcatggctcaccacgtggtggccctgagaatgggcctcatcgacctgcctctactgggagtgtaattaaccagggccccagctgctgcrctggggaatccatatgcttccttccatgaggtgctcctggctaatgactgagcatggcagggacactaaagcagacccctccccgggagacacaggattcccctgtccccggctttggcttagggacttccctatggtgttcgcaccctaacttttttctcctctctcttttactcagagtcagacttgcattactgtctcaggttctcccagctttatgtggcaccttctttgctttctctcaagggcatttcccttaataaaaatcacatatgtgtaatcctgtatgggagtttgtttctcagaactgggctgacacaccatcttgcaaactctgctttcggcattcagctcacacttacttacaccctccaaactccaactatttagggctaattccattccagctcccacccgttgaatcccttcccccctcc

SEQ ID NO: 666932 - DNA, 636 bp, Homo sapiens
ttgcagacaacatgatcatgttcatatgtatatgtacatatatacacatatatatatacctaaagattccaccaaaaatctcttagggtacaggtagttaggcatgagtgggagaggagagggctctccccccacacccactagaaatgctgggaatgctgggtgatggttcagcaattgtcacattgcttctctaaaaatgataattcagcagcgccagggagaggccatttcctgatgatccacacctgttaatatcaaaatgttaactgaatgcagaccccagggtaagcaactttctgggcatgcatgttaagagtaaaaatggtgaagtatgatcttccaggggcacactacaacagaagagggaagaaagcctcagatgggcatgtgtataaccccctaaacatactgtgcaagctcaatcccaaagggtaaggaaagcactgggtacacrgaaagcccactttaagggaagaatcatgggaaagaggtgaacttataaaagtcctaggatcacagttaaacagagcacttgaccttctccctttaacctttaagggccctcttccaagcgcactttcctttatttcctgttctaaggcctttttgaataaacctccatttacacactgg

SEQ ID NO: 666933 - DNA, 636 bp, Homo sapiens
ttgcagacaacatgatcatgttcatatgtatatgtacatatatacacatatatatatacctaaagattccaccaaaaatctcttagggtacaggtagttaggcatgagtgggagaggagagggctctccccccacacccactagaaatgctgggaatgctgggtgatggttcagcaattgtcacattgcttctctaaaaatgataattcagcagcgccagggagaggccatttcctgatgatccacacctgttaatatcaaaatgttaactgaatgcagaccccagggtaagcaactttctgggcatgcatgttaagagtaaaaatggtgaagtatgatcttccaggggcacactacaacagaagagggaagaaagcctcagatgggcatgtgtataaccccctaaacatactgtgcaagctcaatcccaaagggtaaggaaagcactgggtacacagaaagcccactttaagggaagaatcatgggaaagaggtgaacttataaaagtcctaggatcacagttaaacagagcacttgaccttctccctttaacctttaagggccctcttccaagcgcactttcctttatttcctgttctaaggcctttttgaataaacctccatttacrcactgg

SEQ ID NO: 666934 - DNA, 1949 bp, Homo sapiens
ttctagaggtattttttctgtatttgatcagtatttcatgtttcttccttttatgttgaaaatctgatatttatgaagtgtctggctgttgatctgtaaaaccaaacattttcaagcatcgtagcaataaagttcttgaacagccattaatactttagtatctctatagaggtttyaaaatattccttaattcaattccaattgtctgtttaagaaaaataagatgtaattaaatacagatgctttctatactctatctaaaatacttagagatgcccttcattaattacaaaataggtggaacactcagcttttataaatataatccatttggtgtatttccaattccattatgagaaaatttagacatatatttgcactaaaagaataacactgaaatgttgtcaaataatttttacttcaatgtttattgtatttcagtgactcaaaagtatttacaaacaaagcgaacaataaaattttaccataataaaacatatgtgatgattggggaaactgtttaagatagcttgtgtaaagctacatcatactaaatgaaatctggaagagtgtcattgatcatagagtgtaaacaccagcccagctactgtagagtgacgctttgttattagagccagattctaaacctctcttgtctgcttggatttcattgaactcaatcttagagttaaaagaagttgttaaatgagtgtatcctatcgtttgatctatgtatgatactattttagtttcttttaaatctacatcagcaatatgtattagcaagcaagatttacgagagtaaaactggaatcagagttagaaaagtcctaatgatcttacattgattgagatagccctaggatgtcccttaagcagtgagcacaatttgaaacctctcttgaccttttaggaccttccccagacagtgataacccgggaacagttaactacagaaacctcatttgcctgcagaaatctgacctttgtcacgcaaagtggacctttacttccttccccttaggagaatgatagttgctcctagaatttgggcattttagaaacatggaattatattaaaagttggctctaatcatgcccattccaattcacttttctttaaaatgtaagaatggagtgacttctcctcctttcacaacaacatcaaaggctttacataacttattttgaagtggaaaataacaattgtttttaatttttatatgcattgcccacacttaaagtagtacttccttctagaattatacattgtaattaattttgttctataacacaaggataggttgataggaaaatttggaatattttactaaacttatactttggctgaaaatagtatcattgctgtagtagatgactttattgtttttatatagtacactgctgaactgataataaactatgaagtagggaaaggaagttttggaaatagtacatatttcctggcactttggaaatggtacatgtttctcacagagattctacatatgtggtgattttgaactgaccttcaaaaccatttgattggattctgttccagtgagtgtgtgcatatgtttcataaaatattgtgataaaatttctagaagttttaccctccattatattattgaggttttacccaatgaactttgcctttctttgaatattacagtctttccatttaatacttctgaacaaagtgagttagctggctagattaacctcttaaagtgcacaagccatgtaaagcttggcttgggctgataagagacttttccagccccactgaaatatttattttaatggtcagcaacactagaataagactcaaagatggaaagagtccaaacataagtgaaggttttggaaggccagtatcattttccacactgagtaaactggaacgaaggcagagattagatatgtagctttataaattgcctttt

SEQ ID NO: 666935 - DNA, 1949 bp, Homo sapiens
ttctagaggtattttttctgtatttgatcagtatttcatgtttcttccttttatgttgaaaatctgatatttatgaagtgtctggctgttgatctgtaaaaccaaacattttcaagcatcgtagcaataaagttcttgaacagccattaatactttagtatctctatagaggttttaaaatattccttaattcaattccaattgtctgtttaagaaaaataagatgtaattaaatacagatgctttctatactctatctaaaatacttagagatgcccttcattaattacaaaataggtggaacactcagcttttataaatataatccatttggtgtattyccaattccattatgagaaaatttagacatatatttgcactaaaagaataacactgaaatgttgtcaaataatttttacttcaatgtttattgtatttcagtgactcaaaagtatttacaaacaaagcgaacaataaaattttaccataataaaacatatgtgatgattggggaaactgtttaagatagcttgtgtaaagctacatcatactaaatgaaatctggaagagtgtcattgatcatagagtgtaaacaccagcccagctactgtagagtgacgctttgttattagagccagattctaaacctctcttgtctgcttggatttcattgaactcaatcttagagttaaaagaagttgttaaatgagtgtatcctatcgtttgatctatgtatgatactattttagtttcttttaaatctacatcagcaatatgtattagcaagcaagatttacgagagtaaaactggaatcagagttagaaaagtcctaatgatcttacattgattgagatagccctaggatgtcccttaagcagtgagcacaatttgaaacctctcttgaccttttaggaccttccccagacagtgataacccgggaacagttaactacagaaacctcatttgcctgcagaaatctgacctttgtcacgcaaagtggacctttacttccttccccttaggagaatgatagttgctcctagaatttgggcattttagaaacatggaattatattaaaagttggctctaatcatgcccattccaattcacttttctttaaaatgtaagaatggagtgacttctcctcctttcacaacaacatcaaaggctttacataacttattttgaagtggaaaataacaattgtttttaatttttatatgcattgcccacacttaaagtagtacttccttctagaattatacattgtaattaattttgttctataacacaaggataggttgataggaaaatttggaatattttactaaacttatactttggctgaaaatagtatcattgctgtagtagatgactttattgtttttatatagtacactgctgaactgataataaactatgaagtagggaaaggaagttttggaaatagtacatatttcctggcactttggaaatggtacatgtttctcacagagattctacatatgtggtgattttgaactgaccttcaaaaccatttgattggattctgttccagtgagtgtgtgcatatgtttcataaaatattgtgataaaatttctagaagttttaccctccattatattattgaggttttacccaatgaactttgcctttctttgaatattacagtctttccatttaatacttctgaacaaagtgagttagctggctagattaacctcttaaagtgcacaagccatgtaaagcttggcttgggctgataagagacttttccagccccactgaaatatttattttaatggtcagcaacactagaataagactcaaagatggaaagagtccaaacataagtgaaggttttggaaggccagtatcattttccacactgagtaaactggaacgaaggcagagattagatatgtagctttataaattgcctttt

SEQ ID NO: 666936 - DNA, 1495 bp, Homo sapiens
aatgaaaaacaaaaaaaggaattaggaatgaaactaaaaataaatattcatggataatattttacagttatcactaattaaaaaatatttttccttctctatttcctgtctcttctaatgataagtaaataccaacccaaaaacttcttatgacacatgaataggcattttatttttacttatttttgtatgttctaagccactcctctcaataactcacacatggaccacttttaatgtggtcagggaaaattttttcccaaaggaccaagtactaaagccagaccagttaatgtttcagaggtaatacgatttggtaccattggatgaataaaccaatgtggtttggattaaagtttcatttttctttgcttccattttggtgtggatgaggccatcacaattaatttttcaagtttagcattgctttgccaacgggatttgtagtactccatttctacattgaatactgggaaattttaaggaaaagaggccaggacaargaatcacttctagattaaacattgcattgacttactgtgtgactcagacaaaccacttacctctttgtccttcagtttctccattgctgaaaattgcttcgcctccctggtgcacagcaattttgaaagatgaaacatgagttttgaaaagaaacatgccacataattttgaggtattagagtcctgcttttgtaatagcaaaatgaccaccattcattaaatcctttgaataggataattcattattgctattgatgatataattattattgccttattactgtgttatcatacatttcaagttcttaatagcattttttgtagtttattatacaaaatatctagagtgtcattttcaatatttagagatttgggtatctgttatgaattaatataaaatgtttaaatcaaatttctgcatatttttacctcctttcattgggttattttaagaatttaatttaaaaaattaaacattggacacttacagctctgtgaaattattagaagccatgtagagaaagggtaaattgttccttttgcttgcaactccaaaattacagtccatcttatctccagcttcttaatccccatgatatagtctttgaataaattttacctctccagtatgcctttaacttaaacagtgtataaaatattttagaaatgtactttccacttattaagcctgaaataagcattttttgtttttttattgacatataaaaggtacatatatttgtggtttacaacataatgatttgacatatgtatacatcgtagagtgacttaagctaattaacatatgcattgtctcacatacttattttttatggtgagaacactgaaaatctattctctgagaaattttcacatgtacaatatattgttattaactgtagtcatcatcatgtacaacagatctcttgaatttattctttccacctaaaattgtgtatgtagcatcacttctgattttaattataaaacc

SEQ ID NO: 666937 - DNA, 653 bp, Homo sapiens
ttattattaacttaatggagagccttaagtctattgacctcatgtgagaaagccaagcttctcaaataatttgattgcatctctgtgaatttatttcactagggtgaggaaattgagaaccagagacttggggtgattttcttaaggctttagtgacaagatcaaggctaggtccaaatttccagtagatttatgtaacttagtgcatttttatacttatgccaaaattrcttattttctttttatcagaaacactattcagaaaatgagatcagatgttttttcaggtagagtacaattaaaaaaagaaaaaacaattacagagaaagctcttatccagaaatggggctagttttcagcatctatttggaatttaaatgcattctagtgaactccaagcagattagcctgtatttgaaatataaggtcaagtgggaggttataatcagaaagaattagaactccagaaattaaagttaccttgagagtaaatggctgttctatatggaattattttttgttaaaacaattttacacaaaatgcctttataggtaactattattttaaccaaatgtaataatatacgaatgacatgaaggaatgtaggctatattgcgaattatttttgaattgtgactgttacagctattat

SEQ ID NO: 666938 - DNA, 653 bp, Homo sapiens
ttattattaacttaatggagagccttaagtctattgacctcatgtgagaaagccaagcttctcaaataatttgattgcatctctgtgaatttatttcactagggtgaggaaattgagaaccagagacttggggtgattttcttaaggctttagtgacaagatcaaggctaggtccaaatttccagtagatttatgtaacttagtgcatttttatacttatgccaaaattactyattttctttttatcagaaacactattcagaaaatgagatcagatgttttttcaggtagagtacaattaaaaaaagaaaaaacaattacagagaaagctcttatccagaaatggggctagttttcagcatctatttggaatttaaatgcattctagtgaactccaagcagattagcctgtatttgaaatataaggtcaagtgggaggttataatcagaaagaattagaactccagaaattaaagttaccttgagagtaaatggctgttctatatggaattattttttgttaaaacaattttacacaaaatgcctttataggtaactattattttaaccaaatgtaataatatacgaatgacatgaaggaatgtaggctatattgcgaattatttttgaattgtgactgttacagctattat

SEQ ID NO: 666939 - DNA, 1325 bp, Homo sapiens
tgaatggggaggaactgcagacaaggctgccatgcaagactgcagtttgtgccttacaaaaagatgccacctgggggttggggggcagagtgggggctgatatccaatctgtactccattcgccatgctgtatactcaaaacactgtgtccaccccaaagacgcaccttttctcatttatctgccaatgaggagtgcctttttctaactctcacaaaggctaatgatggcaataaagatcccaagagayctgagggatctcaggcagaaaatagagccgaggaacagggtctattcttgtggttaagcaatgatcaaaaaggctaacattcaggttagagagccccagaagttcattcatgtactcaaataattattaagtatttatgcttaataattatgcttaattttcaggcactatgctgaaaaacatgggcacaatccccactctcatgtagctcccagacctctagaggaaacagatatcaaacaagtaaactaatatataatgtcagatagtgataaatgctataatagacataagaattgcaagatagagagtgactggggaagacgaagggcaagttttgggtagatatttgagctgagaactggatgataagaaagagatggccatgaaatcttgaagattagccctttaggaggaataagttggtgtcagagtttagggacaataaggacacccagagatttaccatcccaagtggggcatggttgagagcgaagaggcaatgttgataattacgccaggacaacaggtataaactgggcctgaactgggaaaatcagagtgaatgagcaccttaccttagggggcataggtattaggtttatttggccagagaatctggagctcagcatttagactgagccacttgatcctgggttgtgaaagtgatttaattcacccattcataggaagaaggaaattgctatgagcaattctgtagttctgttagagatgcagctgatctcagccaacaggagtattggagcagtggtggattccactgccaggaataaagggaatatgaatggactgcctactctgtgtgaggcaagtgttttcttgcttaatcttcacaacaaaaaccccttatcatgggtacaaatttatgtcccaatttactgatgataaaattggctcaaagaagttaaataatttccccaaggtcatgtagctagggaataacagaggtgggattcaaacttggacctattgggtctgagcaaattgtgcttgcttctataccatattgtccctagacagaggcaggggaaagaaagcaggggctgaaacaggta

SEQ ID NO: 666940 - DNA, 1325 bp, Homo sapiens
tgaatggggaggaactgcagacaaggctgccatgcaagactgcagtttgtgccttacaaaaagatgccacctgggggttggggggcagagtgggggctgatatccaatctgtactccattcgccatgctgtatactcaaaacactgtgtccaccccaaagacgcaccttttctcatttatctgccaatgaggagtgcctttttctaactctcacaaaggctaatgatggcaataaagatcccaagagacctgagggatctcargcagaaaatagagccgaggaacagggtctattcttgtggttaagcaatgatcaaaaaggctaacattcaggttagagagccccagaagttcattcatgtactcaaataattattaagtatttatgcttaataattatgcttaattttcaggcactatgctgaaaaacatgggcacaatccccactctcatgtagctcccagacctctagaggaaacagatatcaaacaagtaaactaatatataatgtcagatagtgataaatgctataatagacataagaattgcaagatagagagtgactggggaagacgaagggcaagttttgggtagatatttgagctgagaactggatgataagaaagagatggccatgaaatcttgaagattagccctttaggaggaataagttggtgtcagagtttagggacaataaggacacccagagatttaccatcccaagtggggcatggttgagagcgaagaggcaatgttgataattacgccaggacaacaggtataaactgggcctgaactgggaaaatcagagtgaatgagcaccttaccttagggggcataggtattaggtttatttggccagagaatctggagctcagcatttagactgagccacttgatcctgggttgtgaaagtgatttaattcacccattcataggaagaaggaaattgctatgagcaattctgtagttctgttagagatgcagctgatctcagccaacaggagtattggagcagtggtggattccactgccaggaataaagggaatatgaatggactgcctactctgtgtgaggcaagtgttttcttgcttaatcttcacaacaaaaaccccttatcatgggtacaaatttatgtcccaatttactgatgataaaattggctcaaagaagttaaataatttccccaaggtcatgtagctagggaataacagaggtgggattcaaacttggacctattgggtctgagcaaattgtgcttgcttctataccatattgtccctagacagaggcaggggaaagaaagcaggggctgaaacaggta

SEQ ID NO: 666941 - DNA, 1325 bp, Homo sapiens
tgaatggggaggaactgcagacaaggctgccatgcaagactgcagtttgtgccttacaaaaagatgccacctgggggttggggggcagagtgggggctgatatccaatctgtactccattcgccatgctgtatactcaaaacactgtgtccaccccaaagacgcaccttttctcatttatctgccaatgaggagtgcctttttctaactctcacaaaggctaatgatggcaataaagatcccaagagacctgagggatctcaggcagaaaatagagccgaggaacagggtctattcttgtggttaagcaatgatcaaaaaggctaacattcaggttagagagccccagaagttcattcatgtactcaaataattattaagtatttatgcttaataattatgcttaattttcaggcactatgctgaaaaacatgggcacaatccccactctcatgtagctcccagacctctagaggaaacagatatcaaacaagtaaactaatatataatgtcagatagtgataartgctataatagacataagaattgcaagatagagagtgactggggaagacgaagggcaagttttgggtagatatttgagctgagaactggatgataagaaagagatggccatgaaatcttgaagattagccctttaggaggaataagttggtgtcagagtttagggacaataaggacacccagagatttaccatcccaagtggggcatggttgagagcgaagaggcaatgttgataattacgccaggacaacaggtataaactgggcctgaactgggaaaatcagagtgaatgagcaccttaccttagggggcataggtattaggtttatttggccagagaatctggagctcagcatttagactgagccacttgatcctgggttgtgaaagtgatttaattcacccattcataggaagaaggaaattgctatgagcaattctgtagttctgttagagatgcagctgatctcagccaacaggagtattggagcagtggtggattccactgccaggaataaagggaatatgaatggactgcctactctgtgtgaggcaagtgttttcttgcttaatcttcacaacaaaaaccccttatcatgggtacaaatttatgtcccaatttactgatgataaaattggctcaaagaagttaaataatttccccaaggtcatgtagctagggaataacagaggtgggattcaaacttggacctattgggtctgagcaaattgtgcttgcttctataccatattgtccctagacagaggcaggggaaagaaagcaggggctgaaacaggta

SEQ ID NO: 666942 - DNA, 1325 bp, Homo sapiens
tgaatggggaggaactgcagacaaggctgccatgcaagactgcagtttgtgccttacaaaaagatgccacctgggggttggggggcagagtgggggctgatatccaatctgtactccattcgccatgctgtatactcaaaacactgtgtccaccccaaagacgcaccttttctcatttatctgccaatgaggagtgcctttttctaactctcacaaaggctaatgatggcaataaagatcccaagagacctgagggatctcaggcagaaaatagagccgaggaacagggtctattcttgtggttaagcaatgatcaaaaaggctaacattcaggttagagagccccagaagttcattcatgtactcaaataattattaagtatttatgcttaataattatgcttaattttcaggcactatgctgaaaaacatgggcacaatccccactctcatgtagctcccagacctctagaggaaacagatatcaaacaagtaaactaatatataatgtcagatagtgataaatgctataatagacataagaattgcaagatagagagtgactggggaagacgaagggcaagttttgggtagatatttgagctgagaactggatgataagaaagagatggccatgaaatcttgaagattagccctttaggaggaataagttggtgtcagagtttagggacaataaggacacccagagatttaccatcccaagtggggcatggttgagagcgaagaggcaatgttgataattacgccaggacaacaggtataaactgggcctgaactgggaaaatcagagtgaatgagcaccttaccttagggggcataggtattaggtttatttggccagagaatctggagctcagcatttagactgagccacttgatcctgggttgtgaaagtgatttaattcacccattcataggaagaaggaaattgctatgagcaattctgtagttctgttagagakgcagctgatctcagccaacaggagtattggagcagtggtggattccactgccaggaataaagggaatatgaatggactgcctactctgtgtgaggcaagtgttttcttgcttaatcttcacaacaaaaaccccttatcatgggtacaaatttatgtcccaatttactgatgataaaattggctcaaagaagttaaataatttccccaaggtcatgtagctagggaataacagaggtgggattcaaacttggacctattgggtctgagcaaattgtgcttgcttctataccatattgtccctagacagaggcaggggaaagaaagcaggggctgaaacaggta

SEQ ID NO: 666943 - DNA, 1209 bp, Homo sapiens
ggctctcctgagatttcagtttgaatgacagcaacctggggagcagataccacatggaagtcattttctgatgagaatatttagggatgcattggagatgggagaggctgttagcatctgcactgagcagtgacagcattaggtttttcactggagcagtctcaccaggtagagactttgttcctggctgtttcgaagtttgactcagcacccttgaaggctccatgaaggagctatctgatatcctatttaaaagatcccttttctgctcaaagaacctcaggtgaattagttcagttgtctgcagccaagcacattcactaactcagactttactatagctgcagtgcccactatattctcaatactttaaataatactttaaatacatttatctcatggtatcctcccaatcatcctggctcctcaaccagtaagtggaagagctgagaataaatccccagatctgtgaaaactcattcttttttttttgatggagtcttgctctgtagcccaggctggagtgcagtggcgcgagtaactgggactacaggcgcccaccaccacgtccagctaattttttgtatttttagtagagacggggtttcacagtgtcagcctggatggtcttgatctcctgacctcatgatctgccagcctcggcctcccaaagtgctgggattacaggcgtgagccaccacgccaggccccaaaacccattctttactcatgagaaagtttctattcttctgcaaccctttattttctatctgtagcacgtgcagtttgagctagaaagatctccgagttgcttttcattttaagtaagtgtatagctctatgtcccaggagattttgtcccatcactgtaaagaattcaagaaatccctcttggatatctgacctggtgcccagctttttaccatcctaaggagacaccagcrgaacgagattggggagagccccgcaggtgacccagaagcttgaccacaaagcccatcagtatttcccagtactggacagactccacagttactctcaataaccctgtgtgcacattccgcctcacaaacactttccagatgagcttccagggctggctttgacagagaagctgaaacagaggattccaatgtaaaaagtgcagaattagcattgggaaaacaggctattctcccaactctgctacttactggatgaccctaggca

SEQ ID NO: 666944 - DNA, 1209 bp, Homo sapiens
ggctctcctgagatttcagtttgaatgacagcaacctggggagcagataccacatggaagtcattttctgatgagaatatttagggatgcattggagatgggagaggctgttagcatctgcactgagcagtgacagcattaggtttttcactggagcagtctcaccaggtagagactttgttcctggctgtttcgaagtttgactcagcacccttgaaggctccatgaaggagctatctgatatcctatttaaaagatcccttttctgctcaaagaacctcaggtgaattagttcagttgtctgcagccaagcacattcactaactcagactttactatagctgcagtgcccactatattctcaatactttaaataatactttaaatacatttatctcatggtatcctcccaatcatcctggctcctcaaccagtaagtggaagagctgagaataaatccccagatctgtgaaaactcattcttttttttttgatggagtcttgctctgtagcccaggctggagtgcagtggcgcgagtaactgggactacaggcgcccaccaccacgtccagctaattttttgtatttttagtagagacggggtttcacagtgtcagcctggatggtcttgatctcctgacctcatgatctgccagcctcggcctcccaaagtgctgggattacaggcgtgagccaccacgccaggccccaaaacccattctttactcatgagaaagtttctattcttctgcaaccctttattttctatctgtagcacgtgcagtttgagctagaaagatctccgagttgcttttcattttaagtaagtgtatagctctatgtcccaggagattttgtcccatcactgtaaagaattcaagaaatccctcttggatatctgacctggtgcccagctttttaccatcctaaggagacaccagcggaacgagattggggagagccccgcaggtgacccagaagcttgaccacaaagcccatcagtatttcccagtactggacagactccacagttactctcaataaccctgtgtgcacattccgcctcacaaacactttccagawgagcttccagggctggctttgacagagaagctgaaacagaggattccaatgtaaaaagtgcagaattagcattgggaaaacaggctattctcccaactctgctacttactggatgaccctaggca

SEQ ID NO: 666945 - DNA, 600 bp, Homo sapiens
aaccccaaagagctcacagacaagcctataaacaattgcagtatatgcaagatttatttattcatttcatatgtattaagttatatttatgtcaaacttatgtgaatttcttgctcacacatctgttggttcactggggtttcgctgatccaggctgggttgggttcatgtatgctgcactgtctcccctttttgggggatgggttggactcctggagcatttccatcctacagtaatgacaggaatgcatgaagtccagcccacctagcgcatcccaagcctctgcttgcatcatgtctactaatatcccagtagccaaagtaacagccaagagacaggaaagtagatgctacccaccatgaggccatgacaaatggatgcatgatactattacacaggagaggccgggtgtgggtgctcatgcctggaatctcagcactgttggaggccaagatgggtggaytgcttgacaccaggagttcaagaccagcctgggcaacatgacaaaaccccaactctactcaaaatacaaaaataagccatgtgtgttggtggatgcctgtaacaccagctactcaggaggctaaggaaggacagtc

SEQ ID NO: 666946 - DNA, 658 bp, Homo sapiens
attgatatttttatttctttagatgcatgggaattcattgcattgtacctcacttgcctttacatcttaattgttaaataatttttttaaagggaggcattatttttcccctgaaatatcctagtttcttggaaaatttatgtagtttcaatttctttttttctttctttctttcttttttttttttttttttgtcagagtctcagtctgtcacccaggctggagtgcagtggcgcaatctcagctcactgcaacctctgcctcctgggttcaagcgattctcctgcctcagcctcctgagtagctgggattacaggcgcmcaccaccacacgcagataatttttgctttttttttttttttttttttttttttagtggagatggggtttcaccatgttggtcaggctggtcttgaattcttgaccttgtgatctgcccacctcggcctcccaaagtgctgggattacaggtgtgagcaccgagcctggactctagtttcaatttcttagtaataccctagttccccaaaagtctttgagggttgaggtcctagcagaaaacacatatcacacttagaaggggttattgaagagagtttaataaaggggctactgaaaaaggtgtgggtagctatttgggaggctgagggcaagagga

SEQ ID NO: 666947 - DNA, 646 bp, Homo sapiens
gctggcttttgagcctttgagtgcaggggagggtttttgctggtgggttggacatttattaagctttgattgtccccaggagaccctggagggtgccatggcttgaatgtaccccctttaaaattcaaatgatgtcagtgtggtgayattaagaagcaaggcctttaaaatgtgattaggcaatgacgacccatccttgtgaatgggattaaagccttataaaagagactttactcagcattcagttctcttgccctccaccttctgccatgtgaaaatgcaatgttccctccctctgcaccaacaaggcaccatcttggaaggagagagcagctcttgccagacaccaaacctgctagtgacttgatcttggacttcccagtcagcagaactgtggaaaataatttctattcattgtaaattaccaagtctcaggtattttgttaatattaatagcatactatgggctgggcacagtggcttacgcctgtaattccagcacttcggcaggctgaagtgggcggatcacctgaggtcaggagttctagactagcctggccaacatggtaaaaccccatctctacttaaaaaatataaaaattagccaggtgtggtgtcagacaccagctactcagggcactgaggc

SEQ ID NO: 666948 - DNA, 646 bp, Homo sapiens
gctggcttttgagcctttgagtgcaggggagggtttttgctggtgggttggacatttattaagctttgattgtccccaggagaccctggagggtgccatggcttgaatgtaccccctttaaaattcaaatgatgtcagtgtggtgacattaagaagcaaggcctttaaaatgtgattaggcaatgacgacccatccttgtgaatgggattaaagccttataaaagagactttactcagcattcagttctcttgccctccaccttctgccatgtgaaaatgcaatgttccctccctctgcaccaacaaggcaccatcttggaaggagagagcagctcttgccagacaccaaacctgctagtgacttgatcttggacttcccagtcagcagaactgtggaaaataatttctattcattgtaaattaccaagtctcaggtattttgttaatattaatagcatactatgggctgggcacagtggcttacgcctgtaattccagcacttcggcaggctgaagtgggcrgatcacctgaggtcaggagttctagactagcctggccaacatggtaaaaccccatctctacttaaaaaatataaaaattagccaggtgtggtgtcagacaccagctactcagggcactgaggc
